United States Patent Application Publication US 2011/0277190 A1 - sequence listing, part 5

SEQ ID NO: 17783 - protein, 405 aa, GIBBERELLA ZEAE PH-1
MAGSALRAAFTAAVAVQSVSAATKTPAGVIALPLTRDDGLTAYFAKLQVGTPLQTQHLKIDTGSPRYSFLDPRNGVCQREGDPCVEYGTFNNETSSTCQYAGTNFADALGYVGRGDYLSDTVVFGGVATKNMYFGYTSDYSFPDKLSGDIYTILGLSLECGYDFAGPECTYRSSSYALPELKNASTINYMASSIYLGPDDKEAANAQMLLGGAYDKAKIDGDLITVPMVDPFNVQLTGGQTNSVNVTSLEVFLSKDNNKTTETYGEKGVGLPVLMDTGVAAWYLPDKIMAPIYRAFEVTEEPPLGQRYFVVDCKYADPKRSDGYISVGFGNYGKIKVPLHGVVSKFPDKTCGVFTASRGDTVSIFGDPFLRNVYSIFDQENWTLSMGHVKHTDEEDIVPLPKGGF

SEQ ID NO: 17784 - protein, 395 aa, Halobacterium sp. NRC-1
MQAVVLAAGKGERLWPLTENRPKPMVPVANQPILEHIVDALVSAGVTRVMLVVGSNRERVQRHFEDGSRWGIEISYVVQDRQLGTGHALAQAESVVGESFVALNGDRVIDASLVEDVWECHRESGDSAMGVTQVETPSAYGVVDLDGGTVTDIDEQPVPELVASEYINAGVYAFGPSVFAAIRRTDSYGELALTDALDEQLADHELRAVRYDGRWLDVSEPWDLVAANSALITDRRFDPPVERRKPRGSVPGDDQQAPVGGGTVCGEGVIVHPQAVVRNGVALGDNVTVGANAVIEQSILLPDSTVNPGAVVNDSIVGANATIGPNTTVEGGQTDVVLGDTVHQGVRFGALVGDNAEVGAGVTVAPGSIVGNSAVVDSATVVTGRVDDQAHVTRG

SEQ ID NO: 17785 - protein, 210 aa, Glycine max
MGVASVRRMASQSLSLPPTHIPYNRIIGKLDSKFLLWPSCAHIKPRRISTSIRAMGSSASSHSQSQYADSVESEAGADTIDYKSLTDEEWKKRLTNEQFYITRQKGTERAFTGEYWNTKTPGIYHCICCDTPLFESSTKFNSGTGWPSYYQTIGKNVKSKLDLSIIFMPRQEVLCAVCDAHLGHVFDDGPPPTGKRFCINSAALKLKPKQ

SEQ ID NO: 17786 - protein, 283 aa, Picrophilus torridus DSM 9790
MEFYLGKTGERISSIGIGTWQMKSNDQSIMAIRAGLDAGSNFVDTAEAYRNEAMVGRAIESREVFIATKVFPNHFKYDSLIRACENSLKRLNVKTIDLYQLHWPNRHVDIKETMKAMEHLVDTGMIRYIGVSNFNVNELKSAMSAMSKYEIVSNQVEYNPLVRYIEPEISEFCRKNSISIIAYSPLMHGHDIDPISKDESPFNIIANKRNATVRQVILAWILSKNFFAIPKSNVPEHVIENVKSMNINLSSEETSMIDHYVSRFNKKSLKERYGNIISFVSRF

SEQ ID NO: 17787 - protein, 76 aa, Medicago truncatula
MQIFVKTLTGKTITLEVESSDTIDNVKAKIQDKEGIPPDQQRLIFAGKQLEDGRTLADYNIQKESTLHLVLRLRGG

SEQ ID NO: 17788 - protein, 533 aa, Bacteroides fragilis NCTC 9343
MGETKYIFVTGGVASSLGKGIISSSIGKLLQARGYKVTIQKFDPYINIDPGTLNPYEHGECYVTVDGHEADLDLGHYERFLGIQTTKANNITTGRIYKSVIDKERRGDYLGKTIQVIPHITDEIKRNVKLLGNKYKFDFVITEIGGTVGDIESLPYLESIRQLKWELGQNALCVHLTYVPFLSAAQELKTKPTQHSVKELQSLGVQPDILVLRTEHDLNTNLRKKVALFCNVAENAVVQSIDASTIYEVPLLMQEQGLDETILQKMGLPVGERPPLGPWKDFLNRRANATETVTIAMVGKYVELQDAYKSILESLSQAATYNDRKVKIEYVSSEHLTPDNVDEQLGHVNGVVICPGFGSRGIEGKFVAAKYTREHNIPTFGICLGMQCMAIEFARNVLGYADANSIEMDEKTKHNVIDIMEEQKAITNMGGTMRLGAYECVLKKDSKVYEAYKEEHIQERHRHRYEFNNDYRKQFEEAGMKCVGINPESDLVEIVEIPTLKWYIGTQFHPEYSSTVLHPHPLFVSFIKAAIDK

SEQ ID NO: 17789 - protein, 267 aa, Escherichia coli W3110
MAIPAFGLGTFRLKDDVVISSVITALELGYRAIDTAQIYDNEAAVGQAIAESGVPRHELYITTKIWIENLSKDKLIPSLKESLQKLRTDYVDLTLIHWPSPNDEVSVEEFMQALLEAKKQGLTREIGISNFTIPLMEKAIAAVGAENIATNQIELSPYLQNRKVVAWAKQHGIHITSYMTLAYGKALKDEVIAAYAAKHNATPAQVILAWAMGEGYSVIPSSTKRKNLESNLKAQNLQLDAEDKKAIAALDCNDRLVSPEGLAPEWD

SEQ ID NO: 17790 - protein, 197 aa, Momordica charantia
EAEAYVEFDSFWFVQQWPPAVCSFQKSGSCPGSGLRTFTIHGLWPQQSGTSLTNCPGSPFDITKISHLQSQLNTLWPNVLRANNQQFWSHEWTKHGTCSESTFNQAAAFKLAVDMRNNYDIIGALRPHAAGPNGRTKSRQAIKGFLKAKFGKFPGLRCRTDPQTKVSYLVEVVACFAQDGSTLIDCTRDTCGANFIF

SEQ ID NO: 17791 - protein, 82 aa, Oxalis laxa var. hispidissima
INISGTNGEVMPGQWEYQVGPSVGIEAGDHIWASRYILERITEQAGVVLTLDPKPIDGDWNGAGCHTNYSTKSMREEGGFEV

SEQ ID NO: 17792 - protein, 237 aa, Oryza sativa
MSLSLGFSAGAGVGADRLAAAPALQAAGALPPRVDVSLSLARAANGQPSSYLPLNENDSLDMVLFDVLREASAVAALSSSSSSSPELGARTTAPVVAGHPAGRKGGGGGGGGRGAAARGGAAGGRHYRGVRRRPWGKYAAEIRDPTRHGARLWLGTFGTAEEAAAAYDRAAFRMRGAKALLNFPPAVAGDGARRGAAAAAKQVGMSDVVPRACHVVCYSVLSAHIFYDIFRGVIPIP

SEQ ID NO: 17793 - protein, 435 aa, Arabidopsis thaliana
MTPQIKTHLLPKQEPSSSENHGSSTSGIVFNVSTSIIGAGIMSMPAAFKVLGIVPAFLIITIIAWLSTISVGFLMKSTLAGESTTYAGVMKESFGKTGSIAVQIATMVATFGCMIIFSIIIGDVLSGNENGGPEHIGVLQEWFGSYWWNTRIFALLFVYGFVLLPLVLRRRVERLAISSAVSFLLAVLFVVISSVLAISALVNGQTKNPRLFPELSNGGSFWQLFTASPVIVTAFTFHFNVHPIGFELKDPLQVIPATKISVILCAAIYFATGLFGYLLFGDATMSDILVNFDQSSGSSIGSLLNDIVRLSYVLHLMLVFPLLNFSLRANLDELLYPKKPSLEKDTKRFIGLTLALLICCFLSAIAVPDIWYFFQFMGSTITVSIAFIFPAAIVLRNIHGVSTSREKIVAAIMLVLAVATSIIAISTNLYSLAAN

SEQ ID NO: 17794 - protein, 552 aa, Bacteroides thetaiotaomicron VPI-5482
MEKSFIAYIENSIKNNWDLDALTDYKGATLQYKDVARKIEKLHIIFEESGIRKGDKIAVCGRNSSHWGVTFLATLTYGAVIVPILHEFKADNVHNIVNHSEAKLLFVGDMVWENLNESAMPLLEGILMMNDFTLLVSRSERLTHAREHLNEMFGKKYPKNFRKEHIEYHKDEPEELAVINYTSGTTSYSKGVMLPYRSLWSNTKFAYEVLELKAGDKIVSMLPMAHMYGLAFEFLYEFSVGCHIYFLTRMPSPKIIFQAFEEVKPNLIVAVPLIIEKIIKKSVLPKLETPTMKILLKVPIINDKIKATIREEMIKAFGGNFREIIVGGAAFNQEVEQFLKMIDFPYTVGYGMTECGPIICYEDWTRFKPGSCGKAAPRMDVRVLSSDPENIVGEIVCKGPNVMLGYYKNSEATEAVIDKDGWLHTGDLALMDAEGNITIKGRSKNLLLSASGQNIYPEEIEDKLNNLPYVSESIIVQQNEKLVGLVYPDFDEAFAHGLKNEDIERVMEENRVALNAMLPAYSQILKMKIYPEEFEKTPKKSIKRYLYQEAKG

SEQ ID NO: 17795 - protein, 1177 aa, Neurospora crassa
MAVVEELPSSTSATDNGRKAGNAIVPIPNCGAAQKEDETPHVSDRCEDGSLKSYFEVAFFDLPEAGSISSHLTTNANLVNQGISEKLGLAIQAIATFFAAFVVAFAVQWKLTLITICIVPVIVIVTGICMGIDAKQENEIMIIHSGAAKLAEEVFASVKTAHAFWAFPKLSGKYAAILDEAKAVGARKSPNYAVLFSVEFFCVYAGYGLAFWQGIRMYKEGEVSEPGQIVTVIFAVLLAAQALTQIAPQSVVISKAAAAAHQMFQVIDRKSKIDSLSEEGIKPAECRGDIELQDVVFAYPSRPNIKVLQNFSLTIPANKTTAIVGYSGSGKSSILGLLERWGCPESGTITLDGRKIEEYNLQWLRTKVRLVQQEPVMLEGTVFQNVVNGLAGTSMADLSDEEKQRLVEDACRAAYAHEFIEKLPERGSMLSGGQKQRLAIARSVIANPQILLLDEATSALDPNAEQIVQKALNNVAVGRTMIVIAHRLSTIRNADNIVVMSNGRLIEQGTHDQLVALGGTYSHLVRIQRLGQEPDDDDEPQKDTRAEIGGAAIANTTSNVVETVPDASAMEEGAAKKDDINLLRCLFILMQEQRVLWPAFCWVGICCLAGGATYPALAIIFSRIMDAFALEGDKMVERGNFFSLMFFIVALGNLVAYAVLGWFCNVIAQQMVRFYRYTIFDCVVRQDMTFFDMPGNSPGALVSHLSKEPESLHELLSMNMGVIAIVVVNLLSSCILAVVIGWKLGLTLVFGALPPLVFSGYLRIRLEIKLDDDTADRFADSTGIASEAIMAIRTISSLAMERQILDRYENNLRSIAATSVKSLTWTMVWFKPAHIVVRYGGRLVSFGEYTVTQFYTVFIAVIFSGEAAATFFTYTTSITKAQHAANFIFRLRDSVRSENKDDNPPDAEKRSNGAVSIDCQALEFSYPLRPSARVLKGVSINIPPGQFVALVGASGSGKSSLISVFERFYDPSSGTVFFDGEDYQKIHLGRYRANIALVQQEPVLYQGSIRENIAMGVLDATVSDEQILEACRQANIDSFIASLPEGLATPCGSQGLQFSGGQRQRIAIARALVRKPRLLLLDEATSALDTESERVVQAALDAAAKGEGGADGDGIEGNAKGRKRTTVAVAHRLSTIKGADKIFVFSYGRIAEAGTHEELLGMRGMYYEMCLGQSLDR

SEQ ID NO: 17796 - protein, 420 aa, Pyrococcus endeavori
MVEQDPFEIAVKQLERAAQYMKISEEALEFLKRPQRIVEVTIPVEMDDGTVKVFTGFRVQYNWARGPTKGGIRWHPEETLSTVKALAAWMTWKTAVMDLPYGGGKGGIIVDPKKLSDREKERLARGYIRAIYDVISPYEDIPAPHVYTNPQIMAWMMDEYEAISRRKTPAFGIITGKPLSIGGSLGRNEATARGASYTIREARKVLGWGDLKGKTIAIQGYGNAGYYLAKIMSEDYGMKVVAVSDSKGGIYNPDGLNADEVLKWKQEHGSVKDFPGATNITNEELLELEVDVLAPAAIEEVITKKNADNIKAKIVAEVANGPVTPEADEILFEKGILQIPDFLCNAGGVTVSYFEWVQNITGYYWTLEEVREKLDKKMTKAFYDVYNTAKEKNIHMRDADYVVAVQRVYQAMLDRGWVKH

SEQ ID NO: 17797 - protein, 328 aa, Arabidopsis thaliana
MRPILMKGHERPLTFLRYNRQPHLLFSCAKDHTPTLWFADNGERLGTYRGHNGAVWCCDVSRDSSRLITGSADQTAKLWDVKSGKELFTFKFNAPTRSVDFAVGDRFAVITTDHFVDRTAAIHVKRIAEDPEEQDAESVLVLHCPDGKKRINRAVWGPLNQTIVSGGEDKVIRIWDAETGKLLKQSDEEVGHKKDITSLCKAADDSHFLTGSLDKTAKLWDMRTLTLLKTYTTVVPVNAVSLSPLLNHVVLGGGQDASAVTTTDHRAGKFEAKFYDKILQEEIGGVKGHFGPINALAFNPDGKSFSSGGEDGYVRLHHFDSDYFNIKI

SEQ ID NO: 17798 - protein, 551 aa, Acremonium sp. HI-25
MLLGTLFTLLAQCLLIEATSCLVKHDGGFVPDHVLRVSSRNISIACTSRQSAVVNGTSPGPELRVPAGQRTWIRVYNDLEQENLTMHWHGLAQRMAIFADGSPQGSQWPIPPGHFFDYELQTTVEDAGTYFYHSHVGMQALTASGALIVEGCERPPYQYDDERTLHWSDFFPQTDHEIEVGLQSVPLVWPGEVRAVLLNGKGIGIGHEADVSPSGDCSLPVIDVDPGKTYRFRFIGATGLSLVSMGFEGHQNLTIIQVDGGEWTKPASVDRIQLASGQRFDALFKAKTEEELASEGRQTYFIQFETRDRPEVYRGYAVIRYSKASTTPHVPTIPPLTLPNNTYDWLEYELRPLIETVTQPTLGEVTRRVIINASQLTDPQNQHVVWRLANLSWTEAVRQTPLLVDIYKFGDLAIPNYDAALANYGWDPETRAFPAKVGEVLEIVFQNTGSLVGSDGAVDIHPFHAHGEHFYDIGSGDGVYDAEANEAKLVAMNYTAVKRDTTMLYHYAATTTPGAPAGWRAWRLRVTQPGVWMIHCHILQHMVMGKSADAV

SEQ ID NO: 17799 - protein, 291 aa, Rhodopseudomonas palustris CGA009
MTEAVPFNAALVQMRSGLTPEPNLEQGTRLIREAVKAGADYVLTPEVSNMMQLNREALFAQLAEQDDDLSLKAYRELARELNIHLHIGSLALRASPDRAVNRSFLIGPDGAILASYDKIHMFDIDLGNGESYRESANYQPGETAVISDLPWGRIGLTICYDVRFPALYRALAESGASFLAVPAAFTKPTGEAHWHVLLRARAIENGCFVFAAAQGGLHENKRETFGHSLIIDPWGKVLAEGGIEPGFVMARIDPAEVTKARGKIPSLQHGRRFTVADANAGPGHLHLVRQS

SEQ ID NO: 17800 - protein, 280 aa, Zea mays
MKALILAAVLLLQHGGAASAGGNFYQDVDITWGDGRGKILDNGQLLTLSMDRSSGSGFQSKAQYLYGRFDMQLKLVPGDSAGTVATFYLSSQGSQHDEIDFEFLGNASGEPYTVHTNVYSQGKGGREQQFRMWFDPTAAFHAYSVLWNPAHVVFYVDGVPIREFRRRGDGTVPFPTSQPMRVYASVWDAEEWATQGGRVRTDWSKAPFVASYRGYAAAGCTAPDAAACARSNGAWMSQELDSAGQEQLRRAQASYMIYNYCTDKYRFPQGPPPECSSPAK

SEQ ID NO: 17801 - protein, 330 aa, Lactobacillus sakei subsp. sakei 23K
MSILVLGGAGYIGSHTVDQLIQRGYDVAVVDSLVTGHQGAINQKARFYQGDIRDKDFMRTVFQQEDVTGVIHFAAFSIVPESMQAPLKYFDNNTYGMTALLEVMNEFDVKRIVFSSTAATYGEPKSIPIKESDPQLPTNPYGESKLMMETMMKWADKAYGIKFVALRYFNVVGAKPDGSIGEDHHPETHLLPIVLQVAAGKRDQLSIFGDDYDTPDGTNVRDYVHVLDLADAHILAFEYLADGHDSNAFNLGSSTGFSNMEIVEAARKVTGKAIPLEMAPRRAGDPSTLIAASDKARETLGWAPKYDNMEAIIETAWNWHLNHPNGYADR

SEQ ID NO: 17802 - protein, 305 aa, Borrelia burgdorferi
MFCNVESTSIIDNVDVSTIYEIPISFYKQGVHEILSSKLNIKVDPKIEELSKLVGVIKSNFFVPKKIINIAICGKYAELDDSYASIRESLVHVAAHLDLLIKSTLIDSNDLNESCLKEFDGIIVPGGFGGKGYEGKIMAIKYARENNIPFLGICLGLQLAVIEFARNVCGILDADTEENLARDKPLKSPVIHLLPEQKGIKDKGATMRLGGYPVILKKNTIAFKLYGQDRIIERFRNRYEVNNDYIDLFAKNGLIVSGFSSDFKMAKLIEIPENKFFVACQFHPELITRIENPAKLFLGLIKACI

SEQ ID NO: 17803 - protein, 166 aa, Oryza sativa
MAAGKGSHTHRAFLLCNYALLGAASSCIFLTLSLRLLPSPCGLLLLFLHALTAVFSAAGCSGSFTAPATPAQWHNAHTAGAALTAIFQGAVALLAFTRTSDFLAELQSYVRDDDAAVILKMVGGLGTAIFVLEWAALALAFSLRLDDDDGAGDYDNKNWAAASYHV

SEQ ID NO: 17804 - protein, 491 aa, Synechococcus elongatus PCC 7942
MPRGVAPAFAGRKPKGWAWASTAVPDFQGGFKRLINRFQGSKLWLACVPLAATIAVFWGVAANAQGSADPVPSAQFLVNNLWLMVATVLVIFMNAGFAMVETGLCRQKNAVNVLAKNLIVFTLAATAYWFIGYSLMYGSPVVDGFLYFGKGGPLGFFFDPTVSAETIKNDGLISSLDFLFQAAFAGTAATIVSGSVAERIKFVDFIIFSLILTAVIYPIAGSWQWNVGSGWLNKAGFIDFAGSTVVHSVGGWAALIGAITLGPRMGKFQDGRPGALPGHNLAIATLGALILWIGWYGFNGGSVLAFNTAVPYVAVTTTLGGAAGGISATITSWSTSGKPDLSMVINGILAGLVGVTAGCDGFGMGGSFIVGLIAGVLVVFSVYTFENLKIDDPVGACSVHLVCGIWGTLAVGLFNLEKGLFYGGGFGQLGSQILGIISYGVWTVVASVIIWNILKALLGLRVSLKKSYKAWILANTGWKPTLALPRMHLTP

SEQ ID NO: 17805 - protein, 546 aa, Picrophilus torridus DSM 9790
MITGQTPILILKEGTERQQGKNAQKNNIEAAKAIADAVRTTLGPKGMDKMLVDSIGDIVITNDGATILKEMDIDHPTAKMLVEASKSQDTAVGDGTTTVVVLAGELLKQAESLLEQGVHSTVIASGYHLAVTEAKKQLDSLAIKADDEETLKRIAITALSGKNTSVAPEFLADLVIKAVNAVAEERDGKVIVDTANIKVDKKNGGSATDTQFISGLIIDKEKVHSKMPSVVKNAKIALINSALEIKKTEIEAKVQINDPSKIQEFLDQETDTFKEMVEKVKKSGANVLLCQKGIDDTAQYYLAKEGIYAVRRVKQSDMEKLAKATGAKIVTDLDDLTPDSLGTAEKVEERKIGDDRMTFITGAKNPKAVSILIRGGTEHVVDEIERALHDAIRVVAITKEDGKYLPGGGAIEAELSMKIRDYANSVGGREQLAIEAFAKALEIIPRTLAENAGMDPINTLIKLKAEHEKSNKNYGINLNENKIDDMVKLGVFDTYRVKQHALESAVEVASMILRIDDVIASKKSAPSNNQQPQGGMGGMGGGMPPY

SEQ ID NO: 17806 - protein, 473 aa, Rosa hybrid cultivar
MGGDAIVLYPYPGLGHLISMVELGKLLLTHHPSFSITILASTAPTTIAATAKLVASSNDQLTNYIKAVSADNPAINFHHLPTISSLPEHIEKLNLPFEYARLQIPNILQVLQTLKSSLKALILDMFCDALFDVTKDLNIPTFYFYTSAGRSLAVLLNIPTFHRTTNSLSDFGDVPISISGMPPIPVSAMPKLLFDRSTNFYKSFLSTSTHMAKSNGIILNTFDLLEERALKALRAGLCLPNQPTPPIFTVGPLISGKSGDNDEHESLKWLNNQPKDSVVFLCFGSMGVFSIKQLEAMALGLEKSGQRFLWVVRNPPIEELPVEEPSLEEILPKGFVERTKDRGLVVRKWAPQVEVLSHDSVGGFVTHCGWNSVLEAVCNGVPMVAWPLYAEQKLGRVFLVEEMKVAVGVKESETGFVSADELEKRVRELMDSESGDEIRGRVSEFSNGGVKAKEEGGSSVASLAKLAQLWKQK

SEQ ID NO: 17807 - protein, 95 aa, Oxalis pachyrrhiza
LYAGINISGTNGEVMPGQWEYQVGPSVGIEAGDHIWASRYILERITEQAGVVLTLDPKPIDGDWNGAGCHTNYSTKSMREEGGFEVIKKAILNLS

SEQ ID NO: 17808 - protein, 159 aa, Burkholderia vietnamiensis G4
MSTLYSFSAETLAGEPVSLDAYRGKVLLIVNTASECGFTPQYAGLQKLYDRYAARGFSVLGFPCNQFGKQEPGDATQIGAFCERNYGVTFPMFAKIDVKGDHAHPLYRYLTDEAPGILGLKAIKWNFTKFLIGRDGRIVKRYAPSTKPEEIAADIDKLL

SEQ ID NO: 17809 - protein, 92 aa, Oxalis megalorrhiza
GINISGTNGEVMPGQWEYQVGPSVGIEAGDHIWASRYILERITEQAGVVLTLDPKPIDGDWNGAGCHTNYSTKSMREEGGFEVIKKAILNLS

SEQ ID NO: 17810 - protein, 246 aa, Triticum aestivum
MMDLHIKPDPQQEAHESAPSTKSFQHSPEATGTELERALHGRHLQFIAIGAAVGTGLFIGTGNALATAGPVSLLIAFIFVGTLLFSVMTALGEMAAYIPVAGAFTTYATRFLDPTFGFAMGWIYWFSWSITFALELTAAGLIIQYWEKDLSIGIWITVFWFLFTAANFMPVRWFGEFEMWFSSIKVITIIGFIIFSICVNAGVGDQGYIGFKYWKDPGAFNEHIVEGDIGRFVGFWSVLITAGFSY

SEQ ID NO: 17811 - protein, 92 aa, Oxalis spiralis
LYAGINISGTNGEVMPGQWEYQVGPSVGIEAGDHIWASRYILERITEQAGVVLTLDPKPIDGDWNGAGCHTNYSTKSMRDEGGFEVIKKAIL

SEQ ID NO: 17812 - protein, 596 aa, Xanthomonas oryzae pv. oryzae
MSAYKITEHKYDMVVVGAGGAGLRATFGLAQKGLQTVCLTKVFPTRSHTVAAQGGISAALGNMGEDDWRYHFYDTIKGSDWLGDQDAIEYMCREAIPAIIELEHYGVPFSRTEDGKIYQRPFGGMTTKYGEGPSAQRTCAAADRTGHAMLHTLYQQSLAHNARFMIEYFALDLIFDEEGVCRGVLALDMAEGSLHLFRAHGVVLATGGYGRAYFSATSAHTCTGDGGGLVMRAGLPVQDMEFVQFHPTGIYGAGCLITEGVRGEGGILRNSNGERFMERYAPHYKDLASRDVVSRSMTVEIREGRGVGEHKDHILLDLTHLGPEVINEKLPGIAESAHIFAGVDVTKQPIPVLPTVHYNMGGIPTNFYGEVVRKQGDDPDAVVPGLYAIGEAACVSVHGANRLGSNSLLDLVVFGRAVANRCAETVKPNQPHKTLPSYACDKALGLLDKLRHANGSTPTSVIRDNMQRTMQSDAAVFRTSKTLKEGVDKMAEIFATFEDVKVSDRSLVWNSDLIETYELNNLLLNAVATINSAEQRKESRGAHSHEDFPDRDDVNWQKHTLVTVDDKGKCEFDYRPVHMYTLSKDVDVVPPKPRVY

SEQ ID NO: 17813 - protein, 91 aa, Oxalis spiralis
INISGTNGEVMPGQWEYQVGPSVGIEAGDHIWASRYILERITEQAGVVLTLDPKPIDGDWNGAGCHTNYSTKSMRDEGGFEVIKKAILNLS

SEQ ID NO: 17814 - protein, 407 aa, Streptococcus pyogenes MGAS10394
MPSMKHILKSLSILLVGFLGGLIAIITFNNLYPHSPSKINSGKATTSNMVFNNTTNTTKAVKAVQNAVVSVINYQDNPSSSLSNPYTKLFGEGRSKENKDAELSIFSEGSGVIYRKDGNSAYVVTNNHVIDGAKRIEILMADGSKVVGELVGADTYSDLAVVKISSDKIKTVAEFADSTKLNVGEVAIAIGSPLGTQYANSVTQGIVSSLSRTVTLKNENGETVSTNAIQTDAAINPGNSGGPLINIEGQVIGINSSKISSTPTGSNGNSGAVEGIGFAIPSTDVIKIIKQLETNGEVIRPALGISMVNLNDLSTNALSQINIPTSVTGGIVVAEVKEGMPASGKLAQYDVITEIDGKTVNSISDLQSSLYGHDINDTIKVTFYRGTTKKKADIKLTKTTQDLTKTQ

SEQ ID NO: 17815 - protein, 454 aa, Neurospora crassa
MSNLPSEPEFEQAYKELAYTLENSSLFQKHPEYRTALTVASIPERVIQFRVVWEDDNGNVQVNRGYRVQFNSALGPYKGGLRLHPSVNLSILKFLGFEQIFKNALYGLSMGGGKGGADFDPKGKSDAEIRRFCCAFMAELHKHIGADTDVPAGDIGVGGREIGYMFGAYRKAANRFEGVLTGKGLSWGGSLIRPEATGYGLVYYVGHMLEYSGAGSYAGKRVALSGSGNVAQYAALKLIELGATVVSLSDSKGALVATGESGITVEDINAVMAIKEARQSLTSFQHAGHLKWIEGARPWLHVGKVDIALPCATQNEVSKEEAEGLLAAGCKFVAEGSNMGCTLEAIEVFENNRKEKKGEAVWYAPGKAANCGGVAVSGLEMAQNSQRLNWTQAEVDEKLKDIMKNAFFNGLNTAKTYVEAAEGELPSLVAGSNIAGFVKVAQAMHDQGDWWSKN

SEQ ID NO: 17816 - protein, 202 aa, Arabidopsis thaliana
  misc_feature (181)..(181): Xaa can be any naturally occurring amino acid
  unsure (1)..(202): unsure at all Xaa locations
MNILNKLGIGSSRQTNMDPSPIAQVIDDEAPAPGNQFAQFGAGCFWSVELAYQRVPGVTQTEVGYSQGITHDPSYKDVCSGTTNHAEIVRVQYDPKECSYQSLLDLFWSKHDPTTLNRQGNDVGTQYRSGIYFYNPEQEKLARESLERHQQQVDRKVVTEILPAKKFYRAEEHHQQYLSKXGRFGLKQSTEKGCNDPIRCYG

SEQ ID NO: 17817 - protein, 462 aa, Mycoplasma penetrans HF-2
MSKKIDQETIVNHFKNYGFVYQNSEIYNGLANAWDFGPLGSLIKNNLKNLWLKHFIYSKKEMHLIDTNIILNPLVWKASGHIDNFSDPLIDCKECKSRFRADKLILENTKEEINEQTDSDTLIKIISDNKIKCPNCKKSNWTEIRKFNLMFDTSIGVVDDKKDLVYLRPETAQGIFINFKNIQRTQRQKLPFGVGQIGKAFRNEITPGNFIFRTREFEQMEIEYFCDKKDSPKVFDNFLESIKTFLFKTLKIHENNIKIIDYPKEELAHYSSRTVDFLYNFPHGYSELWGLADRGEFDLTAHQNLSKKSLEYLNEETKEKFVPSVIEPSVGVERLLYAILIDAYDEEKIDEENNRVVLKLIPELAPYKFAVLPLSNKLNDKAEEIFNNLILSNICTYDSSGSIGKRYRRQDAIGTPYCITVDFDTLEDECVTIRDRDSMKQIRIKIKDIDLSKVQELFKNAK

SEQ ID NO: 17818 - protein, 78 aa, Rhizobium etli
MTARMDKRFAELKAEGRPALVTYFMGGDPDYDTSLGIMKALPEAGSDIIELGMPFSDPMADGPAIQLAGQRALKGGQT

SEQ ID NO: 17819 - protein, 477 aa, Thermoanaerobacter tengcongensis MB4
MNKIVIDRNKETPIYLQLYSQLKRFIENGSLPPGYKLPTIRSMAKELGVNIITVVNAYRLLEENGYVYTRVGSGTYVCEGIQRDRDLIEDIELSEHREIPVKKGTINFASSSLNPELFPVDEFAELINRVLKRDRGYAFEYQDSRGYKPLRESILKFVRLYGIETGVENIQVISGGQQGIDVVSKALINFGDTIVVERPTYSWALASFQSRGADILEVNLNKDGIDIEDLEDKLKKFKPKFIYVMPNFHNPTGILYSDEKKEKLVGLAEKYETYLLEDDFAIELSFTETDVFPLKAFDKYDRVIYLKSFSKVHMPGLRLGFIIAPEKLVSSFLKAKYVTDLTTSGLMQRAFDLYLRENIWKKHIEEVKGVMRERFEKMKEGLTQLKSYFEFDIPKGGFYYWVKLKDNWKAVDFYQKCLERGLLVVPGDMFFGIKKEDNFLRLSFASCDVQEIEKGIEILRQVLSEGQNENEMYLPII

SEQ ID NO: 17820 - protein, 83 aa, Zea mays
  misc_feature (32)..(32): Xaa can be any naturally occurring amino acid
  unsure (1)..(83): unsure at all Xaa locations
IILFTRILAEKGVVVLPDIYANSGGVVVSYFXEWVQNIQGFMWAEEKVDDELEKDMSSAFQHMKAMCKSLVLPKCVVTLELRV

SEQ ID NO: 17821 - protein, 250 aa, Corynebacterium efficiens YS-314
MVMTNGKLILLRHGQSAWNASNQFTGWVDVDLTTIGEAEAKRGGELLVENNVLPDVVYTSLLRRAIRTANLALDAADRHWIPVVRDWRLNERHYGALQGLNKAETKDKYGDEQYMAWRRSYGTPPPELADDAEYSQAGDVRYKDLESVPRTECLKDVVERFIPYFEEEILPRVKKGENVLIAAHGNSLRALVKHLDNISDDDIAELNIPTGIPLVYEITPEGTVVNPGGTYLDPEAAAAGAAAVANQGGK

SEQ ID NO: 17822 - protein, 110 aa, Gossypium hirsutum
MASQQERQELDARARQGETVIPGGTGGKSLEAQEHLAEGRSRGGQTRKEQLGREGYQELGSKGGQTRKEQIGTEGYQEMGRKGGLSTMDKSGVERAAEEGIDIDESKYRT

SEQ ID NO: 17823 - protein, 486 aa, Glycine max
MAASRRLRDLQSQPANKICVDCSQKNPQWASVSYGVFMCLECSGKHRGLGVHISFVRSVTMDSWSEIQIKKMEAGGNDKLNAFLTQYGIPKETDIVAKYNSNAAAVYRDRIQALADGRPWRDPPVVKEAVRSSASKGKPPLSAGNNNNGGWDNWDPDDGFGSARGGADLRRNQSTGDVRGFGGGGNVSRSKSTQDMYTRAELEASAANKEDFFARKRAENESRPEGLPPSQGGKYVGFGSGPAPNQTGVNQQNDYLSVVSQGFGKLSLAAANVVQAGTKEFSAKVKEGGYDYKVNETVNVVSQKTSEIGQRTWGIMKGVMALASQKVEEFARDNPNWMSDNWQRNESDRNGFYQEFNRENNGRNSSTREGQHSSGGQTNTFHSSSWDDWGHNDSRKEETAKGSAPQSSGGKFDNNYNSSSWDDWDQEDTRKKEPAKGSAAHSSDGWTGWDNAKDDGFDDIYGSASNNKGGAHNDKSGAAWTGGGFL

SEQ ID NO: 17824 - protein, 616 aa, Pseudomonas tolaasii
MSGKAQQQSRIKELIVLGREQGYLTYAEVNDHLPEDISDPEQVEDIIRMINDMGINVFEAAPDKDSLMLADADTDEAAAEEAAAALAAVKTDIGRTTDPVRMYMREMGTVELLTREGEIGIAKRIEEGIREVMGAIAHFPGTVDRILSEYNRVTTEGGRLSDVLSGYIDPDDGIAPPAAEVPPPVDAKAAKADDDSEDDDAESSGDDEDEVESGPDPIIAAQRFGAVSDQMEITRKALKKHGRTNKQAIAELIALAELFMPIKLVPKQFEGLVERVRSALERLRAQERAIMQLCVRDARMPRADFLRQFPGNEVDESWTDALAKGKAKYAEAIGRLQPDIIRCQQKLTALETETGLTIAEIKDINRRMSIGEAKARRAKKEMVEANLRLVISIAKKYTNRGLQFLDLIQEGNIGLMKAVDKFEYRRGYKFSTYATWWIRQAITRSIADQARTIRIPVHMIETINKLNRISRQMLQEMGREPTPEELGERMEMPEDKIRKVLKIAKEPISMETPIGDDEDSHLGDFIEDSTMQSPIDVATVESLKEATRDVLSGLTAREAKVLRMRFGIDMNTDHTLEEVGKQFDVTRERIRQIEAKALRKLRHPTRSEHLRSFLDE

SEQ ID NO: 17825 - protein, 690 aa, Zea mays
MSSSRKPKTPILLFFLFLLASLAFSQEFTYKGFSASGRGGSPNLNLNGTSATEILPSGILRLTNETSRLFGHAFYPTPLRFLDQKNGTAVSFSTQFAFTVVPEFPTLGGHGFAFVVAPDPRMSGALPSQYLGLLSAADVGNATNHLFAIEFDTVQDFEFDDVNGNHVGVDLNSLISNASAKADPLNLKSGDTTAWVDYDGAARLLNVSIANGTLGKPTTPLISFRVDLSGIFREQMYVGFSASTGVLASSHYLRGWSFRLGAGAAPALDLSSLPSLPQLKSSKNRTSLILAVAFSAFVALVVLAGAGAYGAYRYKNRDIIEPWELDYGPHRFKYAELRRATRGFREREVLGSGGFGKVYRGVLRKSGETVAVKRVNHESRQGLREFVAEIASIGRLRHRNLVQLQGWCRRRGDLLLVYDYMPNGSLDRHLFGDHLKASRLTWPVRYRILRDVASALLYLHEGWESVVLHRDVKASNVLLDADMSARLGDFGLAKLHERGTNPSTTRVVGTLGYLAPELTRTGKATTAADVFAFGALVLEVVAGRHPIEPRAPPEELVLAEWAWERYAAGEVEKVVDARLAGAYDFAEAAAAVKVGLWCSHPAPATRPTMREVARYLDGGDASEVPEPPPPPPMPPAYSGEVGFDDFVHSYPSSSFERAAAAGGGWDGGTQMSVATFPFSSLSMRSSHVST

SEQ ID NO: 17826 - protein, 349 aa, Streptococcus pyogenes MGAS8232
MKAATYLSTGNLQLIDKPKPVIIKPTDAIVQLVKTTICGTDLHILGGDVPACKEGTILGHEGIGIVKEIGDAVTNFKIGDKVIISCVTSCHTCYYCKRGLSSHCEDGGWILGHLINGTQAEYVHIPHADGSLYHAPDTIDDEALVMLSDILPTSYEIGVLPSHVKPGDNVCIVGAGPVGLAALLTAQFFSPANIIMVDLSQNRLEAAKTFGATHTICSGSSEEVKTIIDDITNGRGVDISMECVGYPATFDICQKIISVGGHIANVGVHGKPVDFNLDELWIKNITLNTGLVNANTTEMLLNVLKTGKIDATRLITHHFKLSEVEKAYETFKHAGANNALKVIIDNDIS

SEQ ID NO: 17827 - protein, 312 aa, Rhodopseudomonas palustris CGA009
MSDTAKRQPRVLCIGIPVRDLTFRIEAVPGRGNKVPASSFGEICGGNALNAAIGIARLGGKAQMCGPMGDASEAAAGFIFDKLAEEGIGSSGLIHMPGLVTPISAVLVDPTGERTIVTFRDPGLWKVALPDADTLLKDCDAILTESRCSSFVTPLCAEATRRGIPVVVDVDNAMSMNEGLLTAASHLICSAEALHGTAGIADDAEALKKLATLTHAFVAVTRGPKGTLWLDDKQQFRETPAFPVHSVDTLGAGDIFHGGFTVAYGEGQDIAHALRFASAAAALKCTRPGGAFACPTRAEVDELLAKSPVGAL

SEQ ID NO: 17828 - protein, 1510 aa, GIBBERELLA ZEAE PH-1
MSESTSKSIDAGAVAANANVSALDSRDPVVATAPADSNPNNTATAKTDPAFLHSPPDSNNTAKSDGSDSELSDLEDEPIFSDPLQPADPGDKTTSDEDKSKPSDDDIGEVLPDHWSGAVPIFKPTMHQFRDFKRFMEAVDSYGMKSGIIKIIPPQEWKDDLPKLDDLVKQVRVREPIKQEIMGSNGTYRQVNILHGRSYNLPQWRQLCDQSEHQPPARRGERRANAEKPKPRTRAAAPAPKPVDPSVPKKRGRGRPAKRGGRGRRANPEPAEDAEDRPMTPVSPKPDAAEVEDKPVESVELDPGEEVEDDYEPRVGRMGISRPAKTKTQTVSARRKYSRREGSAMIDEAAFKDWDYKMDTSEYTPERCEELERAYWKTLTYAPPLYGADLMGTLFDETTEEWNLNKLPNLLDVLGTKVPGVNTAYLYLGMWKATFAWHLEDVDLYSINFLHFGAPKQWYSISQADARRFEAAMKNIWPTEAKSCDQFLRHKGFLISPQHLKSHYNITVNKVVSYPGEFVVTYPYGYHSGYNLGYNCAEAVNFALDSWLEIGKIAKKCECAQAQDSVWVNVYEIERKLRGEETEYEETEEEEEDEEDDDDEQSGMPTPPSASGVKFKESRRKRKRGPGDKSGKVKVKKIRLRLRAKAEPPCCLCPNDTPSAELLPTDDGRKAHRLCAHYLPETYIETIDNQETVVNVSEIHRDRLDLKCLYCRSKRGACFQCSQKKCARAYHATCAAAAGVFVEEEEVPVFGEDGTEYKEQAFEFSCRFHRTKRDKKLDGELLETDARIQTAASKVQSGETCQFQYHKGDIFAGVVIENRANEQILLVDILPNGDRLEVQWKWLLVPDAADYRLPKASANAIPMPSSQKAKEKLKTKRLHDGKPQKDDPFVEGYTWAEFQLHPASNKEQVSIDFSKPNQIWHYLPKTSTDARAQFTEDLAKQRHNPQGNFLSTVPKPVKPARPPRQVPAYAQQQPYQHATPYNAGRMERPYVYKPRIPAESNMPAMGSFTTQRFVPAASLPTPHQHHPAQYPSYAQPAPPGHQPPHPPYSAQRFEVRSSPAYTPPGSTPRIHSPMNAPAHPQHTQWPGVASVSHPPPVLAPAAGAIHPHHGAHQAPYQAPAPYQQAHPAQQQNHQMKASWQVHPSIYQKYPFFQVNYNRDSSKYRTPYATWRGFTNGYEGNMRAHIMANQDAFLRGQPSSHNYSAHGSTYQRPSAVPPQAPSSSQMPPSGHEFRQQTFVNGVPAPSPMLTHQTSGQFPRPALKPQYMPPIQAQAQEHPQQRQQPQPNAQQGPQEATQTPNQNSKVKTATVFKPYKIPPKQSPVPLPANYLAAMTPTSTSNTAAATAGQSALQQPLNKGSPVEPKSARKVQGTQHSPSVTHNPGRQPLGAKISETPIPVPRLPGFMPASTSREQAAPPQKRVPEQDRSSQRLPVHQGGPVTPVATQEQMASSARDGKLALTNTKPGNMSQTVSAEQAIPFQPHDFPDVPGSESMKFLDNILKNVRTLARRDE

SEQ ID NO: 17829 - protein, 225 aa, Oryza sativa
MEEEDYVFKVVVIGDSAVGKTQLLGRFTKDEFFIDSKSTIGIEFQTRTVEIGGKRVKAQIWDTAGQERYRAVTSAYYRGALGAMLVYDVTSRRSFHHAARWLHDLRAHADNSIVVMLIGNKADLSHARAVAADEAAAFAEDQGLFFSEASALSGDNVEEAFLGLLREIHAIVSRRSLLEMDGINGDAAANANAALMLRGTKLSLSDELSIMETSAIKRVSRCSCS

SEQ ID NO: 17830 - protein, 408 aa, Kluyveromyces lactis
MLSLKAQSSVVGKSSSLRLVRNFSKNVRALSQVADETKPGDDDLVQIDLPETSFEGYLLDVPELSYQTTKSNLLQMYKDMIIVRRMEMACDALYKAKKIRGFCHSSVGQEAIAVGIENAITKRDTVITSYRCHGFTYMRGAAVQAVLAELMGRRTGVSFGKGGSMHLYAPGFYGGNGIVGAQVPLGAGLAFAHQYKHEDACSFALYGDGASNQGQVFESFNMAKLWNLPAVFCCENNKYGMGTAAARSSAMTEYFKRGQYIPGLKVNGMDILAVTKLKDWTVSGNGPIVLEYETYRYGGHSMSDPGTTYRTRDEIQHMRSKNDPIAGLKMHLLELGIATEDEIKAYDKAARKYVDEQVELADAAPAPEAKMSILFEDVYVPGSETPTLRGRLQEDTWDFAKKSFAFRD

SEQ ID NO: 17831 - protein, 717 aa, Saccharomyces cerevisiae; identical to SEQ ID NO: 896

SEQ ID NO: 17832 - protein, 505 aa, Picrophilus torridus DSM 9790
MSDEIKDVRKLEIKYVFELYPVFRRYIKDRKRSRSNDYNYDIERHGLRAVNTFIRLGPTFIKLGQVLSARPDLMPKEYLKAFEMLQDNVPPDPFEKAYEIIKRNIDVNELNDLNKNAISGASLGQVYRLKYHGRDAIIKVNRYNINYILKRDIIIIKRLLRIARHFMDNFLYISIYNVIEDFSTRIYEEANYEIEANNLERIKNNLSYRNDIIIPEVLYVTKEVMILEYRPGIKVTDVKRLKEKNIDLKDLAYRIDLIFLRMLLRDDIFHADPHPGNIAVSDDGNIILYDFGMVGKLDDDTRFELLKLYDGLVNKDPDAIIDSLLSLNALSPAANRGIIRKAIEISIANFSGRDVNEIDIRELLEVANNVIFEFPFHLPRELVLYIRMSSLLEGICKTLDPNFKFVRVLRTILYDEGMLDYLYNRELSEFIKRAVASIEKGLDVLPLMKRRLEEENTKRDKTPLIILAGSIFIAMAVFSARHPLISYIIMALDLILSFYYIRKMH

SEQ ID NO: 17833 - protein, 309 aa, Bradyrhizobium japonicum USDA 110
MSTLLLSHKACLDHVTPPGHPERPDRLRAVEEALSHERFQFLVRDQAPEGDLDLVTLCHNEHYVTELRHIAPSSGLVYIDGDTSMSPGTWEAVMRGVGGAVAATEAVMAGEHRNAFVAVRPPGHHAEIGKPMGFCFFDNVAIAARHAQRKYGITRAAIVDFDVHHGNGTQDIFWSDPTVMYCSTHQMPLFPGTGAKGERGDHDTIVNAPLASEDGGPEFRSAFENLILPQLEKFSPELLIISAGFDAHYRDPLASLNLRAEDYAWVTRKLMDLADRTAGGRVVSVLEGGYDLQGLKESVTAHVGALMGA

SEQ ID NO: 17834 - protein, 545 aa, Erwinia carotovora subsp. atroseptica SCRI1043
MTTNYIFVTGGVVSSLGKGIAAASLAAILEARGLNVTIMKLDPYINVDPGTMSPTQHGEVFVTEDGAETDLDLGHYERFIRTKMSRRNNFTTGRIYSDVLRKERRGDYLGATIQVIPHITNAIKERIIEGGEGHDVVLVEIGGTVGDIESLPFLEAIRQMAVQVGREHTLFMHLTLVPYLAAAGEVKTKPTQHSVKELLSIGIQPDVLICRSDRTVPANERAKIALFCNVPEKAVISLKDIDSIYKIPALLKSQGLDDYICKRFSLNCPEANLSEWEQVVYEEANPGGEVTIGMVGKYVALPDAYKSVIEALKHGGLKNRLTVNIKLIDSQDVETRGVEVLKDLDAILIPGGFGYRGVEGKIMSANYARENNIPYLGICLGMQVALMEFARNVAGMEGANSTEFVPDCKYPVVALITEWRDENGDVEVRDEASDLGGTMRVGGQQCHLTEGSLVRQMYGEQTIIERHRHRYEVNNMLLKQIEAAGLRVAGLSADRKLVEIVELPDHPWFVACQFHPEFTSTPRDGHPLFAGFVKAAGAYQKRQVK

SEQ ID NO: 17835 - protein, 394 aa, Cryptococcus neoformans var. neoformans JEC21
MTCRSVLVYCVALAVVGLVRGQTATEEEHDHDHDHESEEAVETDDAATGLHAGHTHAHSSSDCGVTELQDYNLSLHIAAVFVMLVASAIGVFLPVILGKLGSRNKLFGSVFFVLKYFGSGIIISLAFVHLLIHAFFNLTSPCVGNLEYESAAPAIAMATVIVVWLVDFFGSRYIARQNSKLRECDRNISAAPGFSPDPTEERKKDDISTPMTELACCGPNNLEITNFDGAAKIAHWNVQLLEYGVIFHSVMIGVSLGAMGTGFSTTFAALVFHQLFEGLGLGARIAMLVWPSGISSTIKKWSMCLAYALTTSVGIAIGIGVHASVNMNGRAILLSTGILDSISAGILLYSGLCQLLYREWVVGEMRDASTSKIIVALVSLFLGLFAMSFIGKWI

SEQ ID NO: 17836 - protein, 492 aa, Arabidopsis thaliana
MDPYKYRPSSAYNAPFYTTNGGAPVSNNISSLTIGERGPVLLEDYHLIEKVANFTRERIPERVVHARGISAKGFFEVTHDISNLTCADFLRAPGVQTPVIVRFSTVVHGRASPETMRDIRGFAVKFYTREGNFDLVGNNTPVFFIRDGIQFPDVVHALKPNRKTNIQEYWRILDYMSHLPESLLTWCWMFDDVGIPQDYRHMEGFGVHTYTLIAKSGKVLFVKFHWKPTCGIKNLTDEEAKVVGGANHSHATKDLHDAIASGNYPEWKLFIQTMDPADEDKFDFDPLDVTKIWPEDILPLQPVGRLVLNRTIDNFFNETEQLAFNPGLVVPGIYYSDDKLLQCRIFAYGDTQRHRLGPNYLQLPVNAPKCAHHNNHHEGFMNFMHRDEEINYYPSKFDPVRCAEKVPTPTNSYTGIRTKCVIKKENNFKQAGDRYRSWAPDRQDRFVKRWVEILSEPRLTHEIRGIWTSYWLKADRSLGQKLASRLNVRPSI

SEQ ID NO: 17837 - protein, 388 aa, Prosthecochloris aestuarii DSM 271
MLPVFEAMEKELDALRRQERFRRLPDTGVRDGRFLEFGGESLLNLSSNDYLGIGSNRALVEEYFDGCHRYTEDYWMASSSSRLLTGNHRLYGALELQLAALYGRQASLVFNSGYHANTGILPAISTRQDLILSDRLNHASIIDGGRIADAAFRRYRHLDYAHLESLLDSCRSSYRQIIIVTESVFSMDGDIADLKRLVELKERYGAMLVVDEAHGAGTFGTQGLGVAEAIGVIGGIDILVGTFGKAFASTGAYAVMDSLVRDYLVNTMRPLIFTTALPPVVLGWSARVLERQRCMQQERGHLREISSLLREGFRSRGLRVYGESHIVPVVLGENDLAVRKAAELRAHGILALPVRPPAVPEQSARVRFSLRADLAWEDLAGIPELLIP

SEQ ID NO: 17838 - protein, 428 aa, Prosthecochloris aestuarii DSM 271
MKGHIDTDFDRGHIWHPYTSMRDPLPVYPVARASGVTIELEDGRKLVDGMSSWWAAVHGYNHPVLNHAVTRQLDSMSHVMFGGLTHEPAVKLAGQLIELTPEPLQKVFFSDSGSVSVEVAIKMALQYWQAAGLSRKRRLLTVRSGYHGDTFGAMSVCDPDTGMHSLFTGMLAEQLFAEAPQCGFDAAWNENGIEDLHQKLRQHHEAVAAVIIEPVVQGAGGMRFYSPHYLIRLRELCDEYGVLLIFDEIATGFGRTGKMFALEHAGVVPDIMCVGKALTGGYMTLAATLAADHVADTISSAEPGLFMHGPTFMANPLACSVASASIDLLCSRDWEQEVQDIQGALQDGLSPCSRFSGVHDVRVLGAIGVVELCQPVDMAAVQNFFVERGAWVRPFGRLIYLMPPFIISPSEMVILTRAVRDAVRLIAS

SEQ ID NO: 17839 - protein, 95 aa, Oxalis medicaginea
  misc_feature (3)..(3): Xaa can be any naturally occurring amino acid
  unsure (1)..(95): unsure at all Xaa locations
LYXGINISGTNGEVMPGQWEYQVGPSVGIEAGDHIWASRYILERITEQAGVVLTLDPKPIDGDWNGAGCHTNYSTKSMRDEGGFEVIKKAILNLS

SEQ ID NO: 17840 - protein, 207 aa, Kluyveromyces lactis NRRL Y-1140
MSRKKNILKVIILGDSGVGKTSLMHRYVNDKYSQQYKATIGADFLTKEVIVNDDKVATMQVWDTAGQERFQSLGVAFYRGADCCVLVYDVTNGKSFDNVKSWRDEFLVHANVSSPETFPFVILANKVDVEESKKVVSSRSAQEQAKSLGNVPLFFTSAKDSINVQDAFEEIARSALQQSQSDADAYEDDLSEAINIQLDGEPSSCNC

SEQ ID NO: 17841 - protein, 92 aa, Oxalis lotoides
  misc_feature (1)..(1): Xaa can be any naturally occurring amino acid
  unsure (1)..(92): unsure at all Xaa locations
XINISGTNGEVMPGQWEYQVGPSVGIEAGDHIWASRYILERITEQAGVVLTLDPKPIDGDWNGAGCHTNYSTKSMRDEGGFEVIKKAILNLS

SEQ ID NO: 17842 - protein, 171 aa, Prosthecochloris aestuarii DSM 271
MSQFVLRLKRSVFLFLAIILTVLLPPASAETFSFLGPSGGPGGNYFSDNQTGGLRVVEVRIRSGAYIDAIQFVYENKAGQRITGQMHGGNGGNLSVFALEPGEYLTRITGKHGNFIDSFQIVTSKGRSKGWGGTGGAARYTYTAPPGSSIHGLFGRCGVFLDAVGVILSTP

SEQ ID NO: 17843 - protein, 280 aa, Triticum aestivum
MTIMRMFLALCALGFVAGVVEDGSSFDVSAYPVKWDEDPSVGSAPGTEAPAPPPKHHMMVKKGMLFLERDLFAGALLPANTRLGYVRRTSSPGPVISSTTSPVPPFRYSSFEKILKFYNVTHGSKQAGRISETLQFCEEAGDKEPHVCATSVAAAREFAATVLGTKEPRAVTSTLHGRTEPLRYVVAPNGIASVGGDAVVPCHPLAYPVEVFYCHTPSNVQALRVQLVGQEDPSVGATGIAVCHKDTGDWDEAYFVMLNGSRGEPICHFMPQLHSCGSRR

SEQ ID NO: 17844 - protein, 142 aa, Bacteroides fragilis NCTC 9343
MMPVRRSQNWLPSIFNDFFDNELMAKANATAPAINVIETDKAYKLELAAPGMTKEDFSVRIDEENNLVISMEKKAENKEEKKDGRYLRREFSYSKFQQTMILPENVDKDHISAQVENGVLNIELPKLSEEEVKKPDRTIEVK

SEQ ID NO: 17845 - protein, 95 aa, Oxalis subintegra
  misc_feature (89)..(89): Xaa can be any naturally occurring amino acid
  unsure (1)..(95): unsure at all Xaa locations
LYAGINISGTNGEVMPGQWEYQVGPSVGIEAGDHIWASRYILERITEQAGVVLTLDPKPIDGDWNGAGCHTNYSTKSMRDEGGFEVIKXAILNLS

SEQ ID NO: 17846 - protein, 413 aa, Corynebacterium efficiens YS-314
MSTFFAFLLGVVVAGLALPAYGWAKERFRRHKSATTLAENQVTTVGQVLHLAIQGSPTGITVVDRTGDVILSNGRAHSLGIVHQRTVNSDVWRVAQEAFDDKDTHTLDVNPSVNPRRPGNRVTAVRAVVKPLTLIDDRFVIIYATDESENVRMESARRDFVANVSHELKTPVGGMALLAEALMEAVDDPEQVEYFGARLHREAHRMADMINELISLSKLQGAERLPDMEPVKVDDIIDEAIERTQLAADNAQIELVRGDRTDVWVNAERSLLVTALANLISNAINYSPQSMPVSVSQNVCNDVVMIRVTDRGIGIAPEDQGRVFERFFRVDKARSRQTGGTGLGLAIVKHVMANHGGNISLWSRPGTGSTFTLELPVYHPESEAPAETPKRVGLDSTLRSTASKVTGRRKEKT

SEQ ID NO: 17847 - protein, 103 aa, Crocosphaera watsonii WH 8501
MAAISINVSTVKPLGDRIFVKVSPAEEKTAGGILLPDNAQEKPQIGEVVAVGPGKRNDDGSRSELDVKVGDKVLYSKYAGTDVKLSGDDYVLLSEKDILAAVA

SEQ ID NO: 17848 - protein, 603 aa, Xylella fastidiosa Ann-1
MTVIEIKVPDIGDYSKVPVIEVLVTVGDHVVKNQGILTLESDKATLEVPSMNNGVVKELKVNVGDLLSQGDVILLLETEDTTAPPSPSNAATSDTTSPPPPSPQPAASKPTAPDQQHSDIKCRMVVLGAGPGGYTAAFRAADLGLDTVLVERYPNLGGVCLNVGCIPSKALLHAAAVIDEAAHASTFGIDFGKPKITLDTLREYKQNVVNKLTAGLAVMAKQRKVRTVTGIAHFVSPNTLDITAADGSTQRLHFQQCIIATGSHPVKLPNFPWDDPRIMDSTDALELAEVPKKLLVVGGGIIGLEMATVYNALGSHVTIVEFMDQIIPGTDKDLVKPLADRMKKQGIEIHLNTKASHVKADKKGITVSFEAPTQGTQPALKTSTYDRVLVAVGRTPTGNNISAEKAGVNVTERGFIPVDRQMRSNVPHIFAIGDIVGNPMLAHKATHEGKLAAEVAAAETESGKHREWVARVIPSVAYTNPEIAWIGMTETEAKAKGLNIGVAKFPWVASGRAIGIGRTEGFTKLIFDEDTHRIIGGAIVGVHAGDLLAEIGLAIEMGAEAEDISHTIHAHPTLSESIAMSAEVYDGTITDLYLPKKSATSAK

SEQ ID NO: 17849 - protein, 89 aa, Oxalis unduavensis
  misc_feature (1)..(1): Xaa can be any naturally occurring amino acid
  unsure (1)..(89): unsure at all Xaa locations
XINISGTNGEVMPGQWEYQVGPSVGIEAGDHIWASRYILERITEQAGVVLTLDPKPIDGDWNGAGCHTNYSTKSMRDEGGFEVIKKAIL

SEQ ID NO: 17850 - protein, 81 aa, Xerophyta humilis
MASCGGNCGCGPNCKCGSNCNCGGNKMYPGLAEERSTSTQTNILGVAPQQERREGFEAGQRSENGGCKCGPNCNCNPCNCK

SEQ ID NO: 17851 - protein, 355 aa, male-killing Rickettsia from Adalia bipunctata
GFMSTASCRSTITYIGGDKGILRYRGYDIKDLAEKSDFLEVAYLLIYGELPSSEQYNNFTKKVAVHSLVNERLHYLFQTFCSSSHPMAIMLAAVGSLSAFYPDLLNFKEADYELTAIRMIAKIPTIAAMSYKYSIGQPFIYPDNSLDFTENFLHMMFAAPCEKYKVNPIIKNALNKIFILHADHEQNASTSTVRIAGSSGANPFACVSTGIASLWGPAHGGANEAVINMLKEIGSSENIPKYIAKAKDKNDPFRLMGFGHRVYKNYDLRAAVLKETCKEVLKELGQLDGNPLLQIAIELEAIALKDEYFIERKLYPNVDFYSGIIYKAMGIPSQMFTVLFAIARTVGWMAQWKEM

SEQ ID NO: 17852 - protein, 484 aa, Cryptococcus neoformans var. neoformans B-3501A
MDGVPGITQCSIPPGGSFTYNFTVSHQSGTFWWHSHYSNSMADGIWGPLIVHSANESLQRGRDYDEDRIVFITDWMHDNSEVIVAALISPEGYRGSTVPPQGDAILINGRGQTNCTATGSSSCFYPPPPEIQVPVDRRVRLRMISASSHAMYRVSIDNHSMEIVETDGTAVYGPTIHEMSISSGERYSAIINTTEGKEGDAFWLRTSVALACMSQGSTQVGLAVLRYTGNGNITTAEPRTEAWTDLARHDTPCVGLDEMYALSPREPLNASKTALQSRVLNSKLGTFVDVYGTSFEGYGFNNVTYQNQINDPLLSIVQRGGSCNHSLITNATFPDIGAGNIIINNLDAQIGHPYHIHGNEFQVIGRGFGALTLDDLSNIEFILDNPLRKDTIWMQGGSWLVLRIITDNPGVWACHCHIGWHLAKGKVGCNVTSPTDLFANCFVQMAVVVVQPKAIEDIQWSESWTNLCANTDPNAFGPARRSFP

SEQ ID NO: 17853 - protein, 624 aa, Cryptococcus neoformans var. neoformans B-3501A
MRGLAKLFFLSCSFVSLVSSEKTDESPTAVSDNYMPKATATIDPSVFALSNDFEITDVPTTREYTFDIAKAFASPDGYEREVYVVNNMFPGPVIEANTGDTIIVHVNNHLDEGQSLHWHGLRQLGTAFMDGVPGITQCPIPPGGSFTYNFTVSHQSGTYWWHSHYSNSMADGIWGPLIVHSPNEPLQRGRDYDEDRIVFITDWMHDNSEIIIAALATPEGYKGNIAPPQGDAILINGRGQTNCTATGSSSCFYPPPPEIQVPVNCRVRLRFISATAHPMYRISIDNHPMEVVEADGTAVYGPTVHEISVAPGERYSAIINTNEGKEGDAFWLRTSVALSCMFGAVSQEGLAVVRYTGNGMVSTEEPQTSAWSDLAGVTVPCTGLDQTYTLSPRDSLSAPREPLQSHFFNSERGAFVNVLGNTFQGYGFNNISYQNQIFNPLLSIVQRGGSCENTLVSSRTFPDFGPGNIIINNLDTVIDHPYHLHGNEFQVIGRGTGALSIDNLTNIDFTLDNPVRKDTLWIQGGSWAVLRITADNPGVWALHCHIGWHLTEGKLAVIVVQPSAIGHMESPESWTNLCANTDPNAFGPAKRSSSPSIQSSKTSSFQYLREVKGKVVKRRGAREA

SEQ ID NO: 17854 - protein, 149 aa, Glycine max
  misc_feature (105)..(105): Xaa can be any naturally occurring amino acid
  unsure (1)..(149): unsure at all Xaa locations
MADQLTDEQIAEFKEAFSLFDKDGDGCITTKELGTVMRSLGQNPTEAELQDMINEVDADGNGTIDFPEFLNLMARKMKDTDSEEELKEAFRVFDKDQNGFISAAXLRHVMTNLGEKLTDEEVDEMIREADVDGDGQINYEEFVKVMMAK

SEQ ID NO: 17855 - protein, 248 aa, Mycoplasma hyopneumoniae 232
MNNLFFLSEFLGTAILILLGNGVNYSVNAAKMFANQSGKWIVIALGWALGVLLGIIISNGIIESAPAHLNPAVSIFFGIIFQNSELLALIPFQFLGAIFAQVILNFINWSHIKETKAEIIAACHHTSPAFKKSYISNFFYEFIGTTVLLAAIFLLNKTFSTMKPVIIALIVLSLGLSLGSSTGYAVNPARDFGPRLVYFLFANLVLKRRKEFAAIKNWQEIFGFSYSLNPIIAPSLAGLILGLVIYAL

SEQ ID NO: 17856 - protein, 538 aa, Colwellia psychrerythraea 34H
MWWRGAVIYQIYPRSFYDANQDGIGDLPGIISKLDYIASLGVDAIWISPFFKSPMKDFGYDISDYREIDPIFGTLADFDELVIKAHALGIKIMIDQVLSHTSDQHQWFIDSREDQTNDKADWYVWSDAKEDGTAPNNWLSIFGGTGWTWEPRRQQYYLHNFLTSQPDLNFHNPDVRQAVLDNIEFWLKRGVDGFRLDAINFCYHDAQLRDNPAKAKELRTSIGFDEKNPYAYQYHYYNNTQDENLGFMEDIRTLLNEYPGTVALGEISSEDSLKTMAEYTQGEHRLHMGYSFDLLTDNFSASYIKQVVQNLESRVLDGWPCWSISNHDVERVVTRWGGFNSKDFAKMLYAMISSLRGSVCSYQGEELGLNEADIAFEDIQDPYGITFWPQFKGRDGCRTPHPWQHNAINAGFSEGKPWLPVSNEHFAKSVDVQDDAVDSVLNSYRNFNRWRKDQPALRYGDINFIDTAEPLLAFVRQYQGEQLLVCFNFSEQSQIVALSSLTPASDSLTVLSDHKLISATITDGVLELPPFGCFYSKL

SEQ ID NO: 17857 - protein, 432 aa, Xanthomonas oryzae pv. oryzae KACC10331
MFFKRHPQPPSTVRYVVRRSAMSRRVVVTGMGIVSPLGNDLATSWDGIVHGRSGIGPITQIDASQFTTKIAGEIKNFDPTLFVSAKDVKKMDSFIHYGLGASFMALDDSGLEIDDSNAERVGAILGSGIGGLLGIEEQTIKFHEGGARKISPFYVPSTIINMLPGQVSLIKGLKGPTFSAVSACATSNHSIGTAMRMIQHGDADVMLAGGAERGSSPGSVGGFCAMKAMSTRNDDPTGASRPWDKQRDGFVLGDGAGVLVLEEYEHAKARGARIYAELVGFGASSDAFHMTAPSEDGEGAARSMAAAMRDAKLNPEQIGYLNAHGTSTPLGDLAETIAMKRALGDHAYKTMVSSTKSMTGHLLGAAGGVEAIFSVMALHTGIIPPTINLEEPSEGCDLDYVPNVAREVQVDAVMSNGFGFGGTNGTLVFKRV

SEQ ID NO: 17858 - protein, 446 aa, Colwellia psychrerythraea 34H
MHNKHTMMSPSEQNSLLRFDKENVWHPYTSMSEPLPSYLVDSAEGVTINLASGERLIDGMSSWWSVLHGYNHPKLNAALVEQASKMSHVMFGGLTHQSAITLCEKLINLTPEGLDKVFLSDSGSVSVEVAMKMALQYQHAVAEKKKITLTKTKLLTVKNGYHGDTFAAMSVCDPITGMHQIFEQVLMQHFFAPAPTIKFGEQWSSDDVTELTALFAEHHNDIAAFIIEPIVQGTGGMRFYHPEYLKACRLLCDKYDVLLIVDEIATGFGRTGKLFACEWAGINPDIMCLGKTLTGGYITLAATLCTTHIAQTISEGAAGCFMHGPTFMGNALACAVANASIDLLLENDWQSQVQAIENTLVSHLKPLEKHARVKDTRVLGSIGAIECKQNVNVAQIQKRFVELGVWIRPFGQLIYIIPPLIITTEQLITLVNAMATVLDEDECFKC

SEQ ID NO: 17859 - protein, 568 aa, GIBBERELLA ZEAE PH-1
MSLAQHSESASPVPIIETDDQGNPIKSSNGYFPSKGKSSTLVDNMAHLSVVGGAHRGDDSDAASVRSTSSRASRRPEMKLASYQDEYTTSVYGSRFAGMDLPRHHMPENEMPRDIAYRMIKDDLSLDNNPMLNLASFVTTYMEDEAEKLMAESFSKNFIDYEEYPQSADIQNRCVNMIGDLFHAPPGSSVGTSTVGSSEAIMLGVLAMKRRWKNRRIAEGKSTEHPNIVMSSAVQVCWEKATRYFEIDEKLVYCTPDRFVMDPEQAVDLCDENTIGMCAILGTTYTGEYEDIKAINDLLVERNLDVPIHVDAASGGFVAPFVVPDLEWDFRCEKVVSINVSGHKYGLVYPGVGWVIWRSPEFLPQELVFNINYLGADQSSFTLNFSKGASQVIGQYYQLIRLGKHGYRAIMSNLTRTADYLTETLENMGFVIMSERSGAGLPLVAFRFKTVDEGGDPERHYDEFALAHHLRSRGWVVPAYTMAPNSGVKMLRVVVREDFTKSRCDQLICDVKLCHGLLKETDQESIKKREEYIKNHIVTMGRGKHSHPVYKDEQHSLQGKHGKTHAIC

SEQ ID NO: 17860 - protein, 389 aa, Triticum aestivum
MVSIVQLQRRRTEAAASARGILPDREERMDLSVPRGEFPIPMHAAASPYGGIGGGGVAVADHAMELHHDHANHNGQSQSQAQDMPSPPAAVSEDSSGKKRAAAIAGGAGGPAVKYRECLKNHAAAIGGNATDGCGEFMPSGEEGSLEALKCSACGCHRNFHRKELDDFDGDSCASHGYGYGHHAVRRLLGPAVPHHHKSSGGLLVTADHYGAYAAARALPPPPPPPLGHHHQIIMPLNMIQTSESDEMDGSGGGGIMGDGRGGLASGGGGGSSSSKKRFRTKFTAEQKGRMLEFAENVGWRLQKLDDAMVQHFCQEIGVKRRVLKVWMHNNKHNLASRPLPTSPAQPQSQSMPLAMSMPMPMQVPPSQPGPSGHRGPSSPHAQGELKLD

SEQ ID NO: 17861 - protein, 842 aa, Anabaena variabilis ATCC 29413
MRAVLMAGGSGTRLRPLTCDLPKPMVPILNRPIAEHIINLLKRHHITEVIATLHYLPDVLRDYFQDGGDFGVQMTYAVEEDQPLGTAGCVKNIAELLDETFLVISGDSITDFDLGEAIAFHKQKQSKATLILTRVPNPIEFGVVITDEAGKIKRFLEKPSTSEIFSDTVNTGTYILEPEVLEYLPLNTECDFSKDLFPLLLAKDEPMYGYVAEGYWCDVGHLDAYREAQYDALERKVKLDFAYRENSPGLWIGQNTYIDPSAHIEAPVVIGNNCRIGARVQIEAGTVIGDNVTIGADANLKRPIVWNGAIIGEEAQLSACVISRGTRVDRRAHVLEASVVGSLSTVGEEAQISPGVRVWPSKKIESGAILNINLIWGNTAQRNLFGQRGVQGLANIDISPEFAVKLGAAYGSTLKPGAKVTVSRDQRNVSRMVTRSLIAGLMSVGVDIQNLDATAIPIARTVIPTMGVAGGIHVRVHPDRADYILIEFMDHKGINISKAQEKKIEGAYFKEDMRRALTHEIGDVAYPSQVIDLYCTAFEKLLNVSTLHNSRAKVVIDYVYAVSGAVLPQMLDKFGADAVVLNASLNKNAVTTTDREGLLTQLGHVVEALKANFGVQVSANGEQLILVDESGYPIRGELLTALMVDMILTSNPRGTVVVPVHASSAVEQVARRHDGRIIRTKANATALMEACQKNPNVVLGGSGETGFIFPQLHPGFDSMFCIAKIIEMLTIQERSLATVRSELPRVIYRTHTIRCPWSAKGALMRYLVETHPAQNLELIDGVKIRQPFDDSWLLVLPDASEPLVHLYANSHERDWVDETVRDYRSRVQSFVERQQEYHPAEV

SEQ ID NO: 17862 - protein, 89 aa, Oxalis cf. melilotoides EE190
GINISGTNGEVMPGQWEYQVGPSVGIEAGDHIWASRYILERITEQAGVVLTLDPKPIDGDWNGAGCHTNYSTKSMRDEGGFEVIKKAIL

SEQ ID NO: 17863 - protein, 444 aa, Synechocystis sp. PCC 6803
MITSPTNLNSLPIPPGDFGLPWLGETLNFLNDGDFGKKRQQQFGPIFKTRLFGKNVIFISGALANRFLFTKEQETFQATWPLSTRILLGPNALATQMGEIHRSRRKILYQAFLPRTLDSYLPKMDGIVQGYLEQWGKANEVIWYPQLRRMTFDVAATLFMGEKVSQNPQLFPWFETYIQGLFSLPIPLPNTLFGKSQRARALLLAELEKIIKARQQQPPSEEDALGILLAARDDNNQPLSLPELKDQILLLLFAGHETLTSALSSFCLLLGQHSDIRERVRQEQNKLQLSQELTAETLKKMPYLDQVLQEVLRLIPPVGGGFRELIQDCQFQGFHFPKGWLVSYQISQTHADPDLYPDPEKFDPERFTPDGSATHNPPFAHVPFGGGLRECLGKEFARLEMKLFATRLIQQFDWTLLPGQNLELVVTPSPRPKDNLRVKLHSLM

SEQ ID NO: 17864 - protein, 161 aa, Glycine max
  misc_feature (133)..(133): Xaa can be any naturally occurring amino acid
  misc_feature (142)..(142): Xaa can be any naturally occurring amino acid
  misc_feature (145)..(145): Xaa can be any naturally occurring amino acid
  unsure (1)..(161): unsure at all Xaa locations
MACLMSRTGREMQRYNSSGGRQVVGCIPYRYKEDNDGNVSNELEVLVVSSQKGQALMFPKGGWELDESVEEAASRESLEEAGVTGIVQHELGQWSFISKRLGTYYEGHMFPLLVKEQLDLWPEKDLRRRIWDXLMKPREVCXHWXMKGSITFSLERTLQEK

SEQ ID NO: 17865 - protein, 95 aa, Oxalis humbertii
LYAGINISGTNGEVMPGQWEYQVGPSVGIEAGDHIWASRYILERITEQAGVVLTLDPKPIDGDWNGAGCHTNYSTKRMRDEGGFEVIKKAILNLS

SEQ ID NO: 17866 - protein, 396 aa, Salmonella typhimurium LT2
MFENITAAPADPILGLADLFRADDRPGKINLGIGVYKDETGKTPVLTSVKKAEQYLLENETTKNYLGIDGIPEFARCTQELLFGKGSALINDKRARTAQTPGGTGALRIAADFLAKNTPVKRVWVSNPSWPNHKSVFNAAGLEVREYAYYDAENHTLDFEALQASLSEAQAGDVVLFHGCCHNPTGIDPTLEQWQVLAELSVEKGWLPLFDFAYQGFARGLEEDAEGLRAFAALHKELIVASSYSKNFGLYNERVGACTLVAADAETVDRAFSQMKSAIRANYSNPPAHGASIVATILSNDALRAIWEQELTDMRQRIQRMRQLFVNTLQEKGANRDFSFIIKQNGMFSFSGLTKDQVLRLREEFGVYAVASGRVNVAGMTPDNMAPLCEAIVAVL

SEQ ID NO: 17867 - protein, 552 aa, Enterobacter cloacae
MRTPYCVADYLLDRLTDCGADHLFGVPGDYNLQFLDHVIDSPDICWVGCANELNASYAADGYARCKGFAALLTTFGVGELSAMNGIAGSYAEHVPVLHIVGAPGTAAQQRGELLHHTLGDGEFRHFYHMSEPITVAQAVLTEQNACYEIDRVLTTMLRERRPGYLMLPADVAKKAATPPVNALTHKQAHADSACLKAFRDAAENKLAMSKRTALLADFLVLRHGLKHALQKWVKEVPMAHATMLMGKGIFDERQAGFYGTYSGSASTGAVKEAIEGADTVLCVGTRFTDTLTAGFTHQLTPAQTIEVQPHAARVGDVWFTGIPMNQAIETLVELCKQHVHAGLMSSSSGAIPFPQPDGSLTQENFWRTLQTFIRPGDIILADQGTSAFGAIDLRLPADVNFIVQPLWGSIGYTLAAAFGAQTACPNRRVIVLTGDGAAQLTIQELGSMLRDKQHPIILVLNNEGYTVERAIHGAEQRYNDIALWNWTHIPQALSLDPQSECWRVSEAEQLADVLEKVAHHERLSLIEVMLPKADIPPLLGALTKALEACNNA

SEQ ID NO: 17868 - protein, 127 aa, Brassica napus
MESVKNSDLKSSVNGGVVDVYGEDSATIEHSITPWSLSVSSGYSLLRDPRYNKGLAFSEKERDTHYLRGLLPPAVVDQNLQEKRLINNIRQYQYPLQKYMALTELQERNERLFYKLLIDHVEELLPI

SEQ ID NO: 17869 - protein, 95 aa, Oxalis lucumayensis subsp. lucumayensis
  misc_feature (93)..(93): Xaa can be any naturally occurring amino acid
  unsure (1)..(95): unsure at all Xaa locations
LYAGINISGTNGEVMPGQWEYQVGPSVGIEAGDHIWASRYILERITEQAGVVLTLDPKPIDGDWNGAGCHTNYSTKSMRDEGGFEVIKKAILXLS

SEQ ID NO: 17870 - protein, 525 aa, Brassica oleracea
MKQSSMVHSCSILFRFVVFLISFCIFFVTTSHAQVVHRRLWPWPSIPWPSMPWPYPWPMEPPEPGPPPGPPPGPSPNPGPPSGPSPRPPIPPKPQPKPPPAPGPSACPPIPPKPQPKPPPAPAPSPCPPQPPKPQPKPPPAPAPSPKPGPSPPPPKPPSPVPKPVPPPAPSPKPSPPAPSPKPKPSPPAPLPPKPENKTIPAVFFFGDSIFDTGNNNNLKSKIKSNYRPYGMDFPSRVATGRFSNGKVASDYISTYLGVKEIVPAYLDQKLQQNQLQRSDLLTGVSFASGGAGFDPETSESVEVIPMLDQLSYFQDYIKRVKKLVGKKEAKRIVSKGVAIVVAGGTDLIYTYFGIGAQHLKTDIDSYTTLMADSAASFVLQLYGYGARRIGVIGTPPLGCTPSQRVKDKKICDEEINYAAQLFNSKLAIILDQLSETLRNSTLVYMDIYSIFSKILESPAHYGFEEVKKPCCKIGLTGGGVFCKKKTSKICPNTSSYLFWDGAHPTERAFETLNKKLVKKYLRYI

SEQ ID NO: 17871 - protein, 259 aa, Rhizobium leguminosarum
MQSLENAVQDDDATQEMLSLVLEEPDHWAMFLDIDGTLLNLAPTPDAIEVPEALPGQLHRLSNKLGGALALVTGRSLAYADALFKPFAFPTAGLHGAEIRNAAGMQTVEATAEFQALKHALTEEAEHYPGVLIEDKGAAVAAHYRLAPEYEKVLADRMHHYAELAGPNWALQLGKMVFELRPARSSKGDALERFFQSDPFKNRCPITIGDDLTDESMFAIANARGGVSVRVGAIGAPSCATSRLSSSALVRNVIAALAA

SEQ ID NO: 17872 - protein, 275 aa, Xerophyta humilis
SLQQVEEVKCLLRIIPIWSTGIIYYIAIVQQQTYVVYEALQSDRHLGNTSFLIPAASYSVFAMLAMTIWIPIYDRIIVPRFRKLTGQEGGITLLQRMGVGLVLAIIGMVVSAIIEIQRRSYAIHRPTIGTAPSGGAISSMSSLWLIPQLVILGLSEAFNAIGQIEFYYKQFPENMRSVAGSLFFLGAATANYLSGALIGVVHRVTGRGAGKNWLAGDLNKGRLDYYYFFIAGLGVLNLVYFMMCAKWYKYKEADSSSNAGEISLVDEIISKEPLV

SEQ ID NO: 17873 - protein, 311 aa, Pseudomonas fluorescens PfO-1
MSALSPLSPNTPRIALIGECMIELQQRADGSLQQSFGGDTLNTAVYLSRAMGGKAQVDYVTALGDDSFSDAMCRIWADEGIGLDLVQRLPGRLPGLYCIQTDAAGERRFLYWRNEAAVRDCFTTPASAPILAALADYDVLYFSGITLAVLGALGREKLIETLIEARQRDARIVFDNNYRPRLWASVEEARAAYRSVLPHVDLALLTVDDEQALFHFEDCDAVFAAYAQIGTPEVVLKRGAEACLIRCDGEAFEVPAQKVETVVDTTAAGDSFSAAYLASRLSGASPVRAAEAGHRLASQVIQVPGALIPKD

SEQ ID NO: 17874 - protein, 477 aa, Coxiella burnetii RSA 493
MLRSTKIIATLGPATDDLSILEEIIHEGVDIIRLNFSHGTHEKHKQRIEMVRKAAKKQERVIGILADLQGPKIRISSFKTGKINLKKGELFILDAGLPPEEGTEKSVGIDYKNLPKDVKAEDILLLDDGRLTLKVQNVKGEQIICRVVEGGALSDHKGINRLGGGLSAEAMTEKDINDLKFAVDFDVDYVAISFPRDAQDILKAKHLVQGYKGKAGIIAKIERTEAVKNIDAIIEASDGVMVARGDLAVEIGDAQVPLVQKDIIHRARSMDKPVIIATQMMESMIHATVPTRAEVSDVANAVLDNTDAVMLSAETAVGDYPVLAVAAMARTCVVSESQPRSHISRHRVECRFKRIDEAIAMATMYAANHLDIKAIITLTESGITPLWMSRIRTAIPIYGLSRFDKSLGRMTLYRGVYPIKFDPTQYTRDEINVKAVETLQSQDLLKNGDLVVLTKGDYMGVGGGSNAMKIMVVGKVV

SEQ ID NO: 17875 - protein, 202 aa, Yarrowia lipolytica CLIB122
MNWYVRLLQKYPYRMAVTSTSSLFMIGDCVSQRYFSDKPYEPMRTARAGIYACAFAPAMTAWFRFLGQQQLPVIAKVAIDQAVFAPSSIGYYFSVMGLLEGKSPDTIWQSLKNQYWDTLKCGWMIWPAFQLFNFGIVPPNFRVLASNCCGLVWNTFLAYQNANKMEKGHVADLVIEEVKEEVKEVKQEVLAEVKVIKGFVKQ

SEQ ID NO: 17876 - protein, 219 aa, Magnetospirillum magnetotacticum MS-1
RFVRSVHGSNRLGTNSLLDINVFGKRAGRTAAAYAATASYSELPENPAAAVVAQLEEMRNRPDGERVADVRKALQETMDANAQVFRTGESLNQALADIRDLQKRYKNVSVQDKGRLFNTDLLEAIELGFLLDIAEVTVVAAINRKESRGGHYREDFPDRDDTNYMLHTMAYRRPTSASDVADGHVAGYFDHVEQFDGYKVALGSKPVTQTRYEPMERKY

SEQ ID NO: 17877 - protein, 359 aa, Ralstonia eutropha JMP134
MNANEVSRADDHSVSLFGLGDATPHERVMLVTEEKTGLRAIIAIHSTARGPAFGGCRYWSYGSDLAAMEDALRLSRGMSLKNAMADLPFGGGKAVILRGDGQHERNAMYQAFGRAVQVLAGTYITGEDVGTSVADMLAVREVTPYAAGIPRPDGFGGNPSPKTALGVFAAIERGASHVFGARELSGLRVAVQGLGAVGWALAERLHRAGCKLVVADIDDSRTAAARRAFNAVVVAVDDIATQDVDILAPCALGATLHRQSIPALRARLVAGAANNQLATNGDGDALHERGIAYLPDYLVNAGGIISCVREYQGGFAEADVDAEVLRIANRVDSLFVRASSAGEPLSRAADRWALEKLAS

SEQ ID NO: 17878 - protein, 427 aa, Streptococcus pyogenes MGAS8232
MTHSTKQEHSHSQSAVLGLQHVLSMYAGSILVPIMIAGALGYSARELTYLISTDIFMCGVATFLQLKLTKHTGVGLPVVLGCAFQSVAPLSIIGAQQGSDAMFGALIASGIYVILVAGIFSKIARFFPPIVTGSVITVIGLSLVGVAMGNMGDNVKEPTAQSMMLSLLTIVIILLVQKFTKGFVKSISILIGLVAGTLVSAMMGLVDTTPVVEASWIHVPTPFYFGMPTFEITSIVMMCIIATVSMVESTGVYLALSDLTNDQLDEKRLRNGYRSEGIAVFLGGLFNTFPYTGFSQNVGLVQISGIKTRRPIYYAAGILVGIGLLPKFGAMAQMIPSPVLGGAMLVLFGMVALQGMQMLNRVDFQKNEYNFIIAAVSISAGLGFNGTNLFASLPETAQMFLTNGIVIATLTSVVLNLVLNGKDKQDE

SEQ ID NO: 17879 - protein, 389 aa, Xanthomonas oryzae pv. oryzae KACC10331
MGAHRMNDTVKPGFKPKKSVALSGTAAGNTALCTVGRSGNDLHYRGYDILDLATTSEFEEIAYLLVHGKLPNSGELRGYKAKLRSLRGVPAAVKAALEQLPPSAHPMDVMRTGVSVLGCLQPEKDDHNHPGARDIADKLMASLGSMLLYWYHYSHNGKRIDVETDDDSIGGHFLHLLHGFAPKDAWVRAMHTSLILYAEHEFNASTFASRVIAGTGSDMYSAIAGGIGALRGPKHGGANEVAFEVQKRYDTPDEAEADIKARVERKEVVIGFGHPVYTLSDPRNKVIKDVARELSDEQGSRKMYDIAERLESVMWDIKKMFPNLDWFSAVSYHMMGVPTAMFTPLFVLARTAGWSAHIIEQRVDGKIIRPSANYTGPEDQVFVPLDQRR

SEQ ID NO: 17880 - protein, 255 aa, Ralstonia eutropha JMP134
MHNTAKVAIVTGGSQGIGEAAARRLAADGFRIAVVASSDRAKAGNVAEAINSNGGDAAGFTCDVRDPQAARRLIAEVQNMFGRIDVLVNAAGIFKPTPAGSSDAQQVNQMIDTNLKGTWNTIDAVVPVLKAAGGGRIVNVASVAGVTGFGTYAIYCATKAGIILATRALACELGRENINVNCVAPGNTATAINEDIRNDAAMQGLRDYMTARTPSTRTFSEPEDIAGAIAFLASDAARAMHGSCILMDEGISAGL

SEQ ID NO: 17881 - protein, 558 aa, Bacteroides fragilis NCTC 9343
MCGIAGIFNIKIQSRELRNKALRMARKIRHRGPDWSGMYCGGSAILAHERLSIVDPQSGGQPLYSSDRKQVLAVNGEIYNHRDIRAQYAGRYEFRTGSDCEVILALYRDKGIHFLEELNGIFAFALYDEEKDEYLIARDPIGVIPLYIGKDAEGHVYFGSELKALEGFCDEYEPFLPGHYYHSKEGTMKRWYTRDWMEYKEENDKQADSRSPTRQIQDALENAVHRQLMSDVPYGVLLSGGLDSSVISAIAKKYAAKRIETDGASDAWWPQLHSFAIGLKGAPDLIKAREVAEYIGTVHHEINYTLQEGLDAIRDVIYFIETYDVTTVRASTPMYLLARVIKSMGIKMVLSGEGADEIFGGYLYFHKAPDARAFHEETVRKLSKLHLYDCLRANKSLAAWGVEGRVPFLDKEFLDVAMQLDPEIKMAPGKVIEKKVLREAFADMLPSGIAWRQKEQFSDGVGYSWIDTLKEITATAVSDEQMAHAAERFPIHTPMNKEEYYYRSIFEEHFPSESAARSVPSIPSVACSTAEALAWDTAFKNLNDPSGRAVKGVHEEAY

SEQ ID NO: 17882 - protein, 401 aa, Thermus thermophilus HB27
MPEAWIVEAVRTPIGKHGGALASVRPDDLLAHALSALMDRSGVPKEEVEDVYAGCANQAGEDNRNVARMALLLAGFPVEVAGCTVNRLCGSGLEAVAQAARAIWAGEGKVYIGSGVESMSRAPYAVPKPERGFPTGNLVMYDTTLGWRFVNPKMQALYGTESMGETAENLAEMYKIPREEQDRFALLSHQKAVRAWDEGRFQDEVVPVPVKRGKEEILVEQDEGPRRDTSLEKLAALRPVFREGGTVTAGNSSPLNDGAAAVLLVSDDYAKAHGLRPLARVRAIAVAGVPPRIMGIGPVPATRKALERAGLSLSDLGLIELNEAFAAQSLAVLREWGLDMEDPRLNPNGGAIALGHPLGASGARILTTLVHEMRRRKVQFGLATMCIGVGQGIAVVVEGMG

SEQ ID NO: 17883 - protein, 169 aa, Dehalococcoides sp. CBDB1
MRLTFKHLFRPWITVQYPEEKLAMSKRIRGNQVIWVKETCIACLACARACPVKAINMEVSRGEDRKLKVDHMSIDFGLCIFCGLCVESCPTKNAIYMGCGYETTTYRCTNVEKAEGQSFSECRCRELILTGDELGPSETRVLSGYDRPDAAEKLPLQTLLINKKGYFER

SEQ ID NO: 17884 - protein, 215 aa, Brassica napus
  misc_feature (157)..(157): Xaa can be any naturally occurring amino acid
  misc_feature (198)..(198): Xaa can be any naturally occurring amino acid
  unsure (1)..(215): unsure at all Xaa locations
MGKVAVGATVVCAAAVCAATVYVVRRRMKSCGKWGRVIEILKVFEEDCATPIGKLRQVADAMTVEMHAGLASEGGSKLKMLISYVDNLPSGDEQGFFYALDLGGTNFRVMRVLLGGKQDRVVKQEFEEVSIPPPLMTGASDELFNFIAEALAKFVAXEGRDFHLQAGRQREVGFTFSVPVKQTSLCSGTLINWTKGFXIEDALGKDVVGELIKAM

SEQ ID NO: 17885 - protein, 413 aa, Pyrococcus furiosus DSM 3638
MKAVILAGGFGTRLRPISSTRPKPMVPVLGKPNLQYILEALEKVSEIDEIILSVHYMRGEIREFIQERMVDYPKDIRFVNDPMPLETGGALKNVEDYVSDDFLVIYGDVFTNFDYSELIKAHKENDGLITVALTKVYDPERFGVVIVDEEGKIIDFEEKPRKPKTNLVDAGIYMVNKEVLKEIPKNKEVYFEREILPKFVSQGLVYGYRMPKEYYWIDLGTPEDLFYAHQIALDQLSRENGYMILGENVEIPEDVEVQGPVYIDNNAKIGHGVKIKAYTYIGPNTIIEDKAYIKRSILLGSDIIKERAELKDTILGEGVVVGKNVIIKENAVVGDYARINDNLVIYGAKILPWKKVEEYEAYIRIKLDPTKVRPELTPERCPLGLPECIYKKFKAIAGEKPPCDECIENQWLF

SEQ ID NO: 17886 - protein, 432 aa, Glycine max
MARGKAKKKEEGEDTDVANPETLERKRLKSLAISNKILSETPARSSVHLNPSSVVAKHHGKDIIKKSQRKSCRYLFSFPGLIAPIAGGKIGDLKDLGTKNPVLYLDFPQGQMKLFGTIVYPKNRYLTLQFPKGGKSVMCEDYFDNMIVFSDAWWIGRKDENPEESKLEFPNELYEGHQAEYDFKGGAGAGAASVVNQGVPRTNIQRVEQESPKTPTEDDLSDNEINLKDTKELVPVRHSTRTAKKSYKFAEISSGDDSGENSPELSDDEEKVIQKKTVVFDLDDEDDAPVDQPAKINTESASRSKSKEVSQSASASASTEVKSSNRGSLVQATISTLFKKVEEKTTPRSSRKSPSSKAYGQKSQPAGSKRKIDLDEGSKKRARKTTDKDPGKKIKAKSKEDDVEDGDDDGDDIEEFSNASEDANESDEDWTA

SEQ ID NO: 17887 - protein, 396 aa, Clostridium acetobutylicum ATCC 824
MNYIEEAKVMYDELVAIRRDFHEHPELGFELERTSSKVKEFLKNEGIEYYETAKTGICAIIRGKNTGKTVGLRGDMDALPLMENNENRSYCSKVNGRMHACGHDAHTTILMGAAKLLNKMKDELQGNVKLFFEPAEETTGGAQIMIEEGVLENPHVDAVIGLHVSEDIECGKIGIKKGVVNAASNPFTITIKGRGAHGAHPNAGVDPIVAACNIVNMLQTLVSREISPVNPAVLTIGYIHGGTTAQNVIPEDAKIGGIIRTMKKEDREFAKKRLKEMVEGAATAMRTSASIDIEESYPCLYNDDNMFEMFKSLAKNLLKEENVIALDEPSMGVESFAYFSMERPSVFYYLGARNEEKGIVNPAHGSLFDVDEDCLPIGVALQCKAAVETLERLINK

SEQ ID NO: 17888 - protein, 262 aa, Triticum aestivum
  misc_feature (69)..(69): Xaa can be any naturally occurring amino acid
  unsure (1)..(262): unsure at all Xaa locations
MAPSSPPAAAVAAEGDEQQQQIVVAAAAAAAAKKGGGKRGRREMRRIEDATSRQVTFSKRRSGLLKKAXELGVLCDAEVALIVFSPRGRLYEYASAPDLQKTIDRYLNHTKGTSANEKTVEQPAAGVQMCRSEATALKHKIDAIEAYQRKLSGEGLGSCSAHELQELELQLEKSLSCIRQKKQQKMLDKILELKEKERKLLTENVVLREEYKALPLLELATAAAAERSPDGAGAEEAEEDERRLHYMEVETELVIGRPGSSS

SEQ ID NO: 17889 - protein, 91 aa, Oxalis cf. ptychoclada EE916
  misc_feature (1)..(1): Xaa can be any naturally occurring amino acid
  misc_feature (4)..(4): Xaa can be any naturally occurring amino acid
  unsure (1)..(91): unsure at all Xaa locations
XNIXGTNGEVMPGQWEYQVGPSVGIEAGDHIWASRYILERITEQAGVVLTLDPKPIDGDWNGAGCHTNYSTKSMRDEGGFEVIKKAILNLS

SEQ ID NO: 17890 - protein, 376 aa, Triticum aestivum
MEEMGEESSRYPWQDYDLGFGEELMRELLDQTTTAPSATPTAAGAASADNSSSSDKGIGDEEEGAVGRRESMVNRLMSTVYSGPTLSDIESALSFTGAGAGDLLDGRSKYHYSPSSPVVFSPEKVLGKMENKYTMKIKSCGNGLADDGYKWRKYGQKAIKNSPNPRSYYRCTNPRCNAKKQVERAVDEPDTLVVTYEGLHLHYTYSHFLQQQTTPPPAAAAASSSKKPKLHPAAGAITDSHHGSTPVATTSPPSAAVVPAGAGDSSGDSGGNVIADAGFLLEHAVPNCSPYVFDGGLFGEAGEERRMTSDAGGLLEDMVPLMVRRPSCNSAATTASSSTTVGSPAAPVSSPSPSTSSVSWTPASPYIDMAILSNIF

SEQ ID NO: 17891 - protein, 307 aa, Thermus thermophilus HB27
MVEKPAIALVGESLVDLVLEGESPLAFTGTLGGSVLNTATVLARLGYPVRFFSEVGEDWLSAWSEVEMARRGLNPKLQRHPGPMPLALVRLDPEGNARYSFHRPFQAPFLPESGALRGVGAFHFGSLFALEARTAKGVAALLEEAARAGALLSYDPNLRGLPSPEERARVEAYLGRVDLLKLSLEDARLLFPEAPLEAVRRLPPRLKVLTLGPEGALAFLGEGEVRVPGVRVRVVDTVGAGDTFTAGLLALLLRRGGGRGVLEGLDLEGLREALEAAVALSALACTVRGAGLPEEGLAAWRARWLAG

SEQ ID NO: 17892 - protein, 175 aa, Triticum aestivum
MAPTVMASSATSVAPFQGLKSTAGLPVSRRSNGASLGSVSNGGRIRCMQVWPIEGIKKFESLSYLPPLSTEALLKQVDYLIRSKWVPCLEFSKVGFIFREHNASPGYYDGRYWTMWKLPMFGCTDATQVINEVEEVKKEYPDAYVRIIGFDNMRQVQCVSFIAFKPPGCEESGKA

SEQ ID NO: 17893 - protein, 343 aa, Xerophyta humilis
ETKVIPGKHGFIAQLNEGRHLKKRPTEFRVDRVLQPFDQGKFNFTKVGQEEVLFRFEPSVHGKSNFSESASIDANDTPNVVAINVSPIEYGHVLLIPRVFDCIPQRIDRLSFELAVRMAAEAGSPYFRLGYNSLGAFATINHLHFQAYYLSVALPVEKALTRRIMVARSRDENSWSGVSGILDYPVRGLVFEGQSPSRGLADVVADACVYLQENTFPLMCLCSDLGRRIFLFPQCYAEKQALGQVSQELLDTQVNPAVWEISGHMVLKRRKDYKDASEEYAWRLLSEVSLSEERFEEVKASMFEAVGLTEYEDGGLERVEEAAALQPITPMAVHFPESCLVLQ

SEQ ID NO: 17894 - protein, 664 aa, Coxiella burnetii RSA 493
MPSRRDCANAIRALAMDAVQKANSGHPGMPMGMADIAEVLWRDFLKFNPANLNWVDRDRFVLSNGHGAMLQYALLHLTGAGLTIEDIKQFRQWHSRTPGHPEFGDTPGVETTTGPLGQGLATGVGMAMAEQMLAATFNRENFPIVDHYTYVFAGDGDLMEGISHEACSLAGTWGLGKLIVFYDDNGISIDGEVSGWFTDDTPKRFEAYHWHVVPNVDGHDPDAILKAIEAAQNVTDKPSLICCKTIIGYGAPILAGKAVTHGAPLGEEEVAGVRKILNWPHPPFEIPEEIYAAWDCKEKGEKNETQWNRLFTEYEKQHPDLAKEFRRRQEKELPEQWEQTGKELLATMQASKENNATRKLSLKCLNTFAPLLPELIGGSADLSESNCTKWTGAIIQGQDNRSGNYIEYGVREFAMTAIMNGMALHGGFIPFAGTFLTFSDYARNAVRLAAMMKAHAIFIYSHDSIGLGEDGPTHQPIEQLPSLRMIPGLHVWRPCDGVETAVAWKKIIEEPGANCLLLTRQTVAHQDRDEKQIAQIVKGGYILWESAANPEVILIASGSEVAVTIEAAKALAKENISVRVVSMPCCELFKKQNTDYRNSVLPPNVKKRVAIEAAHPDYWYQFVGYEGLVIGIDRFGASAPWQVVYREYGFTVENILNVVNQLYK

SEQ ID NO: 17895 - protein, 557 aa, Propionibacterium acnes KPA171202
MTTSPTINDWWKSAVVYQVYPRSFADSNGDGIGDVRGIIDHLDHLVTLGVDALWISPWYPSPMADGGYDVSDYCDINPDFGTLADADALVAQAHELGLRVIIDLVPNHSSQEHPWFKKALAAAPGSPERDRYIFRDGRGENGELPPNNWPSVFGSGAWERITEPDGTPGQWYLHFFDVSQPDWNWENSDVLEEFDRVLRFWFDRGIDGFRIDVANSLVKESGLPDLPENEKFGELVGDSPMWDQPELASIQRRWRAIADEYADTPEGPRMFVAEAYLPHDRLVRYLESDRLHTSFNFEFLISAWKANSLRTTITESLAAHESVGASATWVLGNHDNVRPVSRYGKEISGLDFSDPSAPHAQFHGTPTDVALGRCRARAAAMLELALPGGAYIYQGEELGLPEVEDLPEETLQDPTWKRSGHTDRGRDGCRVPMPWSGSNAPYGWSTNANTWLPMPSNWAEWTVESEQNDSSSFFALYRTLLAERHANPALGAGTMTWNESSDEVLDFSREPGFRCIVNFGAEKVTVDADAVIASSIPLDTQGKTVSVGRDQAVWLRV

SEQ ID NO: 17896 - protein, 1629 aa, Pisum sativum
MDVGGDEEFRRCNSNGSGNPQCEPERKKNRKESTSGRKRKAEENSQNGVVDDDGGKGLFDGGSGIFAEGEVNGGVDLGIGSGNFNLWQQGGEGQQLVFGEGSGNLGKFLGDGVDFLGGFVEDRNGVGLGQPWSSVGVFGNAAGVSGVAKEDHGKCVDGVCGNDSLGFHSQGIEGLIGEEEAGFGNLYDRSFQALLCQGKVCDEDVNLIGGGTGFQGLVGESAYDFRGEVGEGVGNLNESGGKFGGEKIVGNVLEAPNSSNKVKAIGVEEGIELLPSGGVSTPNEEARGEVLKPLTRRGGRPKGSKNKKKGVSLALEGKADCGSDNAGAIGMGTVEVLENEKSVFSGKYDGEGVDMGEIARTRECSQLEDLKYTGEIVFAAGYEVAGVSEISRPCKLAPESKGLVNKEKNVEEVSTSSEVAVEIARPKKRGRRKGSTNKMVTYSACSKEGADDIETQGSEEKMLIVPYQKGADGFASPTNKLGPASSTRNKLRSIEFEGYKNPEMSSNVRLEDDGTPSGLEITTLAPLCEMEKGMPFESAKHIENLTTPPIIKRGRPKGSKNKKKELADQEHIGHEGDIIKLIGVENYEATAVSVGDQELVVQTLGQDEVQNVKPKIGRPKGSKNKKKNIDGEAENKLHEKKKRGRPKGSGKKQKENASRLDAEIECENNTRVYGILSTTIQHKHIHEESVLLLEDQVYKKDDADFVPECSKESGIEKIAKGLVSESDNLHKTQDVEVGDIFYEKEVKETRDHGLESDNVHKTQDVEMGDIFYEKEVKETRDHGLESSDMMGDCEAKKEPRNSRCHQCWKKSRTGLVVCSKCKRKKYCYECIAKWYQDKTREEIETACPFCLDYCNCRMCLKKAISTMNGNDEADRDVKLRKLLYLLNKTLPLLQDIQREQRYELEVEASMHGSQLVEEEDIRKAEVDDDDRVYCDNCNTSIVNFHRSCSNPNCQYDLCLTCCTELRIGVHCKDIPASGNEEMVDAPPESIPWRAETNGSIPCPPKARGGCGIATLSLRRLFEANWIDKLTRGVEELTVKYQPPIADLSLGCSECRSFEEDVAQNSARKAASRETGYDNFLYCPDAVEIGETTFQHFQRHWIRGEPVIVRNVYKKASGLSWDPMVMWRAFMGARKILKEDAVNFKAIDCLDWCEVEINAFQFFKGYLEGRRYRNGWPAMLKLKDWPPSNFFEECLPRHGAEFIAMLPFSDYTHPKSGILNLATKLPAVLKPDLGPKTYIAYGTSDELSRGDSVTKLHCDISDAVNILTHTAEVKPPPWQSRIIKKLQKKYEVEDMRELYSHDKTAVGLPRKRGRKRRVGFGVDPKISEKEDTNGRDSTLQGSQGKEEKLDEQESSEPTKIKFDLNASEQEISNSPRFQQFDLNSHDSSFLVPGNDCESMHYDNVQQCSSQGDESYKGISSVIDDQPCSGTKETKIVNKLNSSDDFCQMVETNNIDSVEKDSLSNNSCQDDVHLGTQNGSAVWDIFRRHDVPKLTEYLKKHHREFRHIINLPVNSVIHPIHDQILYLNEKHKKQLKLEYGVEPWTFEQHLGEAVFIPAGCPHQVRNRKSCIKVAMDFVSPENVQECVQLTEEFRLLPKNHRSKEDKLEIKKMALYAADVAVAEANELMGAK

SEQ ID NO: 17897 - protein, 219 aa, Gossypium arboreum
MSMKKEGEILYKKGLWAMEEDKLLIDYVNVHGKGQWNKIANRTGLKRSGKSCRLRWMNYLSPNVKKGDFSEEEEDLVIRLHKLLGNRWSLIAKRVPGRTDNQVKNYWNSHLRKKLGIIDQNKTRIDFCQSSKQVKVCHVDEAATDPSPGHGTTTETTGITVDQSNQQEVIDHRVLNNTTQESMTTESYINTFWIPDHDYELSTLAMIDHFHECSSFHLS

SEQ ID NO: 17898 - protein, 408 aa, Glycine max
MEAAATATATVLAPPSAFLGRPSVLAFRSNLRFSTKLSTSVAISKHGHGRHCVGTRRGFVVRAASFTPESSEPSSKIAPLKLESPIGQFLSQILISHPHLVPAAVEQQLEQFQTDLDGDKQKKEPSASGTDLVLYRRIAEVKAKERKTALEEILYALVVQKFMDASISLIPSLTPNHSGQVDSWPSEDGKLEELHSPEAYEMIQNHLALILGNRLGDSTSVAQISKIRVGQVYAASIMYGYFLKRVVQRFQLERTMKILPNATEENSIQQTVVDDSRIRGGEGHSHVMSHPEVSTLPGGGISSGGFGYGSKVSRLRTYVMSFDSETLQRYATIRSKEALSIIEKHTEALFGRPEIVVTPQGVIDSSTDDNIKISFGGLKRLVLEAITFGSFLWDVESYVDSRYHFVLN

SEQ ID NO: 17899 - protein, 268 aa, Legionella pneumophila subsp. pneumophila str. Philadelphia 1
MNRVALVQMVSSAKIADNLQLTEQYLIEARAQEASLVVLPENFAFMGMNEREKLQIAEYYGQGPIQQRISELARDLRVWIIAGTIPLKSMGSKVRASCIVYDDKGLNVARYDKIHLFDVIVSEQEKHQESLTIEAGKDIALVDTPVGKIGLTICYDLRFPELYQYLTQRGAQLLSVPSAFTAVTGAAHWEVLLRARAIENLCYVLAPNQGGTHENGRHTYGHSMVVEPWGKVLAQKEEGQGVILADIDLERLSQLRRQFPCVEHHVLM

SEQ ID NO: 17900 - protein, 333 aa, Streptomyces avermitilis
MAELFYDADADLSIIQGRKVAVIGYGSQGHAHALSLRDSGVDVRVGLHEGSKSKAKAEEQGLRVVTPSEAAAEADVIMILVPDPIQAQVYEESIKDNLKDGDALFFGHGLNIRFGFIKPPAGVDVCMVAPKGPGHLVRRQYEEGRGVPCIAAVEQDATGNGFALALSYAKGIGGTRAGVIKTTFTEETETDLFGEQAVLCGGTAALVKAGFESLTEAGYQPEIAYFECLHELKLIVDLMYEGGLEKMRWSISETAEWGDYVTGPRIITDATKAEMKKVLAEIQDGTFAQAWMDEYHGGLKKYNEYKTQDENHLLETTGKELRNVMSWVNDEEA

SEQ ID NO: 17901 - protein, 500 aa, Vibrio vulnificus YJ016
MSLMTVSLLFQKEQELATNPLSILFVASEVEGLIKSGGLADVAKALPEALVNLQHDARIAIPAYTAIPNVCDDEVILDTHLETWPHTHYQVKKRFLGDNPVYLIACGHYFDRPSMYAENNQAYTDNGERFAFFSAACLDMLPKIGFQPDIVHANDWHTGLVPFLLKHRYGQDPFFAQTKSILSIHNAVFKGVFHYDEMQCLPEFHCRNVPDAAVSSTHMTMLKAGVMNADKINAVSPTYAEELKTELGSHGMAWEFQQRAGDLVGILNGCDYSAWHPDTDSYLPINYKATKQSMVRGKNGCKRALQEQVGLPVKDVAMFGMVCRLTHQKGVHYLLPVLTEFLKLDVQLVLVGTGDPLLAAQLRDVAAQFGEKFVFVEAYNNQLAHLVEAASDFFLMPSEFEPCGLNQIYSMAYGSLPIVRGVGGLKDSVCDYDVNPETATGFVFYEPTAQALLITMQRALLLYAQNLTELRRVQLYAMERDFCWNKAAEQYVELYRSALK

SEQ ID NO: 17902 - protein, 555 aa, Legionella pneumophila subsp. pneumophila str. Philadelphia 1
MPKESNSNSLFDLLLKNEKNSADRVYLRQPKNGVWHEYTWSSVMLQARKVAGFLHHLGLKKGDHISIISKNCAEWFITDFGIHIAGMVNVPLFANQNEESAHYVLDHGDVKLVFVGKLDDHQRVRQFIPKNYRTIGFDYHKDLQVDYEWSDVLKSDPMINLVEPEPDALYTIIYSSGTSGAPKGAMYTNRSIANYLTVFPKDLLRIRELEHYKLISYLPLAHVYERSAIQLGSVAINASVSFVESLEKFAENLREVSPTFFTAVPRIWGVFKQKIEQKLPPAKLNFLLKIPLISSLIKRKIIHSLGLSECTNCFSGASHLPISIIDFFEKLGIYIQEGYGQSENLAYATLSMLNERKRGYVGTPRLEVEIKVGEENELLMKCPCLMSGYYKNEQATKNAFTEEGWLRTGDVVDVDNEDRVKILGRLSENFKNQTGEFIAPSPIEKLFSVNPMLEQLCLVGRELPNNVLLVTLNEGVRLGMPKEEITHSLQETLKQVNSKLVKYEKVSHILVLKDAWTTENDKLTPTLKVKRRVVEKDYAELIQKALQQSQSIVWE

SEQ ID NO: 17903 - protein, 405 aa, Vibrio vulnificus YJ016
MAGVLGMILAGGEGSRLRPLTESRSKPAVPFGGSYRLIDFALNNFVNADLMRIYVLTQFKSQSLFHHMKKGWNINGITDRFIDPIPAQMRTGKRWYEGTADAIYQNLRFMELSEPEQVCIFGSDHIYKMDIKQMLSFHKEKQAALTVSALRMPLAEASQFGVIEVDAEGRMVGFEEKPSAPKSIPGDPDFALVSMGNYIFEADVLFAELIEDADNENSSHDFGKDIIPKMFPRGDVFVYDFSQNRISGEKAEVYWRDVGTIDAYWQAHMDLLKTDAPFSLYNRKWPLHTYQPPLPPATFTDSDNGRVQIIDSLVCNGSYVRGSRIEKSVLGFRSNIASACDISESILLGDVKVGEGCVLRRVIVDKDVDIAPGTQIGVNLQEDKKVFHVSDDGIVVIPKGARVGY

SEQ ID NO: 17904 - protein, 390 aa, Meiothermus ruber
MRNAPRSVTITQAMHGRLPLTAQTHRRLVVKVGSAVLSGPQGRQHQLAIAAQVAALRAEGREVVLVSSGAQATGMQKLGLTEKPKSMPGKQALAAVGQPTLMLLWEQAFSWYDLKVAQVLLTAEDLAHRHRYLNARQTLETLLEWGIVPIINENDTVMVEEIKFGDNDQLSALIASLVGADLLILLSDIEALYEADPRTHPEAQPIPYVERVDAGVLRMAGDSPNRVGTGGMKSKLLAAEKAQAAGIPHLLLPGTRPQSIAEALQGAPVGTLFAGGQRRYSGRKLWLYQLPKPQGEVVVDAGAAKALRQGGASLLPAGILEVRGQFGVGEAVRCLDEQGNLIGVGLVNYSAAELARIKRRKTREIEALLGYKNTDEAIHRDYFALASELE

SEQ ID NO: 17905 - protein, 465 aa, Glycine max
  misc_feature (366)..(366): Xaa can be any naturally occurring amino acid
  unsure (1)..(465): unsure at all Xaa locations
MEKAISRQKILLHHLNPSSSTHPNESSSLYASACVAGDSAAYQRTSTFGDDVVIVAAYRTAHCKAKRGGFKDTLPDDLLAPVLKAVIEKTNVNPSEVGDIVVGSVLAPGAQRASECRMAALYAGFPETVPVRTVNRQCSSGLQAVADVAAAIRAGFYDIGIGAGLESMTTNPMGWDGSVNPKVKMFEQAQNCLLPMGITSENVAQRFGVSRKEQDQAAVESHRRAAAATAAGKFKDGGEIVPVTTKIVDPKTGEEKSVTISVDDGIRPGTTVSDLGRLKPVFKKDGSTTAGNSSQVTDGASAVLLMKRSVALQKGLPILGVFRTFAAVGVDPAIMGVGPAAAIPVAVKAAGLELDDIDLFEINEAXFASQFVYCRNKLGLDPEKINVNGGAMAIGHPLGSTGARCVATLLHEMKKRGRDCRFGVISMCIAGTGMGAAAVFESGDCADELCNARKVDDLLLSKDAR

SEQ ID NO: 17906 - protein, 410 aa, Campylobacter jejuni
MAKEIIFSDEARNKLYEGVKKLNDAVKVTMGPRGRNVLIQKSFGAPSITKDGVSVAKEVELKDSLENMGASLVREVASKTADQAGDGTTTATVLAHAIFKEGLRNITAGANPIEVKRGMDKACEAIVAELKKLSREVKDKKEIAQVATISANSDEKIGNLIADAMEKVGKDGVITVEEAKSINDELNVVEGMQFDRGYLSPYFITNAEKMTVELSSPYILLFDKKITNLKDLLPVLEQIQKTGKPLLIIAEDIEGEALATLVVNKLRGVLNISAVKAPGFGDRRKAMLEDIAILTGGEVISEELGRTLESATIQDLGQASSVIIDKDNTTIVNGAGEKANIDARVNQIKAQIAETTSDYDREKLQERLAKLSGGVAVIKVGAATETEMKEKKDRVDDALSATKAAVEEGI

SEQ ID NO: 17907 - protein, 381 aa, Picrophilus torridus DSM 9790
MDINDYLIETRRYFHRNPELSFKEYKTAGKIEEELKSMGLRPERITETGIIADIINDKNKKTVAIRADIDALPVTEENDVDYRSLNDGIMHACGHDTHITMLLGAAKMIINDLKNFNGNVRLIFQPAEESPPGGAIEMIKNGALENVDYIIGQHIWGSLDAGKIGIYYHEMMANADQFNIKIHGKGGHGSAPHEAIDTIYISSHLINMLNNIISREIDPQEPAVLTVGKINAGYRYNVIAAHSELSGTVRTFSRDVQEKIKKRIGEILEGLKMIYNINYEYDYEYGYPVLVNNENISKIIEETASSILGNENIVHPKPNMGGEDFAYYLEKVPGAYYVLGGAFPGKHIGNHSPLFNIDESVLYNGALILKESARNILLKNP

SEQ ID NO: 17908 - protein, 212 aa, Erwinia carotovora subsp. atroseptica SCRI1043
MNSIDKTQRITQSDALPGRSTPMPVARLHVVHEHSMTHVPDHMSVAIFAMGCFWGAERLFWQQPGIYSTAAGYIGGYTPNPTYREVCSGQTDHAEAVRVVFDPATISYSQLLQLFWENHDPAQGMRQGGDIGSQYRSAIYTLTPEQEQAAQASLQRFQQAMRENSDGRAISTEIEPAGPFYYAEEDHQQYLHKNPNGYCGLGGIGVCLPPPR

SEQ ID NO: 17909 - protein, 1028 aa, Cryptococcus neoformans var. neoformans JEC21
MSRVPSGSQQPQYTQQPLYHPSSVHSQSTPIQQTHQQYHPHTGQPMTFQGDAHAYSYDRQSQINTWQANPGAAGSMEYHSAVAGSSRGADPYQPYSQSHRSSPSQSVTASRTQPASAQQYTPWAPVQTSATTPSSRGGGVKLEDLMSSDSRAGGKNQPLSGIPLSVSASFDTRSQFSAGPQGASAEKEKDKERDKATQQQGPSEFIKKLYKMLEEEQAQYGNSRTKKGEKGKRGSVGWGANGTSFVVWDMNDFTTKILPQTFRHSNFSSFVRQLNKYGFSKIWEFQHPNFQAGGKSDLESIKRKPVAPKKANNQEGDENSPRHIGLSNEDQTRMHLMEDRINMLEDALAKSRSEADEARMREMAMMGLVRDMIGHIAASESDNLARAYPPEMYHSNIARQPTTMPYTPAQPQSHQSFLNAAYNPAFSGNSVGGAVQAQASPHTDGTGSRGSFSGPSTGEIKPPASSSRLRAASNAGAAPSGSVNASVPLASQPSGNPPAGPVARAEDPAEDVIEIPNQMQDMYGGESVGIAPLFVETPAWLTEGTTVPLTMYRKQSDGQVLKAVYQAFAAGGKLPAGEGQDEDGNAIASGSSTSAAEIMAGSSQMGLQQSYGAGSSTSTGIPLPMDGSPSSESSSRKGKGKKSRGTSLKEQRESKLKPHWAQTPRILVVEDDIVYRTLSKKFLQKFGCETETVENAQGAVDKMNGTKYDLVLMDIFFGPNMDGRKATSLIRQFNNYTPIISMTSNAQPQDVDSYYQSGMNDILAKPFTKNHLFTILDKHLVHLRHAQLYERLIPLGVGVPPLSDQHVQEALAVSAANLQNTNGQLQLENGPTAETQNEQQDSNGELELGIRNPLAGSGWSDEAYQLVLAQFLQTGVMPDITTISAVSSSPNPNGIDGTIGTSIVFGESSGFSRKRSIEAISDDNWDGQAQTSASVQAQAQAQAQAQAQAQAQAQAQAQAQAQAQTQAQAQNTIMQGDQQQGMSLQMPMNVGMGMEVNMGNMPESGMMNQDISNGSDGREAKRARGMAG

SEQ ID NO: 17910 - protein, 259 aa, Triticum aestivum
AGRVWGTILPYSGTFLNFVSYAAGSVRLSALSRVRTIWVATHDSIGLGEDGPTHQPIETLAHFRALPNTMVWRPADGNETSGAYYVCLTSKHTPSIIALSRQNLPQLEGSTIEKAAKGGYVLHEVEGADITLVSTGSEVSIAVDAAKYLEEKKNIKARIVSMPCFEAFDLQDKEYRLSVLPDGVPSLSIEVMSTMGWERYTHEQFGINRFGASGAYKDVYKKFEFTPEGIAKRAVATIDFWKDVPNVRSPINRAFQQII

SEQ ID NO: 17911 - protein, 475 aa, Thermus thermophilus HB27
MEVKEAPTEALIGGAWRRLERRFPVVSPATGERVAEVADCGEEEAREALEEAVLAFPAWSRATAYERAQVLRRWYERILEHQEPLARLMALEMGKPLKEGRAEVAYAAGFVEWYAEEAKRVYGETVPSQFPHKRILVRYEPVGPVYGITPWNFPAAMVTRKVAPALAAGCTFVLKPAEESPLTALYLAKLFLEAGGPPGVFQVLPTSRPAEVSRPFLEDERVRKLTFTGSTEVGVRLYGEAAKTLKRVSLELGGGAPVLVFADADLDRAVEETLRAKFRNAGESCVAANRIFVQAEVAEAFAEAYARRVQALKVGDPLSEETDVGPLVNEAALRKVRTHVEDALAKGARLVAGGEAKGLFFAPTVLLDVKPESLLFREETFGPVAPLTVFREEEEAVRWANGFPVGLAAYVFTRDLSRAFRVAEALEYGIVGVNDGVPSTPQAPFGGVKRSGLGREGGKWGLLEYLEVKYVSLGL

SEQ ID NO: 17912 - protein, 405 aa, Enterococcus faecalis V583
MRNFKKSDKLNNVSYDVRGPVLEEAERMQEEGIRILKLNTGNPAPFGFDAPNEIVRDMIVNVRDSEGYSDSKGIFSARKAIEQYCQLKKFPNVTINDIYTGNGVSELITMCMQGLLNNGDEVLVPMPDYPLWTASVSLAGGTPVHYICDEQAEWYPDIDDIKSKITSNTKAIVIINPNNPTGALYPKELLLEIVEVARQNDLIIYSDEIYDRLVMDGLVHVPIATLAPDLFVVTLNGLSKSHRVAGFRCGWMVLSGDKSRVKGYIEGLNMLASMRLCSNVLSQQIIQTALGGYQSVDGLLLPGGRIYEQREFIYNAINDIPGLSAVKPKAAFYIFPKIDTAKFDIYDDEKFVLDFLHKHHILLVHGGGFNWQQPDHFRIVYLPKMEDLKTTADKMREFLSTYKQK

SEQ ID NO: 17913 - protein, 191 aa, Xanthomonas oryzae pv. oryzae KACC10331
MKSARPRLSDAHGRRNCARRGRRPGHQPFWRLAMNIVRYPQFSTHALQNEIKHVFDRFFEHNSDTDESAVVTAQWVPRVDIKEEPKHFVLYADLPGIDPSQIEVQMDKGILSIKGERKSESSTETERFSRIERRYGSFHRRFALPDSADADGITASGHNGVLEIRIPKRPAATPRRIHVGNGQDTSDSTVQ

SEQ ID NO: 17914 - protein, 401 aa, Campylobacter jejuni
MAKEIIFSDEARNKLYEGVKKLNDAVKVTMGPRGRNVLIQKSFGAPSITKDGVSVAKEVELKDSLENMGASLVREVASKTADQAGDGTTTATVLAHAIFKEGLRNITAGANPIEVKRGMDKACEAIVAELKKLSREVKDKKEIAQVATISANSDEKIGNLIADAMEKVGKDGVITVEEAKSINDELNVVEGMQFDRGYLSPYFITNAEKMTVELSSPYILLFDKKITNLKDLLPVLEQIQKTGKPLLIIAEDIEGEALATLVVNKLRGVLNISAVKAPGFGDRRKAMLEDIAILTGGEVISEELGRTLESATIQDLGQASSVIIDKDNTTIVNGAGEKANIDARVNQIKAQIAETTSDYDREKLQERLAKLSGGVAVIKVGAATETEMKEKKDRVDDALSA

SEQ ID NO: 17915 - protein, 966 aa, Glycine max
MAARNIEKMASIDAQLRLLAPRKVSDDDKLVEYDALLLDRFLDILQDLHGEDIRQTVQDCYELSAEYEGEHKPEKLEELGNMLTGLDAGDSIVIAKSFSHMLNLANLAEEVQIAYRRRIKLLKKGDFADENSAITESDIEETFKKLVAQLKKTPQEIFDALKNQTVDLVLTAHPTQSVRRSLLQKHGRIRNCLTQLYAKDITPDDKQELDEALQREIQAAFRTDEIRRTPPTPQDEMRAGMSYFHETIWKGVPQFLRRVDTALKNIGINERVPYNAPVIQFSSWMGGDRDGNPRVTPEVTRDVCLLARMMAANMYFSQIEDLMFELSMWRCTDELRVRAHELHRSSKRDAKHYIEFWKQIPPNEPYRVILGDVRDKLYNIRERARHLLANGTSDIPEETTFTNVEQFLEPLELCYRSLCACGDRPIADGSLLDFLRQVSTFGLSLVRLDIRQESDRHTDVMDAITKHLDIGSYREWPEEKRQEWLLSELSGKRPLFGHDLPKTEEITDVLETFRVISELPSDNFGAYIISMATSPSDVLAVELLQRECHVKQPLRVVPLFEKLADLEAAPAAVARLFSIDWYRNRIDGKQEVMIGYSDSGKDAGRLSAAWALYKAQEELVKVAKEYGVKLTMFHGRGGTVGRGGGPTHLAILSQPPDTIHGSLRVTVQGEVIEQSFGEEHLCFRTLQRFTAATLEHGMHPPVSPKPEWRALMDEMAVIATKEYRSVVFKEPRFVEYFRCATPELEYGRMNIGSRPSKRKPSGGIESLRAIPWIFAWTQTRFHLPVWLGFGSAFKHVVEKDPKNLQMLQDMYNQWPFFRVTLDLVEMVFAKGDPGIAALFDKLLVSEELRPFGENLRAKYEETKSFLLQVAGHKDILEGDPYLKQRLRLRDSYITTLNVLQAYTLKRIRDPDYHVKLRPHLSKDYMESSKPAAELVKLNPKSEYAPGLEDTLILTMKGIAAGMQNTG

SEQ ID NO: 17916 - protein, 155 aa, Arabidopsis thaliana
MSCSATDLAVLLGPNATAAANYICGQLGDVNNKFIDTAFAIDNTYLLFSAYLVFSMQLGFAMLCAGSVRAKNTMNIMLTNVLDAAAGGLFYYLFGYAFAFGSPSNGFIGKHYFGLKDIPTASADTPTFSTNGPLQSLRLESQVARSLNGHSSWLT

SEQ ID NO: 17917 - protein, 263 aa, Bacteroides fragilis NCTC 9343
MNRINQLFDSNPRDLLSIYFCAGYPTLEGTTEVIRTLEKHGVNMIEIGIPFSDPMADGMVIQNAATQALRNGMSLRLLFEQLHDIRRDVKIPLILMGYLNPIMQFGFDNFCRQCAECGIDGVIIPDLPFKDYQEHFRTIAERYDVKVIMLITPETSEERVREIDEHTDGFIYMVSSAATTGAQQDFDGQKRAYFKKIEKMNLRNPRMVGFGISNEATFRAACENASGAIIGSRFVTLLHEEKNPEKAITRLKAILNLSSNDLR

SEQ ID NO: 17918 - protein, 187 aa, Ustilago maydis 521
MARGSAKKTASGNAFLLRLLRNGFLATNTIYLLVRFWLLRSSVTKRIVFGYVASEAVAVSLWWTLQSMAAQGNDLQQSGLTQYMFDVIYVTWFVQLASLVWSKLWYLYLIIPGYAAYVIYQKILLPYLFRGQSPFGSIQRLLGASGSAAAGATVNAQQQPTETMSKRQQKLQARAAKGDARVQIRKH

SEQ ID NO: 17919 - protein, 91 aa, Oxalis picchensis
INISGTNGEVMPGQWEYQVGPSVGIEAGDHIWASRYILERITEQAGVVLTLDPKPIDGDWNGAGCHTNYSTKSMRDEGGFEVIKKAIFNLS

SEQ ID NO: 17920 - protein, 367 aa, Agrobacterium tumefaciens str. C58
MCFRWQKPRQASRLRIVTYERFVMTKFKLEYIWLDGYKPVANLRGKTQIKEFDEFPTLEQLPLWGFDGSSTQQAEGHSSDCVLKPVAIYPDPARTNGALVMCEVMMPDGVTPHASNSRATILEDEDAWFGFEQEYFFYQDGRPLGFPEQGYPAPQGPYYTGVGFKNVGSVAREIVEEHLDLCLEAGINHEGINAEVAKGQWEFQVFGKGSKRAADQIWIARYLLLRLCEQYGIDVEFHCKPLGDTDWNGSGMHCNFSTKFMREVGGKDYFEALMAAFAKNWQEHIDVYGPDNHLRLTGKHETAPWNKFSYGVADRGASIRVPHSFVNNGYRGYLEDRRPNSQGCPYQIASVVLKTIAEVPLAKSAAA

SEQ ID NO: 17921 - protein, 235 aa, Arabidopsis thaliana
MADEVTIGFRFYPTEEELVSFYLRNQLEGRSDDSMHRVIPVLDVFEVEPSHLPNVAGVRCRGDAEQWFFFVPRQEREARGGRPSRTTGSGYWKATGSPGPVFSKDNKMIGAKKTMVFYTGKAPTGRKTKWKMNEYHAVDETVNASTIPKLRREFSLCRVYITTGSSRAFDRRPEGVLQTERMLTSDVAVAETSFRVESSLETSISGGEHIDVSMNTEFVDGLSEPMWDWEQLTWP

SEQ ID NO: 17922 - protein, 311 aa, Thermotoga maritima MSB8
MGSDKIHHHHHHMFLVISVVGSSNIDIVLKVDHFTKPGETQKAIEMNVFPGGKGANQAVTVAKIGEKGCRFVTCIGNDDYSDLLIENYEKLGITGYIRVSLPTGRAFIEVDKTGQNRIIIFPGANAELKKELIDWNTLSESDILLLQNEIPFETTLECAKRFNGIVIFDPAPAQGINEEIFQYLDYLTPNEKEIEALSKDFFGEFLTVEKAAEKFLELGVKNVIVKLGDKGVLLVNKNEKKHFPTFKVKAVDTTAAGDVFNGAFAVALSEGKNPEEAVIFGTAAAAISVTRLGAQSSIPAREEVEAFLKNL

SEQ ID NO: 17923 - protein, 875 aa, Pseudomonas putida KT2440
MTDIDVRLREDVHVLGELLGETIRQQHGDAFLQKIEDIRHSAKADRRGPGEQLSSTLADLAEEDLLPVARAFNQFLNLANMAEQYQLIRRRDADQPEPFEAQVLPELLGRLKQAGHSNDALARQLAKLDIQLVLTAHPTEVARRTLIQKYDAIAGQLAAQDHRDLTPAERQQVRERLRRLIAEAWHTEEIRRTRPTPVDEAKWGFAVIEHSLWHAIPSHLRKVDKALLEATGLRLPLEAAPIRFASWMGGDRDGNPNVTAAVTREVLLLARWMAADLFLRDIDALAAELSMQQANDTLRKQVGDSAEPYRAVLKQLRDRLRATRAWAHSALTSNQPAGADVLVDNRELIAPLELCYQSLHECGMGVIAEGPLLDCLRRAVTFGLFLGRLDVRQDAARHRDALTEITDYLGLGRYADWDEEQRIAFLQAELKNRRPLLPAHFKPQADTAEVLATCREVAAAPAASLGSYVISMAGAASDVLAVQLLLKEAGLTRPMRVVPLFETLADLDNAGPVMQRLLGLPGYRAGLRGPQEVMIGYSDSAKDAGTTAAAWAQYRAQENLVRICAEHQVELLLFHGRGGTVGRGGGPAHAAILSQPPGSVAGRFRTTEQGEMIRFKFGLPGIAEQNLNLYLAAVLEATLLPPPPPQPAWREVMDQLAADGVQAYRSVVRENPDFVEYFRQSTPEQELGRLPLGSRPAKRRAGGIESLRAIPWIFGWTQTRLMLPAWLGWETALTNALARGQGELLAQMREQWPFFRTRIDMLEMVLAKADAQIAEAYDERLVQPHLRPLGAHLRDLLSQSCQVVLGLTGQPVLLAHSPETLEFISLRNTYLDPLHRLQAELLARSRSREAALDSPLEQALLVTVAGIAAGLRNTG

SEQ ID NO: 17924 - protein, 352 aa, Glycine max
MAPSFDFASSLLCTEDSTVFDESHNNGGTMMTAMGVYEDTRSPRRRHFDEEPDELPLLSDESLVMMVEKECQHWSGLRYLNKFQTGDLDFGARMEAIDWIHKVRSHFGFGPLCGYLSINYLDRFLFAYELPKGRVWTMQLLAVACLSLAAKLDETEVPLSLDLQVGESKFLFEAKTIQRMELLVLSTLKWRMQAITPFTFLDYFLCKINDDQSPLRSSIMRSIQLISSTARGIDFLEFKPSEIAAAVAMYVMGETQTVDTGKAISVLIQHVEKERLLKCVQMIQELSCNSGSAKDSSASVTCLPQSPIGVLDALCFNYKSDDTNASSCVNSSHNSPVAKRRKLNKTCGAEQL

SEQ ID NO: 17925 - protein, 442 aa, Corynebacterium efficiens YS-314
MVDMSASPSGTSANVSRSIEWFEKAKMFTPGGVNSPVRAFGSVGGQARFIDRAHGSTLIDVDGNEYVDLVCSWGPMLMGHAHPAVLEAVQKTIVDGLSFGAPTIGEVELAQDIINRTSVEEVRLVNSGTEATMSAVRLARGYTQRPKILKFDGCYHGHVDSLLASAGSGVATFALPDSPGITGAQTRDTIVVPYNDIEAVRAAFAEFPGQIACIISEAAAGNMGTVAPQDHFNEHLLAIAHADGALLILDEVMTGFRTSYRGWFGVDKVRADLVTFGKVVSGGLPAAAFGGRAEIMNMLAPQGPVYQAGTLSGNPVAVAAGRASLSAATEEVYRTIDANADRLHGLISDALTREGVAHHIQRASNMLSIRFAEGEGHNFTDMKNADTFRFAPFFHALLDHGVYAPPSVFETWFVSSALTDDDFQKIDDALVPAARAAAAATA

SEQ ID NO: 17926 - protein, 607 aa, Kineococcus radiotolerans SRS30216
MPVREVPRTAGEDPGTPPPRREEVRRVLRLFRPHTRPLGLVGVLIALSAVAGVASPFLIREVVDVALPRGDLRLLAWLAAGLIGIVVATTALDVLQSLLTTRVGQAVMHGLRTALYSHLQRMSLGFFARTRTGEVQSRIANDIGALQTVVTSTGADLVQNLATVVVTVVAMLALDWRLALFSFVVLPFSVWLNRRVGRLRRRITAQRQRQLAEMSATVEETLSISGILLTRTTGRTPEVVERFTRQSDDVARLEVGSEMAGRWQWSLITLTMAAVPALTYLLGGWIRGTGTALSIGTLVALVTLQAQLFRPLGALLRIVVRLHASMALFTRVFEYLDTPVEVAERPGAVDLPRPRGHVRFAGVSFAYPGAGQDTLTGIDLDVPAGTSLAVVGTTGSGKTTLGYLLARLYDVDSGAVLLDGHDVRDLTARSLSDAVGVVTQETFLLHASVADNLRFAKPDATDEELRRAARAAQVDDVLSALPQGYDTVVGERGYRFSGGEKQRIALARTVLRDPPVLLLDEATSALDTRTERAMAAALAELSSGRTTVTIAHRLSTVRDADQIVVLDRGRVAEVGTHAELLARGGRYAGLVAADAARAEPLEQPAGS

SEQ ID NO: 17927 - protein, 436 aa, Schizosaccharomyces pombe
MPVFMFDEHDNLNENYNSHLSSDDEIAEEGYDFEELEASASTITSSSDLKDGKNAKDEKGTVEFKVAAHGDFISSKGDNYVPSGKMRPADFQPLTVLGRGSYGKVLLVKQKNTGRLFAQKQLKKASIVLRAKGLEQTKNERQILEEVRHPFICRLYYAFQDHDRLYLILQYAPGGELFSHLAEQRMLPEDVVAFYTAELTLALIHLHKLGIVYRDLKPENCLLDAEGHILLTDFGLSKVAENGADCRSFVGTEEYCAPEILLEQPYDHAVDWWSMGILIFDLLTGSPPFTANNHKRIMEKITRAKPNIPFYVTSDARDIINKFLKKNPKQRLGADGPEKGYDAIKKHRIYRRIDWNKLEKRMLPPPIVPCITNPEAAENFSVEFTKLPLSTTPILHEEFGNLTIGSHSSAFQGFTYVASPNFLNCEFLSNNAVSNH

SEQ ID NO: 17928 - protein, 91 aa, Brassica napus
MGSTPAEVPCDVVSDNRSGLGGGISDVYGEDLATLDQLVTPWVSSVASGYSLMRDPRYNKGLAFTDKERDAHYLTGLLPPVVLSQEVQERK

SEQ ID NO: 17929 - protein, 138 aa, Calycanthus floridus var. glaucus
MTKSIPRIGSRRGGRIASRKNARRIPKGVIHVQASFNNTIVTVTDVTGRVVSWSSAGTCGFRGTRRGTPFAAQTAAANAIRTVIDQGMQRAEVMIKGPGLGRDAALRAIRRSGILLSFVRDVTPMPHNGCRPPKKRRV

SEQ ID NO: 17930 - protein, 159 aa, Zea mays
PVACAETGVTLISPFVGRILDWYKKSTGKEYTAETDPGVKSVQRIFNYYKQHGYNTIVMGASFRNTGEITELAGCDYLTIAPKLLEELKNSDAKVPKKLDAAPADQAKEEKVSFVDNEAAFRWELFNDPMAFDKLHEGIRGFAKDGDACKEMLREKLRA

SEQ ID NO: 17931 - protein, 397 aa, Bordetella parapertussis 12822
MSKLDSLFTAALEQAAQRQVRRRLRRATAAPPGRLALDGRTLVNFSSNDYLGLARHPLLAERASLWATRHGAGAQASRLVCGNLDLHEQVEAKLARLKGTEAALLLASGWQANAAVLPALFKAAAAQGEPQVYTDRLNHASLHHGCQAAGVRQIRFRHNDLAHLEHLLAERAGAPGARFIVTESVFSMDGDRADVPALAALAARHHTFLYLDEAHATGVLGPRGMGLAGLAPGGVDLAMGTFSKGLGSFGAYVAGSRALCDYLVNACSGFIYTTALPPAVLGAIDAALDLVPRLDQARAALLGHGERLRASLAAQGIDCGASSTQIVPAIVGDAGHALALAAELERRGLLAVAIRPPTVPAGTSRLRIALSAAHGETELDQLIEALAAGWRAVRQAA

SEQ ID NO: 17932 - protein, 555 aa, Erwinia carotovora subsp. atroseptica SCRI1043
MSENYTVGDYLLDRLTQIGIQHLFGVPGDYNLHFLDHVIRNPDITWVGCANELNAAYAADGYARCRPAAALLTTFGVGELSAINGIAGSYAECLPVIHIAAAPCLASQRNGELLHHTLGDGDFSHFSRMAAEVTVAQASLTVENATAEIDRVIGEALAQHKPVYLFLPVDVAAAPVGARPYPLVIPEPLHSDDSLRAFTTAATDMLSKAKSVSLLADFLAQRFSLAGKIQRWLDKTPLPHATLLMGKGTLNEQHRSFTGTYSGSGSHESIRAHIEDADAIISIGVRYTDTITTGFSHQIPIEKNIDIQPTLARVGNQVFPSVPMSDAIAVLEKITEKFASRWDHCTITPPVLPQSEHRSALSQREFWQQIQRFLRPDDILVTDQGTSCFGAATLRLPAGCHFIVQPLWGSIGYSLPAAFGAQIAEPERRVVLLIGDGSLQLTVQELGSIIRDRLNMVIVVLNNEGYTVERAIHGSEQRYNDIAAWNWTQLPTALGANENEILCKQVRSPIALAQVLEQVNAESRLSLIEVVLPRMDIPALLHTITQSLETRNTVQ

SEQ ID NO: 17933 - protein, 630 aa, Dehalococcoides sp. CBDB1
MAEVDTIPKLVKHNAEQWGDKPAMCMKNLGIWQKYTWSDYYQTVKYFGLGLLSLGTKPSDRVAIIGDNEPEWFWAEFAAQSIGAIPTGIYVDSIPDEVKYIASHAEVRVAVVNDQEQADKFLELLPELPNLIKIIYWDPKGLKNYDDPMLVSFKEVIKLGREYEKANLDLFERLLDTTKPDDIAFVYYTSGTTGLQKGAMLSHRSLITTAKGFVARYPLSYKDDLISNFPASWVGDSFFATIPHILSGARLNFPEEPETVAEDTREIGPNFVIYGPRQWESLVSEIQVKIMDAHPLKRLAYKVLSPVGYKMAEKTLTGGKPGLPLMVGHKIADALLFHPLKDKLGVSKVRFGVTGSSVLSLDTFKMIHSMGIELRQNYASTEAGFISSHGKGDISFESVGRPALGTEVRLTDEGELLIRSDCMFSGYYKDPERTAQSFRDGWFATGDAVNINEKGHLIFLDRLKDLGVLANGIKYAPQYIEGRLRFSPYIKDAMVVGGEDKEYVTAIINIDFTMVSKWAQKNRLNFTTFVDLSQKNEIADLVAKDLMRVNSYLPEGSRVRKFVLLHKEFDPDEAELTRTRKLRRGFVSERYKDLIDAMYHLNKEVKVEAAVTYRDGRKGVVTTSIKVRSL

SEQ ID NO: 17934 - protein, 343 aa, Bradyrhizobium sp. BTAi1
MRAVVIHAPKDLRIDSFPDPAPGAGEVRVKIEAGGICGSDLHYYHHGGFGTVRIKQPMALGHEIAGVVAAVGAGVSGLSEGTRVAVNPSLPCGQCAYCREGLRNQCLDMRFMGSAMRDPHIQGGFREYVTVDAAQAVPIAPSLSLGEAAMAEPLSVCLHAAHQAGSLLGKRVLVTGCGPIGALSILVARYGGAAEIVTTDVADAPLAVAGRLGASHAFNVGTEPSALDPWRAGKGQFDVLFEASGNQSALRSALDVMRPGGVIVQLGLGGEMTLPLNTLVTKELQLRGTFRFDREFELALRLMGEGLLDVKPLISATLPFQEAIAAFELASDRSRSMKVHLTF

SEQ ID NO: 17935 - protein, 299 aa, Bradyrhizobium sp. BTAi1
MVEFAQEDGSLFRRGFGGDTLNTALYLARLGVPTSYVTALGDDPLSAMMLAAWQAEGINTAEVLRVDGRVPGLYMIERDAKGERSFLYWRDRAPARELFDRADPAMLDRLSRFDLIYLSGISLSLYSETGKAKLRELLTVARKRGARVAFDGNYRPRGWPSREAAQRAFRAILPLVDLALPTLEDEQMLFGDSDVSVSLRRFKDAGVREIVVKRGARGCLIDADGVLVDITPPQVMQPVDTTAAGDSFNAAYLAARLNRVPPRKAALAGHRLAGAVIMSPGAVIPRAAMPKDILVQSET

SEQ ID NO: 17936 - protein, 127 aa, Dehalococcoides sp. CBDB1
MTLYFEKVMEYFVNPLNSGEMENPDGIGRAGNAVCGDVTEFYIRVKDNRLVEVKFKTYGCGAAVAISSLVSLMATGKTIEEAMKIDNKAVEAEIKGLPQNRNHCSQMGPQALHSAIADYKIKVQARG

SEQ ID NO: 17937 - protein, 92 aa, Oxalis oblongiformis
  misc_feature (91)..(92): Xaa can be any naturally occurring amino acid
  unsure (1)..(92): unsure at all Xaa locations
GINISGTNGEVMPGQWEYQVGPSVGIEAGDHIWASRYILERITEQAGVVLTLDPKPIDGDWNGAGCHTNYSTKSMRDEGGFEVIKKAIFNXX

SEQ ID NO: 17938 - protein, 481 aa, Allium cepa
MPIYTSRSCFYLLLFHIILLCSVDKTLCRQTSSFVRSEFPAVDIPIDSKEFAVPKNQFSPQQVHITQGDYDGKAVIVSWVTFIDPGKSEVVYGTSPNSYDHSAQGKTTNYTYYDYTSGYIHHCLLDKLEYDTKYYYKIGKGDAAREFWFHTPPQIHPDASYTFGIIGDLGQTYNSLSTLEHYMKSKGQTVLFVGDLSYADRYSCNNGTRWDSWGRFVERSVAYQPWIWTVGNHEIEYRPDLGEVFPFRAYLNRYPTPHLASASSSPLWYSIRRASAHIIVLSSYSPFVKYTPQWLWLSEELTRVDREKTPWLIVLMHAPLYNSNEAHYMEGESMRVAFESWFVQYKVDLVFAGHVHAYERSYRISNIVYNITSGNRYPIPDKSAPVYITVGDGGNQEGLAERFSESQPDYSAFRESSYGHSTLELRNRTHAFYQWNRNDDGKHIPVDRIIFRNQYWASNTRRRRLKKTRPSQAVERLISSY

SEQ ID NO: 17939 - protein, 162 aa, Dehalococcoides sp. CBDB1
MTLERWQPGWSLRPWRPFREVLSPGLWNMLTNERDWLPATEMVELKDKYLIKAEMPGINEEDIEVSVSDNVLSIKGEKKCDCEISEENYYFSERSYGSFSRSMTLPNNTDPQNIAATLDNGILEITIPKSSEAKPKKVSVIKAAKPKKTDLNTQSIKPKAQS

SEQ ID NO: 17940 - protein, 437 aa, Nocardioides sp. JS614
MTSEPLTSVLAGLSRVRSWQEECYRDLHAHPELSHQETRTAGVVADRLRQDGCDVHEGVGGTGVVGVLSNGGGPTVLLRADMDALPVREATGVPYASTAVATDADGAVVPVMHACGHDVHVACLLGAVSLLAAARDAWHGTVVAVFQPAEEVADGARGMVDDGLVGLVDGAGVGRPQVALCQHVLPLPTGQVATRVGPTLSAADSMRITVHGRGAHGSMPQASVDPVVLAAMIVVRLQTVISRETQPGEPAVLTVGSLQAGTKSNVIPDHAVIALNVRTYHEHTRTAILDAIRRIVVAECEASGSPRPPEFELFDRFPLTDNDPDVTERVAAAFRRRFGDDAVELPLQTASEDFTDLPNAFAIPYTYWGIGGIDRDLYERARSAGRIAQDVPVNHSAAFAPVLQPTLDTGTTALVTAALEWLAPASIVETPDGVAGR

SEQ ID NO: 17941 - protein, 472 aa, Clostridium acetobutylicum ATCC 824
MQKTKMIFTIGPSSDSEEKLKELMNAGMNAARLNFSHGTHEDHKEKIDIIKKLRKELNKNVAIVVDIKGPKIRTHNFENDKAEIKKGQTFTVMCGSEILGNSEKCSVSYDDLYKDVKKGGLLLVDDGLLEFEITDVQDKNIICKAKNNGIISNHKGVNVPGVSIGLPAVTEKDVLDLKFACKMQADLVAASFIRKAEDVSVVRKVLKENGGEDIRVISKIETQEGVDNIDKILELSDGIMVARGDMGVEIPIEDVPSIQKMIIRKCNDAGKIVITATQMLDSMIRNPRPTRAEASDVANAIYDGTDAIMLSGESASGLYPIEAAETMAKIAQKTESQIDYTKALNERKGEIITKISDAISLAACSTAAELKAAAIITATQSGITARMVSKFRPTCPIIAVTPHDDVARRLALNFGITPITSEKVVSTDELISVSIKRALNENLIKKGDLVVVVAGVPVGESGTTNMLKIQYT

SEQ ID NO: 17942 - protein, 415 aa, Nocardioides sp. JS614
MARISRKNVLVICLAGGEGKRLMPLTADRAKPAVPFAGIYRLIDFALSNVVNSGFLKVVVLTQYKSHSLDRHVTQTWRMSTMLGNYVTPVPAQQRVGKHWYLGSADAIYQSLNLMRDERPDYVVVVGADHVYRMDFYQMVKAHAESGAACTVAAIRQPIELADQFGVIDVHPDDPSRIREFLEKPTDPVGLPDSPGEVLASMGNYVFDADALVEAVTRDATEIGSKHDMGGDIVPAFVRRQQAAVYDYKDNDVAGSTDRDRGYWRDVGTLGSYYAAHMDVVSPLPVFNLYNFDWPIYTSYGPQPPAKLVQGASGDLPGVDEAVLSPGVVVTGGQVQRSVLSPSVRVDTGAEVTGAVLMNGVYVGAGAVVRNAILDKNVVVPPGAQIGVDPEADRARGFVVEDGLTILGKDQAFPT

SEQ ID NO: 17943 - protein, 403 aa, Zymomonas mobilis subsp. mobilis ZM4
MQVTDLFSKFDPLIAIRKEMLSHGGRDPFAVVMEKVLSPTKAIIKGKPVILLGTYNYMGMTFDPDVIAAGEKALKEFGAGTTGSRVLNGTYQGHKACEEALKDYYGMEHAMVFSTGYQANLGMISTLAGKGEYVIIDADSHASIYDGCRLGNAEIIRFRHNSPEDLDRRLARLPKEAGKLVVLEGVYSMLGDIAPLAEMVAIAKKHDALILDDEAHGMGFFGKNGRGVFEELGLEGQIDFIVGTFSKSVGTVGGFCVSNHPQFEVLRLVCRPYVFTASLPPSVVATAEASIRKLQKANDKREHLWKNSRRLHGGLKEMGFKLGTETAQSAIIAVILPDQEQAVAMWQNLLELGLYVNLARPPATPAGMFLLRCSLCAEHSDDDVTEILAMFKKAGQATGVLAA

SEQ ID NO: 17944 - protein, 676 aa, Corynebacterium glutamicum
MDTKAVDTVRVLAADAVENCGSGHPGTAMSLAPLAYTLYQRVMNVDPQDTNWAGRDRFVLSCGHSSLTQYIQLYLGGFGLEMDDLKALRTWDSLTPGHPEYRHTKGVEITTGPLGQGLASAVGMAMAARRERGLFDPTAAEGESPFDHHIYVIASDGDLQEGVTSEASSIAGTQQLGNLIVFWDDNRISIEDNTEIAFNEDVVARYKAYGWQTIEVEAGEDVAAIEAAVAEAKKDTKRPTFIRVRTIIGFPAPTMMNTGAVHGAALGAAEVAATKTELGFDPEAHFAIDDEVIAHTRSLAERAAQKKAAWQVKFDEWAAANPENKALFDRLNSRELPAGYADELPTWDADEKGVATRKASEAALQALGKTLPELWGGSADLAGSNNTVIKGSPSFGPESISTETWSAEPYGRNLHFGIREHAMGSILNGISLHGGTRPYGGTFLIFSDYMRPAVRLAALMETDAYYVWTHDSIGLGEDGPTHQPVETLAALRAIPGLSVLRPADANETAQAWAAALEYKEGPKGLALTRQNVPVLEGTKEKAAEGVRRGGYVLVEGSKETPDVILMGSGSEVQLAVNAAKALEAEGVAARVVSVPCMDWFQEQDAEYIESVLPAAVTARVSVEAGIAMPWYRFLGTQGRAVSLEHFGASADYQTLFEKFGITTDAVVAAAKDSINS

SEQ ID NO: 17945 - protein, 389 aa, Candida tropicalis
MQLIFFLVGLVVPFISALVLNAGSNFDDDNDRSGIISLDFQVHQVPSNRKRGFYRTQDLINQQIYYTADIFVGSNKQKQSVLVDTGSSDLWIIDSNSCSSITEQCKESGVYNPRTSKSSVNLTTPFSISYLDQSSAEGHWFLDKVKIAGATIKNQQFANAHTITQGIGGDIVCGGTLGLGFKGNEVADTEYDNVPITLKKQGFIKKSAYSIYLNSVSAQKGSILFGGIDHAKYTGELIAQPIAVEDYLALVLGSVKVNDEIFNVHQPALLDTGSSWTYLPQEIADTIADNLNATWISSEDNEYYSVRCDNVIGNITYTFDAGASITVQFADLVFRDTDGNCHLGIGRAPYFILGDNFLRSAYAVFNLDDKTISLAQIKYTNKCKIRAIM

SEQ ID NO: 17946 - protein, 342 aa, Zea mays
MERYEVIRDIGSGNFGVTKLVRDVSTKELFAVKFIERGQKIDEHVQREIMNHRSLKHPNIIRFKEVVLTPTHLAIVMEYAAGGELFERICSAGRFSEDEARFFFQQLISGVSYCHSMQVCHRDLKLENTLLDGSVAPRLKICDFGYSKSSVLHSQPKSTVGTPAYIAPEVLSRKEYDGKVADVWSCGVTLYVMLVGAYPFEDPDDPKNFRKTITRILSVQYSIPDYVRVTMECGHLLSRIFVGNPEQRITIPEIKKHPWFLKNLPIEMTDEYQQSMQLADMNTPGQSLEEVMAIIQEARKPGDAMNLAGQLPCLGSVDLDDIDFDDIDDIDTENSGDFVCAV

SEQ ID NO: 17947 - protein, 394 aa, Candida tropicalis
MFLSQLVVFLVFGLLVTASPTTSPPGFISLDFVIIKTQKNIVPNENIIVSKRQPVPVTLIKEQIAYAAEITIGSNNQKQTVIIDTGSSDLWVVDKNATCVRRFEQQVQDFCKANGTYDPITSSSAKKLGTVFDISYGDKTNSSGNWYKDTIKIGGITITNQQFANVKSTSVAQGVMGIGFKTNEASNVTYDNVPITLKKQGIISKSAYSLYLNSSDSTTGEIIFGGVDNAKYTGKLIDLPVTSNRELRIYLNSLTIGVTNISASMDVLLDSGTTFSYLQQDVLQHVVDKFNGQLIHDALGNPLHLVDCDLPGNIDFEFSNSSKISVPSSEFAVKLYTINGELYPKCQLSILTSSANILGNNFLRSAYIVYDLEDKKISLAQVKYTSKSNILPLT

SEQ ID NO: 17948 - protein, 582 aa, Mycobacterium avium subsp. paratuberculosis
MLGRDGEARLCRRPTAAAWSSVAGTAPGQDVSSPIRRNHFAMAKTIAYDEEARRGLERGLNALADAVKVTLGPKGRNVVLEKKWGSPTITNDGVSIAKEIELEDPYEKIGAELVKEVAKKTDDVAGDGTTTATVLAQALVREGLRNVAAGANPLGLKRGIEKAVEKVTETLLKSAKEVETKDQIAATAAISAGDQSIGDLIAEAMDKVGNEGVITVEESNTFGLQLELTEGMRFDKGYISGYFVTDAERQEAVLEDPFILLVSSKVSTVKDLLPLLEKVIQAGKPLLIIAEDVEGEALSTLVVNKIRGTFKSVAVKAPGFGDRRKAMLQDMAILTGGQVISEEVGLSLESADISLLGKARKVVVTKDETTIVEGAGDSDAIAGRVAQIRTEIENSDSDYDREKLQERLAKLAGGVAVIKAGAATEVELKERKHRIEDAVRNAKAAVEEGIVAGGGVALLHAIPALDELKLEGEEATGANIVRVALERPLKQIAFNGGLEPGVVAEKVRNSPAGTGLNAATGKYEDLLKAGITEPVKVTRSALQNAASISGLFLTTEAVVADKPEKTAPPAGDPTGGMGGMDF

SEQ ID NO: 17949 - protein, 432 aa, Zymomonas mobilis subsp. mobilis ZM4
MLKAFCQGEKSNMRRVVATGLGMVTSLGGDVETTWSNILASKSGAGRITRFDPEGFACTVACEVKPADHEYGFDPSKRVDSKTIRQVEPFIIYGIDAAGQALEDAGLMDMSEEEKLRTGLSIGAGIGGLPRIEKESIICHEKGPRRVSPHFVHASLINLTAGQVSIRYGLKGPNHAVVTACSSGCHSIGDASWMIRMGYADVMVAGGSESAICPLGIAGFSQAHALSTGHNDTPEKASRPYDKGRDGFVMGDGAGIIILEEYEHAKARGAKIYGEIIGYGMTGDAYHVTAPQPDGDGAYRSMKMALEQANLTTADIDYINAHGTSTPMGDEIEANAVRRLFGDDIKNMSMSSTKSAIGHLLGGAGAVETIFCLLAMRDQIAPPTINLENPSDGLAGFDLVPNVPKKRSIKAVLNNSFGFGGTNASLIFKAVD

SEQ ID NO: 17950 - protein, 500 aa, Lycopersicon esculentum
MAIGSLARRKASTILSSRYLKYSFSLSRGFASGSDENDVVVIGGGPGGYVAAIKAAQLGLKTTCIEKRGTLGGTCLNVGCIPSKALLHSSHMYHEAQHSFASHGVKFSSVEVDLPAMMAQKDKAVAGLTRGIEGLFKKNKVNYVKGYGKFLSPSEVSVDTVEGGNTIVKGKNIIIATGSDVKSLPGLTIDEKRIVSSTGALALTEIPKKLVVIGAGYIGLEMGSVWGRLGSEVTVVEFASDIVPTMDGEVRKQFQRSLEKQKMKFMLKTKVVSVDTVGDSVKLTLEPAAGGEQTTLEADVVLVSAGRVPFTSGLGLDKIGVETDKAGRILVNERFASNVPGVYAIGDVIPGPMLAHKAEEDGVACVEFIAGKEGHVDYDLVPGVCYTHPEVASVGKTEEQVKALGVDYRVGKFPFLANSRAKAIDDAEGIVKVIAEKGTDKILGVHIMSSNAGELIHEAVLALNYGASSEDIARTCHAHPTMSEALKEAAMATYDKPIHM

SEQ ID NO: 17951 - protein, 565 aa, Staphylococcus epidermidis RP62A
MLKFHLRLLLLISTITIISFIGLGAIIHNTIYQTLTSNQIKSLDSEARNYVNLFNNNKEKEITNIAHNEKNIILIKEKDKDKIIYSSGNIKDIDHRIDNEANPSKLINKNTKLGMRYTYKNTIDDKTIYISGINNEIIDLQKDLWKYLSIVGVIVLFTVYLASRSINRTYIRPINEVTYATSLLADGYYHVRVPESNVKETRALFVTTNDLARRLQKLNNSQKIQSNRLKTTLENIPSSVLMIDKHGEIVVANHAYYQVFNPDQMVENKSYIGFIDDSIEKLIIESFRTEKVIYEQLEVAINNVHTKYFDVSCIPILTKSKKNLQGMVVVLHDITNLQKLENLRREFVANVSHELKTPITSIKGFAETLIEGAKNDEQSLDMFLNIILKESNRIESLVTDLLDLSHIEQQKELEINYMNLSELAINIIDNLQTQAYNKRIKIQSEIEKDVIIEAHENKIAQVITNLLSNAINYSSEDNKVIVRVYRNDNKVYLEIQDYGIGISETDQKRIFERFYRVDKARSRDSGGTGLGLSITKHIVEAHNGRIGVKSAPGKGSIFKVLFNDN

SEQ ID NO: 17952 - protein, 227 aa, Neurospora crassa
MIESEPRGFGRRAERVVPELQVHHQHQPQPQEQNAQAQAQDQQQVRQLDIGSDNSGESNSVAPAREPAPTTAEEDARVIRVSETTTNTVSETASGATPASSDNRNNTNITTTNPNNNMGLAYNVYLNSGKIYGCRNCKTHLANHEDIISRNFRGQHGKAYLFNSVVNVETGDPNERNMTTGRHVVRDIHCRQCKEVVGWKYDRAYEPNEKYKEGKFILEAELLANVN

SEQ ID NO: 17953 - protein, 763 aa, Yersinia pestis KIM
MGNKTMTILNHTLGFPRVGLKRELKKAQESYWAGNSTQEELLNVGRELRARHWQQQQQAGVDLVPVGDFAWYDHVLTTSLLLGNVPERHQNADGSIDIDTLFRIGRGRAPTGKPAAAAEMTKWFNTNYHYMVPEFQQGQQFKLGWTQLLDEVDEALALGHKIKPVLLGPITYLWLGKVKGEQFDRLSLLNDILPVYQQVLAELAKRGIEWVQIDEPALVLELPQEWLDAYQPAYQALQGQVKLLLTTYFDSIGHNIDTIRALPVQGLHVDVVTGHDDLAVLNKNLPKEWLLSLGVINGRNVWRADLSSWFERLQPLVNSRPLWLGSSCSLLHSPIDLNEETRLDAEVKSWFAFALQKCAELALLTQALNAPNDAKLAELAAYSAPIRARRSSSRVHNAQVEQRLAAITSQDIERQLPYEARAETQRKRFNLPAWPTTTIGSFPQTTEIRGLRLDFKQGRLDGKNYRTGISEHIKHAIAEQERLGLDVLVHGEAERNDMVEYFGEHLDGFVFTQNGWVQSYGSRCVKPPVIIGDISRPEAITVEWAKYAQSLTEKPVKGMLTGPVTILCWSFPREDVSRETIAKQIALALRDEVEDLEKAGIGIIQIDEPALREGLPLRRADWQAYLQWAVDAFKLNAAVAQNDTQIHTHMCYCEFNDIMDSIAALDADVITIETSRSDMELLESFEDFAYPNEIGPGVYDIHSPNVPSVEWIEALLRKAAQRIPAERLWVNPDCGLKTRGWPETRQALANMVLAAQRLREEQV

SEQ ID NO: 17954 - protein, 295 aa, Arabidopsis thaliana
MYSAIRSSLPLDGSLGDYSDGTNLPIDACLVLTTDPKPRLRWTSELHERFVDAVTQLGGPDKATPKTIMRTMGVKGLTLYHLKSHLQKFRLGRQSCKESIDNSKDVSCVAESQDTGSSSTSSLRLAAQEQNESYQVTEALRAQMEVQRRLHEQLEYTQVQRRLQLRIEAQGKYLQSILEKACKAIEEQAVAFAGLEAAREELSELAIKASITNGCQGTTSTFDTTKMMIPSLSELAVAIEHKNNCSAESSLTSSTVGSPVSAALMKKRQRGVFGNGDSVVVGHDAGWVMPSSSIG

SEQ ID NO: 17955 - protein, 333 aa, Oryza sativa
MASPGSSGRCSRTPGFPAGPLGGGGRAVPAVGLGTASLRSVGEESFRGALLAALEVGYRHIDTASVYGSERVVGEAVAGAARRGVIACREEVFVTTKVWCTQCHPDLVLPSLRESLQNLQMEYVDMYLVHWPMSVKPTKPHYPMKREDIMPMDLRGVWQAMEECHQLGLAKMIGVSNFTTKKLQELLAFAKIPPAVNQVELNPVWQQKKLMEFCKAKGIHVTAYFPLGGRHSTSTVNPVLDSDVLKEIAAAKGKSVAQISLRWIYEQGASMVTTSTKRERLKENIDIFDWQLSDEDRLKISQIPQHKTVSVLSILCPDGVSSVELSEVDVVEV

SEQ ID NO: 17956 - protein, 200 aa, Brassica napus
  misc_feature (181)..(181): Xaa can be any naturally occurring amino acid
  unsure (1)..(200): unsure at all Xaa locations
MASSSPQHCHIIEVNRGKSVEESTTILASKACGEAPCGFSDLNNASGDAQERNTSMRKLCIAVVLCLLFMTVEVFGGIKANSLAILTDAAHLLSDVAAFAISLFSLWAAGWEATPRQTYGFFRIEILGALVSIQLIWLLTGILVYEAIIRLLSETSEVNGFLMFLVAAFGLLVNIIMAVLXGHDHGHSHGHGHDHHSHGV

SEQ ID NO: 17957 - protein, 349 aa, Lactobacillus rhamnosus
MKASMLEDLNKFSVKEIDIPSPKKDEVVVKVMAAGTCGSDSHKMISGWKYGYPAVMGHEFSGIVTQLGENVSNVSVGQHVAVAPFIPCFKCHYCQIGLFQMCENYSMLGQQKFGGFEQYVSVPARNVLDIGKMSFEEGALIEPMAVAAHAVMGIKPELGDTVAVFGLGTVGDLVVRLLISSGATNVIGIDIDDQKLEKGLDEGCTHVINSAKESLEEKIMEYTDGLGVDISMECAGSKITEEQTLLVTKRRGKVGFVGIAYSDVLLHQKAFENIFRHELTVTGFWNSYSAPFPGREWTNSIQLVNRGRIKIKDLITHRFELEDMQKAFNMITTRSESFNKVMFFPNGIN

SEQ ID NO: 17958 - protein, 794 aa, Beta vulgaris
MASGSSSSEMASHIVGYPRMGPKRELKFALESFWDGKSSADDLKKVSADLRSSIWKQMSDAGIKYIPSNTFAYYDQVLDTTAMLGAVPPRYGWTGGEIEFDVYFSMARGNATVPAMEMTKWFDTNYHYIVPELGPDVKFSYASHKAVNEYKEAKALGVDTVPVLVGPVSYLLLSKPAKGVEKSFNLLSLLPKILAIYKEVVTELKAAGASCIQFDEPLLVMDLDSHKLQAFTDAYAELESTLSGLNVIVETYFADVTPEAYKTLISLKGVTGFGFDLIRGTQSLELIKGGFPSDKYLFAGVVDGRNIWANDLAASLALLQSLQGLVGKDKLVVSASCSLLHTAVDLVNETKLDDEIKSWLAFAAQKVVEVNALAKALSGQKDEAFFSANAAAQASRKSSPRVNNEAVQKAAAGLKGSDHRRATNVSARLDAQQKKLNLPILPTTTIGSFPQTVELRRVRREYKAKKISEEEYVKAIKEEINKVVKLQEELDIDVLVHGEPERNDMVEYFGEQLSGFAFTVNGWVQSYGSRCVKPPIIYGDVSRPNPMTVFWSSAAQSMTSRPMKGMLTGPVTILNWSFVRNDQPRHETCYQIALAIKDEVEDLEKAGINVIQIDEAALREGLPLRKSEHGFYLKWAVHSFRITNVGVQDTCQIHTHMCYSNFNDIIHSIIDMDADVITIENSRSDEKLLSVFREGVKYGAGIGPGFYDIHSPRIPPTEEIADRIRKMLAVLESNVLWVNPDCGLKTRRYGEVQPGLVEHGCCSPSTPPRACQCQVKGCMMVERTCTSLVCWVHT

SEQ ID NO: 17959 - protein, 506 aa, Zea mays
MAKGGAVVGTAVVVCAAAAAAVGVAVVLSRRRSRRREAEDERKRKAAAVIEEVEQRLSTPTALLRGIADAMVEEMERGLRAEPHAPLKMLISYVDNLPTGDEHGLFYALDLGGTNFRVIRVQLGGRDRRVVKQQYEEVSIPPHLMVGTSTELFDFIAAELEKFVRTEGEDFHLPDGKQRELGFTFSFPVHQTSISSGTLIKWTKGFCINGTVGEDVVAELSRAMERQGLDMKVAALVNDTVGTLAGGRYADNDVVAAVILGTGTNAAYVEHANVIPKWTGLLPRSGNMVINMEWGNFRSDKLPRSEYDKSLDFESLNPGEQIYEKMISGMYLGEIVRRILLKLAHDASLFGDVVPPKLEQLFILRTPDMSAMHHDTSHDLKHLGAKLKDILGVPDTSLEARYITLHVCDLVAERGARLAAAGIYGILKKLGKDKLLGDFSQQRTVVAIDGGLYEHYKKFSACLEATLTDLLGEEVASSVVVKLANDGSGIGAALLAASHSQYAEAA

SEQ ID NO: 17960 - protein, 444 aa, Xanthomonas oryzae pv. oryzae KACC10331
MTNSAAETLPQAPVLTPDAGRWAPLWVILFVVLWPTPGLAETVLSLGALFAAYRLLHVRFRGGMRPLSGAAWALTSVLFLAYWLPQMLSAFDAVDAGRALRKSATDLRYLPFMWLCAIAVANAQRRRRTFTGLAVIGCVWTLDALLQAAFGTSPLFFGIDQIKQLISGHGLCTAQELALVDRLSGVLGPCNLKFGQTLASLSPFLLLALGRRHVWAWAVGAAAVGIVLVLAGSRASWITYGVIVLLSGWQLLGGRRLLVVAVAGALLAIAVVAVAPQARERIQRTTLAFGNGEQGVDQALSGRAQIWGAALCMIRAHPFNGVGARGFRHAYPACNPAPGQAPAWGGGPAFHAHQIVLEILAETGVIGLLLWLAGAAQAWRAWRYSSVVAREQARPAMIALVATVFPLNTHLAFYSSFWGGLSLMLAGLYAGALLNDDADRVPLQ

SEQ ID NO: 17961 - protein, 575 aa, Clostridium thermocellum ATCC 27405
MKNFIRILKQGRQYWKYLIVAGISLLAITAFNLVTPWKVRELVDILSKEGTKNMASIRNIAIILAVAYIARAFFSYLYRYFSHVAAWRLVADMRVIVYEHLQKLSLSFYQDKQTGQLMSRAINDTATFEVLIAHAVPDLVTNVLILVGTGILLFVINPLLAALTLIPIPFLVLGSGIFTKKVLPNFREAQGKLGDLNAVVQDNISGIKEIQAFNQQSREKKRVEKRARKYTSAILHALRVSAIFHPVVEMISSLGTVIVVAFGGWFALKGYVSTADIVGFIMFLGLFYQPITTLARVIEDLQQAAAGAERVFELLDTEPDIVDSEGAKTITSSKGEITFKNVSFHYIPSNPVLKNISFTAKPGQMIALVGPTGVGKSTVISLIARFYDPVSGEILLDGMNIKDITISSLSNQISIVLQDTFLFNGSVADNIAYGSRDASFEDIVRAAKIARAHDFIMQLPEGYDTVIGERGVKLSGGQKQRLSIARAVLRNTPILILDEATASVDVETEAEIQKAIGELAGTRTIIVIAHRLSTVKQADNILVLKDGEIVESGTHDELIKQDGLYKYLCEVQFGI

SEQ ID NO: 17962 - protein, 357 aa, Cryptococcus neoformans var. neoformans JEC21
MPTVLLTGITGFLSAHVAHTFLKHDWIVHGTLRSSSKVALIEVIPEYSPYISSGKLKLFVVGPLENADYTEAMKGVDAVVHTASPVEFGGDNFRESHLKPALEGTRGVLRAVAKEKNVKSVVYTSTFGAVGDHRYHPTEIKGKVITEDNWNPYTLEELDKMVESGESGNPTFPPGYLFYKGAKKYAELAAWECQKEAREQGAEWSLATMNCVMIWGPPIQPLTSLSHGGMSTEFLWMLAGGKDAHIMDSLYPYYVDVRDAAEAHYQATVRRAQGRFIISAGPYDFQEFADMLRELYPEQKERFALGAPGKYMYRDPGVYVLTNEKSQRELGITYRPKQETLKDAFDRFFALEKQGLK

SEQ ID NO: 17963 - protein, 668 aa, Haemophilus somnus 2336
MVTRRELANAIRFLSMDAVQKAKSGHPGAPMGMADIAEVLWRDFLNHNPTNPQWANRDRFVLSNGHGSMLIYSLLHLTGYDLSIEDLKQFRQLHSKTPGHPEYGYAPGIETTTGPLGQGITNAVGMAIAEKTLAAQFNRAGHDIVDHHTYVFLGDGCLMEGISHEACSLAGTLGLGKLIAFYDDNNISIDGHVDGWFTDDTQKRFEAYGWHVIPAVDGHNAEQIIEAIKQAQAEKNKPTLIMCKTIIGYGSPNKQNTHDSHGAPLGDEEIALTRQALNWNYAPFEIPADIYAKWNAHEKGQVAENAWNEKFAAYEKAYPELAVEFKRRLNGELPANWATESQAFIEKLQANPANIASRKASQNAIEAYAKLLPEFLGGSADLAGSNLTLWSGSKPIRATENIDGNYINYGVREFGMSAIMNGIALHGGFIPYGATFLMFMEYAHNAVRMAALMKQRSLFVYTHDSIGLGEDGPTHQPVEQTTALRLIPNLETWRPCDQVESAIAWKAAVERQDGPSALIFTRQNLAQMNRTSEQLENVKRGGYILRACCEKGDCPDLILIATGSEVELAMKAAEALDAEGVKVRVVSMPSTNVFDKQDVAYREAVLPSAVTKRVAIEAGISDFWYKYVGTNGRIVGMNSFGESAPADQLFKLFGFTVENIVAKAKEIL

SEQ ID NO: 17964 - protein, 565 aa, Candida glabrata CBS138
MAQPQQQMMEMPDLSNAIVAQDEMGRPFIIVKDQSNKKRQHGLEAKKSHILAARSVASIIKTSLGPRGLDKILISPDGEITITNDGATILSQMELDNQIAKLLVQLSKSQDDEIGDGTTGVVVIASALLDQALELIDKGIHPIKIANGFDEAAKLAVSHLESVTEDITAIEFEKDSKLLNDYLFKAAKTSLGSKIVSKVHDKFAQMAVDSILSVMDKERKDVDFDLIKLQTRVGGSLEDSSLIKGVLLDKEFSHPQMPSKVLPREGQKSVKLAILTCPFEPPKPKTKHKLDISSVEEYKKLQTYEQDKFKEMIQYVKDSGADVVICQWGFDDEANHLLLQNELPAVRWVGGQELEHIAISTNGRIVPRFQDLSPDKLGECSSIYELEFGTTKDRMLVIEQPEESKTVTCFIRGSNKMIIDEAQRALHDSLCVVRNLIKDSRIVYGGGAAEVTMSLAVSEEADKQRGIHQYAFKAFANALDTVPMTLAENSGLDPIETLSTLKSKQLKENIPVFGVDCLGKGSNDMKELFVVDPFISKKQQIMLATQLCRMILKIDNVIISGKDEY

SEQ ID NO: 17965 - protein, 264 aa, Triticum aestivum
  misc_feature (253)..(253): Xaa can be any naturally occurring amino acid
  unsure (1)..(264): unsure at all Xaa locations
NKFVQKSRLVPVRNSRDIVDPRVRSPAVRQAVSALLAGPNPELADAVARKCAGLSNWYGVIPALWPNAKYVYGIMTGSMEHYVKKLRHYAGGLPLVAAEYGASEGWIGANLEPAMPPESATFTVLPDIGYFEFIPLRPGCTAAPGPDACYGESEPVGLTDVVVGEHYEVVMTTFAGLYRYRLGDVVRVAGFHNATPKLKFVCRRNLALSINIDKNSEQDLQLAVDAAAAKFLAAEKLEVVDYTSHADMSSDPXHYVVFVELNAG

SEQ ID NO: 17966 - protein, 548 aa, Propionibacterium acnes KPA171202
MSRKPEPMTNPITNRGTAFTRAERLEHGMIGRLPAAVETLEQQAQRCYRQLQGLGCNIDRYVFLEELQNRNETLYYKLLVDHLVELLPVIYDPTVGEAIKKWSHAYRRSRAVYLSVDHIEDVRPSFETLELGPDDVDLLVVSDSEQILGIGDWGVNGTDISIGKLAVYTAAAGIRPERTIAVNLDVGTDNAYLLNDPSYLGNRHARVRGERYDELIHEYLEVASELYPHALLHFEDFGASNARRILVQNAANHRIFNDDMQGTAAIVLAAVISGLKVTRQSFADQRLIVYGAGTAGTGIADQIRAAMISDGLSQQEAVDRIWLVDRNGLVTDDMKGLPDYQEPYAKPVEKTRHWAHTNRHIGLTETIRRIHPTILIGTSTDHDAFTQQVVEEMCREVERPIIMPLSNPTEKIEAMPADVIAWSKGKALVSVGIPVAPFHYEGTRYEIGQGNNALLYPGLGLGVIVSGAERVSARMIRAAAEAVASQVDPRPAGSSLLPAVENLRASSATVAVAVVQAAIEEGLATKKPSNVVQAVQDAMWWPHYPPVG

SEQ ID NO: 17967 - protein, 422 aa, Dehalococcoides sp. CBDB1
MTDNQPQNRVVITGIGIVSPLGLDTQTTWEGLINGRSGIDHISLFDASNLAVRFGGEVKDFDPANYISRKDIRRMDRFAQLAVAAGKQALENSGLTVDESTSQDIGVIVGSGIGGLSVLFEQIKVFLEQGPDRVSPFLVPMMIADMAGAQVSIQLGLKGSNFCTTSACSSGSDAIGTAFEKIRFGSAKIVLAGGAESIMNPVGFAGFSALKALSTRNEDPQTASRPFDANRDGFVISEGAAILVLEELQTAKARGANIIAEIIGYGGSSDAFHITQPVESGVEAARAINIALKTAGIKPEAVDYINAHGTSTPLNDKMETNAIKVAFGEHARKLAISSTKSMLGHLIGGAGAIEASICALTIKNGIIPPTINYTTPDPECDLDYTPNTARKAKVKVALNNSFGFGGHNSVLILREMGNENIG

SEQ ID NO: 17968 - protein, 95 aa, Oxalis peduncularis var. pilosa
  misc_feature (87)..(87): Xaa can be any naturally occurring amino acid
  unsure (1)..(95): unsure at all Xaa locations
LYAGINISGTNGEVMPGQWEYQVGPSVGIEAGDHIWASRYILERITEQAGVVLTLDPKPIDGDWNGAGCHTNYSTKSMRDEGGFEVXTKAIFNLS

SEQ ID NO: 17969 - protein, 93 aa, Oxalis petrophila
AGINISGTNGEVMPGQWEYQVGPSVGIEAGDHIWASRYILERITEQAGVVLTLDPKPIDGDWNGAGCHTNYSTKSMRDEGGFEVIKKAILNLS

SEQ ID NO: 17970 - protein, 405 aa, Vibrio sp. Ex25
MEDALAVILAGGMGSRLSPLTDDRTKPAVPFGGKYRIIDFTLTNCLHSGLRKILVLTQYKSHSLQKHLRDGWSIFNPELGEYITAVPPQMRKGGAWYEGTADAIYHNMWLLSRNDAKYVVVLSGDHIYRMDYAAMLEEHKEKGAKLTVACMDVPVEDASAFGVMGTAENGLVTSFIEKPECPPTLPGSKTRSLVSMGIYIFDMDVLKEALEDDSKLDSSSHDFGKDIIPKLIDTESVYAYQFCGSKGRVDKDCYWRDVGTIDSFYEANMDLLEPVPPMNLYQSNWAIRTYEPQFPPARTVSSATGNEGIFINSIIATGVINSGGSVQHSIISSNVRIQDSATVVDSIIFDDVEVGEGSQLVNCIVDKHVRIPPHTQIGINKLEDAKRFKISDKGIVVIPESYQFD

SEQ ID NO: 17971 - protein, 92 aa, Oxalis nubigena
  misc_feature (2)..(2): Xaa can be any naturally occurring amino acid
  misc_feature (5)..(5): Xaa can be any naturally occurring amino acid
  unsure (1)..(92): unsure at all Xaa locations
GXNIXGTNGEVMPGQWEYQVGPSVGIEAGDHIWASRYILERITEQAGVVLTLDPKPIDGDWNGAGCHTNYSTKSMRDEGGFEVIKKAILNLS

SEQ ID NO: 17972 - protein, 184 aa, Triticum aestivum
  misc_feature (166)..(166): Xaa can be any naturally occurring amino acid
  misc_feature (173)..(173): Xaa can be any naturally occurring amino acid
  unsure (1)..(184): unsure at all Xaa locations
NKFVQKSRLLPVRNSRDIVDPRVRLDGMLSFVLLDTRDKSFIAARDALGICPLYMGWGLDGSVWFSSEMKALSDDCERFISFPPGHLYSSKTGGLRRWYNPPWFSESIPSAPYDPLLIRESFEKAVIKRLMTDVPFGVLLSGGLDSSLVASVVSRHLAETKSCQAXGNKLHTXFCIGLEGSPDL

SEQ ID NO: 17973 - protein, 176 aa, Oryza sativa
MEDETISIDEMLVRDGSNDITVKFDLSRVFSAKAGIHSREILPSSRSFLRRFANRLRRWPLPHAPRRTPSLKTLAHRASLFTSPANAPAPAKEHGCYERGYAARRASAAGTMRAGVGWLTPWLDERPKGYLFKQLLPPAGEFHKWVDWELPCNLTIVILGIRLNAKPNLTLQTWPH

SEQ ID NO: 17974 - protein, 601 aa, Arabidopsis thaliana
MGLCTSKPNSSNSDQTPARNSPLPASESVKPSSSSVNGEDQCVTTTNNEGKKSPFFPFYSPSPAHYFFSKKTPARSPATNSTNSTPKRFFKRPFPPPSPAKHIRAVLARRHGSVKPNSSAIPEGSEAEGGGVGLDKSFGFSKSFASKYELGDEVGRGHFGYTCAAKFKKGDNKGQQVAVKVIPKAKMTTAIAIEDVRREVKILRALSGHNNLPHFYDAYEDHDNVYIVMELCEGGELLDRILSRGGKYTEEDAKTVMIQILNVVAFCHLQGVVHRDLKPENFLFTSKEDTSQLKAIDFGLSDYVRPDERLNDIVGSAYYVAPEVLHRSYSTEADIWSVGVIVYILLCGSRPFWARTESGIFRAVLKADPSFDDPPWPLLSSEARDFVKRLLNKDPRKRLTAAQALSHPWIKDSNDAKVPMDILVFKLMRAYLRSSSLRKAALRALSKTLTVDELFYLREQFALLEPSKNGTISLENIKSALMKMATDAMKDSRIPEFLGQLSALQYRRMDFEEFCAAALSVHQLEALDRWEQHARCAYELFEKEGNRPIMIDELASELGLGPSVPVHAVLHDWLRHTDGKLSFLGFVKLLHGVSSRTIKAH

SEQ ID NO: 17975 - protein, 148 aa, Arabidopsis thaliana
MNVVVGPKIGRKLITGSYVVADVMCSENLVGAIDHALKVFDKMAQAIGPRLYSCCNCRNHVGLHDDIISKAFQGRTGRAFLFSHAMNIVVGPKEDRNLLTGLHTVADISCVDCNEPLGWKYERAYETSQKYKEGKFIFEKAKIVKEDW

SEQ ID NO: 17976 - protein, 287 aa, Nicotiana glauca X Nicotiana langsdorffii
MASSLMKRNGVEKNDKTFHEFFETWLAEQKQELKELVSASRDVSKGNNNVVEERVLVPLIKRVIQHYEGYYEEKSKYTEEDVFGMLNPTWRSNLEGAFLWIGGWRPSMAFHLLYSKSGLQFEARLPQLIRGITTGDLGYLSPDQIDKVDELQKKTIREEKKSSEKLARVQETVADASMVELSHIVTQLMMISGSRGGGGGGGKILDEEVEANLATKEEGLIIILQKADNLRLNTLKEILAILTPTQAIHFLIAAAELHLRLHEWGKIEDATASRTPARRYYHHHHQL

SEQ ID NO: 17977 - protein, 255 aa, Oryza sativa (japonica cultivar-group)
MAPVQFSAAGVGAVAFATKGMASRDALRLPPPAAVRVLRQAPRPSRGLVVRAAAASVAPKYTTLKPLADRVLVKIKSAEQKTTGGILLPSAAQSKPQGGEVVAIGEGRTVGDNKVEVSIQVGSQVVYSKYAGTEVELNDSNHLILKEDDIIGILETDDAKDMKPLSDRVLIKVAEAEDKTPGGLLLTETTKEKPSIGTVVAVGPGPLDEEGKRIPLSVSAGSTVLYSKYAGSEFKGSDGTSYIVLRVSDLMAVLS

SEQ ID NO: 17978 - protein, 543 aa, Yersinia pestis KIM
MTPGELRRLYLIIRVFLSYGLDELIPNIRLTLPLRVGRHLFFWLSNRHKDKSLGERLRLALQELGPVWIKFGQMMSTRRDLFPPNIADQLALLQDRVASFDGALARKHIEIAMGGALETWFDDFDSQALASASIAQVHTARLKENGKEVVLKVIRPDILPIIKADVRLMYRLAGWVPKLLPDGRRLRPREVVREYEKTLLDELNLLREAANAIQLRRNFEDSPMLYIPEVYSDYCRESVLVMERIYGIPVSDIAALEDQGTNMKLLAERGVQVFFTQVFRDSFFHADMHPGNIFVSYEHPHDPLYIGIDCGIVGSLNKADKRYLAENFIAFFNRDYRRVAELHVDSGWVPRDTNVEDFEFAIRTVCEPIFEKPLAEISFGHVLLNLFNTARRFNMEVQPQLVLLQKTLLYVEGLGRQLYPQLDLWTTAKPFLESWLRDQVGLPAVIRALKEKAPFWAEKFPELPELVYDSLQQHKLLQQSVEKLTIQIQGQQQRQGQSRYLFGVGATLLVSGTILFLADATEVSTGFIVAGALAWFIGWRRTC

SEQ ID NO: 17979 - protein, 274 aa, Brassica napus
  misc_feature (265)..(265): Xaa can be any naturally occurring amino acid
  unsure (1)..(274): unsure at all Xaa locations
ANARTTLEAGKGVGKAFIVAFRSGAVMGFLLAASGLLVLYITINVFKVYYGEDWEGLFEAITGYGLGGSSMALFGRVGGGIYTKAADVGADLVGKIERNIPGDDPRNPAVIADNVGDNVGDIAGMGSDLFGSYAEASCAALVVASISSFGINHDFTAMCYPLLISSMGILVCLITTLFATDFFEIKAVKEIEPALKNQLIISTVIMTVGIAIVPYVGLPSSFTVFNFGAQKVVKNWQLFLCVCVGLWAGLIIGFVTEYYTSNAYXPVQDVADSC

SEQ ID NO: 17980 - protein, 373 aa, Staphylococcus epidermidis RP62A
MAELKRGLEGVIAAETKISSIIDSQLTYAGYDIDDLAENAQFEEIIFLLWNYRLPNENELSELKEKLFDYMTLNNRVYKHFEEYVTDHVHPMTALRTSVSYVAHFDPEAENESDENKYDRAIRIQAKIASLVTAFARVRDGKEPVKPNSELSYAANFLYMLRGELPTEVEVEAFNKALILHADHELNASAFTARCAVSSLSDMYSGVVAAIGSLKGPLHGGANERVMSMLKEIGSIDNVDHYLDERFANKDKIMGFGHRVYKDGDPRAKYLREMSRKITEETGQSELFEMSLAIEKRMKEEKGLIPNVDFFSATVYHSMNIPHDLFTPIFAVSRTSGWIAHILEQYRDNRIMRPRAKYIGEQNRKYVPIEERP

SEQ ID NO: 17981 - protein, 237 aa, Triticum aestivum
  misc_feature (159)..(159): Xaa can be any naturally occurring amino acid
  unsure (1)..(237): unsure at all Xaa locations
MAPAVMASSATTVAPFQGLKSTAGLPVGRRSSGSLGSVSNGGRIRCMQVWPIEGIKKFETLSYLPPLSTEALLKQVDYLIRSKWVPCLEFSKVGFVFREHNSSPGYYDGRYWTMWKLPMFRCTGRHTVLNEVEEVKKEYPDAYVRVIGFKTWPQGQGVXFIPFKPPGCQGTREGPNHKTKTRAQYPEEGLFENLPILAQKPRLGRNLDFRPRRTNTFRSKIRYRGKRTAPKQKSLLE

SEQ ID NO: 17982 - protein, 366 aa, Candida albicans SC5314
MATFAPHISKITKSSTKFNYGRIAKTFLGVAGSAAIATYFYNNGNPFNNNNNNNNNNGGSKNAAKALFGASAGANVKIAKVPEGKSASDYQKVYNDIATKISENLEFDENAGYYGQLLRLAWHTSGTYDKSDNSGGSYGGTMIFAPEEFDPENAGLQVGREFLMEFLVKYPWISRGDLWTLGGVAAVQESGGPKIEWRPGRVDDNTASKVPPNGRLPDASKDGKYVKDLFARMGFNERETVALLGAHVLGRCHKHNSGYDGPWGPSFNQFTNVFYTTLLGDWHVKKWDGKKQYEDDETGEFMMLPTDMALKEESYFLKYVKMYADDQDLFFKDFAKAFSKLISNGIKYPADSKPILFKTLDEQDEE

SEQ ID NO: 17983 - protein, 452 aa, Staphylococcus epidermidis RP62A
MAENLQRELSNRHVQLIAIGGAIGTGLFLGAGQTIAMTGPSILLTYIIIGFMLFMFMRGLGEIIIQNTNFKSFADVTNTYIGPFAGFVTGWTYWLCWIITGMAEVTAVAKYISFWFPDIPNWISALFCVLILMSFNLLSAKLFGELEFWFAIIKIVTIIALIVIGVIMILFAFKTPFGNTSLTHLYQHGIFPKGASGFFMSFQMALFSFVGIEMIGVTAGETKDPEKTIPKAINSVPIRILIFYVGALAVIMSIIPWDKVDPDNSPFVRLFALIGIPFAAGIINFVVLTAAASSCNSGIFSNSRMLYGLSNQNQAPPTFASTNKHGVPHKAIIASSALLLIAALLNYIFPDATLVFTYVTTISTVLFVVVWALIIIAYINYSRKNPELHKKATYKLPGGQYMGYLILIFFVFVFALLFINVDTRRAIYCTPIWFILLGLMYLRYKKADKEAR

SEQ ID NO: 17984 - protein, 457 aa, Shigella flexneri 2a str. 2457T
MQKYISEARLLLALAIPVILAQIAQTAMGFVDTVMAGGYSATDMAAVAIGTSIWLPAILFGHGLLLALTPVIAQLNGSGRRERIAHQVRQGFWLAGFVSVLIMLVLWNAGYIIRYMENIDPALADKAVGYLRALLWGAPGYLFFQVARNQCEGLAKTKPGMVMGFIGLLVNIPVNYIFIYGHFGMPELGGVGCGVATAAVYWVMFLAMVSYIKRARSMRDIRNEKGTAKPEPAVMKRLIQLGLPIALALFFEVTLFAVVALLVSPLGIVDVAGHQIALNFSSLMFVLPMSLAAAVTIRVGYRLGQGSTLDAQTAARTGLMVGVCMATLTAIFTVSLREQIALLYNDNPEVVTLAAHLMLLAAVYQISDSIQVIGSGILRGYKDTRSIFYITFTAYWVLGLPSGYILALTDLVVEPMGPAGFWIGFIIGLTSAAIMMMLRMRFLQRMPSAIILQRASR

SEQ ID NO: 17985 - protein, 396 aa, Bacillus anthracis str. A2012
MIQTKDIIELTDTYGANNYHPLPIVISKAEGVWVEDPEGNRYMDLLSAYSAVNQGHRHPKIINALIDQANRVTLTSRAFHSDQLGPWYEKVAKLTNKEMVLPMNTGAEAVETAIKTARRWAYDVKKVEANRAEIIVCEDNFHGRTMGAVSMSSNEEYKRGFGPMLPGIIVIPYGDLEALKAAITPNTAAFILEPIQGEAGINIPPAGFLKEALEVCKKENVLFVADEIQTGLGRTGKVFACDWDNVTPDMYILGKALGGGVFPISCAAANRDILGVFEPGSHGSTFGGNPLACAVSIAALEVLEEEKLTERSLQLGEKLVGQLKEIDNPMITEVRGKGLFIGIELNEPARPYCEQLKAAGLLCKETHENVIRIAPPLVISEEDLEWAFQKIKAVLS

SEQ ID NO: 17986 - protein, 520 aa, Zea mays
  misc_feature (208)..(208): Xaa can be any naturally occurring amino acid
  unsure (1)..(520): unsure at all Xaa locations
MEYERIEKPFPVQGGGFSPKRLRAMLLGVDKRRKGQDGAAEEDEDGGGDYGALPKAHARSGAGDGGGGGGATCEEYKDVDVVSTTSEFSSSLETAGGHRPRDAHPVATGSRTRVPPEEDSCDSESVASNFEFHKERRAAASAAASVVPPFSKPAPSKWDDAQKWIASPTANCPGRGGAAPAPKKTEKPGSGIGRLPLPATKVVVEATXEIDTKRMDPSQEKREIGWQKAARWAPPDPCPEAEPCPTKTTLLAVETTVAAASAAVNFNRHDASTTLQSAATCIPPPTTVRSVSMRDMGTEMTPIASQEPSRTGTPVRATSPNCSQPTTPRRTLGGPSAVGSFISHGGECSSSELSEQELQTKTRREIMLLGTQLGKTSIAAWASKKEEEKDASLSLKPVPMDQSTQNITAIRAAAWEEAEKAKYLARFKREEIKIQAWEDHQKAQIEAEMRKIEVEVERMRARAQDKLMTKLASARHSADEKRATAELKRNRAAARTAEQAEHIRRTGRVPPSFGCWNWCS

SEQ ID NO: 17987 - protein, 542 aa, Haemophilus somnus 2336
MATNYIFVTGGVVSSLGKGIAAASLAAILEARGLNVTIMKLDPYINVDPGTMSPTQHGEVFVTQDGAETDLDLGHYERFIRTKMTKRNNFTAGKIYSEVLRKERRGDYLGATIQVIPHITNEIKSRVIDGAAGYDVAIVEVGGTVGDIESLPFLEALRQLAVQVGRERTIFMHLTLVPYIPTAGEVKTKPTQHSVKELLSIGIQPDVLICRSDRMIPPNERAKIALFCNVPERAVISLKDVSSIYQIPALLKSQGLDDFICQRFRLDCQEADLSEWEKVLYQEANPTGEVTIGMVGKYTELPDAYKSVNEALKHAGLTNRLTVNIKYIDSQDVETKGIDILKDLDGILIPGGFGYRGVEGKILTAQYARENNVPYLGICLGMQVAFIEYARHVAGLKGANSSEFDRTCEYPVIALITEWQDAEGNVEVRSDESDLGGTMRLGAQQCHLVAGSLAHQLYGSDIIEERHRHRYEVNNVIRPQVEKAGLKVTGLSADKKLVEIIEVPNHPWFVACQFHPEFTSTPRDGHPLFAGFVKAASENRKK

SEQ ID NO: 17988 - protein, 180 aa, Calycanthus floridus var. glaucus
MFPMVTGFMNYGQQTVRAARYIGQSFMITLSHANRLPVTIQYPYEKSITSERFRGRIHFEFDKCIACEVCVRVCPIDLPVVHWRLETDIRKKRLLNYSIDFGICIFCGNCVEYCPTNCLSMTEEYELSAYNRHELNYNQIALGRLPMSVIEDYTIRTTRNSTQIKIAMDKPLNARTVTNF

SEQ ID NO: 17989 - protein, 198 aa, Clostridium thermocellum ATCC 27405
MANNCFEKSNLKLAAFAGGCFWCMVPPFKELEGVCEVIAGYTGGHVENPTYEQVCSGKTGHYEAVQITYDPETIQYEKLLDVFWSQIDPTDPEGQFADKGPQYQTAIFYYDEEQKVLAEESKKRLESEGYFDKPIVTKIIKASAFYPAEEYHQDYYLKNPEHYKRYKTGSGREAYIQKVCGIRAMNKNNSKTNDMQSK

SEQ ID NO: 17990 - protein, 510 aa, Bacillus anthracis str. A2012
  misc_feature (56)..(56): Xaa can be any naturally occurring amino acid
  unsure (1)..(510): unsure at all Xaa locations
MLASYIEWKEECVDHLNGIYAFAVWDEQKEQVFIARDRLGVKPLFYKYDSGRLLFXSELKAILAHPDVKAEVTLEGLSEIFGLGPSRTPGHGIYTGIKELRPGHAMTFSKNGLCIWRYWNVESKKHEDSFEETVEKTRFLLQDAITRQLVSDVPLCTFLSGGVDSSAITAIAAKEYEKSGKGQLHTYSVDYEDNDKYFKANAFQPNSDAPFIHLMTETFQTIHHRCVISNEQLAQYLTEAVLVRDLPGMADIDSSLLWFCREIKQDFVVGLSGECADEIFGGYPWFYREDDLQSSAFPWMRSTEAREQLLKKEWRNKLNLQQYVQQRYEESIQEVPILDGESPLEAKRRQLFYLNMVWFMTTLLDRKDRMSMGASLEVRVPFADHRLVEYAWNIPWEMKMYKNREKGLLRKALEGLLPNDILYRKKSPYPKTHNPHYTKAVTVWIQDLLTDKGSILHELFDKEQLSGLIESGGSAFQTPWYGQLMTGPQLLAHLAQIHVWFKEYGVNIKE

SEQ ID NO: 17991 - protein, 381 aa, Manihot esculenta
MCGGAIISDFIPATAAGRSSRRLTADFLWPDLKKPIGKIVGDLDDDFEADFQEFKDESDVDEEDDVLFDVKPFSFSATASPPPRNRSPSRGSTAVKSVEFNGLAEKSAKRKRKNQYRGIRQRPWGKWAAEIRDPRKGVRVWLGTFNTAEEAARAYDAEARRIRGKKAKVNFPDEAPRASPKRTMKANPQKPLPKRNATESMSYLNNPDQDYFNTLGSVDEKPLVSQFDLMDSFPANGDATVKSIPPCDNVPTFFNSDQGSNSFECSDFGWGEQASKTPEISSVLSATPEIDESLFMDDANPKKKMKSDSENAVPIEESNGKSLSEELLAFDNQMNFQMPYLEGSWEASLDGFLNGDVTQDGGNPMDLWSFDDLPNMVGGVY

SEQ ID NO: 17992 - protein, 405 aa, Candida albicans SC5314
MVSIITFTKNVLVTLAFALLAQGLAIPEDIDKRAEKVVSLDFTVTRKPFNATAHGQHHQSQQQQQQQQQQPAQKRGTVQTSLINEGPSYAATITVGSNKQQQTVIVDTGSSDLWVVDSAAVCQVTYPGQSPTFCKQDGTYKPSSSTTSQNLGKAFSIRYEDGSSSQGTVYKDTVGLGGASITNQQFADVTTTSVDQGILGIGFTGDESSPTYDNVPVTLKKQGIINKNAYSLYLNSASASSGTIIFGGVDNAKYTGSLTALPITSSNELRVQLSTINIAGTTVSASTTPVLDSGTTLTYFSQTIADKLAAAVGAKWNSYYQLYTSSCNLAGNIVFNFAKGVTISVPLSEFVLQDGNSCYFGVSRDSATILGDNFLRRAYAVYDLDGNTISLAQVKYTTSSSISTL

SEQ ID NO: 17993 - protein, 274 aa, Triticum aestivum
  misc_feature (206)..(206): Xaa can be any naturally occurring amino acid
  misc_feature (213)..(213): Xaa can be any naturally occurring amino acid
  unsure (1)..(274): unsure at all Xaa locations
MAKEGAGGGPDWNGLLKWSLAHGSDGTNPPRALSEEDRKWFMEAMQANTVDVVGRMKEIAQVMKTPDDVLQSHGVTPENIEDMLDELQEHVESIDMANDLHSIGGLDPLLGYLKNSHAGIRAKAAEVVSTVVQNNPKSQQLVMESNGLEPLLTNFRSDPSTTARTKALGAISSLIRNNQSGLAAFRLGNGHAALKDALGSDDARLXRKALHLXKYLLNNKADRKRPHRRLGFRINLYTSASKRRLWESRGGWPGAGLLAGCANKNKARAPWIGA

SEQ ID NO: 17994 - protein, 488 aa, Bacillus anthracis str. A2012
  misc_feature (149)..(149): Xaa can be any naturally occurring amino acid
  misc_feature (194)..(194): Xaa can be any naturally occurring amino acid
  unsure (1)..(488): unsure at all Xaa locations
MNPNNRLTTNQGAPVGDNQNSRTAGRRGPVLLEDYHLVEKLAHFDRERIPERVVHARGAGAHGVFVTKNSMKKYTKAAFLQNEGTETPVFVRFSTVIHGQGSPETARDPRGFAVKFYTEEGNYDIVGNHLPVFFIRDAIKFPDMVHSLXPAPDTNIQTPDRYWDFMTLSPESTHMMTWVFSDYGTPASYREMEXFGVHSFKWINAEGKIVYIKYHWKPQQGVRNLSAKEVQEVQGKDFNHATRDLFDAIEKGNYPKWDLHVQVMQLEETDSLDFDPLDPTKVWPEDRFPLMEVGTMTLNRNPKNFFAEVEQVAFSPSATVNGIEPSEDKLLQGRLFSYPDTQRYRLGANYLQIPVNCPYAAVHNQQRDGAMQINQNPSTINYEPSRHAENPVEDPAYRDSTMKVEGYVSREKIDKPNDFKQAGERYRSFSKEEQDNLIANLTSDLKDVNERTKLLAVCNFFRADQEYGMRLAQALNVDITQYVGNAPK

SEQ ID NO: 17995 - protein, 495 aa, Candida glabrata CBS138
MSFENFHKATSEQLTKAVDELCKEFEVTPKMLDELTAYFIESMEKGLAAEADSENKGLPMIPSFVTGMPNGTENGVLLAADLGGTNFRVCSVTLNGDNTFKMEQMKSKIPDELLDDEGVTSEQLFGYLGRRTVAFVKKYHPEFLNKGDDIPPIRLGFTFSYPVDQTSLNSGTLIRWTKGFKIEDTVGKDVVQLYQQQLDAQGLGMIKIVAMTNDTVGTFLSHCYASGSHSSSGGEISEPVIGCIFGTGTNGCYMEEIENIKKLPEDMRHQLANEGKTHMCVNTEWGSFDNECRYLPTTKYDVDIDQKYSANPGFHLFEKRVSGMYLGEVLRNVLVDLHSRGLMLTQYRDYDQLPHRLKTPFELSSEVLSRIEIDDSTGLRETELSFLQSLRLPTTPSEREAIQKLVRAISRRSAYLASVPIAAILIKTNALNKRYHGEVEVGCDGSVIEYYPGFRSMLRHALSLSPIGADGERKIHIRIAKDGSGVGAALCALVA

SEQ ID NO: 17996 - protein, 625 aa, Candida glabrata CBS138
MSQEENVETVPVTVTGKADSASQAAPESTTDVDIKKSKKADAKEPGVDASKLVPAPIPTSSPWKAVSQTGESVNASEVSLEEEIENTRKQKERKNGGSANTMKPTGSNVKWVPMKASITVSSGNGGSKRSGRRSGNKGKDTKKTGNSNSTSDSQGTNATSSSSQSKKKNTKQAKSNNVKNNNKKKDDENNTSSTDTDKDNTKSSEVKTKSDVKSSSETVNGGSSHAHHHHHGNNHNHNHSHSQHNHQHHHGHKHEQNKQKDVNTKDINEEKETASVQETESKTPTGQRASSGSGQKENYSTENTNEQNVGEPSSKHVRRHSYHHQQGGSYGHTGRQFNNHHSTNYSYNTSNTNFHDKTQRNGYYPRQNQKPYVPHNRNFNNNMHYVPYVQNSYNAQYYNTMHALITAVQNVSKQIEYYFSEENLSRDSFLKSKFSDAGFVPIDLIAKFFRVVNMSFGGDPTIILAALREIAANEDSVVEVVRGKSNAEEHEAKGQDNFYGPEYNINNYFVRAKNWEKWLNETNQDSFAVAIEKTLAGTDLDQFTINSSLLPAQPYMYGRSYRPNGYKRGQSYSRGGKQRYNSNSSPDNHRSQVGDGANEENDDPVNDNSTPVDTKSAEKSENDEQ

SEQ ID NO: 17997 - protein, 284 aa, Glycine max
MGNANGREDGSIPGPADPSVADPAARGTHAPDSRPPVRAFSSDSMANSPPQSPRRSRSPILFGPQVPLAPLQRGNGPPFLNQMWQNESHGIVNQLPEQGIPVMITWNYGGNNVAVEGSWDNWTSRKALQRSGKDHSILIVLPPGIYHYRFIVDGEERFTPELPNVADEMGHVCNLLDVNDYVPENPDGVSEFEAPPSPESSYGQAFPAEEDFAKEPMAVPSQLHLTVLGMEKSDIGSSSKPQHVVLNHVFIEKNLALKSVVALGLTHRFQSKYVTVVLYKPLKR

SEQ ID NO: 17998 - protein, 406 aa, Shewanella sp. ANA-3
MSSPLTSKLGSKILARQQALAEQGLLRQRQALSSAVALSEDGPQFGLAEQHYLNFSSNDYLGLSRAPALVEALRLGAKQYGVGSGASPLVTGYSEAHLALETKLCQITGFEAALLFSSGFSANTTLCKTLFDKQDVVLADKLVHASIIDGLRDSGADFKRFLHNSTESAERLLAKNAVSALITESVFSMDGDIAPISALSALCRAHNAWLIVDDAHGFGVVDAVSVQAESTPASNLIDIQIVTFGKALGCQGAAILGCRQLIEFLVSNAREYIYSTALSPANAALALAAVEYTEAHPELKQKLQRNILLFKQLCQDADIPLLGSDTAIQPLIIGDATQTMRVAEKLKALGIWVGAIRPPTVPVGSARLRITLSASHSEAVIRCCVSSIATVLKECALPRVSERPEG

SEQ ID NO: 17999 - protein, 138 aa, Brassica napus
MTTVDNMSSVPASEDTEFGFKRPEMYSTNIANSITSYGRHVFVLYKTPEAWISHVEEEGLPQRFATLLKDRKSDLLVQTKLNVCEGGGSDGDVLIFPDMVRYKGIKDTEVESFFEDVLVNGKPWRSGREEKISGTFVF

SEQ ID NO: 18000 - protein, 250 aa, Pseudomonas aeruginosa PAO1
MPAETPPLRPDADPPQCALPEARPDRDASTKLRAAVLGANDGLVSNLCLVMGVAGASMAHSSIVLTGMAGLVSGACSMALGEWLSVTNAREMASKRIAEEERLLRLCPNTETQELIDIFTAKGLSEVSARRVALQLMNDGRGALDTLSREALGIDPTELGGNPWNAAGTSFLLFSLGALVPVAPFLFLDGAAALVASLLSSLLALLFSGAVTARFTGRPLAFSALRQVLVGTLAAAFTYGLGTALGVGLG

SEQ ID NO: 18001 - protein, 455 aa, Candida glabrata CBS138
MSSAEKIAKQARVAGNVLKTISDENRSKILYRIRDALANAKDEIESANKEDLEQARAGGLADSLVKRLDLFKGDKFDVMLQGISDVADLEDPVGKVKMAREIDNGLMLYQVTAPVGVILVIFESRPEVIANITALCIKSGNAGILKGGKESVNTFKAMAKVVNQTIEQYKDETGVPVGAVQLIETRQDVSDLLGQDEYIDLVVPRGSNSLVRQIKDSTKIPVLGHADGICSIYVDRDADLEKAKRIVLDAKTNYPAGCNAMEGLLLNPDFSQWDDVLHHLITEGGVTIHATTDVKEAFLKKLQDSGKLNDDIKAKIVDAKDGDFDKEFLSLDCAVKFIPNTVDAINHINEHSSKHTDAIITESKEDAEKFLKGIDSSGVYWNASTRFADGFRYGFGTEVGISTSKIHARGPVGLDGLVTYQYQIRGDGQVASDYLGAGGNKAFVHKDIDVTNIKL

SEQ ID NO: 18002 - protein, 368 aa, Photorhabdus luminescens subsp. laumondii TTO1
MMNSSQTLVVKLGTSVLTGGSRRLNRAHIVELVRQCAQQHEKGHRIIIVTSGAIAAGREHLGYPDLPATIASKQLLAAVGQSRLIQLWEQFFSIYGIHVGQMLLTRADLEDRERFLNARDTLQALLDNRIVPVINENDAVATAEIKVGDNDNLSALAAILGGADKLLLLTDIEGLYTADPRNNPDAKLIPEVYDISDELRMVAGDSISGLGTGGMATKLQAAGIAGRAGIDVIIAAGNKPDVISDVIEGNPVGTRFHGLESPMENRKRWIFGAPPAGEIIVDHGAETAICEKGSSLLPKGIKNIKGDFSRGEVICIRSLSGKDLAHGVCRYNSDALRLIAGHHSQQISQILGYEYGAVAVHRDDMIVS

SEQ ID NO: 18003 - protein, 95 aa, Oxalis tuberosa
LYAGINISGTNGEVMPGQWEYQVGPSVGIEAGDHIWASRYILERITEQAGVVLTLDPKPIDGDWNGAGCHTNYSTKSMRDEGGFEVIRKAIFNLS

SEQ ID NO: 18004 - protein, 417 aa, Photorhabdus luminescens subsp. laumondii TTO1 [sequence omitted]

SEQ ID NO: 18005 - protein, 95 aa, Oxalis tuberosa
LYAGINISGTNGEVMPGQWEYQVGPSVGIEAGDHVWASRYILERITEQAGVVLTLDPKPIEGDWNGAGCHTNYSTKSMRDEGGFEVIKKAILNLS

SEQ ID NO: 18006 - protein, 466 aa, Propionibacterium acnes KPA171202
MEHYDIVVIGSGSGNTILDEDFADRRAAIIDSGAFGGTCLNVGCIPTKMFVLPADFASSPSEAVRVGVDLQFRGASFASIRDRIFGRIDSISKAGLSYRQGLDNIDVYTGEAAFIDAHTLEVGGRCITADQIVLAAGSRPRVPDVPGLDDPSMAGLIHTSDTIMRLAELPQRLVILGGGLIAAEFAHIFSGLGSQVTVINRSGRMLRHEDREISQRFTEQMGRRVRLRMAEGLVGVDRDPGGHLVVLTVDGDGVDYDYPADVVLNATGRVSNGDRLNLPAAGVDVDDDGFVVVDKHQRTNVEHIWALGDVCSPWELKHVANHEARVVRHNLLHPDDLASSNHCFVPHAVFSNPQVASVGATEQGLLQSDTPYAAYLQEYADVAYGWAMEDEGHCVKLLGDPQTRTLLGAHIIGPQASTLIQTCIQGMSVGQTVDEMARGQYWIHPALSEVVESALLGLGKEMDTTR

SEQ ID NO: 18007 - protein, 381 aa, Arabidopsis thaliana
MTNHLQDPLPTYPKPVLTKEEQEVDEKMVSLQAESIVNTVAFPMVLKAAFELGVIDTIAAAGNDTWLSPCEIACSLPTKPTNPEAPVLLDRMLSLLVSHSILKCRMIETGENGRTGKIERVYAAEPVCKYFLSDSDGTGSLVPLFMLLHTQVFFKTWTNLKDVILEGRDAFNSAHGMKIFEYINSDQPFAELFNRAMSEPSTMIMKKVLDVYRGFEDVNTLVDVGGGNGTVLGLVTSKYPHIKGVNFDLAQVLTQAPFYPGVEHVSGDMFVEVPKGDAVFMKWILHDWGDEDCIKILKNCWKSLPEKGKIIIVEFVTPKEPKGGDLSSNTVFAMDLLMLTQCSGGKERSLSQFENLAFASGFLRCEIICLAYSYSVIEFHK

SEQ ID NO: 18008 - protein, 524 aa, Arabidopsis thaliana
MGPKGRNVIIEQSWGAPKVTKDGVTVAKSIEFKDRIKNVGASLVKQVANATNDVAGDGTTCATVLTRAIFTEGCKSVAAGMNAMDLRRGIKLAVDTVVTNLQSRARMISTSEEIAQVGTISANGDREIGELIAKAMETVGKEGVITIQDGKTLFNELEVVEGMKIDRGYISPYFITNPKTQKCELEDPLILIHEKKISNINAMVKVLELALKKQRPLLIVAEDVESDALATLILNKLRANIKVCAVKAPGFGENRKANLHDLAALTGAQVITEELGMNLDNIDLSMFGNCKKVTVSKDDTVVLDGAGDKQAIGERCEQIRSMVEASTSDYDKEKLQERLAKLSGGVAVLKIGGASETEVSEKKDRVTDALNATKAAVEEGIVPGGGVALLYASKELEKLSTANFDQKIGVQIIQNALKTPVYTIASNAGVEGAVVVGKLLEQDNPDLGYDAAKGEYVDMIKAGIIDPLKVIRTALVDAASVSSLLTTTEAVVTEIPTKEVASPGMGGGGMGGMGGMGGMGGMGF

SEQ ID NO: 18009 - protein, 323 aa, Rhodococcus fascians
MTSPSTTIRPRPTDADLDAQSPAADLVRVYLNGIGRTALLTAEEEVDLAKRIEAGLYAKQVLENTKRLSAVKKRNLAIIVRDGSAARSHLLEANLRLVVSLAKRYTGRGMPLLDLIQEGNLGLIRAMEKFDYAKGFKFSTYATWWIRQAITRGMADQSRTIRLPVHLVEQVNKLARIKRELHQQLGREATDEELSSESGIAVEKIADLLDHSRDPVSLDMPVGSDEEAPLGDFIEDSEATSAENAVIAGLLHSDVRVVLGTLDEREQQVIRLRYGLDDGQPRTLDQIGKLFGLSRERVRQIEREVMVKLRQGDRAEKLRSYAS

SEQ ID NO: 18010 - protein, 460 aa, Solibacter usitatus Ellin6076
MVAGVASGADAVLGRVSAHAARLGAISRQIWETPELGFHEQKSSALLRDELKADGFTIQDGVAGMPTAFTATWGSGKPVVAILGEFDALPGLSQRDVAHQDPIVAGGPGHGCGHNLLGSASALAAIGVKEEMQARGLKGTIRYYGTPFEEGGGGKVYMFHAGLFRDVDVVLAWHPGDSNSVNLRSDLAINGAKFRFYGIASHAAAAPEKGRSALDGALLMLHAIEMLREHVPQETRMHYIITNGGAANNVVPAFAEVSLGARHPDAGTLDGIWDRILKCAQAGALATETRLEVEQGTNYANILPNDALTALVSRNMKKAGGYEYTADEQKFADEIQKSLGSPKKIDGPEKILADTSEGAGAYSTDVGDLSWNIPTVQFNAATYAPGTPAHSWQAAATAGTSIGRKGLLVAARTLALSAMELMETPNAIDSAKTSFDKRRAGRQWVTRIAPDAKPQLDLKH

SEQ ID NO: 18011 - protein, 474 aa, Rhodococcus fascians
MVCAGTQPAESEDLSAGNNSGVTPQRLRHERAYVAATDIRQTVDSEPGTATPEPAVKAPAAKAPAKKAPAKRAAAKKAPAKKAAAKKTAAPATGDDVDESTPGIEDIDISEGDLAAAANDVVEGRRRRQPEEDATSEPTAEDKASGDFVWDEEESEALRQARKDAELTASADSVRAYLKQIGKVALLNAEEEVELAKRIEAGLFAVEKMRESAEKGEKLPVAQRRDMTWICRDGNRAKNHLLEANLRLVVSLAKRYTGRGMAFLDLIQEGNLGLIRAVEKFDYTKGYKFSTYATWWIRQAITRAMADQARTIRIPVHMVEVINKLGRIQRELLQDLGREPTPEELAKEMDITPEKVLEIQQYAREPISLDQTIGDEGDSQLGDFIEDSEAVVAVDAVSFTLLQDQLQSVLETLSEREAGVVRLRFGLTDGQPRTLDEIGQVYGVTRERIRQIESKTMSKLRHPSRSQVLRDYLD

SEQ ID NO: 18012 - protein, 270 aa, Manihot esculenta
KFHWKPTLGVKCLMDDEAQKIGGVNHSHATQDLYDSIAAGNYPEWKLFIQTMDPADEDKFDFDPLDMTKIWPEDMFPLQQLGRLVLNRNIDNWFAENEMLAFDPGHVVPGIHYSNDKLFQLRTFAYADTQRHRLGPNYKMLPVNAPKCNYHNNHYDGFMNFMHRDEEVDYFPSRYDPVRHAERTPLPHAIISGRREKCVIEKENNFKQPGDRYRSWTPDRQERFLCRLVNALSDPRITHEIRSIWVSYWSQCDKSLGQKLASRLNVRPNF

SEQ ID NO: 18013 - protein, 387 aa, Yersinia pestis KIM
MENVVIIDAVRTPMGRSKGGAFRHVRAEDLSAHLMRAVISRNPGLNAAEIDDIYWGCVQQTLEQGFNIARNASLLAEIPHSVPAVTVNRLCGSSMQALHDGARAIMVGDAKISLIGGVEHMGHVPMNHGVDFHPGMGRTVAKAAGMMGLTAEMLAKIHNISRQSQDEFAFRSHQRAYAATQAGHFAKEIVATNGHDAEGVLKRFDFDEVIRPETNLSGLAALRPAFDPVNGTVTAGTSSALSDGASAMLIMSESRAKSLGLTPRARIRSMAVVGCDPSIMGYGPVPASQLALKRAGLELADIGLFELNEAFAAQSLACLKGLGLLESMDDKVNLNGGAIALGHPLGCSGARISTTLLNLMERRDVQFGLATMCIGLGQGIATVFERL

SEQ ID NO: 18014 - protein, 168 aa, Vibrio cholerae
DATQLYLSEIGFSPLLTAEEEVLYARRALRGDEAARKRMIESNLRLVVKISRRYSNRGLALLDLIEEGNLGLIRAVEKFDPERGFRFSTYATWWIRQTIERALMNQTRTIRLPIHVVKELNIYLRTARELSQRLDHEPTPEEIALELDRPVDDVTKMLRLNERITSVD

SEQ ID NO: 18015 - protein, 482 aa, Ralstonia eutropha JMP134
MQLRDPSLFKALACIDGQWVGADSGATIEVTDPATGEIVAKVPDLRAAETERAIAAAERAQKGWARKTGKERAIILRRWFDLMIANTDDLAYLMTREQGKPLDEAKGEIAYAASFLEWFAEEAKRVDGEVLASPAADKRLVTLRQPVGVCAAITPWNFPAAMITRKAAPALAAGCAIVIKPAELTPLSAFALAELAHRAGVPAGVLQVVTGDARTIGAVLTASPIVRKLSFTGSTEVGRILMAQSAATVKRLSLELGGNAPFVVFDDADVDAAVDGAIAAKFRNGGQTCVCANRFYIQDGIYDAFATKFAQRASQLRVGNGLEQGVVIGPLIEEAAVEKVTSLVDDATSKGGRLLTGGLKHQLSGTYYAPTVIADATATMRVAREEIFGPLAPLFRFKRDEDAVAAANATEYGLAAYLYTRDIARAWRTAEALEYGMVGLNTGLISNEVAPFGGIKQSGLGREGSRHGIEEYLETKYLCLQM

SEQ ID NO: 18016 - protein, 447 aa, Ralstonia eutropha JMP134
MTITSPKLPQAAELDLKAHWMPFSANRNFHDDPRMVVAAKGRWLIDDQGRKVFDGLSGLWTCGAGHARAEIQAAVASQLGTLDYSPAFQFGHPQSFMLAERIAELFPGDLNHVFYTGSGSECADTAVKMARAYWRIKGQPAKTKLIGRARGYHGVNIAGTSLGGIGGNRKMFGQLMDADHLPHTLQADCAFTKGQAETGGVELANELLKLIELHDASNIAAVIVEPMSGSAGVIVPPKGYLQRLREICTQHGILLIFDEVITGFGRLGKASGAEYFGVTPDIANVAKQLTNGAIPMGAVIASSEIYNTFMAQPTSGHAVEFGHGYTYSGHPVACAAGLATLDLLARENLIQQAADLAPHFEQAIHGIRGAKHVVDIRNCGLAGAIQMAPRDGDATIRPFEAGLALWKKGFYVRFGGDTLQFGPAFNTTISELDTMFDSVGAVIETLA

SEQ ID NO: 18017 - protein, 1629 aa, Anabaena variabilis ATCC 29413
MKILIVEDDELNAYALTAVLTNQNYAVEVGSDGITAWELIQTYDYDLILLDVILPRLDGISLCRQIRSSGRQMPILLLTGCDSSHEKAIGLDAGADDYVVKPFDEEELVARVRALLRRGGTTAQPILEWGNLQLDPSSCEVRYNQNLLSLTPKEYALLELFLRHSRRVFSCSMILEHIWSYEDTPGEEAVRTHIKGLRMKLRNAGAPGDLVETVYGIGYRLKAQEEEQGSKDEVKHSQSTSKGKSQQQTLTAIAGIWQKFYGRVDEQVKVLEQAAMTSDRPEIVTLTQETLNPELRSQAIREAHTLAGSLGTFGLPEGSKLARKIEQLLKSGKKLTPTEIQSLQNWVKLLRQEVAAHEPQAASPETTSAAILQLQPPQAEAKVLAVDDDPQILAILQTLLHPWGLQVITLDDPRQFWETLRDVNPDLLILDVEMPYTNGIELCQVVRNDPQWSELPILFLTVHKDGEIVNQVFSVGADDFVSKPIVGPELVTRIINRLERVKLLHKVSESRGIGEKNSPPSPSFTDWRTIFNAEPECVTIVATDGTLLDINPAGVAAIEADSAGAVIGKRVYSLVVPEYQQVFRQLNESVCQGEQGTLEFEIITCRGNRRWMATHAVPVRNETDGNLVQLSITRDVTQYKQAELEIKRINRTLQTLSDCNQLVIRTQDEGELLQKVCQILVDVGNYRLAWVAFAENDAEKSIHPVAQAGYEQGYLQSLNLTWADTIRGQGPTGTAIRTGKTAIIQNILTDPRFEIWRCQASNRGYASSISLPLMNNGQAFGALNIYAAEANAFDSDEVKLLEELTADVAYGIVALRNRRDRQIAEAALRESQERLALTLEAVNLGIWDWNITTNQIIWSEGHARLFGIESEKFDGTYEAFQACIYPEDRGGLAEVINSARQQKTDYSHEFRIISPDGNIHWIEGTGKLYYNEMGEAVRMLGIVRDITSRKQIEATLQKVNNELELRVAERTAELVNVNRQLQSELDERQRVEEALRISQVRLARILDIADDAIISINGNQQITLFNQGAEKIFGYSAEAIIGQRLDTLIPQRFTQAHRQHVADFGQAPNLARRMGERREIFGRRQDGTEFPAEASISKFQLDKEVFYTVILRDITERKQIERMKDEFVSVVSHELRTPLTSIHGSLGMLASGLLPADSEQGRRLLEIATDSTERLVRLINDILDIERIESGRVKMERESCNLTDLIESAVSIMRPLANKAGVKLSVSHPSIQLWVDPDRIVQTLTNLLSNAIKFSTAEKTVWLVAQQYGDELLVTVKDNGRGIPADKLDSIFERFQQVDSSDSRNHDGTGLGLAICQSIVQQHGGRIWAESVLSEGSNFYFTLPILPISPNSELPDSLTHYPLSPEGDLPSPIPSTHSPLVLVCDDDPLIRTELQSLLEQGGYRVVTVATGKEAIASASTQHPDVIVLDLLMPGMNGWETMAMLKESTETKHIPIVICSVYKPTTNNQPSSDFVDWISKPVQESYLLHSLRQAIAKSSRRVRILIVEDDADLAELFVTLFERHDIETFSAKTGREAIHLSQEVNPDLLILDLILPETDGFAVVDWLQKHQRLCNIPVVVYSAKDLDESERKRLKLGHTEFLTKGRVTTKEFEQRVIELLQRITPTNVRD

SEQ ID NO: 18018 - protein, 499 aa, Saccharomyces cerevisiae
MGGEDEILSTMEDFAAVYDVLVIGCGPGGFTAAMQASQAGLLTACVDQRASLGGAYLVDGAVPSKTLLYESYLYRLLQQQELIEQRGTRLFPAKFDMQAAQSALKHNIEELGNVYKRELSKNNVTVYKGTAAFKDPHHVEIAQRGMKPFIVEAKYIVVATGSAVIQCPGVAIDNDKIISSDKALSLDYIPSRFTIMGGGTIGLEIACIFNNLGSRVTIVESQSEICQNMDNELASATKTLLQCQGIAFLLDTRVQLAEADAAGQLNITLLNKVSKKTYVHHCDVLMVSIGRRPLLKGLDISSIGLDERDFVENVDVQTQSLLKYPHIKPIGDVTLGPMLALKAEEQAIRAIQSIGCTGSDGTSNCGFPPNVLYCQPQIGWVGYTEEGLAKARIPYQKGRVLFSQNVRYNTLLPREENTTVSPFIKVLIDSRDMKILGVHMINDDANELLSQASMAVSLGLTAHDVCKVPFPHPSLSESFKQAVQLAMANGTSPGVHVRE

SEQ ID NO: 18019 - protein, 101 aa, Triticum aestivum
HEEHTRRFIQVQEAYETLSDPSRRTTYDRALARGVCRLAFSPAARRHDASAFYHQEQEEKSGWRTSWEGQISELKKRSTVKDAEENLSWGAQMRRRRAEQL

SEQ ID NO: 18020 - protein, 348 aa, Haemophilus somnus 2336
MIKKLIQSIITGLAAAALVLLILPVFKGNGYLTNVFFIQKDILSYKDAVRIASPAVVNVYNQAFAFTTNNYQPQINNLGSGVIMSKDGYILTNEHVVQNADQIVVALQNGRIFEAKLVGSDRLTDLAVLKIHADNLATIPQNPKRQAHVGDVVLSIGNPYNLGQSVSQGIISALGRNAVGDFIGRQNFIQTDAPLNRGNSGGALINSAGELIGISTLSIGKNANEIAEGLNFAIPIELANDVMQKIIRDGRVIRGYLGVQSDILFSNGKGLRDKGILITSILQGSPAHKAGIQPGDVIVSFDGIDAVSPAQMMEAISNTKPNTTINMVIQRLDKTLTLPVVIEEYKAN

SEQ ID NO: 18021 - protein, 159 aa, Listeria monocytogenes str. 1/2a F6854
MNVHDFSEKAMNGKEIALSDYKGKVLLIVNTASKCGLTPQLEGLEAMYKKLGGDNFEILGFPCNQFLRQDPGSDEEILEFCQMNYGVTFQMFSKIKVKGKDASPLYKYLTEQTGGKKVEWNFAKFLIDENGEVVERFPSKMKPEDFEDKVEALVAKVNN

SEQ ID NO: 18022 - protein, 1010 aa, Ustilago maydis 521
MSVTPPLLRGSSSEDDPTGPTATNRWGTVSGGMLSPPPAPSSGAGVRRNHTIHGARHHGKPRLEKHFEQPEDLAPTPTLADRAASGPSVSQNPSDGDENRSHVIHSSPSFNDDASLDLLASPSTKSDTAGDFVASLTPLQALYSRSSVSRNLSLPSRHSTKVVSNLSSNATQGRTSLFNSLSAITGGSDLDEHDWEKLIHSSNALGDEHQQDPHALNSLSLQHDHPWSSSLFPQGQIGAPTDSSLPTSPISRPDPFLDAHHLDRSNGSVDTFDQSAQTDTQALPGSANLVRRHQSLNHHAGRSAAQRLAARSSDLLRQYNAGDTADPTMSPYSSRTDAAFSPVRHTISLSAASSPVMPSSYSKVPWHQPTQDPIGSPSRFAASFPSQNLEPSHSRVPSTMDGSSSPLTDVTAHLSCLEISGSSALAGDSTQASRALATSTSHSTPPDSSTQSESTIVTRPLEGRKLPQLVTNRDALQRGQRADGASGPFSAAAYVPPIGHAHARNPSNDPAAPLASSLDADSSQQYGPFTAAPAGNWLDKDKIVGRLDAGHASRGAGSDSQAWSHQTQVGPYAAGAMDPSVIALSMALAQEQQRNAILQAQLGARSNAGGLQEPHLFGMQPIDLTGPMQSIGQQLRGGPMPSSPPMGPVGNLASRGQPFAMQQSPPPFRAPMHALAQSPRPSPAGVFASADTEAITPPTPVDPTYLALQKGYNPAPATFNLAPVNARFFVIKSYTEDDVHKSLKYEIWASTDKGNQRLDKAFRESAHNSPIYLFYSVNASGHFCGMAQMLTPLDYATSSNVWAQDGKWKGTFKVRWIYVKDLPNNQLRHIRLTNTPECKPVTQSRDTQELTPEAGREVLRIMAEYSAKTSLLQDFNFYEMQARTGGGQLAQQGSAAVGMGGLPPRNSPKPSGSPALGFGGSSFAASADANFAHRSGVSASPNSGARRAQSSGISQRPHGSSGSGLAPGTPRSAVQPIQDLRSDKANHAAPGTCTDAESAAQVAGLAPSAL

SEQ ID NO: 18023 - protein, 111 aa, Archaeoglobus fulgidus DSM 4304
MRDIGIDVKPPERECEDENCPFHGTLSVRGQLLRGKVVKVYGKTAVIERELIRYVPKFERYMKKRSKLHAHNPRCIRARPGDIVTIGECRPISKTKSFVILEVVGNEGNKS

SEQ ID NO: 18024 - protein, 381 aa, Xanthomonas oryzae pv. oryzae KACC10331
MPSRALALVVACAVPSFVPAVFSRSVSALPADPFIHCPSPLSTPQGHSMSNDTQPKIAIIGYGSQGRAHALNLRDSGFDVTVGLRPGGPTESKAQADGFTVVAPSEAVKSADLVAILTPDMVQKKLYEDVIAPNMKQGACLLFAHGLNVHFDMITPRADLDVVLVAPKGPGALVRREYEIGRGVPCIYAVYQDTSGKAEQFALTYAGGLGGARANIIKTTFKEETETDLFGEQAVLCGGASSLVQAGFEVLVEAGYQPEIAYYEVLHELKLIVDLFYEGGITRMLEFVSETAQYGDYVSGPRVIDASTKARMKDVLTDIQNGTFTKNWVAEYEAGLPNYTKFKQADLEHPIEEVGKKLRAKMVWLNGEQQAAAAPANQQAA

SEQ ID NO: 18025 - protein, 659 aa, Neisseria meningitidis Z2491
MSQLANAIRFLSADAVQKANSGHPGAPMGMAEMAETLWTKFLNHNPANPKFYNRDRFVLSNGHASMLLYSLLHLTGYNLSIEDLKNFRQLHSKTPGHPEYGYTDGVETTTGPLGQGIANAVGMALAEKILAAEFNKDGLNIVDHYTYVFMGDGCLMEGVSHEACSLAGTLGLGKLIVLYDDNNISIDGKVDGWFTENIPQRFESYGWHVVPNVNGHDTAAIQAAIEAARAETGKPSIICCKTLIGKGSANKEGSHKTHGAPLGADEIEATRKHLGWTYPAFEIPQEIYDAWNAKEQGAKLEAEWNELFAQYQTKYPAEAAEFVRRMDKKLPDNFDEYVQAALKEVCAKAETIATRKASQNSIEILAKELPELVGGSADLTPSNLTDWSNSVSVTRDKGGNYIHYGVREFGMGAIMNGLVLHGGVKPFGATFLMFSEYERNALRMAALMKINPVFVFTHDSIGLGEDGPTHQPIEQTATLRLIPNMDVWRPCDTAESLVAWAEAVKAADHPSCLIFSRQNLKFQARSEQQLNDIKRGGYVISEAQGNAQAVIIATGSEVELALEAQKALAAQNIAVHVVSMPSTNVFDRQDTAYQAAVLPESLPRIAVEAGHADGWYKYVGLNGAVVGINRFGESAPADLLFKAFGFTVDNVVDTVKSVL

SEQ ID NO: 18026 - protein, 786 aa, Bradyrhizobium sp. BTAi1
MTPPMPNPTGASSEALLEAMQAPPPAAGALSFRMFLASVLAAAATVVAVELLTDLQKDRIVSLLMLAFGAVVVMIVLTSMLIRKSRHAIALANALARQNDQLAQTTRLLGDAQRIGRLGHWVTDPSGEFAVWSDELFEIAGLEPVDQVAFAKMLDIIHPEDVGAYVRARDRSRATGCAFIQELRFVTPNGQVRWVRIEANASDEADGVFRERFGIVQDITERKLAEINADQARLLLMDAIESLTNGFVLFDKDDRFVMSNTMFREMFPAWTVLMKPGISFTELMRRAYEHGLIRSKGDRFEEWLARKTAWHLGGSRMIEHRELNGRWIQSVDHRISDGGTVCLVTDITAFKTVQAELEQKLAYVEAIRSDLEQQTQELEARGAELRAARDAAEAANRAKSDFLAIMSHEIRTPLSGMVGMVDLLRGTSLSEEQKRYTALAKESADLLLEVINDILDFSKLEAGRLQSECIDFDVPNLVESAVSFMGEKARRRGLDLKVSLAPGLPQYLEGDPTRIRQVMLNLVGNAIKFTEQGSIEVRASHRQLDGGVVDLRIEVIDTGIGMSPEILAQIFDPFVQADTSISRKYGGSGLGLAICRQLCTIMGGSIGVDSELGRGSRFWFETKCRCGEALALPAETVVASVDRPLDILVAEDSPIIATLIQSLLVKQGFRPTMVVNGAEAIAAISDKVYDLVLMDVQMPEMDGISATKAIRQLPGPERCVPIIALTANALVGQRETYLAAGMNDYVTKPIQPPLLFAAIRRWALPQYADAPPLQAGGNGQLEMFVS

SEQ ID NO: 18027 - protein, 346 aa, Trichodesmium erythraeum IMS101
MSPYLEELKVTAQAMVAKGKGILAMDESNGTCNKRFEKLGIPTTEEYRQAYRQLILTTPDLSNYISGPILYDETIRQSTTEGVPFLKVITDAGMIPGIKVDTGAKNLANHPNEKVTEGLDGLGERIAEYYQMGARFAKWRAVITIGDGIPSRACIEANAHGLARYAALCQEGGLVPIVEPEVLIDGNHTLERCFEVTDETLHTVFNHLYTQGVAFDQMILKPSMVIPGKDCPTQVSVEAVAEATINCLLKNVPVTVAGIAFLSGGQSIEQSSAHLNAMNALFGSRCPWPVTFSYARAIQQPALDYWSGDSARVAEAQQKLLARAKCNSAASVGEYSASMDETPVLV

SEQ ID NO: 18028 - protein, 373 aa, Wolbachia endosymbiont of Drosophila ananassae
MPGRLPHIMDYERNREVIVWCSNNYLGMSQNESVIAAIQNSSVGAGGTRNISGTTKEVVELEKSLACLHKKEAALTFACGYLANQTTLSTLSSVIPGVVIFSDEKNHSSMIEGIKSGKRPKHIFKHNNVNHLEQLLKSIDKKTPKIIALESVYSMDGDIAPLEAICDLADQHNAITYLDEVHAVGMYGSHGGGIAEREGLMDRITVIQGTLSKAFGVMGGYIASSKSLVDVIRSSAPGFIFTTAMSPVLAAAAKASVEHLKSSNIEREKQKQVVEKVKNSLRNAGINFIPTETHIIPIIIGNSELSKKASKLLFDEYGIYVQHINYPTVPRGTERFRITPTPYHTDEMIEHLTESLVKVFEKLSISLACLCYS

SEQ ID NO: 18029 - protein, 291 aa, Ustilago maydis 521
MGESRTELIHWINELLGFSYTKVEQCGSGAAYAQIIDSIYYNVPLAKIKFDAKHDYEYINNFKVLQEAFKRNRIDKPIPVDRLIRCKMQDNLEFLQWLKRYWDQNFSGEMYDAEARRGGVGAAPPPLVGAVSVGAARSTGAARAAPSAQAATSRSSARAPPAAASTTRRPLGGAPARAPAASAASVPNETIQALTAQMDEMKVSVDSLEAERDFYFAKLRDIEILVQERLGVLAEQFPAPSEDDDPEGLHVGSEEQESLKQIQAILYSTEEGFELPEGGDELVQPDEDEMF

SEQ ID NO: 18030 - protein, 631 aa, Glycine max
PYSPPLPLLYFSEFCDPHAIGYRAPPRVSYVAPPPIKFKSKEQEKEKKDDFDWDSLRIEAQAKAGKREKTDNTMDSLDWDAVRCADVSEIAETIKERGMNNRLADRIKNFLNRLVEEHGSIDLEWLRDVPPDKAKEYLLSIRGLGLKSVECVRLLTLHHLAFPVDTNVGRIAVRLGWVPLQPLPESLQLHLLELYPVLESIQKYLWPRLCKLDQETLYELHYQMITFGKVFCTKSKPNCNACPMRAECRHFASAFASARFALPGPEQKSIVSTTGNSVINQNPSEIISQLHLPPPENTAQEDEIQLTEVSRQLESKFEINICQPIIEEPRTPEPECLQESQTDIEDAFYEDSSEIPTINLNIEEFTLNLQNYMQENMELQGGEMSKALVALNPEAASIPMPKLKNVSRLRTEHCVYELPDTHPLLQGWDTREPDDPGKYLLAIWTPGETANSIQPPESNCSSQEECGQLCNEKECFSCNSFREANSQIVRGTLLIPCRTAMRGSFPLNGTYFQVNEVFADHDSSLNPISVPRSWIWNLNRRTVYFGTSVTTIFKGLTTQETQQCFWRGYICVRGFDREARAPRPLMARLHFPASKLAAKTKEKAKKESNSAKSRASKPNPEQPELIANRDK

SEQ ID NO: 18031 - protein, 435 aa, Solibacter usitatus Ellin6076
MLAFIRFSLYRRPEKRQSKSMRRVVITGIGAVSPNGIGRERFWEATRNGVSGVRRITRFDPSAYQVQVAGEVPDEFDENRYVEVKDRPHVSRAVPLAAASVAEAVADAGLDVKAMGRDELRGIGVIVGSGGGSQDFTEEQYRLYYAGLIKQCSVYTIPTGTIGTLASEVSMRFGFRGLSHIVSTGCTSSTDAIGYAFRNIQAGVLSTVVAGGVDSPIAPLILRGFQLMRIMSTRWNHDPTRASRPFSKDRDGFVIAEGSWFFVLEEMEQAKSRGAHIYGEIAGYGSTCEAFHRVRLEECGEEPARAIGMAVEEAGIQPSDIQYIHYHGTSTELNDRIETRAVKLAFNGHAGKLAGSSLKSMIGHPQGACGAAGIAATLLAMRDGILPPTINVDEPDENCDLDYITDIGRKMHVEHAVANCIAFGSKNSAMVLRRA

SEQ ID NO: 18032 - protein, 474 aa, Coxiella burnetii RSA 493
MTKEIKTEVVVLGSGPGGYAAAFRAADLGKKVVLVERYETIGGVCLNVGCIPSKALLHVAKVIDDAKDMSSFGIDFGKAALEIEKIRSWKENVVKKLTGGLKMMAKQRKVEIITGYGKFSSSNELAVENKEKSVTKIKFDQAIIAVGSLPVKLPFIPDDPRIMDSTGALELEDVKGHLLVLGGGIIGLEMATVYHALGTKISVVEMMDQLIPGADADVVKPLHQRIQKRYEEILLKTKVTKIEPKKDGLYVTFEGENAPKEPKKYDRILVAVGRSPNGKLIDAEKAGVKVDDKGYIAVDKQMRTNVSHIYAIGDVVGQPMLAHKATYEGRLAAEVIAGIKHYNDARCIPAVAYTDPEVAWVGLTETQAKEKGIKYEKGVFPWAASGRALSLNRSEGSTKLLFDEKGTVIGGGIVGVNAGDLISEVALAIEMGCDAEDVGLTIHPHPTLSETVMMACEMFEGTITDLIPPKKKDK

SEQ ID NO: 18033 - protein, 238 aa, Burkholderia vietnamiensis G4
MSPYIAEFIGTAILVLLGNGAVANVLLAKTKGKGADLIVIVMGWAMAVFVAVYVTASFSGAHLNPIVTISLALAGKFAWSKVAGYVIAQMLGGMAGALLVWLAYRQHFANEADADLKLAVFCTAPAIRSTTHNVLTEAICTFVLILGVLYLASPQVGLGALDALPVGLLVLGIGISLGGPTGYAMSPARDLSPRIMHALLPIPGKRDSDWRYAWVPVIGPLLGGAAAAGLYLRLHAMA

SEQ ID NO: 18034 - protein, 717 aa, Triticum aestivum
  misc_feature (398)..(398): Xaa can be any naturally occurring amino acid
  unsure (1)..(717): unsure at all Xaa locations
MAGAMVDRATSDMLIGPDWAKNMEICDICNRDPGQSKDVVKALRKRIAHKNPKVQLLALTLLETAIKNCGDIFHMHVAERDLLHEMVKLVKKKSDQRVKDKILVLIDTWQEALGGPRSRYPQFYAAYHELVRAGAQFPKRSERPAPLFNGQSEAAKSMRSPDQRDEAESSAGNDFPALSMSEIQNARGIMDVLAEMLNALDPGNREGLRQEVIVELVDQCRTYKQRVVQLVNTASDEELLSQGLALNDDLQRVLAKHDAIAAGIAVRVEKRPKSLQALVDTEDSANQDSKKEQALVDIDDPTSQDSKTEQNQSTSEPSPFEQLALPAPPVSNGSANAAPKPDSGIDLLSWDDTPSTAENSLALVPVTDPLADSTSNQNALAIVDIYSQNNTANSNAQXLTPLGFDSSPTPLGSQPYNTATQHPVQSQQPPQQVALYSNGSAVNPGTSYDPASQYNHTNSGWNGQVANHAAPPPQQVNYDDQSGALPPPPWEAPAAPSNEMPNGQLGGMQPLPTPASQFGGVQPLQPQNNHMAGLQPQPMYNNQPGAMVPHAMQSNQTVGGQMQPGYGNQYGHLAPQPMPMPGMQFAGMQPSPMPGAQPGMMYAQPMPGAQFGGMPQQQMYGGGGRMATQYGYVQQQAAQYYNQGRPAMYGYPGTNGLSQSMYGLSMQDSSYMGGMNSTYQAAPSSSSMAQPMRPSKPEDKLFGDLLSIAKTKQNRAS

SEQ ID NO: 18035 - protein, 1091 aa, Arabidopsis thaliana
MMMSNLPKDLVEEILSRVPFKYLRAIRSTCKNWYDLSKNRSFANKNIDKAAVSGEKEFLMITQFNVFWVGVNLHRSQNNSFDLSIQLKAKIVSRDKKDDLFQKSQVIHCNGVFLCVREKMLVVLNPYWGQTKRIMPRPPFGCFDRYALGYDKSSGSHKILRLFGVNQNNLNIYDLSSSSWMIPDGTLERDMEYMKQGVSLNGDTYWYAKDKESIDWYLLCFDFTRERFGTPLPLPFSNEGYTLHKGYKSLSALKEEKLAVLLWDTMVIWVTNKIEPDAVSWSIFLKLDMEPSIYCRYGNFFIDEEKKVAVVFEKDSSSWSWMYNPNYNKAYIAGENENSFTLHFTKKRVDKGRASYTSILDSVQSSTCLSRRFLKLDLTYRCDVVSSLKLETTIIMMMMSNLPNDLVEEILSRVTVTFMRTVRSICKKWNALTKDRSFTNKYIRNIAALGEREFLMIKEFSIYLVGVNLHGIQNNNFDLSIELKGKLISMDNTIRRFCISQIFHCNGLFLCVSQKDMDNRLVVWNPYCSKPRWIKPSYNYRTVDRERFGPRLPLPFMNLDDVSLSVVKEEKLAMLLKRWDTCEVEIWVTDKIEPDVSWSKFLKVGIKPRFDFANFVVIDVVKKVALVFDKNKAEKFQYSYNIAYIIGEKASPEELSSHRERKKRVESCLKHEKASPQGFVIGFLPKRPHTSCRDCIQSQPYGQASKAHACGNLRSCQDRLYPTISPSNQRPRTWASFLRHILISNLPDELVEEILCRAPVTSLKAMRSTCKKWYVLTKDQRFAKKRGKEFLMIMNRRVYLIGVNLHNNIDLSIKCRGRLISRDETAQGFYVSQVFHCNGLLLSVSGKTIDDTRLVVCNPYGVKPKWINPKDNYGRLDIFSLGFDKLCGSYKILRIYDFDNKLQIYDLSSNSWMIPRDTLGRDIEYMQNGVSSKENTYWCARDKQSQYCFLFCFDFTRERFGPRLPLPFNGAYVSLSAVKEEQLAVLFQPSDKSEIEIWVTNKIEPEEVSWSVFLKVEMKLRVLSWNFLIDKEKKFAVVFDKDKAKGFKTNYDIAYVIGENGYYRRVDLRESPNKPLCRIVSCYVPSCVQIE

SEQ ID NO: 18036 - protein, 447 aa, Saccharum hybrid cultivar CP65-357
MGKEKTHINIVVIGHVDSGKSTTTGHLIYKLGGIDKRVIERFEKEAAEMNKRSFKYAWVLDKLKAERERGITIDIALWKFETTKYYCTVIDAPGHRDFIKNMITGTSQADCAVLIIDFTTGGFEAGIFKDGQTREHALLAFTLGVKQMICCCNKMDATTPKYSKARYDEIVKEVSSYLKKVGYNPDKIHFVPISGFEGDNMIERSTNLDWYKGPTLLEALDLINEPKRPSDKPLRLPLQDVYKIGGIGTVPVGRVETGVIKPGMVVTFGPSGLTTEVKSVEMHHEALQEALPGDNVGFNVKNVAVKDLKRGYVASNSKDDPAKEAASFTSQVIIMNHPGQIGNGYAPVLDCHTSHIAVKFAELVTKIDRRSGKELEKEPKFLKNGDAGMVKMVPTKPMVVETFSEYPPLGRFAVRDMRQTVAVGVIKSVEKKDPTGAKVTKAAAKKK

SEQ ID NO: 18037 - protein, 439 aa, Triticum aestivum
MSFRSIVRDVRDGFGSLSRRGFDVRFLGHRRGKSHSAVHELHDPAPVIQSSCWANLPPELLHDVIERLEASEATWPSRKHVVACAAVCRTWREMCQEIVKNPEFCGKITFPVSLKQPGPRDGTIQCFIKRDKSTQTYYLYLCLTSAVVAENGKFLLLAKRHSRPTCTEYTIFMNTDNTSRSSNMYIGKLRSNLLGTKFVIYDTQHPCNIPNVSQSGKTSRRFYSRKVSPKASPSTYSIAQVSYELNVLGTRGPRRMNCVMNSIPASSLVAGGTVLCQPDSAVAHSLDESFGSISFSKSSIRDRSIRFSSTRFSGISIGGSRNGGQALGDNDECKEWPLTLRNKAPRWHDQLQCWCLNFKGRVTVASVKNFQLVAATESTAEAPTPSQPAPPPPSEHDKVILQFGKVAKDMFTMDYRYPLSAFQAFAICLSSFDTKLACE

SEQ ID NO: 18038 - protein, 441 aa, Saccharum hybrid cultivar CP72-2086
HINIVVIGHVDSGKSTTTGHLIYKLGGIDKRVIERFEKEAAEMNKRSFKYAWVLDKLKAERERGITIDIALWKFETTKYYCTVIDAPGHRDFIKNMITGTSQADCAVLIIDSTTGGFEAGISKDGQTREHALLAFTLGVKQMICCCNKMDATTPKYSKARYDEIVKEVSSYLKKVGYNPDKIHFVPISGFEGDNMIERSTNLDWYKGPTLLEALDLINEPKRPSDKPLRLPLQDVYKIGGIGTVPVGRVETGVIKPGMVVTFGPSGLTTEVKSVEMHHEALQEALPGDNVGFNVKNVAVKDLKRGYVASNSKDDPAKEAASFTSQVIIMNHPGQIGNGYAPVLDCHTSHIAVKFAELVTKIDRRSGKELEKEPKFLKNGDAGMVKMVPTKPMVVETFSEYPPLGRFAVRDMRQTVAVGVIKSVEKKDPTGAKVTKAAAKKK

SEQ ID NO: 18039 - protein, 358 aa, Arabidopsis thaliana
MTMDSKVCSVRFHLRRSKEEEEDTMDLSIKQVDLLNQVEISRVYHCDGLLLCVAKDNSRVVVWNPYLGQTRWIRPRTESNIGDSYALRYDINRNHKILRMVQTRNVSVYRYEIYDLRSNSWRVLEVTPNGEMDPNHPLYGVSVKGNTYFFAHEDSSSGEIDEDGDIIDLEDFLLCFDFTTETFGLRLPLPFHSTIDATVTLSCVRDQQLAVLYHNEGLHSDDRFTTVEFWVTTSIEPNSVSWSKFLTVDMRPLALTGVRFDNDMGATFFIDEDEKVAVVFDLDGYLSTESARYHTAFISGKDGFFKPVTLGVAPNVGEPCPRTGHIPTTYRPPLVCSSTYLPSLVQVNQQRKRKERHV

SEQ ID NO: 18040 - protein, 325 aa, Pseudomonas syringae pv. phaseolicola 1448A
MAKRIQFSTVGGPEVLEYVDFEPEAPGPQAVVVRNKAIGLNFIDTYYRSGLYPAPELPSGLGAEGAGVVEAVGDEVTRFKVGDRVAYGTGPLGAYSEVHVLPEANLVKLADSVSFEQAAALMLKGLTVQYLLRQTYQVKPGEIILFHAAAGGVGSLACQWAKALGAKLIGTVSSPEKAAHAKALGAWETIDYSHEDVAKRVLELTDGKKCPVVFDGVGQDTWLTSLDSVAPRGLVVSFGNASGPVSGVNLGILAQKGSVYVTRPTLGTYANNAQNLQAMADELFDMLASGKLKVDNIQQYALKDAAKAQTELSARRTTGSTILIP

SEQ ID NO: 18041 - protein, 412 aa, Bacillus anthracis str. A2012
MEKKRVVITGLGAVTPVGTDVETAWENIKKGVSGIGRLTRIDPELFPAKVAAEINDFEVEKYIDKKEARRMDRFTQYAVAAAKMAVADAKLEITEENGPRIGVWIGSGIGGMETYEEQFKIFTEKGPRRVSPFFVPMMIPDMAAGQVSIATGAKGINTCSVTACASGANSIGDAFKAIQRGDADAMITGGAEAPLTSMAFAGFSSAKALTFNEDPATACRPFDKNRSGFVMGEGSGILILEELEHALARGAHIYAEIAGYGATGDAFHITMPAPGGEGGVRAMRQALADAGLQPEDIDYINAHGTSTDANEKYETMAIKETFGEHAYKVAISSTKSMTGHLLGAAGAVEAIFSIKSITDGVIPPTINYETPDPECDLDYVPNNARHQEVNAVLSNSLGFGGHNAVLVFKSYK

SEQ ID NO: 18042 - protein, 250 aa, Manihot esculenta
MPKNYPKVSEEYQKAIDKARRKLRGFIAEKGCAPLMLRIAWHSAGTYDVKTNTGGPFGTMRHAAEQGHAANNGLDIAVRLLEPIKEQFPILSYADFYQLAGVVAVEITGGPDIPFHPGREDKPEPPPEGRLPNATKGADHLREVFGKTMGLTDKDIVVLSGGHTLGRCHKERSGFEGPWTPNPLIFDNSFFQVLLDEPTEDLLQLPTDSVLVTDPVFRPYVEKYAADEEAFFADYAESHMKLSELGFAEA

SEQ ID NO: 18043 - protein, 449 aa, Xanthomonas oryzae pv. oryzae KACC10331
MAADLFETYAVTVIATMLLGSLTLAETGPHAVLYPLVLGGVSIIASIVGATFVKVKAGGSIMGALYKGMIVSGVLAALAYWPITQSLMRDNSHGATALYACALIGLVLTGLIVWITEYRTGTQYTPVQHVASASTTGHGTNIMAGLGISMKSTALPVIAVCAAICGAFHFGGLYGIATAATAMLSMAGMIVALDAYGPITDNAGGIAEMAELPPEVRNITDPLDAVGNTTKAVTKGYAIGSAALAALVLFADYTHNLQAVHPGQVFAFDLSDRTVIMGLLIGGLIPYLFGAMAMEAVGRAAGAVVEEVRRQFRELPGIMAGTAKPQYGRVVDMLTRSAIREMIVPSLLPVVVPIVVGMLLGPHALGGLLIGTIVTGLFLAISMTTDGGAWDNAKKYIEDGHFGGKGSEAHKAAITGDTVGDPYKDTAGPAINPLIKIINILALLLVPLV

SEQ ID NO: 18044 - protein, 191 aa, Xanthomonas oryzae pv. oryzae KACC10331
MLKDRANQDRQYLTISIAGAVLFVLVGLFLSWYTAIGFALGAVLSGLAGYIGMNVSVRANVRTAEAARHGIGKAMDVAFRGGAITGMLVVGLGLLGVAGYFAALQAMGLPLEQNLHALVGLAFGSSLISIFARLGGGIFTKGADVRADLVGKVEAGIPEDDPRNPAVLPTTSATMSATAQAWPRIYSKPMQ

SEQ ID NO: 18045 - protein, 307 aa, Anabaena variabilis ATCC 29413
MSIIVFGSINIDLVATAPKLPIAGETLLGEDFFKVPGGKGANQAVAVAKLGVPTQMVGRVGAHGFGAELMENLQDAGVQTDNIFVDETASSGVAMITVAHDGENQIVVIPGANGRVNQADVERLSYILPTATALLLQLEIPITAVIAAAQAARSNNITVILDPAPAPSDLPAELYPLIDIITPNEVEAGQIVGFPVDGEEAARKAAGVLLQRGVKSAIVKLGAKGVVCATDKETFFVPAFFVDTVDTVAAGDAFNGGLATALYSGLSLHQAVIWGAAAGALAATKLGAQTSLPDKLTFEAFLKERGL

SEQ ID NO: 18046 - protein, 386 aa, Bacillus megaterium
MTQRIEDLSIATIRTLSIDAIEKANSGHPGMPMGAAPMAYTLWTKFMNINPKNPNWFNRDRFVLSAGHGSALLYSLLHLAGYDLSIEDLKNFRQWGSKTPGHPEFGHTAGVDATTGPLGQGIAMAVGKAMAERHLAETYNKEGLEIVDHFTYGICGDGDLMEGVSAEAASLAAHLKLGRLVVLYDSNDISLDGDLDRSFSENVEDRFKAYGWQVIRVEDGNDLTAIANAIEEAKGDLTRPTLIEVKTTIGFGSPNHAGTSGVHGSPLGSDETKLTKEAYAWTFEEDFYVPEEVYAHFKATIAEDGQKKENEWNDVFAQYKEKYPELGRQFELAVEGKLPEGWEETLPAYETGSSLASRASSGEVLNAVAQAVPQFFGGSADLAGSN

SEQ ID NO: 18047 - protein, 222 aa, Shewanella sp. ANA-3
MIDLYTAATPNGFKISIALEEMGLDYRVHKLDFNTNEQKQPEFLAINPNGRIPAIIDRDNEDFVVFESGAILLYLAEKTGKFLPADPKKRSQVIQWLMFQMSGVGPMMGQANVFYRYFPEKIPAAIERYQKEGRRLFEVMNTQLAKHQYLAGDEYTIADIATWPWVRIHEWSGINMQGLTHLQRWLDELALRPACQKGIVTPPPSVLSDEERAKQIQKMVTK

SEQ ID NO: 18048 - protein, 428 aa, Oryza sativa
MSSSLPILPKSLKDIPRSHNTQNILMPGQLPNDSMPLHQSATQSSISHPRASVVRSSYSAMLGYAANPIDSVSSHEGHFMAAPFISQSSNAEMLQYLCNNNTHGGHTVPTFFPAPACGAPDYMDTITVPDNHTQSGSSTVTSDAAKQNEWWADIMNDDWKDILDATATDSQSKSMAQPSNSAASQPAFNQSTSSHSGDICPVTSPPPNNSNASASKQRMRWTPELHESFVHAVNKLGGSEKATPKGVLKLMKVDGLTIYHVKSHLQKYRTARYKPDLSEGKTQEGKTTDELSLDLKASMDLTEALRLQMEVQKRLHEQLEIQRKLQLRIEEQGKYLQKMFEKQCKSSTQSVQDPSSGDTATPSEPSNSVDKDSEAALDPNRIGDNHPKNSTNVGANLKTAATESPDSPVIATDGSELPQEKRRRVHES

SEQ ID NO: 18049 - protein, 604 aa, Escherichia coli
MLNAWHLPVPPFVKQSKDQLLITLWLTGEDPPQRIMLRTEHDNEEMSVPMHKQRSQPQPGVTAWRAAIDLSSGQPRRRYSFKLLWHDRQRWFTPQGFSRMPPARLEQFAVDVPDIGPQWAADQIFYQIFPDRFARSLPREAEQDHVYYHHAAGQEIILRDWDEPVTAQAGGSTFYGGDLDGISEKLPYLKKLGVTALYLNPVFKAPSVHKYDTEDYRHVDPQFGGDGALLRLRHNTQQLGMRLVLDGVFNHSGDSHAWFDRHNRGTGGACHNPESPWRDWYSFSDDGTALDWLGYASLPKMDYQSESLVNEIYRGEDSIVRHWLKAPWNMDGWRLDVVHMLGEAGGARNNMQHVAGITEAAKETQPEAYIVGEHFGDARQWLQADVEDAAMNYRGFTFPLWGFLANTDISYDPQQIDAQTCMAWMDNYRAGLSHQQQLRMFNQLESHDTARFKTLLGRDIARLPLAVVWLFTWPGVPCIYYGDEVGLDGKNDPFCRKPFPWQVEKQDTALFALYQRMIALRKKSQALRHGGCQVLYAEDNVVVFVSVLNQQRVLVAINRGEACEVVLPASPFLNAVQWQCKEGHGQLTDGILALPAISATVWMN

SEQ ID NO: 18050 - protein, 404 aa, Neisseria meningitidis Z2491
MDKFPKSAKLDHVCYDIRGPVHKKALQLEEEGNKILKLNIGNPAPFGFEAPDEILVDVIRNLPTSQGYCDSKGLYSARKAIVHYYQTKGLRDITVDDVYIGNGVSELITMSMQALLDDGDEILIPAPDYPLWTAAATLAGGTVRHYLCDEENGWFPNLADMEAKITPKTKAIVVINPNNPTGAVYSREILLEIAELARKHGLIIFADEIYDKILYDGAVHHHIAALAPDLLTVTFNGLSKSYRVAGFRQGWMVLNGPKHHAKGYIEGLDMLSSMRLCANTPMQHAIQTALGGYQSINEFILPGGRLLEQRNRAWELVSQIPGVSCVKPMGAMYMFPKIDTEMYRIRDDMKFVYDLLVREKVLLVQGTGFNWIKPDHFRIVTLPYVHQIEEAMGRLARFLQTYRQ

SEQ ID NO: 18051 - protein, 675 aa, Arabidopsis thaliana
MVNAMVERATSEMLIGPDWAMNLEICDMLNSDPAQAKDVVKGIKKRIGSRNPKAQLLALTLLETIVKNCGDMVHMHVAEKGVIHEMVRIVKKKPDFHVKEKILVLIDTWQEAFGGPRARYPQYYAGYQELLRAGAVFPQRSERSAPVFTPPQTQPLTSYPPNLRNAGPGNDVPEPSAEPEFPTLSLSEIQNAKGIMDVLAEMLSALEPGNKEDLKQEVMVDLVEQCRTYKQRVVHLVNSTSDESLLCQGLALNDDLQRVLTNYEAIASGLPGTSSQIEKPKSETGKSLVDVDGPLIDTGDSSNQANGATSSSGNGVLNQLALPAPPVTNGSANSKIDLLSGDDLALVPVGPPQPASPVASDQNALALIDMFSDNTNNPSPATAPSGNPAQNIPLNPQGHQQPNSQAGEAGLQQSNGFAPQVGYSQFEQPSYGQGVSSPWSSQPAQQPVQPSYGAQDSTAFPPPPWEAQLQDYSPSAESGSPFSPGMHPTQTAFTHAQPVNNNNPYPQIPQTGPPVNNNSPYAQMPQTGQAVANISPYPQIPQNGVYMPNQPNQALGSGYQPQQQQQQQMMMAQYYAQQQQLQQQQQQQAYGNQMGGYGYGYNQQQQGSSPYLDQQMYGLSMRDQTSHQVASSSSTTSYLPPMKPKNKPEDKLFGDLVDISKFKPTKPTSGRAGTM

SEQ ID NO: 18052 - protein, 125 aa, Caulobacter crescentus CB15
MGAMRILLVEDDEAIRDLVTGVLEGAGYEVSTAADGQAALDMLPGVAPHAMVVDINMPGMDGLALLHAVRRDPAFAEIPALMLTAQTSPEDIRRSMSLGAADFIGKPFEARVLLRRLERMVRSAS

SEQ ID NO: 18053 - protein, 586 aa, Bacillus cereus ATCC 10987
MEVRNEIKKKGSWRQFLRLIQDTNPSKGILVFALFMSLLSTGASLFIPMLTKGLVDNFSLSSISTGQIVGLVAFFIMQTIAAGLSIYLLNYIGQKIVAGLRERLWKKVLILPVSYYDQNRTGDTISRMTNDTGVVKTLISEHLSNLLTGGISIVGSLIVLFVLDWKMTLLLLTVIPLSVLILVPLGRKMYKISKALQDETASFTSVLTQVLSEIRLVKSSNTEKREYETGNKGIEKLLQFGLKEGKVQALISPVMSFVLMALLVIIVGYGGMRVSSGALTTGELVAFILYLVQIIMPMSQLSMFFTQFQKAIGATERINTILEYEVEDHETGVKVTNAKQPIVLENVYFEYNEEEQVLKNIDFTIESGKVTAIVGPSGSGKTTLFSLLERFYEPTSGAIKLGKDAITSYSLQSWRRQIGYVSQDSPLIDGTIRDNICYGVEGEVTDEEIEKVAAMAYVDAFIHDLPNGYATEVGERGVKLSGGQRQRIAIARALLRNPQILMLDEATSSLDSKSESVVQKALNNLMKGRTTLVIAHRLSTVVDADKIIFIEKGNLTGSGTHDELLRTHDMYREFATQQLKIKEGVL

SEQ ID NO: 18054 - protein, 421 aa, Neisseria meningitidis Z2491
MSEALAKETLNPFEIARKQVKTACDRLKTDPAVYEILESPTRVLEVNFPVKLDDDTVKTFTGYRSQHNNAVGPYKGGVRFHPGVNLDEVKALSIWMTIKCCVAGIPYGGGKGGITLDPRDYSEAELERIARAYSEAISPLIGEKIDIPAPDVNTNGKIMSWMVDAYENVVKHSAPGVFTGKPVEFGGSLARTEATGYGVNLAAVQALEKLGKDVKGATYAIQGFGNVGYHTGYYAHQSGAKVVAVSTVDVAIYNENGLDMEALFKEFQEKGFITNEAGYGKEITNAELLALDVDVLAPCALENQLTSENAGKVRAKIVVEGANGPTTPEADVILRQNGVLVVPDILANCGGVVVSYFEWVQNLQGYYWEFDEVQEKETVVLRRAFRDIWNLAQEYDVDLRTASYMMSIRRVEKAMKLRGWY

SEQ ID NO: 18055 - protein, 343 aa, Kineococcus radiotolerans SRS30216
MSDEHAPVDPALVPRRELRGGATVPAIGIGTFGSDRYSPAEVAAAVAGAVAAGYRLVDCAAVYGNEAQVGEALAGAVAGGVDRDELFVVSKVWNDAHAPADAVASVHRSLRDLRLDHLDAVFVHWPFPNHHPPMADTDARDPRARPYDHDAYLALWGALEGLVDSGLVRHLGTSNTTVAKLDLLLRDARIPPALNEMELHPCFQQPELFAHCVRHGIQPVGYSPLGSPSRPERDRTPGDVVDTEDPVVVRIAREHGVHPALVCLKWAVARGQVPIPFSVKPAQYTANLRAVVEDPLTAQEVADLAAADRGERLIKGQVFLWPGAESWRDLWDEDGTIVGWTER

SEQ ID NO: 18056 - protein, 235 aa, Neisseria meningitidis Z2491
MNAAIEHVQAVAFDLDGTLCDSVPDLAAAAEAMLEQLGMKPLPAKVVESYVGDGIGKLVHRVLTNDRDREADSELWEKGFVSYMKYYRDHLSVFTRPYPETEAGLALLKSLGIPLAVITNKNEILAAELLKQLGLADYFSLILGGDSLPEKKPSPLPLRHAAEVLGIDVANMVMVGDSRNDIIAAKAAGCLSVGVTFGYGDMTLLSQDDATRPDWIIGSLPEIYENLQPQKNKEE

SEQ ID NO: 18057 - protein, 191 aa, Zea mays
MAAVGARPVLYHHHPHPAPAGGAPAPMSSSYFSRGGGSSSPASSLSAAHLDISEFLFDDASVVVPPDASGGGAISAGGAGSAAAPERPRTDRIAFRTRSEVEVLDDGYKWRKYGKKSVKNSPNPRNYYRCSTEGCNVKKRVERDRDDPGYVVTTYEGTHNHASPSTVYYASQDAASGRFFVAGTQPPGPGL

SEQ ID NO: 18058 - protein, 586 aa, Vibrio sp. Ex25
MSRKNNKNLSILLKLNTFIAPYKWRVAAALVALVATASLTLSVGYGVRILIDQGFAQQSLQELTNAIQFIVGVTLCIAIGTFFRFYLVSSVGERVSADIRLSVFNHVITLHPSYFETNSSGDIMSRLTTDTTLLQSIIGSSFSMAMRSALMCFGAIIMLFATNVKLTLIVLASVPLVLVPILFYGRRVRALSRQSQDSMADVGSYAGEAIEHIKTVQSFSSEPYERAAFAVEVEKAYEVGRQRVKQRAILISGVIVIVFSAIAGMLWVGGSDVIHGKMSAGDLAAFVFYAIMVASSTATISEVMGELQRAAGATERLIEILQVDSDIKAPINHLPIRPDMPAEVNFKSVSFNYPSRPNQPAIKELNLTAEQGKVLALVGPSGAGKTTLFELLQRFYDPQQGQVLFGGEDIRQFDPNELRRQMALVPQQPALFSHDVFHNIRYGNPEATDEQVIEAAKKAHAHEFIEKLPEGYHSFLGERGVRLSGGQKQRIAIARAILKDPKILLLDEATSALDSESEHHVQQALEALMKGRTTLIIAHRLSTIQHADKIAVLDNGELVDVGNHQSLMQSCELYQRLVALQFKHLE

SEQ ID NO: 18059 - protein, 521 aa, Zea mays
  misc_feature (455)..(455): Xaa can be any naturally occurring amino acid
  unsure (1)..(521): unsure at all Xaa locations
MMRATFGVGGSHRITVLCCGGLVLLLLPPALFIGRLRFVVLARPAPAPAILRQQGAAPSARQDHGRRRHRITVLCCGGLVLLLLLPVKIMDAAADDKPEISDDTAHQISVDPWYQVGFVLTTGVNSAYVLGYSGSIMVPLGWIGGTCGLLLAAAISMYANALLARLHEVGGKRHIRYRDLAGHIYGPKIYGLTWALQYINLFMINTGFIILAGQALKATYGLFSDDGVLKLPYCIAISGFVCALFAIGIPYLSALRIWLGFSTLFSLMYIVIAVVLSSRDGITAPARDYSIPKSSQSTRVFTTIGSIADLVFAYNTGMLPEIQATIRPPVVKNMEKALWFQFTIGSLPLYAVVFVGYWAYGSSTSGYLLNSVTGPVWVKAVANLSAFFQTVIALHIFASPMYEFLDTKYGSGRGGPFEIHNVAFRVAVRGGYLTVNTLVAAVLPFLGDFMSLTGXLSTFPLTFVLANHMYLMVKGPKLGAIQKSWHWLNVLGFTALAVAAAVSAIRLIMRDSSTYHFFADL

SEQ ID NO: 18060 - protein, 215 aa, Burkholderia sp. 383
MISTHPLTFHTADTPNGHKIAIYLEEAGLAYDRVHVDLSAGEQRSPAFLAINPNGKIPAIVDHDAGLTVFESGAILGYLAAKTGVLQPDTLAERTAVQQWLHFQIGGIGPMLGQLWWFLHASKTVNAQALERYRNEARRLYGVVNGRLAESAYLASPRYSIADIAAFPWLRTAPELDLDLAGYPHVERWLAGIEARQAVQRGLIACRAPAAEGAR

SEQ ID NO: 18061 - protein, 575 aa, Nostoc punctiforme PCC 73102
MLEHDVIIVGGGLAGCRAAVEIARTDPSLNIAVVAKTHPIRSHSVAAQGGMAASLKNVDSQDSWEAHAFDTVKGSDYLADQDAVAILTQEAPDVVIDLEHLGVLFSRLPDGRIAQRAFGGHSHNRTCYAADKTGHAILHELVNNLRRYGVQVYEEWYVMRLILEENEAKGVVMFHLLDGHIEVVRAKAVMFATGGYGRVYNTTSNDYASSGDGLAMTAIAGLPLEDMEFVQFHPTGLYPVGVLISEAVRGEGAYLINSEGDRFMANYAPSRMELAPRDITSRAIAYEIRAGRGINLDGSAGGPFVYLDLRHLGKEKIMSRVPFCWEEAHRLVGVDAVTQPMPVRPTIHYCMGGIPVNTDGQVRSSGDGLVDAFFAAGETSCVSVHGANRLGSNSLLECVVYGKRTGAAIAKFVQKRKLPSVDEQRYVTEAQQQIQALLEQPGQYRINQVRQAFQDCMTEYCGVFRTEALMSEGLHKLEEIQQRYPQIYLDDKGSCWNTELVEALELRSLMIVGQTILASALNRQESRGAHFREDYSERDDTNFLKHTMAYYSPAGIDIQYRPVAITMFEPKERKY

SEQ ID NO: 18062 - protein, 344 aa, Zea mays
MASASHQSEPLDSAATSDTDAPSDNIPDLPCPPYHIVTKPGQLPVEFLEPSAAQKLVIGFDCEGVDLCRNGALCIMQLAFPDAVYLVDAIEGGKELIQACKPALESDHITKVIHDCKRDSEALYFQFGIKLHNVMDTQIAYSLIQEQEQEGKKKTSDDYNYISFVSLLADKRYCGIPYPEKEEVRILLRQDPNFWTIRPLSDMMVRAATDDVRFLLNIYEKMMEKLNKVSLWRLAVRSELYCRCFCLNDNQFADWSPLPPVPDGIEADVYVPEVDILSVLDVPHGKMGRVIGRKGSTIMVVKESCNVEIHIGGAKGPPDRVFIIGSVNEVRKAEAIFRGRMLEF

SEQ ID NO: 18063 - protein, 358 aa, Pandanus amaryllifolius
MSCFIGKYADELIKTAKYIATPGKGILAADESTGTIGKRLASINVENIESNRQALRELLFTSPGALEYLSGVILFEETLYQKTRDGKPFVDVLTENNVIPGIKVDKGIVELAGTNGETTTQGLDSLGARCQQYYKAGARFAKWRAVLKIGATEPSELAIQQNAQGLARYAIICQENGLVPIVEPEILTDGTHDINKCAAATETVLAAVYKALNDHHVLLEGTLLKPNMVTPGSDSPKVAPEVIAECTVTALRRTVPAAVPGIVFLSGGQSEEEATLNLNAMNKLEVLKPWTLSFSFGRALQQSTIKKWAGKKENVPAAQAPFLARCKANSEATLGKYGGAAPADAAASESLHVKDYKY

SEQ ID NO: 18064 - protein, 382 aa, Ruegeria sp. PR1b
MPQWIMICFMKGRFRVVMPLGHRLLALLLHQCLRHASGRPVSPGPGQDGLLRMRQIEAGLEHEEGSQDVRALVIGGCGFIGSHVVDVLHQAGMGLRVLDRRPEAFRAPVPGVEYVYCDMQDRAQLFEAVSGVDAVVHLASTTVPATSNLDPVADVSGNLVTTLSLLEVMRAAGVRRMVYLSSGGTVYGVPQQDLVSEDHPLNPISSYGIVKVAVEKYLFMEHQLHGLEYVVLRASNPYGPRQGHRGIQGLIGTHLWRLSRQEEIEVWGDGSIVRDFLHVRDLAQLCLLAMTSGKSGIFNAGRGQGASVAEVVEQICATVAASGGRSVAPIYKPGRNFDVPRVVLDTTRARAELGWQAEITLQDGIAETWDWVQAQARQQGQG

SEQ ID NO: 18065 - protein, 269 aa, Oryza sativa (japonica cultivar-group)
MATDGAAAAAAAGSKKKKEVLIFDAEEDLAVSLAKYTAELSAKLAAERGAFTVVLSGGSLIKNIRKLAEPPYLDSVDWSKWHVFWVDERVVPKDHEDSNYKLALDGFLSKVPIPTGQVYAINDALSAEGAADDYETCLKQLVKNGVIAMSQSTGFPRFDVMLLGMGPDGHIASLFPGHPLVNENKKWVTYIKDSPKPPPERITFTFPVINSSAYVAMVVTGAGKAGAVQKALSDKQTSSDLLPVEMAVLQDGEFTWFTDKPAVSMLQNK

SEQ ID NO: 18066 - protein, 425 aa, Mesorhizobium loti MAFF303099
MNYQRFFEEAIDQLHAERRYRVFADLERIAGKFPRAIWRSNGRAEEITVWCSNDYLGMGQHPDVIAAFQNAAGKMGSGAGGTRNISGTSNPLVELEHELADLHGKDAALVFTSGFVSNEASISTIARLLPNCLIISDELNHASMIEGVRRSGAEKKIFRHNDVAHLESLLQAAGRERAKLIVFESVYSMDGDIAPIREIVELAERYNAMTYIDEVHAVGMYGPRGGGITEREGLADRIDIIEGTLAKAFGTLGGYITGTSAVIDAVRSYAPGFIFTTALPPAIAAAATTSIRHLKRSQAERDAQQQQAARTKQILSAAGLPVMESPTHIVPVLVGDPELCKMASDRLLGVHGIYIQPINYPTVPRGTERLRITPTPFHSDALIAGLQDALVETWDALGIPYGAAGRPAVAKSDRIVPLLVPKSGG

SEQ ID NO: 18067 - protein, 333 aa, Mesorhizobium loti MAFF303099
MRMTVLVTGGAGYIGSHMVWELLDAGERVVVLDRLSTGFEWAVAPEAKLVVGDVADKELVGSIIRDNHVDAIIHFAGSIVVPESVADPLAYYENNTSKTRTLIETAVREGVPHFIFSSTAAVYGGAGLEPVREDARLAPESPYGLSKLMSEWMLRDAGLAHDIRYTALRYFNVAGADPKGRTGQSTPGATHLIKVACETALGKRPFMQVFGTDYPTPDGTCMRDYIHVSDLAAAHRLALQRLRAGGTSLVANCGYSHGYSVLEVIDSVRRAFGRDFEVKMGDRRPGDAAAVVANSDLARAELGWTPQRDDLDQIVADALAWERILTSKNSARG

SEQ ID NO: 18068 - protein, 1312 aa, Arabidopsis thaliana
MEVEGEVREKEARVKGRQPETEVLHGLPQEQSIFNNMQHNHQPDSDRRRLSLENLPGLYNMSCTQLLALANATVATGSSIGASSSSLSSQHPTDSWINSWKMDSNPWTLSKMQKQQYDVSTPQKFLCDLNLTPEELVSTSTQRTEPESPQITLKTPGKSLSETDHEPHDRIKKSVLGTGSPAAVKKRKIARNDEKSQLETPTLKRKKIRPKVVREGKTKKASSKAGIKKSSIAATATKTSEESNYVRPKRLTRRSIRFDFDLQEEDEEFCGIDFTSAGHVEGSSGEENLTDTTLGMFGHVPKGRRGQRRSNGFKKTDNDCLSSMLSLVNTGPGSFMESEEDRPSDSQISLGRQRSIMATRPRNFRSLKKLLQRIIPSKRDRKGCKLPRGLPKLTVASKLQLKVFRKKRSQRNRVASQFNARILDLQWRRQNPTGTSLADIWERSLTIDAITKLFEELDINKEGLCLPHNRETALILYKKSYEEQKAIVKYSKKQKPKVQLDPETSRVWKLLMSSIDCDGVDGSDEEKRKWWEEERNMFHGRANSFIARMRVVQGNRTFSPWKGSVVDSVVGVFLTQNVADHSSSSAYMDLAAEFPVEWNFNKGSCHEEWGSSVTQETILNLDPRTGVSTPRIRNPTRVIIEEIDDDENDIDAVCSQESSKTSDSSITSADQSKTMLLDPFNTVLMNEQVDSQMVKGKGHIPYTDDLNDLSQGISMVSSASTHCELNLNEVPPEVELCSHQQDPESTIQTQDQQESTRTEDVKKNRKKPTTSKPKKKSKESAKSTQKKSVDWDSLRKEAESGGRKRERTERTMDTVDWDALRCTDVHKIANIIIKRGMNNMLAERIKAFLNRLVKKHGSIDLEWLRDVPPDKAKEYLLSINGLGLKSVECVRLLSLHQIAFPVDTNVGRIAVRLGWVPLQPLPDELQMHLLELYPLHYHMITFGKVFCTKVKPNCNACPMKAECRHYSSARASARLALPEPEESDRTSVMIHERRSKRKPVVVNFRPSLFLYQEKEQEAQRSQNCEPIIEEPASPEPEYIEHDIEDYPRDKNNVGTSEDPWENKDVIPTIILNKEAGTSHDLVVNKEAGTSHDLVVLSTYAAAIPRRKLKIKEKLRTEHHVFELPDHHSILEGFERREAEDIVPYLLAIWTPGETVNSIQPPKQRCALFESNNTLCNENKCFQCNKTREEESQTVRGTILIPCRTAMRGGFPLNGTYFQTNEVFADHGSSINPIDVPTELIWDLKRRVAYLGSSVSSICKGLSVEAIKYNFQEGMLICLTLKTPLVSNIAFMKSLFDSIKISHDVKALAPTRP

SEQ ID NO: 18069 - protein, 533 aa, Oryza sativa
MACRVSFTLSMEISQAFVFASLLLLLLLTWLLFHLLSYQAPPPNGDGGRRIPSPPALPVVGHLHLLKKPLHRSLAALAARYGGGAGLLLLRFGARPVVLVSSQAAADECFTAHDAALAGRPGLASRRLLTDGCPTIATAGHSARWRHLRRLATVHALCARRLAATSPARDAEARAMAARLYSSSSSSSAASAVVVGVKPAAYGFVASVIMSMVAGERMAEEDVLRFKAITEAGLAAAGAANRQDFLPFLRLLDFGRARRRLAGIAKERHDFGQRIVDEYRRRHRRRLAVAADDFSSSPPRRTVIGDLLRQQESSPESYADEVIRTVCLSLLQAGTDTSASTIEWAMALLLNNPDVLRKATDEINSVVGMSRLLQEPDLANLPYLRCIITETLRLYPLAPHLVPHEASRDCMVAGHVIARGTMVLVDVYSMQRDPRVWEDPDKFIPERFKGFKVDGSGWMMPFGMGRRKCPGEGLALRTVGMALGVMIQCFQWERVGKKKVDMSEGSGLTMPMAVPLMAMCLPRVEMESVLKSL

SEQ ID NO: 18070 - protein, 335 aa, Gossypium hirsutum
MKVLSPILACLALAVVVSHAALSPEQYWSYKLPNTPMPKAVKEILHPELMEEKSTSVNVGGGGVNVNTGKGKPGGDTHVNVGGKGVGVNTGKPGGGTHVNVGDPFNYLYAASETQIHEDPNVALFFLEKDMHPGATMSLHFTENTEKSAFLPYQTAQKIPFSSDKLPEIFNKFSVKPGSLKAEMMKNTIKECEQPAIEGEEKYCATSLESMIDYSISKLGKVDQAVSTEVEKQTPMQKYTIAAGVQKMTDDKAVVCHKQNYAYAVFYCHKSETTRAYMVPLEGADGTKAKAVAVCHTDTSAWNPKHLAFQVLKVEPGTIPVCHFLPRDHIVWVPK

SEQ ID NO: 18071 - protein, 611 aa, Candida glabrata CBS138
MADNQNGNEGDLHPLALLMDELKHDDIANRVEAMKKLDTIAIALGPERTREELIPFLTEVAQDDEDEVFAVLAEELGKFVPLVGGSQYINVLFPTLEILAATEETLVREKALASLNKVVKDMTIEQLLHDYVPLLDRLANADWFSSKVSACGLFKVVISRVKDDTLRKNLLALYSQLIQDDTPMVRRAAARNLPSIIDQLRENPGLSCEDDWEYVSEMFKKVITDNQDSVKFLAVESLIAILKFFNAKGDSSHTEALLAYALKLAKDEAWRVRYMVAEKFEDLADEISQLDKVVDHLLEPFLSLCEDNEGDVRKAIAGHVSGFSKHIKDASIIEAKIIPAIYTLSIDENETVRASLAQSITGMSSLLPKESVTENLLPIVLNMLKDEFPDVRLNIIASLKNINKVVDTKILSESLIPAINELAKDINWRVRMAIIDYLPVIGEQLGKSFFDEQLIDLCMTLLWDPVYAIRNATVKILTKLTEFFGSDWCRDEILTKLLTVDAETLENFIYRFTVLSALRELTSAVSSDITLEHILPYIVKLSDDKVPNIRFNVAKAYTVICENLKNNKTKNLKEIFEEKMLPSFKKLQGDSDVDVKYFANENLEKCQLLIN

SEQ ID NO: 18072 - protein, 296 aa, Arabidopsis thaliana
MSVFESETSNFHVYNNHEIQTQPQMQTFLSEEEPVGRQNSILSLTLDEIQMKSGKSFGAMNMDEFLANLWTTVEENDNEGGGAHNDGEKPAVLPRQGSLSLPVPLCKKTVDEVWLEIQNGVQQHPPSSNSGQNSAENIRRQQTLGEITLEDFLVKAGVVQEPLKTTMRMSSSDFGYNPEFGVGLHCQNQNNYGDNRSVYSENRPFYSVLGESSSCMTGNGRSNQYLTGLDAFRIKKRIIDGPPEILMERRQRRMIKNRESAARSRARRQAYTVELELELNNLTEENTKLKEIVVIS

SEQ ID NO: 18073 - protein, 223 aa, Bacillus cereus ATCC 10987
MSMIETWTAVDQYVSDVLIPKDSTLEEVLQVNAAANLPAHDVSPTQGKFLQLLVQIQGARNILEIGTLGGYSTIWLARGLSSGGRVVTLEASEKHADIARSNIERANLNDRVEVRTGLALDSLQQIENEKYEPFDFIFIDADKQNNPAYFEWALKLSRPGTVIIGDNVVREGEVIDNTSNDPRVQGIRRFYELIAAEPRVSATALQTVGSKGYDGFIMAVVKE

SEQ ID NO: 18074 - protein, 576 aa, Ashbya gossypii ATCC 10895
MKYVVVSGGVISGIGKGVLASSTGMLLKTLGLKVTSIKIDPYMNLDAGTMSPLEHGECFVLNDGGETDLDLGNYERYLGVTLTKDHNITTGKVYSHVMAKERKGDYLGKTVQVVPHLTNAIQDWLERVARIPVDDSGMEPDVCIIELGGTVGDIESAPFVEALRQFQFRVGRDNFALIHVSLVPVIHGEQKTKPTQAAIKDLRSLGLTPDMIACRCSEELDKPTIEKIAMFCHVGPEQVVNVHDVASTYHVPLLLLEQRMIDYLGQRLKLSDIKLGAEDKERGARLLDRWRHLTTAIDESFEVVQIALVGKYTHLKDSYLSVIKALEHSSMRCKRKLEIVWVEASDLEPEMSASDKEKFQQAWKSLSSSDGILVPGGFGTRGTEGMILAAKWARENKIPYLGVCLGLQVATIEFARHVLGIADATSSEFYPEVAEDKQVVVYMPEIDKQNMGGTMRLGLRPTIFQEDTDWSIIRKLYGSASSVEERHRHRYEINPKMVQKLEEHGLKFVGRDETGTRCEILELVDHPYYVATQYHPEYMSKVLDPSQPFLGLVAAAANILPSLLAAERAVGARADF

SEQ ID NO: 18075 - protein, 325 aa, Pseudomonas syringae pv. syringae B728a
MTELQPIPVTVLTGFLGAGKTTLLRHLLKAEHGLKIAVIENEFSDAGIDSQLLGTDPVQIMTLSNGCVCCTIHTDLTKALYLLLERMDSGEIAFDRLVIECTGLADPAPVAQTFFIDEELRERYILDGIITLVDAAHADTHLAQTIAQAQIGFADRLLVSKRDLVDDAAFEALSARLTRINRRAPIRIVEHGKIDLAELLDVRGFNLNADLGGGMILRPLAPAGNSADRISSLVLRSDKPLNLDRLSEFMNELLEDHGKQLLRYKGVLNIEDEPRKMVFQGVLKLYGFDWDTEWAEGEKRESVIVFIADELPEEKIRAGFEKVCG

SEQ ID NO: 18076 - protein, 347 aa, Bradyrhizobium sp. BTAi1
MAASFPMNAWYAAAWDAEVKQALLPRTICGKHVVMYRKADGSIAALEDACWHRLVPLSKGRLEGDTVVCGYHGLKFSPQGRCTFMPSQETINPSACVRAYPAVERHRFIWLWMGDPALADPATIPDMHWNHDPAWAGDGKTIQVKCDYRLVVDNLMDLTHETFVHGSSIGNDAVAEAPFDVTHGERTATVTRWMRGIEPPPFWAKQLGKPGLVDRWQIIRFEAPCTVTIDVGVAPTGTGAPEGDRSQGVNGMVLNTITPETDKTCHYFWAFARNYQLTEQRLTTEIREGVSGIFREDELILEAQQRAMDANPGRVFYNLNIDAGAMWARRIIDRMIARETPLREAAE

SEQ ID NO: 18077 - protein, 328 aa, Xanthomonas oryzae pv. oryzae KACC10331
MKAPVRVAVTGAAGQIGYALLFRIASGEMLGKDQPVILQLLELSNEKAQAALKGVMMELEDCAFPLLAGMVGTDDAEVAFKDIDVALLVGARPRGPGMERKDLLLENAKIFTAQGAALNKVAKRDVKVLVVGNPANTNAYIAMKSAPDLNPKNFTAMLRLDHNRALSQLALKLGKPVGGIEKLVVWGNHSPTMYPDYRFATSDGASIGDAINDQEWNASTFIPTVGKRGAAIIEARGLSSAASAANAAIDHVRDWVLGSNGKWVTMGVPSDGSYGISEGVIFGFPVTTENGQYSLVKDLPIDDFSQKYIDKTLAELEEERSGVSHLLG

SEQ ID NO: 18078 - protein, 477 aa, Neisseria meningitidis Z2491
MNEYSQLIKHPDISLSPISDGIGVGNPATGEILAYVRNTGSDKLKNLIQKAAAAQKLWAAKTALERADILWRWYFLVKENKEALARLMTMEQGKSLTESRGEIDYAASFVRWFAEEARRIDGDVLTSVKASQKLIVLKQPVGVTAAITPWNFPSAMIARKAAPALAVGCAMIVKPASLTPLSAYALVVLAYEAGVPQDLLPVVSGRASEIGREFATNPIIRKISFTGSTEVGAKIFADSAADIKKLSLELGGNAPFIVFDDADLDKAVEGALASKFRNSGQTCVCTNRVYAQSGIYDAFCRKLSEKAAALKLGNGLEDGVNQGPLIEEKAVEKVEQHIADALSKGAVCLTGGKRSALGGTFFEPTVLSGVTAQMAVAREETFGPLCPVFRFETEAEVIEAANNTEYGLAAYLFTADTARQWRVGEALEYGMVGINTGLISNEAAPFGGVKRSGLGREGSKYGADEYLELKYLCMDVG

SEQ ID NO: 18079 - protein, 936 aa, Oryza sativa
MSDHRTHASDCHPVASQPDVQCLVCTRPFTLDAQVTDTFEALAICRDCKMTVLNDDERDEITSTYRQNTRRRQISRTASIDFLEDAFLQEFSQLIDLARRQGRETDIDSSSVAPQHASFNSTPSQSQRWHASDDESDGLNYVDSVFGEIESAISLGDYGGDSDTSIEEHSVMTRRRISIQLDNDSYMNTDTDIDPMNARLDQWDSDDQEDVEESGFDEIVNTMTQHQQQSHDIQLSGLSEDESEDGVWNWSVSVRQRANVTNLLDDMEEPEMRTTFVGNPDDYVDARQFEMLLEQFAEDNDSRRGAPPAATSFIENLPSVIISASHQTNGDVICPVCKDPIPTRARAKQLPCMHLYHSSCILPWLSSRNTCPVCRYELPTDDAEYERSKQATTNVRDIQVVEEISDEQEVQVTRQMAAGVIEETNTSEHNVRVDEQPNSARRRSGWLFIAAAPVCFCQNSTQCPVESLALFYLCNILWLRAVKIRKKLRRQGIRGPKPTFLYGNTKEIKRIRQELKFSQKQGTNNFISTLFPHFLLCRETYGPVFLYSTGALEILQVSHPDMVKDIGRWTPSELGKPNYLKKSRKALFGGGLFTENGDEWAYQRKIIAPEFFMDKIKGMIQLIEDATVTVLEAWEDMIDDVGGCREIVVDDYLRNLSADVIARACFGSSFTKGEEIFCKLRQLQKVIAQQDSFVGLSALWKYLPTKSNQEIQMLDEQVRLLILDVAKEQHHYQDSHNSLVNAIIDGAQDGRSAAEAEDFIVGNCKTIYFGGHESTAVTAIWCLMLLATHSEAMEVTMVIQETLRLYPPASVMMQEALTDVKLGNIEVPRGTIVQVPRLMLHLDKEAWGADADEFRPDRFANGVAAACRAAHMYVPFGHGPRTCIGQNLAMAELKVVLARLLTKFAFSPSPRYRHSPAFRLTIEPGFGLPLMVTKLP

SEQ ID NO: 18080 - protein, 923 aa, Pisum sativum
MELRVICIIRLVVACVLCLCIFIRSASSATEGFESIACCADSNYTDPKTNLNYTTDYRWYSDKSNCRQIPEILLSHRSNINFRLFDIDEGKRCYNLPTIKDQVYLIRGTFPFDSVNTSFYVSIGATELGEVTSSRLEDLEIEGVFRAPKDNIDFCLLKEDVNPFISQLELRPLPEEYLHDFSTNVLKLISRNNLCGIEDDIRFPVDQNDRIWKATSTPSYALPLSFNVSNVELNGKVTPPLQVLQTALTHPERLEFVHVGLETDDYEYSVLLYFLELNDTLKAGQRVFDIYLNSEIKKEGFDVLEGGSKYSYTVLNISANGSLNITLVKASGSKFGPLLNAYEILQARPWIDETDQTDLEVIQKMRKELLLQNQDNEALESWSGDPCMLFPWKGVACDGSNGSSVITKLDLSSSNLKGTIPSSVTEMTKLQILNLSHNHFDGYIPSFPPSSLLISVDLSYNDLTGQLPESIISLPHLNSLYFGCNQHMRDDDEAKLNSSLINTDYGRCNAKKPKFGQVFMIGAITSGSILITLAVVILFFCRYRHKSITLEGFGGKTYPMATNIIFSLPSKDDFFIKSVSVKPFTLEYIELATEKYKTLIGEGGFGSVYRGTLDDGQEVAVKVRSATSTQGTREFDNELNLLSAIQHENLVPLLGYCNEYDQQILVYPFMSNGSLLDRLYGEPAKRKILDWPTRLSIALGAARGLAYLHTFPGRSVIHRDVKSSNILLDHSMCAKVANFGFSKYAPQEGDSYVSLEVRGTAGYLDPEYYKTQQLSEKSDVFSFGVVLLEIVSGREPLNIKRPRVEWSLVEWAKPYIRASKVDEIVDPGIKGGYHAEALWRVVEVALQCLEPYSTYRPCMVDIVRELEDALIIENNASEYMKSIDSLGGSNRYSIVMDKRALPSTTSTAESTITTQNVSHPQPR

SEQ ID NO: 18081 - protein, 386 aa, Nicotiana sylvestris
NEKGLFYALDLGGTNFRVLRVQLGGKEERVIATEFEQVSIPQELMFATSEELFDFIASELGKFSQSEGGKFEMQQGRTREIGFTFSFPVKQTSVKSGILIKWTKGFAVSGTAGKDVVACLNEAMERRGLGMQVSALVNDTVATLAGARYWDNDVMVAVILGTGTNACYVERVDAIPKLPKRMSNSPVTIVNTEWGAFSNGLPLTEFDREMDAESINPGEQIFEKTISGMYLGEIVRRVLVKMAKVGGLFGGGYVPEKLVTPFVLRTPDICAMQQDTSRDLEAVESVLYDIAGVKSDLNARKTVVDICDTIAKRGGRLAGAGIVGILQKMEEDSKSVVFGKRTVVAMDGGLYEHYPQYREYIQEAVTELLGSEISKNVVIEHSKDGS

SEQ ID NO: 18082 - protein, 496 aa, Nicotiana sylvestris
MKKATVGAVVVGTAVAVAVAALIMRHRMGKSSKWARARAILKEFEEKCATPDGKLKQVADAMTVEMHAGLASEGGSKLKMLISYVDNLPTGDEGGVFYALDLGGTNFRVLRVQLGGKDGGIIHQEFAEASIPPNLMVGTSEALFDYIAAELAKFVAEEGEEFHPPPGRQRELGFTFSFPIMQTSINSGTLIRWTKGFSIDDTVGKDVVAELTKAMQKREIDMRVSALVNDTVGTLAGGRFTNKDVSIAVILGTGTNAAYVERAQAIPKWHGPLPKSGEMVINMEWGNFRSSHLPLTEYDHAMDTDSLNPGEQIFEKICSGMYLGEILRRVLLRMAEEAGIFGEEVPPKLKNSFILRTPEMSAMHHDTSSDLRVVGDKLKDILEISNTSLKTRRLVVELCNIVATRGARLAAAGILGIIKKMGKDTPRESDPEKIVVAMDGGLYEHYTEYSKCLENTLVELLGKEMATSIVFKHANDGSGIGAALLAASNSVYVEDK

SEQ ID NO: 18083 - protein, 338 aa, Streptomyces hygroscopicus subsp. yingchengensis
MVEVVLPGKVEPEGLQVRQGPVPAAGPGQVVVRMEATGVSFAEQQMRRGRYYDQPPFPFVPGYDLVGTVIETGDGVAPGLAGTRVAALLKVGGWATHVVVDAADVVPVPDGISAAQAETVVINGITAWQMLHRKARVRAGQTVLVHGANGGVGSVLVQLAHAAGVQVIGTASARHHAALREAGVMPIDYRTENIPARVREHAPGGVDAVFDHVGGRSVVDSWQLLAPGGTLVSYGSASTRDDEGSKQWPVLKLLARVWLWNALPNRRRAYFFNVWAGRALTPSRFRARLRNDLTEVFTALHRGDITPAIAAQLRLDRVAEALRLAESGTVSGKVVLVP

SEQ ID NO: 18084 - protein, 473 aa, Ureaplasma parvum serovar 3 str. ATCC 700970
MRYKFKTQEDLVNHLKSVGFVFANSEIYNGLANAWDYGPLGVLLKNNLKNLWWKEFVTKQKNIVGLDSAIILNPLVWKASGHLDNFSDPLIDCKSCKTRYRADKLIESFNKDIHIAENSTNEEFMKVLNDHKIFCPTCKQFNWTDIRHFNLMFKTHQGVIEDPKNIVYLRPETAQGIFVNFKNVQRSMRLHLPFGIAQIGKSFRNEITPGNFIFRTREFEQMEIEFFLKEEIAYDVFDKYLNQIQNWLVTCCGLDLNNLRKHEHPKEELSHYSKKTIDFEYNFLHGFSELYGIAYRTNYDLSVHMNLSKKDLTYFDEETKQKYIPHVIEPSVGVERLLYAILTEATFIEKLANDEDRILMNLKYDLAPYKIAVMPLVNKLKEKAEAVYNKILDLNISVTFDNSGSIGKRYRRQDAIGTIYCITIDYDSFGDEHDPTFTIRERNTMAQKRIKLSELSLYLSQKAHEDFQKQCQK

SEQ ID NO: 18085 - protein, 249 aa, Propionibacterium acnes KPA171202
MTAKLILLRHGESEWNSKNLFTGWVDVDLNEKGEGEARHAADLLKQENLLPDIVHTSLLRRAIHTAYLALDGCDRHWIPVHRSWRLNERHYGALQGLNKAETKEKYGNDQFMAWRRSYDVRPPDLDRDSEFSQFHDPRYADIPASERPVAECLKDVVARMVPYFTSDIAADLKDGKTVLVAAHGNSLRALVKHLDEISDEDIAGLNIPTGIPLFYELDDNLKPVTRGGRYLDPEAAAAGAKAVANQGNK

SEQ ID NO: 18086 - protein, 355 aa, Nicotiana sylvestris
MKKVTVGAAVVGAAAVCAVAALIVNHRMRKSSKWGRAMAILREFEEKCKTQDAKLKQVADAMTVEMHAGLASEGGSKLKMLITYVDNLPTGDEAGVFYALDLGGTNFRVLRVQLGGKDGGIIHQEFAEASIPPSLMVGTSDALFDYIAAELAKFVAAEEEKFHQPPGKQRELGFTFSFPVMQTSINSGTIMRWTKGFSIDDAVGPDVVGELTKAMKRKGVDMRVSALVNDTVGTLAGGKYTQKDVAVAVILGTGTNAAYVERVQAIPKWHGPVPKSGEMVINMEWGNFRSSHLPLTEYDHALDNESLNPGEQIFEKMTSGMYLGEILRRVLLRVAEEAGVFGDEVPPKLKDSFVL

SEQ ID NO: 18087 - protein, 189 aa, Zea mays
FLDKEFINVAMGMDPEWKMYDKNLGRIEKWVMRKAFDDYEHPYLPKHILYRQKEQFSDGVGYNWIDGLKSFTEQQVTDEMMNNVAQMFPYNTPSTKEAYYYRMIFERLFPQDSARETVPWGPSIACSTPAAIEWVEQWKASNDPSGRFISSHDSAATDHTAVSRRWPTAAARPANGTVNGKDVPVPIAV

SEQ ID NO: 18088 - protein, 1309 aa, Arabidopsis thaliana
MEVEGEVREKEARVKGRQPETEVLHGLPQEQSIFNNMQHNHQPDSDRRRLSLENLPGLYNMSCTQLLALANATVATGSSIGASSSSLSSQHPTDSWINSWKMDSNPWTLSKMQKQQYDVSTPQKFLCDLNLTPEELVSTSTQRTEPESPQITLKTPGKSLSETDHEPHDRIKKSVLGTGSPAAVKKRKIARNDEKSQLETPTLKRKKIRPKVVREGKTKKASSKAGIKKSSIAATATKTSEESNYVRPKRLTRRSIRFDFDLQEEDEEFCGIDFTSAGHVEGSSGEENLTDTTLGMFGHVPKGRRGQRRSNGFKKTDNDCLSSMLSLVNTGPGSFMESEEDRPSDSQISLGRQRSIMATRPRNFRSLKKLLQRIIPSKRDRKGCKLPRGLPKLTVASKLQLKVFRKKRSQRNRVASQFNARILDLQWRRQNPTGTSLADIWERSLTIDAITKLFEELDINKEGLCLPHNRETALILYKKSYEEQKAIVKYSKKQKPKVQLDPETSRVWKLLMSSIDCDGVDGSDEEKRKWWEEERNMFHGRANSFIARMRVVQGNRTFSPWKGSVVDSVVGVFLTQNVADHSSSSAYMDLAAEFPVEWNFNKGSCHEEWGSSVTQETILNLDPRTGVSTPRIRNPTRVIIEEIDDDENDIDAVCSQESSKTSDSSITSADQSKTMLLDPFNTVLMNEQVDSQMVKGKGHIPYTDDLNDLSQGISMVSSASTHCELNLNEVPPEVELCSHQQDPESTIQTQDQQESTRTEDVKKNRKKPTTSKPKKKSKESAKSTQKKSVDWDSLRKEAESGGRKRERTERTMDTVDWDALRCTDVHKIANIIIKRGMNNMLAERIKAFLNRLVKKHGSIDLEWLRDVPPDKAKEYLLSINGLGLKSVECVRLLSLHQIAFPVDTNVGRIAVRLGWVPLQPLPDELQMHLLELYELHYHMITFGKVFCTKVKPNCNACPMKAECRHYSSARASARLALPEPEESDRTSVMIHERRSKRKPVVVNFRPSLFLYQEKEQEAQRSQNCEPIIEEPASPEPEYIEHDIEDYPRDKNNVGTSEDPWENKDVIPTIILNKEAGTSHDLVVNKEAGTSHDLVVLSTYAAAIPRRKLKIKEKLRTEHHVFELPDHHSILEGFERREAEDIVPYLLAIWTPGETVNSIQPPKQRCALFESNNTLCNENKCFQCNKTREEESQTVRGTILIPCRTAMRGGFPLNGTYFQTNEVFADHDSSINPIDVPTELIWDLKRRVAYLGSSVSSICKGLSVEAIKYNFQEGMLICLTLKTPLVSNIEFMKRTNNSIKISHDVFALAM

SEQ ID NO: 18089 - protein, 444 aa, Streptomyces avermitilis
MVPHAGDARDAEAKHDARTRGWETTMSALSPHLRQATPVVAVRGEGVHLYGEDGRRYLDFTAGIGVTSTGHCHPRVVAAAQEQAGTLVHGQYTTVLHPPLRRLVDRLGEVLPAGLDSLFFTNSGSEAVEAALRLARQATGRPNVLVCHGGFHGRTVAAAAMTTSGTRFRSGFSPLMSGVVVTPFPTAFRYGWDEETATRFALQELDYTLRTISSPDDTAAIIVEPVLGEGGYVPATRAFLEGLRERADRHGFVLILDEVQTGVGRTGRFWGHDHFGVTPDILITAKGLASGFPLSGIAASAELMGKAWPGSQGGTYGANAVACAAACATLDVVRDEKLVDNAEAMGARLRAGLAAVAATTPAIGDVRGLGLMLASEFVTEDGGPDPETAARVQRAAVDEGLLLLLCGAWNQVVRMIPALVIDEAEVDEGLRAWSAAVEVGVPAR

SEQ ID NO: 18090 - protein, 497 aa, Nicotiana tabacum
MKKVTVGAAVVGAAAVCAVAALIVNHRMRKSSKWGRAMAILREFEEKCKTQDAKLKQVADAMTVEMHAGLASEGGSKLKMLITYVDNLPTGDEAGVFYALDLGGTNFRVLRVQLGGKDGGIIHQEFAEASIPPSLMVGTSDALFDYIAAELAKFVAAEEEKFHQPPGKQRELGFTFSFPVMQTSINSGTIMRWTKGFSIDDAVGQDVVGELTKAMKRKGVDMRVSALVNDTVGTLAGGKYTQKDVAVAVILGTGTNAAYVERVQAIPKWHGPVPKSGEMVINMEWGNFRSSHLPLTEYDHALDNESLNPGEQIFEKMTSGMYLGEILRRVLLRVSEEAGVFGDEVPPKLKDSFVLRTPDMSAMHHDTSPDLKVVGEKLKDILEISNTSLKTRKLVVELCNIVATRGARLAAAGVLGILKKMGRDTPKQGGSERTVIAMDGGLYEHYTEYRMCLENSLKDLLGEELATSIVFVHSNDGSGIGAALLAASHSMYLEDQA

SEQ ID NO: 18091 - protein, 467 aa, Lycopersicon esculentum
MSTKPTPLELSEMSTMSLDETFHPNKVSESTESSSSSTTPLKPHTGGDIRWDAINSATGRGGPPLNLSNFRLLKRLGYGDIGSVYLVELRGTNAFFAMKVMDKGSLASRNKLLRAQTEREILSLLDHPFLPTLYSHFETDKFYCLVMEFCSGGNLHTLRQKQPNKHFTEEASRFYASEVLLALEYLHMLGIVYRDLKPENVLVRDEGHIMLSDFDLSLRCSVNPTLVKSSSVHGGGGGGNPSSGSGILDNDNAVQGCIQPSTFFPRNILPTKKNRKSKSDFGLFVGGSLPELMAEPTNVRSMSFVGTHEYLAPEIIRGEGHGSAVDWWTFGIFLYELLHGTTPFKGAGNRATLFNVVGQPLRFPETPQVSAIARDLIRGLLVKEPHKRIAYKRGATEIKQHPFFEGVNWALVRSAVPPSIPEPVDFAQYASKDASAPCSDKKMPDTESHDKSKNTCTDSSYIDFEYF

SEQ ID NO: 18092 - protein, 322 aa, Pseudomonas fluorescens PfO-1
MNVVRWDMIGCGSVAERKSGPAFYKAPGSALVAVMGRRLEAVTDYAARHGIARTYTDVDALINDPEVDAVYIATPPDSHHTYSLKVAAAGKHCCVEKPMALNAGQSREMQQAFAEAGLHLFVSYYRRSLPRFQQVRQWLEQGRIGQVRHLSWTLTKAPSPKDLDGSANWRTDPAVAGGGYFADLASHGFDLFQYLLGDIVEVAGFTARQAGLYAAEDAVSASWRFASGALGMGCWSFVADRREDRVEIIGSQGRIGFSVFDEHPVELHADEHISLEIPHHEHIQWHHVLGMNAQIRGESQHPAIAAEALKTDWVMDQILKRH

SEQ ID NO: 18093 - protein, 271 aa, Ruegeria sp. PR1b
MPTNTVEETDLRRLIIETAAACGEAAHIGGSLSMVELLNVLFGSVLRHRPDTPDWPERDIFILSKGHSVLGYFAVLHSYGYFDRATLATFQTNGSALIAHPIKNIPLGIESSNGSLGQGLSYGLGMALGMQKRGEDRRVYVLMGDGECNEGSVWEAAALAGELGLGPLTAIVDQNGFRNDGANTLYAADKGPNLAQAWAAFGWDVHEVDGHDSTAIKAAFDLARTRTDQPSVLVAKTIKGKGISFMEANNDWHHNRITQKVFDDCLQELEV

SEQ ID NO: 18094 - protein, 261 aa, Picea abies
MGRGRVQLRRIENKINRQVTFSKRRNGLLKKAYELSVLCDAEVALIIFSTRGKLYEFASSSMNKTLERYEKCSYAMQDTTGVSDREAQNWHQEVTKLKGKVELLQRSQRHLLGEDLGPLNVKELQQLERQLEVALAHLRSRKTQVMLDQIEELRQRERLLHEVNKSLQKKLSETEGRDVITGIEQTSNTNTGTNGPWDSSITNTAYALSHPQQNSNASLHHVDCEPTLQIGYQPVPPESIGPPHQPQHNQTQNQYMQGWWV

SEQ ID NO: 18095 - protein, 222 aa, Picea abies
MGRGKIEIKRIENTTNRQVTFCKRRNGLLKKAYELSVLCDAEVALIVFSSRGRLYEFANHSVKRTIERYKKTCVDNNHGGVISESNSQYWQQEAGKLRQQIEILQNANRHLMGDGLTALNIKELKQLEVRLEKGIGRVRSKKNEMLLEEIDIMQRREHILIQENEILRSKIAECQNSHNTNMLSAPEYDALPAFDSRNFLHANLIDAAHHYAHQEQTTLQLG

SEQ ID NO: 18096 - protein, 331 aa, Vibrio harveyi
MTIKVGINGFGRIGRFVFRAAQERNDIEVVGINDLIDVDYMAYMLKYDSTHGRFNGTVEVEGGNLIVNGKTVRVTAERNPEDLKWDAIGVDVVAEATGLFLTDETARKHITAGAKKVVLTGPSKDATPMFVMGVNHATYAGQDIVSNASCTTNCLAPIAKVLNDKFGIESGLMTTVHATTATQKTVDGPSAKDWRGGRGASQNIIPSSTGAAKAVGVVLPELNGKLTGMAFRVPTANVSVVDLTVNLKEGASYEAICAAMKEASEGELAGVLGYTEDQVVSQDFIGEVQTSVFDAKAGIALTDNFVKVVSWYDNEIGYSNKVLDLIAHISK

SEQ ID NO: 18097 - protein, 535 aa, Arabidopsis thaliana
MESQLWNWILPLLISSLLISFVAFYGFFVKPKRNGLRHDRKTVSTVTSDVGSVNITGDTVADVIVVGAGVAGSALAYTLGKDKRRVHVIERDLSEPDRIVGELLQPGGYLKLLELGIEGLSTDCVEEIDAQRVYGYALFKNGKRIRLAYPLEKFHEDVSGRSFHNGRFIQRMREKAASLPNVQLEQGTVLSLLEENGTIKGVRYKNKAGEEQTAFAALTIVCDGCFSNLRRSLCNPQVEVPSCFVGLVLENCNLPYANHGHVVLADPSPILMYPISSTEVRCLVDVPGQKVPSIANGEMKNYLKTVVAPQMPHEVYDSFIAAVDKGNIKSMPNRSMPASPYPTPGALLMGDAFNMRHPLTGGGMTVALADIVVLRNLLRPLRDLSDGASLCKYLESFYTLRKPVAATINTLANALYQVFCSSENEARNEMREACFDYLGLGGMCTSGPVSLLSGLNPRPLTLVCHFFAVAVYGVIRLLIPFPSPKRIWLGAKLISGASGIIFPIIKAEGVRQMFFPATVPAYYYKAPTVGETKCS

SEQ ID NO: 18098 - protein, 212 aa, Arabidopsis thaliana
  misc_feature (26)..(26): Xaa can be any naturally occurring amino acid
  misc_feature (92)..(92): Xaa can be any naturally occurring amino acid
  misc_feature (100)..(100): Xaa can be any naturally occurring amino acid
  unsure (1)..(212): unsure at all Xaa locations
TPFDIDAISSLGTNCVLSGVSPFSQXNQSQSKLSQFMSLDLKEHPMASAHFTNQTLTAFSSSSASRFQATRSSTGMSRGMRWWEKSTNHNMXEIQSATHXVDSLLYAGDRLVVLDFYSPGCGGCKSLHPKICQLAETNPNVMFLKVNQEELRTMCHGLNVHVLPFFKFYRGAEGKVCSFSCTIATLVIKQRSNIKRWCYKEMTFFIKVLIEL

SEQ ID NO: 18099 - protein, 925 aa, Medicago sativa
  misc_feature (635)..(635): Xaa can be any naturally occurring amino acid
  unsure (1)..(925): unsure at all Xaa locations
MELQVIRIFRLVVACVLCLCIFIRSASSATKGFESISCCADSNYTDPKTTLTYTTDHIWFSDKRSCRPIPEILFSHRSNKNVRIFEIDEGKRCYTLPTIKDQVYLIRGVFPFDSLNSSFYVYIGVTELGELRSSRLEDLEIEGVFRATKDYIDFCLLKEDVNPFISQIELRPLPEEYLHGFATSVLKLISRNNLGDTNDDIRFPDDQNDRIWKRKATSTPSSALPLSSNVSNVDLKDSVTPPLQVLQTALTHPERLEFVHDGLETDDYEYSVFLHFLELNGTVRAGQRVFDIYLNNEIKKEKFDVLAGGSKNSYTALNISANGSLNITLVKASGSEFGPLLNAYEILQARSWIEETNQKDLELIQKMREELLLHNRENEALESWSGDPCMIFPWKGITCDDSTGSSIITMLDLSSNNLKGAIPYFVTKMTNLQILNLSHNQFDSLFPSFPPSSLLISLDLSYNDLDGRLPESIISLPHLKSLYFGCNPYMKDEDTTKLNSSLINTDYGRCKGKKPKFGQVFVIGAITRGSLLITLAVGILFFCRYRHKSITLEGFGGKTYPMATNIIFSLPSKDDFFIKSVSVKPFTLEYIEQATEQYKTLIGEGGFGSVYRGTLDDGQEVAVKVRSSTSTQGTXEFDNELNLLSAIQHENLVPLLGYCNEYDQQILVYPFMSNGSLLDRLYGEASKRKILDWPTRLSIALGAARGLAYLHTFPGRSVIHRDVKSSNILLDQSMCAKVADFGFSKYAPQEGDSYVSLEVRGTAGYLDPEYYKTQQLSEKSDVFSFGVVLLEIVSGREPLNIKRPRIEWSLVEWAKPYIRASKVDEIVDPGIKGGYHAEALWRVVEVALQCLEPYSTYRPCMVDIVRELEDALIIENNASEYMKSIDSLGGSNRYSIVMDKRALPSTTSTAESTITTQTLTHPQPR

SEQ ID NO: 18100 - protein, 529 aa, Ustilago maydis 521
MSAETSAPPSEAVAPPVSFESSNTASAQDQELFGASILSKKEDALTTEPAQVEQPQAEQPEASTATTADADQHDIAAVAAAAAAAAAAADASSAAQTITELATAATNAANNAAAATPAAVESLSADVEAAAATAAAADASEAAPARVEEAGDQQDAAVGADGAVTAEPVSNSGLPSNVESELREIYSVASAIANFSVAHVNQVNVPTPQKVRNIIQKALKLTSSLSMLLAQPEVALRQLDAEESGKRPAESKLDSARKRPRSSDWDGTKIELPHGAGLPITPYTHSSGLKVFPDGSLSTSFPSPGFDSDQKGPQYKKRSRAPAPGSCQACGTTETPEWRRGPDGARTLCNACGLHYAKLVRKRLQQEGVEEPMPRHTPAQMSLVSLEELRASTKSAEAAAAAGLTPSASSTSLNGTPIKVDAHEAWNTPSKPPRVSSSLSSVVAASSENDSAQNQGVPQPPASAPTSADNASDTAGIVESAPTRISAGADATPHPAGAPEPVIAPELAAEAAPINHVDTNHAQPMQTDH

SEQ ID NO: 18101 - protein, 495 aa, Mesorhizobium loti MAFF303099
MNLPPNALWIDQDDYDVRGFSHGLYIDGRWRPSSDGRVIDVVDPSSGSVIAAVPDATLEDALAAVDAAAKAATAWRETAPRKRSEILRRCFELMVERSETLAMLISLENGKALRDARGEVAYAAEFFRWNAEEAVRITGEFGTAPSGANRIVVDYEPIGICVLITPWNFPAAMATRKIAPALAAGCTVILKPASETPLTAYALAALYSEAGVPAGVVNVLTTTSPGPLTSAMLADPRVRKLSFTGSTGVGRTLLGEAAKHVVSCSMELGGNAPFVVFDDADLDAALDGAMIAKMRNAGEACTAANRIYVQSGIHDAFADGLRKRMAALKVGPGMSADTECGPMITRKAVDKIDRLVKDAVGRGAKVLCGGSIPEEEGFFYPPTVLSQVPPDADMAHEEIFGPVAPVTRFETEAEVIMHANNTEYGLAAYIYTRDVGRGLRVASRIEAGMIGLNRGLMSDPAAPFGGVKQSGLGREGGQHHGIAEFMEAKYIAVTF

SEQ ID NO: 18102 - protein, 441 aa, Glycine max
KTPSGLVARPVLTSLYKSDQFKNRPYDPFNVYTSPDEAILCPDSFQSMYTQMLCGLIMRHQVLRVGAVFASGLLRAIRFLQLNWAELAHDISTGTLNPKISDLAIKQRMTQILTPNPELADFIVKECSGENWDRIITRIWPNTRYVEVIVTGAMAQYIPTLDYYSGGLPIACNIYGSSECFFGINLNPFCNPSDVSYTIMPNMGYFEFLPHDHDDDDGALYSGSDSSSRLTDLADVELGKSYEIVVTTYSGICRYRVGDILRVTGFHNSTPQFSFVRRKNVLLSIDSDKTDEAELQNAVENASVLLKEFKTSVVEYTSFADTKSIPGHYVIYWELLMKDSSNAPTSEALEQCCLTMEESLNAVYRQGRVADHSIGPLEIRVVKNGTFEELMDYAISRGASISQYKVPRCVTFTPITELLDSRVESVHFSPSEPHWTPERRR

SEQ ID NO: 18103 - protein, 622 aa, Campylobacter jejuni
MNAKTQEAELEELFQENAKDYITYEKLVKYLTKQPSASTAKKVQALMKKHKVQLFSAAEIGQMKNIEDAKRLQEEKQKLQDTSLENEFDLANENDLLEWSRSDSPVRMYLREMGQIALLNKDEEIEISKKIELGEDIIIDAFCSVPYLIDFILDYKEPLINRERRVKELFKSFDDEEKSDDKLDELDIDEDEENETELESDEENTKKNSKKEDERTLKVIEKFKALEKAKKDWLKTSKDKESGDELLDKLSIAFKKNILKEKLMDLGPTSKLISEIVKSMETALKSDEEFDKELKRLEYRLPMFSDELKKRHADILKDITKLSKEEITERALETTMVSTYMEIKKLFQTKEASEKSFDLEKSRLKEILEQIKRGKKISDEAKGRMAKSNLRLVVSIAKRYTNRGLPFLDLIQEGNIGLMKAVDKFEYKRGYKFSTYATWWIRQAISRAIADQARTIRIPIHMIETINQINKIIREHLQKDGKEPDVSVIAKEVGLSVDKVKQVIKITKEPISLEAPIGNEDDGKFGDFVEDRNSLSPMDHILKDDLKEQIDEVLDQLNDREKAVIRMRFGLMDDESDRTLEEIGKELNVTRERVRQIESSAIKKLKHPKVGRKLKNYIEGWK

SEQ ID NO: 18104 - protein, 924 aa, Medicago truncatula
MELQVIRIFRLVVAFVLCLCIFIRSASSATKGFESIACCADSNYTDPKTTLTYTTDHIWFSDKRSCRQIPEILFSHRSNKNVRKFEIYEGKRCYNLPTVKDQVYLIRGIFPFDSLNSSFYVSIGVTELGELRSSRLEDLEIEGVFRATKDYIDFCLLKEDVNPFISQIELRPLPEEYLHGFGTSVLKLISRNNLGDTNDDIRFPDDQNDRIWKRKETSTPTSALPLSFNVSNVDLKDSVTPPLQVLQTALTHPERLEFVHDGLETDDYEYSVFLHFLELNGTVRAGQRVFDIYLNNEIKKEKFDVLAGGSKNSYTALNISANGSLNITLVKASGSEFGPLLNAYEILQARSWIEETNQKDLEVIQKMREELLLHNQENEALESWSGDPCMIFPWKGITCDDSTGSSIITKLDLSSNNLKGAIPSIVTKMTNLQILNLSHNQFDMLFPSFPPSSLLISLDLSYNDLSGWLPESIISLPHLKSLYFGCNPSMSDEDTTKLNSSLINTDYGRCKAKKPKFGQVFVIGAITSGSLLITLAVGILFFCRYRHKSITLEGFGKTYPMATNIIFSLPSKDDFFIKSVSVKPFTLEYIEQATEQYKTLIGEGGFGSVYRGTLDDGQEVAVKVRSSTSTQGTREFDNELNLLSAIQHENLVPLLGYCNEYDQQILVYPFMSNGSLLDRLYGEASKRKILDWPTRLSIALGAARGLAYLHTFPGRSVIHRDVKSSNILLDQSMCAKVADFGFSKYAPQEGDSYVSLEVRGTAGYLDPEYYKTQQLSEKSDVFSFGVVLLEIVSGREPLNIKRPRIEWSLVEWAKPYIRASKVDEIVDPGIKGGYHAEALWRVVEVALQCLEPYSTYRPCMVDIVRELEDALIIENNASEYMKSIDSLGGSNRYSIVMDKRALPSTTSTAESTITTQTLSHPQPR

SEQ ID NO: 18105 - protein, 451 aa, Chloromonas sp. ANT3
MREAISIHIGQAGCQIGNTCWELYCLEHGIQPDGQMPSDKTIGGGDDAFNTFFSETGAGKHVPRAIFLDLEPTVIDEVRTGTYRQLFHPEQLISGKEDAANNFARGHYTIGKEIVDLALDRIRKLADNCTGLQGFLVFNAVGGGTGSGLGSLLLERLSVDYGKKSKLAFTVYPSPQVSTAVVEPYNSVLSTHSLLEHTDVAIMLDNEAIYDICRRSLDIERPTYTNLNRLIAQVISSLTASLRFDGALNVDITEFQTNLVPYPRIHFVLSSYAPIISAEKAYHEQLSVAEITNAVFEPASMMVKCDPRHGKYMACCLMYRGDVVPKDVNAAVATIKTKRTIQFVDWCPTGFKCGINYQPPTVVPGGDLAKVQRAVCMISNSTAIGEIFSRLDHKFDLMYAKRAFVHWYVGEGMEEGEFSEAREDLAALEKDFEEVGAESADGAGEGEGEEY

SEQ ID NO: 18106 - protein, 321 aa, Nicotiana tabacum
MSTASINSCLTISPAQASLKKPTRPVAFARVSNSSSSPSVPSLIRNEPVFAAPTPIINPILREEMANESYEQAIAALEKLLSEKGELGPIAAARVDQITAELQSSDGSKPFDPVEHMKAGFIHFKTEKYEKNPALYGELSKGQSPKYMVFACSDSRVCPSHILNFQPGEAFVVRNIANMVPAYDKTRYSGVGAAIEYAVLHLKVENIVVIGHSACGGIKGLMSLPADGSESTAFIEDWVKIGLPAKAKVQGEHVDKCFADQCTACEKEAVNVSLGNLLTYPFGRDGLVKKTLALKGGHYDFVNGGFELWGLEFGLSPSLSV

SEQ ID NO: 18107 - protein, 239 aa, Nicotiana tabacum
MATNGRHQEVGHKSLLQSDALYQYILETSVYPREPEPMKELREITAKHPWNLMTTSADEGQFLSMLIKLINAKNTMEIGVFTGYSLLATAMALPDDGKILAMDINRENYEIGLPVIEKAGLAHKIEFKEGPALPVLDQMIEDGKYHGSYDFIFVDADKDNYLNYHKRLIDLVKIGGLIGYDNTLWNGSVVAPPDAPLRKYVRYYRDFVLELNKALAADSRIEICQLPVGDGITLCRRIS

SEQ ID NO: 18108 - protein, 677 aa, Burkholderia sp. 383
MLATIVGSSAEEHVLAISDRNDSTSPEVTATAKAGRRASKGKAQAQALTPTDIASLARQNEERQRQMRALIALGRERGYLTHADINDHLPDNFAQTAAMDTIVSTFSDMGVAVYEQAPDAEALLLTEAAPAVASDDQADEEAEAALSTVDSEFGRTTDPVRMYMREMGASELLTRAGEIEVAKRIEDGLQDMIQAIAACPSIVSTILADVDRIVAGELRIDELVDGISVDTDESEMTPESQEEEAEVLAADDDSDEDDVETDAGDSEKVNAARLEELTNDSLVIFARVRALFEQLPDVPVTGEARSAAAAQVRAAIQRELAPIRFTAKTIDRLCEIVHGQVTEVRAIERSVLAIAVDRCGMPRDAFVESFPGHETDLDWTSRTAATSQQFGAALERHQPAIQAAQQKLVDIESRVSLPLQQLKQINRQMSAAELKMRQAKREMIEANLRLVISIAKKYVNRGMQFLDLIQEGNIGLMKAVDKFEYRRGWKFSTYATWWVRQAVTRALADQARTIRVPVHMIETINKLNRISREILQQTGQEAHPAVLAKRMEMSEEKVRSILKIAKQPVSLETPVGDDADATLGDMIEDVSASSPAEAAIHANMRAAIDEALNGLSPREAKVLRMRFGLDTNSDHTLEEVGKQFDVTRERIRQIESKAMRKLMHPSRADKLRPFLER

SEQ ID NO: 18109 - protein, 901 aa, Medicago truncatula
MELQVIRIFRLVVAFVLCLCIFIRSASSATKGFESIACCADSNYTDPKTTLTYTTDHIWFSDKRSCRQIPEILFSHRSNKNVRKFEIYEGKRCYNLPTVKDQVYLIRGIFPFDSLNSSFYVSIGVTELGELRSSRLEDLEIEGVFRATKDYIDFCLLKEDVNPFISQIELRPLPEEYLHGFGTSVLKLISRNNLGDTNDDIRFPDDQNDRIWKRKETSTPTSALPLSFNVSNVDLKDSVTPPLQVLQTALTHPERLEFVHDGLETDDYEYSVFLHFLELNGTVRAGQRVFDIYLNNEIKKEKFDVLAGGSKNSYTALNISANGSLNITLVKASGSEFGPLLNAYEILQARSWIEETNQKDLEVIQKMREELLLHNQENEALESWSGDPCMIFPWKGITCDDSTGSSIITKLDLSSNNLKGAIPSIVTKMTNLQILDLSYNDLSGWLPESIISLPHLKSLYFGCNPSMSDEDTTKLNSSLINTDYGRCKAKKPKFGQVFVIGAITSGSLLITLAVGILFFCRYRHKSITLEGFGKTYPMATNIIFSLPSKDDFFIKSVSVKPFTLEYIEQATEQYKTLIGEGGFGSVYRGTLDDGQEVAVKVRSSTSTQGTREFDNELNLLSAIQHENLVPLLGYCNEYDQQILVYPFMSNGSLLDRLYGEASKRKILDWPTRLSIALGAARGLAYLHTFPGRSVIHRDVKSSNILLDQSMCAKVADFGFSKYAPQEGDSYVSLEVRGTAGYLDPEYYKTQQLSEKSDVFSFGVVLLEIVSGREPLNIKRPRIEWSLVEWAKPYIRASKVDEIVDPGIKGGYHAEALWRVVEVALQCLEPYSTYRPCMVDIVRELEDALIIENNASEYMKSIDSLGGSNRYSIVMDKRALPSTTSTAESTITTQTLSHPQPR

SEQ ID NO: 18110 - protein, 482 aa, Propionibacterium acnes KPA171202
MQEGDSVTPHTSTTVDKGDAGYDKALKNRHLQMIAIGGSIGTGLFLGTGGRLAQGGPGLAISYAVCGIFAFLMVRALGEMAIRRPSSGAFVSYAREFMGEKGAYATGWFFFLDWSVTVMADITAVALYLHYWTPLRAIPQWVLALIALGVVFTLNMLSVKMFGEAEFWFAAIKVAAIILFMIAAIWAIVTGARVGNYTAGLHNIAQHGGFFPAGLAPVFALTLGVIFAFGGTEMVGVAAGETKDASKILPKAINSMILRIFVFYVGSIILMALVLPYTAYSSNESPFVTFFTGIGIPYAGDIIQVIVLTAALSSLNAGLYSTGRTLRSLAVAGEAPKAAAKLNRHHVPSGGIAMTAALGLLGVALNAFLPDSAFEIVMNLAGIGIAGTWAMVLLAHTRFVSAVRRGKDNRPEYRMPGAPVTNYISLAFLLIVVLSNVTSESGRWTLALFALVAIAMVAGWYAVRNSIKPDLLDNVVPSDEGM

SEQ ID NO: 18111 - protein, 173 aa, Brassica napus
  misc_feature (160)..(160): Xaa can be any naturally occurring amino acid
  misc_feature (164)..(164): Xaa can be any naturally occurring amino acid
  misc_feature (167)..(167): Xaa can be any naturally occurring amino acid
  misc_feature (170)..(170): Xaa can be any naturally occurring amino acid
  misc_feature (172)..(172): Xaa can be any naturally occurring amino acid
  unsure (1)..(173): unsure at all Xaa locations
MANQGAKKRKDENARHMAKLRRIIIACNVVYVIVRMVIFHSSFTWKHWIGLVVTSIGYGVPYKFLDGMAKPSVSDDGELIDGGFDMSTGGICGYLHDVLYITCFVQLASIISGKFWYTYLVIPAFGAYKASGLIRGFMSQGSEGGVEDEKTRKKREKMEXKAFXGQXVRXRXR

SEQ ID NO: 18112 - protein, 451 aa, Chloromonas sp. ANT1
MREAISIHLGQAGVQVGNACWELYCLEHGIQPDGQMPSDKTIGGGDDAFNTFFSETGAGKHVPRAIFLDLEPTVVDEVRTGTYRQLFHPEQLISGKEDAANNFARGHYTIGKEIVDLALDRIRKLADNCTGLQGFLVFNAVGGGTGSGLGSLLLERLSVDYGKKSKLGFTIYPSPQVSNAVVEPYNSVLSTHSLLEHTDVAIMLDNEAIYDICRRSLDIERPTYTNLNRLIAQVISSLTASLRFDGALNVDITEFQTNLVPYPRIHFVLSSYAPIISAEKAYHEQLSVAEITNAVFEPASMMVKCDPRHGKYMACCLMYRGDVVPKDVNAAVATIKTKRTIQFVDWCPTGFKCGINYQPPTVVPGGDLAKVQRAVCMISNSTAIGEIFSRLDHKFDLMYAKRAFVHWYVGEGMEEGEFSEAREDLAALEKDFEEVGAESAEGAGEGEGEEY

SEQ ID NO: 18113 - protein, 521 aa, Arabidopsis thaliana
MDSCCNFSLGTKTVLAKDSFKNVENKFLGEKIKGSVLKPFSSDLSSKKFRNRKLRPGVAYAIATSKNAKEALKNQPSMFERRRADPKNVAAIILGGGDGAKLFPLTKRAATPAVPVGGCYRMIDIPMSNCINSCINKIFVLTQFNSASLNRHLARTYFGNGINFGDGFVEVLAATQTPGEAGKKWFQGTADAVRKFLWVFEDAKNRNIENIIILSGDHLYRMNYMDFVQHHVDSKADITLSCAPVDESRASEYGLVNIDRSGRVVHFSEKPTGIDLKSMQTDTTMHGLSHQEAAKSPYIASMGVYCFKTEALLKLLTWRYPSSNDFGSEIIPAAIKDHNVQGYIYRDYWEDIGTIKSFYEANIALVEEHPKFEFYDQNTPFYTSPRFLPPTKTEKCRIVNSVISHGCFLGECSIQRSIIGERSRLDYGVELQDTLMLGADSYQTESEIASLLAEGNVPIGIGRDTKIRKCIIDKNAKIGKNVVIMNKDDVKEADRPEEGFYIRSGITVVVEKATIKDGTVI

SEQ ID NO: 18114 - protein, 289 aa, Zea mays
MEDERNTQQHQGGEQAQDQENEVKDRGLLDSLLGRNKHDDQEKKNQQEEEELATGMEKVTVAEPDHKEEGHEAAEKKDSLLAKLHRTSSSSSSSSDDEEEEVIDENGEIVKRKKKGLKEKVKEKLAAHKAHDEGDHHQPGVPAPAPAPPVAVDTHAHHQEGEHKPHFPAPAPPPHVETHHPVVVHKIEDDDTKTQTPPQAPEEEKKGLLDKIKEKLPGGHKKPEDAAAAAAAPAVHAPPPPAPHAEVDVSSPDGKKGLLGKIMDKIPGYHKSSGEEDRKDAAGEHKTSS

SEQ ID NO: 18115 - protein, 149 aa, Arabidopsis thaliana
MELELDDDVFFADISKQLNLLITDEDEQNPISLSSSVSFQGLFRGNYQTSATPYMMYNEQINYNVIRESKGTGVFIPRSSQPRRKHNHHPHQKKQGRFIGSFIPKQQFPHHGHDNNLTTLNNNNQESITFHHASTNPRRTYRDAASLFT

SEQ ID NO: 18116 - protein, 373 aa, Lycopersicon esculentum
MQATAEIQAAGSPRRSQKHQMLKDKQVKDLIIDKRRLVEVPYTATLADTINTLMANKVVAVPVAAPPGHWIGAGGSMILESDKQTGAVRKHYIGMVTMLDILAYIAGNGYRDDDDDLTKKMMVPVSSIIGHCLESLSLWTLSPNTSIVDCMEVFSKGIHRAMVPVNGRLENVVGVELTESASCYRMLTQMDLLRFLNDQQELKAIMSHKVSDKQLQAITDTVFGVTNKAKVIDVIKCMRTASLNAVPIVESSNDITEDHTQLVNGKKRKIVGTFSATDLRGCPVSKMQPLLNLEVLDFLKMLSGAPNTGLRSSWREQVTCRPESSLGEVVEKVVSDNVHRVWVVDEQGLLEGVVSLTDMIRVIRLWYLTEFLQ

SEQ ID NO: 18117 - protein, 116 aa, Avena sterilis subsp. ludoviciana
VDAQTYNPAISPIVYECLINPMMRGIPTNDKVVAESLEKLTKVLEVYEARLSKSKFLAGDFFSFADLNHFPYTFYFMGTPHAVLFDSFPHVKAWWETIMARPAVQRMAAKMVPNKA

SEQ ID NO: 18118 - protein, 217 aa, Pimpinella brachycarpa
MVRGKTQMRRIENATSRQVTFSKRRNGLLKKAFELSVLCDAEVALIIFSPRGKLHEFASSSMHETIERYRKHTKDVQSNNTPVVQNMQHLKHETASLAKKIELLEVSKRKLLGEGLGTCSINELQQIEQQLEKSVCTVRARKMQVFKEQIEQLKEKEKTLAADNAILLAKYDVQPRQESPEDGGNLTSTTENSENSDVETELFIGPPEKRFKRIMEK

SEQ ID NO: 18119 - protein, 514 aa, Lycopersicon esculentum
MDGTAVQGTSSVDSFLRNYKLGKTLGIGSFGKVKIAEHTLTGHKVAVKILNRRKIRNMDMEEKVRREIKILRLFMHPHIIRLYEVIETPSDIYVVMEYVKSGELFDYIVEKGRLQEDEARNFFQQIISGVEYCHRNMVVHRDLKPENLLLDSKWNVKIADFGLSNIMRDGHFLKTSCGSPNYAAPEVISGKLYAGPEVDVWSCGVILYALLCGTLPFDDENIPNLFKKIKGGIYTLPSHLSAGARDLIPRMLIVDPMKRMTIPEIRLHPWFQAHLPRYLAVPPPDTTQQAKKIDEEILQEVVKMGFDRNNLTESLRNRVQNEGTVAYYLLLDNRHRVSTGYLGAEFQESMEYGYNRINSNETAASPVGQRFPGIMDYQQAGARQFPIERKWALGLQSRAHPREIMTEVLKALQELNVCWKKIGQYNMKCRWVPSLPGHHEGMGVNSMHGNQFFGDDSSIIENDGATKLTNVVKFEVQLYKTREEKYLLDLQRLQGPQFLFLDLCAAFLAQLRVL

SEQ ID NO: 18120 - protein, 486 aa, Arabidopsis thaliana
MRDDRERGEGDLSWPLIGEKSSVKEEVKKQLWLSGPLIAVSLLQFCLQVISVMFVGHLGSLPLSAASIATSFASVTGFSFLMGTASALDTLCGQAYGAKKYGMLGIQMQRAMFVLTLASIPLSIIWANTEHLLVFFGQNKSIATLAGSYAKFMIPSIFAYGLLQCFNRFLQAQNNVFPVVFCSGVTTSLHVLLCWVLVFKSGLGFQGAALANSISYWLNVVLLFCYVKFSPSCSLTWTGFSKEALRDILPFLRLAVPSALMVCLEMWSFELLVLLSGLLPNPVLETSVLSICLNTSGTMWMIPFGLSGAASTRISNELGAGNPKVAKLAVRVVICIAVAESIVIGSVLILIRNIWGLAYSSELEVVSYVASMMPILALGNFLDSLQCVLSGVARGCGWQKIGAIINLGSYYLVGVPSGLLLAFHFHVGGRGLWLGIICALVVQVFGLGLVTIFTNWDEEAKKATNRIESSSSVKDFAVDDRSVVVF

SEQ ID NO: 18121 - protein, 456 aa, Chromobacterium violaceum ATCC 12472
MSEAHTGLQRELKNRHIQLIALGGAVGTGLFLGSASVLKSAGPSMILGYAIAGFIAFMIMRQLGEMVAEEPVAGSFSHFAYRYWGRFPGFLSGWNYWVLYVLVSMAELTAVGAYVQYWWPHVPAWLTALVCFVCINGINLANVKSYGETEFWFALIKVAAVIGMILFGGYLLLSGSGGPQASVSNLWNDGGFFPHGVKGLFMMMAVIMFSFGGLELIGMTAAEANDPQKTIPKAVNQVIYRILIFYIGSLVVLLSLYPWNKVAAGGSPFVMIFEQIGAGFTAHALNFVVLTAALSVYNSCVYATSRMLFGLARQGNAPRALGKLDTRGVPVYATLFSAAATFACVILNYLLPGEALGLLMSLVVAALVTNWAMISLTHLKFRRAKGGQKLVFPSFWFPLSNWICLAFMVMILGILLFTPGMAVSVYVLPVWLGLLWLGFRLKKPSPAEARLAGENA

SEQ ID NO: 18122 - protein, 76 aa, Arabidopsis thaliana
MKVSPRLKSALLLLFMILATVMGPVRVEARTCETSSNLFNGPCLSSSNCANVCHNEGFSDGDCRGFRRRCLCTRPC

SEQ ID NO: 18123 - protein, 203 aa, Picea abies
MECFEEKGKGVQKTRMVRGKTQMKRIENDTSRQVTFSKRRNGLLKKAYELSVLCDAEVALIVFSPRGKLYEFANPSMQKMLERYDKCSEGSNTTNTTKERDIQYLKREIANREERIKILESRQRKMVGEELASCALSDLNLLESQVERGLRHIRARKTQILVAEIEELKRKERISSEENAFHRKSLSILCMRMVPFWQLLQVH

SEQ ID NO: 18124 - protein, 414 aa, Coxiella burnetii RSA 493
MEKRRVVITGLGVVSPLGNKVSDMWQALLAGKSGVKPITRFDASSFPTQIAAEVRDFDPALVLDLKSIRKTDVFVQFAMESARQAWEDSGLEINETNAPRVGVAIGSGIGGMPWIEKNYDALLTSGPRKISPFFIPGAIINMASGMVSIKYDLKGPNISIVTACTTGLHNIGHAARMIAHNDADAMIAGGTEMASTPLGIGGFAAVRALSTRNDEPEKASRPWDKGRDGFVLGEGAACVVVEELEHAKKRNATIYAEIIGFGMSGDAYHMTRPDPEAEGFTTCMKNSLRDAGIAPERVDYINAHGTSTPAADPLEARAIKKTFGDHAYKLAVSSTKSMTGHMLGAAGALETVISVLAIRDNTAPPTINLENPDEGCDLDFVPNEAREMKIDTVMSNSFGFGGTNGTLVLSRVFD

SEQ ID NO: 18125 - protein, 330 aa, Oryza sativa (japonica cultivar-group)
MMRDVCMEVLPPMDHYASRGNWFMARKWSPEENKQFERALAGLDLRCPDWDRVARAIPGRSALEVMNHFRDLELDVQQIENGMVPFPVYGAAAAGGAFTLQWDGAHGVGDFRNAYRFGGGGGGKRHFGRTPEQERKKGVPWTEEEHKLFLLGLKKYGKGDWRNISRNFVQTRTPTQVASHAQKYFIRLNSGGKDKRRSSIHDITTVNLTDDRPPSPSQSSLISNQSNTSTLTAAVAPFSSTADVKPQNAANASFNSPSRTLGMAGYGMGLQDQGLQCGGQKQSGHSLSDDGRHCCIEPSGLMWLLLLEILQAYTTGFSMSPDVPLQHQTI

SEQ ID NO: 18126 - protein, 232 aa, Taihangia rupestris
MGRGKIEIKRIENTTNRQVTFCKRRNGLLKKAYELSVLCDAEVALIVFSNRGRLYEYSNNSVRETIERYKKACADTSNNGSVSEATTQYYQQEAAKLRNQITALQNNNRNYMAEGLGNMSVKELKNVESKLEKAIGKIRSKKNELLFSEIEYMQKRELDLHNNNQILRAKIAENERHQQSINAIAGGGGAHGSYEIMQSAQSFHEARNYFQVNALQPNHQYSRHDQISLQLV

SEQ ID NO: 18127 - protein, 325 aa, Pseudomonas aeruginosa
MAKRIQFAACGGPEVLEYRDYQPAEPGPREVRVRNRAIGLNFIDTYYRSGLYPAPGLPSGLGSEGAGEVEAVGSEVTRFKVGDRVAYATGPLGAYSELHVLAEEKLVHLPDGIDFEQAAAVMLKGLTTQYLLRQTYELRGGETILFHAAAGGVGLFACQWAKALGVQLIGTVSSPEKARLARQHGAWETIDYSHENVARRVLELTDGKKCPVVYDSVGKDTWETSLDCVAPRGLLVSFGNASGPVTGVNLGILSQKGSLYVTRPTLGSYADTPEKLQAMADELFGLIERGDIRIEINQRFALAEAARAHTELAARRTTGSTVLLP

SEQ ID NO: 18128 - protein, 296 aa, Streptomyces coelicolor A3(2)
MAERIVHRRGYRKGLGGEMCAEFLGTFVLILFGVGSVAVAVAGLPGSGRQTADFGPANWLIISWGWGLAVVFGVYVAGGISGAHLNPAVTLGFAVRRDFPWRKVLPYWLAQVVGAFVAAALVYACYRWAIDAAIAKAGETRETSLNTYSIFATFPAEYFGDSWWGPLLDQIVGTGILLLLICALIDTRNTAPMANLHPYLIGLVVVAIGLTFGTNAGYAINPARDFGPRLFTFFEGWGDIALPGTFQWFSGYWWIPIVGPLIGGVVGVLVYDLLVSPVLKARLTEREEGPATEEPS

SEQ ID NO: 18129 - protein, 290 aa, Triticum aestivum
HEDNADITLSCAPVGESRASEYGLVKFDSSGRVVQFSEKPKGDDLEAMKVDTSFLNFAIDDPAKYPYIASMGVYVFKRDVLLNLLKSRYAELHDFGSEILPRALHDHNVQAYVFTDYWEDIGTIRSFFDANMALCEQPPKFEFYDPKTPFFTSPRYLPPTKSDKCRIKEAIISHGCFLRECKIEHSIIGVRSRLNSGSELKNAMMMGADSYETEDEISRLMSEGKVPIGVGENTKISNCIIDMNARIGRDVVISNKEGVQEADRPEEGYYIRSGIVVIQKNATIKDGTVV

SEQ ID NO: 18130 - protein, 336 aa, Lotus corniculatus var. japonicus
MGRSPCCDENGLKKGPWTPEEDQKLVEHIQKHGHGSWRALPKLAGLNRCGKSCRLRWTNYLRPDIKRGKFSPEEEQTILHLHSILGNKWSTIATHLPGRTDNEIKNFWNTHLKKKLIQMGFDPMTHQPRTDLVSTLPYLLALANMTQLMDHNHQSFDEQAVQLAKLQYLNYLLQSSNNPLCMTNSYDQNALTNMEAFSLLNSISNVKENLGVDFSQMDTQTSLFSHDGNNMASSQPLHHPSNMLPHFLDPQVSFSSQSCLNNNEQGQGTNNFAISQRDHTGDESSWINIPSINPPNAIGTSGDASSSTSSYGGAGPSPYNWSELFFEDPTTMHELS

SEQ ID NO: 18131 - protein, 481 aa, Oryza sativa
  misc_feature (396)..(396): Xaa can be any naturally occurring amino acid
  unsure (1)..(481): unsure at all Xaa locations
GFSFDLAAATQVGTYFLRNYYNLLQQSPDVVHQFYNDASTMVRVDDLAGTNTTASTMMDIHSLIMSLNFTQIEIKTANFLNSWGDGVLVMVSGLVQTKEYSHQRKFIQMFFLAPQEKGYFVLNDYFHFVDEEQVQPAPVIAQDNFETNMASNSVVEPVPEYIHEEENQSAVPITSEESDAVENYTYSEPPQQVVSQSDNWGDEPLPEEPISSFTNGMAMAPEEPVQSPPVPPPHVEEPVGEPVKKTYASILRTAKAPLVFPVAQPAPTRPHQATETNQAAQHSVMTSSVATEKPKTDVYGEFAVQDDEESKSVYVGNVPSSVSEADLENEFKKFGRLIPDGVAIRSRKETGGYYAFVEFEELSGVHNALKASPIEINGRQIYVEERKPNSGIRGGXGEAEVVSVEEGEGMLEGEATTNMRATVVVAGHQMATSVFLTMRGAFWGATTQETKWFTTPWWWPGGICICCKHEVLIRQKGGRAA

SEQ ID NO: 18132 - protein, 307 aa, Lotus corniculatus var. japonicus
MMRTPSIDESGMKKGPWSQEEDKVLVDYIQKHGHGSWRALPQLAGLNRCGKSCRLRWTNYLRPDIKRGKFSDEEEQLIINLHASLGNKWATIASHLPGRTDNEIKNLWNTHLKKKLKLLQMGLDPVTHCPRSDHMNILSNLQQILAAANIVSSFTNPCDMIHALMLHSDATNLAKLHLLQNMLQNNNFQNIYNGSVAFPSLHQIQPSFQNFEAPQHLSGGRDDISNYRECLKFDEQLGLSNIADPTPSNSLPKLVSASPECSPVNQEENMANHKEWSNFDPSSTAFETWGEFMSEDTSETYWKDFME

SEQ ID NO: 18133 - protein, 543 aa, Prochlorococcus marinus str. NATL2A
MAKRIIYNEQARRALERGIDILAESVAVTLGPKGRNVVLEKKFGAPQIINDGVTIAKEIELEDHIENTGVALIRQAASKTNDAAGDGTTTATVLAHAMVKAGLKNVAAGANAITLKKGIDKATEFLVEKIKDHSKPISDSNAIAQCGTIAAGNDEEVGKMIADAMDKVGKEGVISLEEGKSMTTELEVTEGMRFDKGYISPYFATDTERMEAVLDEPYILLTDKKIGLVQDLVPVLEQVAKTGKPLLIIAEDIEKEALATLVVNRLRGVLNVAAVKAPGFGDRRKAMLEDMAVLTNGQLITEDAGLKLENATLDMLGTSRRVTINKDTSTIVAEGNEVAVNARCEQIKKQMDETDSTYDKEKLQERLAKLSGGVAVVKVGAATETEMKDKKLRLEDAINATKAAVEEGIVPGGGTTLAHLAPALGDWSSSNLSGEELIGANIVEAALTSPLMRIAENAGANGAVVAENVKSKPVNDGYNAATGEYVDMLSAGIVDPAKVTRSGLQNAASIAGMVLTTECIVADLPEKKDSSSAGGGMGGDFDY

SEQ ID NO: 18134 - protein, 73 aa, Ipomoea nil
  misc_feature (9)..(9): Xaa can be any naturally occurring amino acid
  unsure (1)..(73): unsure at all Xaa locations
EQLAAVDGXLCLVSKAIGAYDPVCTYNVNLSVFTSIPDFWAFGQLFPIVPIRRLDERPGARGILSDLTCDSDG

SEQ ID NO: 18135 - protein, 103 aa, Prochlorococcus marinus str. NATL2A
MAAVSLSVSTVKPLGDRVFVKVSESEEKTAGGILLPDTAKEKPQVGEVAQVGPGKRNEDGSRQSPEVSVGDKVLYSKYAGTDIKLGSDEYVLLSEKDILAVVN

SEQ ID NO: 18136 - protein, 440 aa, Haloarcula marismortui ATCC 43049
MDRDTAEPCVDSMPGPQSSEWVEYHHETAAPSTYVYDFVWDITEDAIGPFCTDADGNVLLDFTCHVAASPLGYNNPKMLDRADEFDMVDPLKIAGQDFYISTGGSPDETSLPGPAHLMDKLTDITSQYDFDTVFLSNSGAEAVENAMKICYDNCETPKYGITFDGAFHGRTLGALSLNRSKSVYRRKFPEISGIHDVEYSEAGVERLRSKLDADTGHIPPEEVAFLILEPIQGEGGYRVPNPEFLSAVDDLCREHDIPIIADEIQSGVGRTGEMWAVDHYDIEPDVITSAKALRVGATVSRSDIFPSETSRLSSTWGAGDILGSMRGALTLAAIEDHDLLDNAAEKGTYFMDRLREISAGRSLVEDVRGLGLMTALEFDTADRRDAVMETALQHGLLTLGCGQKSLRLLPPLDVTERELELCLDILDSVFTEVADPVASA

SEQ ID NO: 18137 - protein, 603 aa, Bdellovibrio bacteriovorus HD100
MESRYEALFELSNDMIGVFGEDWRPAKLNHVWSEVLGWSHEELMQIPFNELIHPEDVKNIVSRYEKIRKGDVLRNFLLRYRCKDGHYKFLSWNYQFDPVTNEALCVVKDTTPQKIFTEILGQANAEAPIGTWSMDLTTGKHFWSRALYDIFEVDPDTYDLDRLRGFEMIAEKDRSLMMETHRRLMEQGTDYDVEVTVCSGKGRVFPARVMGTALRQEGRIVQIYGLMYDVAQRRHVEKELRYQQFLLRMFLQSSPAIVYVKDLQGRYLLVSPTFENLVGKRSVELVGKTDAQIFGVEDARRFSDSDNQLIQEQQPRSYEEKLTFHDGSQKYYLSEKFPLRDEDGHLIAIAGVSTDITELHRYQQELERAKEAAEAGTRAKSEFLANMSHEIRTPMNSIMGMSELLLDTELSPDQRQFVTILTRASSSLLNLINDILDLSKIESGLMVIEKVPFSVRESVRRALELLMIRAVEKKLDLKLEIDPQVPEKILGDATRFQQVLINLIGNGLKFTTHGEVRVQLKVNGHQLWVGVKDTGIGMAPEQMQGLFTRFSQGDSSITRRFGGTGLGLSISKQLVEKMGGTIGVTSEIGQGSVFYFTLPLGSK

SEQ ID NO: 18138 - protein, 699 aa, Magnaporthe grisea 70-15
MATIALPRPIPAHRASSGLSLSSSSIAIDSINANPVPNKHLPVCPPGPVPRSAPHPHDNHPPTLETLDSDHNSVNESSQSILFPPDAFPRFSSADGGSLIVYQLTPRDIADALDHIARQPLPDPSAVFPWLHGLHPQNHIQQAFFVQRRRSLRRTPHCLRSVTLVKADGDLSTSRLKGAIAPQEFLQSDTAEFIDVDPKDGFSVRNFQIQSAKSAMTSDIVVYGDDEPLVRKVGWDIANAQQAWRQKHIDQGDLALPEYNTFVCLSRFSSFEKNHPEIVAVDSGGRLTGRVVDLFSQERREMYAMTKASEIAPNVFLGPTPDPSTGEDQDYDIFIECNDMAQLSPVCLQAIVGIPDEVIQQVFLEFPSSGSILPPTWSQAEADGILDTCKWLYHLAQGTCPDPVDIDNGEAMTGAGSQSKFPPRKILIHCQDGYTESTMLAIAYVSYATGMPVPEAWLHLHTVKKRNFFAYPTDVALLTAIAPRLLSASPVHAETASLAEMTAMLKSERNEPKWLAGLDGSLPSRILHYMYLGNLGHANNPDLLRELGIGQILSVGETAMWRDGELEQWGPENVCIVENVQDNGIDPLTCEFQRCLEFIERGRRNGTATLVHCRVGVSRSATICIAEVMKELKLSVPRAYSFVRARRLNVIIQPHLRFAYELLKWEELLQLHWNGKIQRELEWSEITREIALMNRPYAR

SEQ ID NO: 18139 - protein, 427 aa, Haloarcula marismortui ATCC 43049
MSTQKEPPEQATDEDESPIATARRQLERAAEHLDLSEGMLEQLRHPSKTVEVSVPIHRTDGSVEVFNGYRVQHFEVRGPYKGGMRYHPSVSAEECTALAMLMTWKCAVMDLPFGGAKGGIVVDPSTLDAQETEQLTRRFAEELREVVGPTKDIPAPDMGTDEQTVAWFMDAYSMQEGETVPGIVTGKPTAVGGTHGREEAPGRSVAIVAREALDYYDGSVEGATVAVQGFGAVGANAARLLDSWGASVVAVSDVDGGIYDESGLDIESISADGDEHGQLGAVDAPRQLSNAELLELDVDVLIPAAVGNVLTEENAADVQASIIVEGANGPTTTAADTVFEERNIPVIPDILANAGGVTVSYFEWLQHINRRSWSREEVNDELEAEMLDAWEALQAEVEDRDVTWRTAAYIVALSRIGDAMNARGLWP

SEQ ID NO: 18140 - protein, 925 aa, Medicago truncatula
MMELQVIRIFRLVVAFVLCLCIFIRSASSATKGFESIACCADSNYTDPKTTLTYTTDHIWFSDKRSCRQIPEILFSHRSNKNVRKFEIYEGKRCYNLPTVKDQVYLIRGIFPFDSLNSSFYVSIGVTELGELRSSRLEDLEIEGVFRATKDYIDFCLLKEDVNPFISQIELRPLPEEYLHGFGTSVLKLISRNNLGDTNDDIRFPDDQNDRIWKRKETSTPTSALPLSFNVSNVDLKDSVTPPLQVLQTALTHPERLEFVHDGLETDDYEYSVFLHFLELNGTVRAGQRVFDIYLNNEIKKEKFDVLAGGSKNSYTALNISANGSLNITLVKASGSEFGPLLNAYEILQARSWIEETNQKDLEVIQKMREELLLHNQENEALESWSGDPCMIFPWKGITCDDSTGSSIITKLDLSSNNLKGAIPSIVTKMTNLQILNLSHNQFDMLFPSFPPSSLLISLDLSYNDLSGWLPESIISLPHLKSLYFGCNPSMSDEDTTKLNSSLINTDYGRCKAKKPKFGQVFVIGAITSGSLLITLAVGILFFCRYRHKSITLEGFGKTYPMATNIIFSLPSKDDFFIKSVSVKPFTLEYIEQATEQYKTLIGEGGFGSVYRGTLDDGQEVAVKVRSSTSTQGTREFDNELNLLSAIQHENLVPLLGYCNEYDQQILVYPFMSNGSLLDRLYGEASKRKILDWPTRLSIALGAARGLAYLHTFPGRSVIHRDVKSSNILLDQSMCAKVADFGFSKYAPQEGDSYVSLEVRGTAGYLDPEYYKTQQLSEKSDVFSFGVVLLEIVSEREPLNIKRPRIEWSLVEWAKPYIRASKVDEIVDPGIKGGYHAEALWRVVEVALQCLEPYSTYRPCMVDIVRELEDALIIENNASEYMKSIDSLGGSNRYSIVMDKRALPSTTSTAESTITTQTLSHPQPR

SEQ ID NO: 18141 - protein, 323 aa, Enterococcus gallinarum
MKKKIDITVFGCEPDEATVFRKLSHEFGVTVSLVREAVSEDNAKVADGCQCVSISHKAELSEPLLLALKDAGVKYICTRSIGYNHIDIQAAGQMGMTIGTVAYSPGSVADYAIMLMLMLMRGTKSVIHRTEKQDYCLNSLRGKELRDMTVGVLGAGRIGQAVMERLKGFGCTVLAYDRNHKAGADYVSFCELLQRSDIITLHVPLAEDTFHMIGREQLEMMKKEALLINTARGALVDTGALVEALADGKIGGAALDVLEGEEGFFYYDCTYKAVEHPFLSTLQRMPNVIVTPHTAYHTERVLVDTVSNTIRNCLNFERSLGNV

SEQ ID NO: 18142 - protein, 634 aa, Zea mays
MDGCDCIEPLWPTDDLLVKYQYISDFFIALAYFSIPLELIYFVKKSSFFPYRWVLIQFGAFIVLCGATHLINLWTFTTHTKTVAMVMTIAKVSTAVVSCATALMLVHIIPDLLSVKTRELFLKNKAEELDREMGLIRTQEETGRHVRMLTHEIRSTLDRHTILKTTLVELGRTLGLEECALWMPSRSGSSLQLSHTLHHQITVGSSVPINLPVINQVFSSNRAIIIPHTSPLARIRPLTGRYVPPEVAAVRVPLLHLSNFQINDWPELSAKSFAIMVLMLPSDSARKWHVHELELVEVVADQVAVALSHAAILEESMRARDLLMEQNVALDLARREAEMAIRARNDFLAVMNHEMRTPMNAIIALSSLLLETELTPEQRLMVETVLKSSNLLATLINDVLDLSKLEDGSLELEIKAFNLHAVFKEVMGFIKPIASIKRLSVSVMLAPDLPLCAIGDEKRLMQTILNISGNAVKFTKEGHITLVASIVKADSLREFRTPEFHPTASDDHFYLKVQVKDTGCGIGPQDLPHVFTKFAHPQSGGNRGFNGSGLGLAICKRFVSLMGGHIWIDSEGTGRGCTATFVVKLGVCDNTNTYQQQLIPLVWPSSADSDLRAPKPLPDGRGSTPLKSRYQRSV

SEQ ID NO: 18143 - protein, 51 aa, Avena sterilis subsp. ludoviciana
VWMEVESNQYTATLGPILFECLVHPMLGGATDQKVVEDNLGKIKKVLDIYE

SEQ ID NO: 18144 - protein, 378 aa, Nicotiana tabacum
MAGMCCGVNLTETEATTPVEPSSEAARRRRMEIHQFRLAPPLENGTKRHKVEKVVDQSKRRKLETSVTISLMSPLGVTEKVAEKEFDAKPLDLSESDVSSVKVDGVEVVAGDNNLSKFGITSVCGRRRDMEDAVAVHPSFCKGENENSNSLHFYGVYDGHGCSHVAMKCKDRMHEIVKNEVEKGETQWKEVMTKSFSQMDNEVVHYSSGAVGGSSSNCRCELQTPQCDAVGSTAVVAVVTSEKIIVSNCGDSRAVLCRNGVAIPLSIDHKPDRPDELNRIQEAGGRVIYWDGPRVLGVLAMSRAIGDNYLKPYVISEPEVTITERTDEDECLILASDGLWDVVSNETACGVARMCLQSRRPPSPQGPPENDVTVTGAG

SEQ ID NO: 18145 - protein, 923 aa, Pisum sativum
MELRVICIIRLVVACVLCLCIFIRSASSATEGFESIACCADSNYTDPKTNLNYTTDYRWYSDKSNCRQIPEILLSHRSNINFRLFDIDEGKRCYNLPTIKDQVYLIRGTFPFDSVNTSFYVSIGATELGEVTSSRLEDLEIEGVFRAPKDNIDFCLLKEDVNPFISQLELRPLPEEYLHDFSTNVLKLISRNNLCGIEDDIRFPVDQNDRIWKATSTPSYALPLSFNVSNVELNGKVTPPLQVLQTALTHPERLEFVHVGLETDDYEYSVLLYFLELNDTLKAGQRVFDIYLNSEIKKEGFDVLEGGSKYSYTVLNISANGSLNITLVKASGSKFGPLLNAYEILQARPWIDETDQTDLEVIQKMRKELLLQNQDNEALESWSGDPCMLFPWKGVACDGSNGSSVITKLDLSSSNLKGTIPSSVTEMTKLQILNLSHNHFDGYIPSFPPSSLLISVDLSYNDLTGQLPESIISLPHLNSLYFGCNQHMRDDDEAKLNSSLINTDYGRCNAKKPKFGQVFMIGAITSGSILITLAVVILFFCRYRHKSITLEGFGGKTYPMATNIIFSLPSKDDFFIKSVSVKPFTLEYIELATEKYKTLIGEGGFGSVYRGTLDDGQEVAVKVRSATSTQGTREFDNELNLLSAIQHENLVPLLGYCNEYDQQILVYPFMSNGSLLDRLYGEPAKRKILDWPTRLSIALGAARGLAYLHTFPGRSVIHRDVKSSNILLDHSMCAKVADFGFSKYAPQEGDSYVSLEVRGTAGYLDPEYYKTQQLSEKSDVFSFGVVLLEIVSGREPLNIKRPRVEWSLVEWAKPYIRASKVDEIVDPGIKGGYHAEALWRVVEVALQCLEPYSTYRPCMVDIVRELEDALIIENNASEYMKSIDSLGGSNRYSIVMDKRALPSTTSTAESTITTQNVSHPQPR

SEQ ID NO: 18146 - protein, 277 aa, Triticum aestivum
  misc_feature (223)..(223): Xaa can be any naturally occurring amino acid
  misc_feature (239)..(240): Xaa can be any naturally occurring amino acid
  misc_feature (256)..(256): Xaa can be any naturally occurring amino acid
  misc_feature (259)..(259): Xaa can be any naturally occurring amino acid
  misc_feature (261)..(261): Xaa can be any naturally occurring amino acid
  unsure (1)..(277): unsure at all Xaa locations
AGRVWHGGLTAVMKLTKLFIEKGAAGIHIEDQAPGTKKCGHMAGKVLVPIQEHINRLVAIRAQADIMGSDLLAIARTDAEAATLLSTNIDPRDHAFILGSTNSTLKPLNDLMIAAEATGKSGAELQRIEDEWLAKANLSSFDDAVAAAIDAGSFSDKAGIKQEYTSRAKGKSNFEARAVARQLLGRNIFFDWDAPRTREGYFRLKGGCDCAVNRAIAYAPYCXAIWMESKLPDFAQAEXXAQGVHAVWPEKKLAYXLSXSXNWETAMPRDEQETTSD

SEQ ID NO: 18147 - protein, 151 aa, Oryza sativa
MVRGKTQMKRIENPTSRQVTFSKRRNGLLKKAFELSVLCDAEVALIVFSPRGKLYEFASASTQKTIERYRTYTKENIGNKTVQQDIEQVKADADGLAKKLEALETYKRKLLGEKLDECSIEELHSLEVKLERSLISIRGRKTKLLEEQVAK

SEQ ID NO: 18148 - protein, 923 aa, Pisum sativum
MELRVICIIRLVVACVLCLCIFIRSASSATEGFESIACCADSNYTDPKTNLNYTTDYRWYSDKSNCRQIPEILLSHRSNINFRLFDIDEGKRCYNLPTIKDQVYLIRGTFPFDSVNTSFYVSIGATELGEVTSSRLEDLEIEGVFRAPKDNIDFCLLKEDVNPFISQLELRPLPEEYLHDFSTNVLKLISRNNLCGIEDDIRFPVDQNDRIWKATSTPSYALPLSFNVSNVELNGKVTPPLQVLQTALTHPERLEFVHVGLETDDYEYSVLLYFLELNDTLKAGQRVFDIYLNSEIKKEGFDVLEGGSKYSYTVLNISANGSLNITLVKASGSKFGPLLNAYEILQARPWIDETDQTDLEVIQKMRKELLLQNQDNEALESWSGDPCMLFPWKGVACDGSNGSSVITKLDLSSSNLKGTIPSSVTEMTKLQILNLSHNHFDGYIPSFPPSSLLISVDLSYNDLTGQLPESIISLPHLNSLYFGCNQHMRDDDEAKLNSSLINTDYGRCNAKKPKFGQVFMIGAITSGSILITLAVVILFFCRYRHKSITLEGFGGKTYPMATNIIFSLPSKDDFFIKSVSVKPFTLEYIELATEKYKTLIGEEGFGSVYRGTLDDGQEVAVKVRSATSTQGTREFDNELNLLSAIQHENLVPLLGYCNEYDQQILVYPFMSNGSLLDRLYGEPAKRKILDWPTRLSIALGAARGLAYLHTFPGRSVIHRDVKSSNILLDHSMCAKVADFGFSKYAPQEGDSYVSLEVRGTAGYLDPEYYKTQQLSEKSDVFSFGVVLLEIVSGREPLNIKRPRVEWSLVEWAKPYIRASKVDEIVDPGIKGGYHAEALWRVVEVALQCLEPYSTYRPCMVDIVRELEDALIIENNASEYMKSIDSLGGSNRYSIVMDKRALPSTTSTAESTITTQNVSHPQPR

SEQ ID NO: 18149 - protein, 402 aa, Saccharomyces cerevisiae
MFQQLSASIRHNAHIIFLCISWYFISSLASQVTKQVLTVCPLPLFLGEFQFIYTAVLAWFTCYIAYSFPGFYRIFPNGTFPEYYIDDRETSRAARKESKLSSLIIPPSKPILQTVLPLGLFQFVGKYFGHTATSLVPVSTVASIKTLSPMFILLLQKILKISTLKITLTLIFSLCTLVLGVWIIVQEDNRSPASSNELREFSKYGVICAMISMFIFVLQNIYGKTVFTYRSQTDESQSNSGFSRQESPLPLYEKLDEKLVAKKKPKSYDKLTLMIYISLVGFCLSFGWFITLEFPVLFRYFFQINSSSTVIKAFPVSLFLLNGTFHFIQAMITFHLLGEVSTLTYSIANLMKRFAIIAVSWVFIGRRITWLQVFGLVLNTLGLFLYERCTSQSKIKAKIRPE

SEQ ID NO: 18150 - protein, 325 aa, Pseudomonas aeruginosa PAO1
MKKNVFVFSRLAPEHLERLQCQFNVRVLEPKQGDIDAQYAAALPDTHGMIGVGRPLGARQLEQAKQLEVISSVSVGYDNYDLDYLNRRGIALTNTPDVLTETTADLGFALLISAARRVAELDAWVKAGNWKRTVDAPQFGTDVHGKKLGILGLGRIGAAIARRGRFGFGMQVLYHGNNRKPELEQELGARFLGFDELLGEADFVCVVVPLGAQTRQLIGARELGLMKPSAILVNVARGQVVDEAALVAALREKRILGAGLDVYEKEPLAESPLFALDNVVTLPHIGSATHETRRAMAERALQNFEAALRGERPLDLVNPQVWRRG

SEQ ID NO: 18151 - protein, 396 aa, Staphylococcus aureus subsp. aureus MRSA252
MTKSEKIIELTNHYGAHNYLPLPIVISEAEGVWVKDPEGNKYMDMLSAYSAVNQGHRHPKIIQALKDQADKVTLVSRAFHSDNLGEWYEKICKLAGKDKALPMNTGAEAVETALKAARRWAYDVKGIEPNKAEIIAFNGNFHGRTMAPVSLSSEAEYQRGYGPLLDGFRKVDFGDVDALKAAINKNTAAVLVEPIQGEAGINIPPEGYLKAIRELCDEHNVLFIADEIQAGLGRSGKLFARDWDNVKPDVYILGKALGGGVFPISVVLADKEVLDVFTPGSHGSTFGGNPLACAASIAALDVIVDEDLPGRSLELGDYFKEQLKQIDHPSIKEVRGRGLFIGVELNESARPYCEALKEEGLLCKETHDTVIRFAPPLIITKEELDLALEKIRHVFQ

SEQ ID NO: 18152 - protein, 414 aa, Staphylococcus aureus subsp. aureus MRSA252
MTENNNLVTSTQGIIKEALHKLGFDEGMYDLIKEPLRMLQVRIPVRMDDGTVKTFTGYRAQHNDAVGPTKGGVRFHPDVDEEEVKALSMWMTLKCGIVNLPYGGGKGGIVCDPRQMSIHEVERLSRGYVRAISQFVGPNKDIPAPDVFTNSQIMAWMMDEYSALDKFNSPGFITGKPIVLGGSHGRDRSTALGVVIAIEQAAKRRNMQIEGAKVVIQGFGNAGSFLAKFLYDLGAKIVGISDAYGALHDPNGLDIDYLLDRRDSFGTVTNLFEETISNKELFELDCDILVPAAISNQITEDNAHDIKASIVVEAANGPTTPEATRILTERGILLVPDVLASAGGVTVSYFEWVQNNQGYYWSEEEVNEKLREKLEAAFDTIYELSQNRKIDMRLAAYIIGIKRTAEAARYRGWA

SEQ ID NO: 18153 - protein, 138 aa, Saccharomyces cerevisiae
MAKDLVQARDNSQVFGVARIYASFNDTFVHVTDLSGKETIARVTGGMKVKADRDESSPYAAMLAAQDVAAKCKEVGITAVHVKIRATGGTRTKTPGPGGQAALRALARSGLRIGRIEDVTPVPSDSTRKKGGRRGRRL

SEQ ID NO: 18154 - protein, 385 aa, Photobacterium profundum SS9
MNVQALPMHRFIDHHGNLVSQLPAWADQSILKGFYCDMVLTRTYDNKAVALQRTGKLGTYPSHLGAEAIGIAIGRALRADDVFIPYYRDMPAMWARGIAMEKNLQYWGGDERGSDFCVTNDQTSTNFTTPNNTTQSPAHSPNHSHCRDLPFCVPIATQCTHAVGVASALKIEGGHKAALVTCGDGATSKGDFLESINCAGTWNIPLVFVVNNNQWAISVPRRLQCGADFLSEKAKGAGIPGLTVDGNDIVAMFDAVQISLDRARKGKGATLIEAISYRLGDHTTADDASRYRSEDELHEAWGFEPISRLKTYLMRQSLWSEQDDKQWQEHCQEVVEQAVKRYLNIPVQAPETAFDFLYESLNTELHQQRDELINKAMRMQGGKHG

SEQ ID NO: 18155 - protein, 228 aa, Taihangia rupestris
MGRKIEIKRIENTTNWQVTFCKRRNGLLKKAYELSVLCDAEVALIVFSTRGRLYEYANNSVRQTIQRYKKTCDSSNSGSVTEANVQFYQQEASKLRRQIREIQNSNRHILGEALSTLNVKELKNLEGRLEKGIGRIRSKKNEMLFAEIEYMQKKEIELQNQNNFLRAKIAETDKARQQQTNMMPGTSSAYDQSMPPPQTYDRSFLPVILESNHNYNRQGQNQTPLQLV

SEQ ID NO: 18156 - protein, 363 aa, Arabidopsis thaliana
MAKDGPNWDGLLKWSLSHADGTRPTRQLSEEDRKWFMEAMQSQTVDVVKRMKEITLVMQTPEQVLVEHGVTPEDIQDLLDELQEHVESIDMANDLHSIGGLVPLLSFLKNSHANIRAKAADVVSTIVQNNPRSQELVMETNALESLLSNFTSDTDIHARTQALGAISSLIRHNKPGVTAFKLANGYAGLRDALASDSVRFQRKALNLLQYLLQEDDSDRSIATGLGFPRVMMHLASSDDAEIREAALRGLLELSREKNDGSSSIDKSDEKLRQLLEERIKGITLMSQEDLETVKEERQLVDLLWSICYNEPSSLREKGLVVLPGEDALPPDVASKLFEPPLRASAANRNATEKKDEPMKLLGP

SEQ ID NO: 18157 - protein, 504 aa, Zea mays
MVLTHVHDLDEASAASAVVFASRYVQDPLPRYELGEKSVSKDAAYQIIHDELLLDSSPRLNLASFVTTWMEPECDKLILEGINKNYADMDEYPVTTELQNRCVNIIARLFHAPVGASEKAVGVGTVGSSEAIMLAGLAFKRRWQNRRRAAGQPCDRPNIVTGANVQVCWEKFARYFEVELKEVRLREGCYVMDPDEAVRMVDDNTICVAAILGSTLTGEFEDVRRLNDLLAANNRRTGWDTPIHVDAASGGFIAPFLYPDLEWDFRLPLVKSINVSGHKYGLVYAGVGWVVWRSKEDLPDELIFHINYLGADQPTFTLNFSKGSSQIIAQYYQFLRLGFEGYRNVMENCMESARTLREGLERTGRFTIISKEQGVPLVAFTFKAKDETPLAFKLSAELRRFGWIVPAYTMPANLEHMAVLRVVVREDFGRPLAERFLSHVRMALEELDHAAKGGPVPRMRLTIELGPPARGSGEEASARVVNREAVVPVHRSVSLAGGKTKGVC

SEQ ID NO: 18158 - protein, 378 aa, Zea mays
  misc_feature (121)..(121): Xaa can be any naturally occurring amino acid
  unsure (1)..(378): unsure at all Xaa locations
SESEAASRRQGEMGKGAQGSDAAAAGGEVEENMAAWLVAKNTLKIMPFKLPPVGPYDVRVRMKAVGICGSDVHYLREMRIAHFVVKEPMVIGHECAGVVEEVGAGVMHLSVGDRVALEPGXSCWRCRHCKGGRYNLCEDMKFFATPPVHGSLANQVVHPADLCFKLPDGVSLEEGAMCEPLSVGVHACRRAGVGPETGVLVVGAGPIGLVSLLAARAFGAPRVVVVDVDDHRLAVARSLGADAAVRVSPRVEDLADEVERIRAAMGSDIDVSLDCAGFSKTMSTALESTRPGGKVCLVGMGHNEMTLPLTAAAAREVDVVGVFRYKDTWPLCIDFLRSGKVDVKPLITHRFGFSQRDVEEAFEVSARGRDAIKVMFNL

SEQ ID NO: 18159 - protein, 239 aa, Triticum aestivum
  misc_feature (11)..(11): Xaa can be any naturally occurring amino acid
  misc_feature (21)..(21): Xaa can be any naturally occurring amino acid
  misc_feature (24)..(24): Xaa can be any naturally occurring amino acid
  misc_feature (32)..(32): Xaa can be any naturally occurring amino acid
  misc_feature (74)..(74): Xaa can be any naturally occurring amino acid
  unsure (1)..(239): unsure at all Xaa locations
LVLRLRGGMQXFVKTFTGKTXITXKVESSDTXFDNVKAKIQDKEGIPPDQQRLIFAGKQLEDGRTLADYNIQKXSTLHLVLRLRGGMQIFVKTLTGKTITLEVESSDTIDNVKAKIQDKEGIPPDQQRLIFAGKQLEDGRTLADYNIQKESTLHLVLRLRGGMQIFVKTLTGKTITLEVESSDTIDNVKAKIQDKEGIPPDQQRLIFAGKQLEDGRTLADYNIQKESTLHLVLRLRGGQ

SEQ ID NO: 18160 - protein, 359 aa, Coxiella burnetii RSA 493
MFAQVTYIWMDGAQPTQKLRSKVRIVKHPERDITLADFPEWGFDGSSTYQATGKDSDLILQPVHFVKDPILGDGNYLVLCEVMNPDGSPHASNTRARLRQIMANGAAEHEPWIGFEQEYTLFQGVQPLGWPDRGYPAPQGPFYCGIGADEVFGRPLVEEHATACIEAELMIFGTNAEVMPGQWEFQIGYRGADDETPDPLTVSDHLWLARWLLYRIGEDYGITATLQPKPVKGDWNGAGKHTNFSTKLMRDPATGREAIEQAIERLSKRHDAHIAVYGHGLEERLTGKHETAPITQFSSGVGNRGASVRIPSAVASRGCGYLEDRRPGANADPYQVAAILLETICGIQLPKNSGIETTV

SEQ ID NO: 18161 - protein, 383 aa, Chromobacterium violaceum ATCC 12472
MRLQDLSPGLGELDERHRLRRRATLESPQGDEVVIDGRSYISFASNDYLGLADHPSLVRALQQGADRWGAGSGASHLLTGHTLAHQQAEEALAGFVGREAALLFGSGYAANLAVITSLVGRGDAVFADKLNHASLNDGCLLSRADFQRFRHNDLAHLEQLLADSGAPTKLIAVDAVYSMDGDQAPLPALLALAERYDAWLYVDDAHGFGVLGDGRGSAALHGLASDRLIYMATLGKAAGLAGAFVAGCRPLVDWLVNKARTYIYTTAQPPALAAAVGASLRLIAEGGERRERLRQLISRCRQRLEGTPYAGASATAIQPFVVGSDENAVRLAETLREQGYWVPAVRPPTVPENGARLRISLSARHELSQLDALLDLMLRPAES

SEQ ID NO: 18162 - protein, 351 aa, Triticum aestivum
  misc_feature (284)..(284): Xaa can be any naturally occurring amino acid
  misc_feature (292)..(292): Xaa can be any naturally occurring amino acid
  misc_feature (299)..(299): Xaa can be any naturally occurring amino acid
  misc_feature (314)..(314): Xaa can be any naturally occurring amino acid
  misc_feature (317)..(317): Xaa can be any naturally occurring amino acid
  unsure (1)..(351): unsure at all Xaa locations
MPRVCTHLHSFDPPILQVPELKAMASPFSAPSLIMEEEGRFEAEVAEVGAWWNTERFRLTKRPYTARDVVLLRGTLRQSYASGEMAKKLWRTLKAHQAGGTASRTFGALDPVQVTMMAKHLDTIYVSGWQCSSTHTSTNEPGPDLADYPYDTVPNKVEHLFFAQQYHDRKQQEARMSLPRAERAHAPFVDFLKPIIADGDTGFGGATATVKLCKLFVERGAAGVHLEDQSSVTKKCGHMAGKVLVAVSEHVNRLVAARLQFDIMGVENVLVARTDAVAATLIQXNIDARDHXFILGATXPRLKNGSLTGMLSDXMSXGRTGGAAGIETVDATAHSNLLEVVKTPSEPHATI

SEQ ID NO: 18163 - protein, 300 aa, Triticum aestivum
MVASSNTGLEREDHQRDADFNKAMHGSSAQARGGVAAMFRKGGAAKQAAVDEYFKHWDNKPAENETPEERAARQAEYATLTRHYYNLATDLYEYGWGQSFHFCRFSQGEPFYQAIARHEHYLAHQIGIKDGMKVLDVGCGVGGPAREIAKFTGAHITGLNNNNYQIERATHYAFKEGLSNQLEFVKGDFMQMSFPDNSFDAVYAIEATVHAPTLKGIYSEIFRVLKPGGVFGVYEWLMTDEYDNDNLRHREIRLGIEQGDGISNMCKVSEGIAAIHDSGFEMLHHEDLADRPDALPWYWP

SEQ ID NO: 18164 - protein, 362 aa, Cryptococcus neoformans var. neoformans JEC21
MALPSSLHVHPHFNAEEAAHVVTGFVSSLENLPGEVTFLLEEIREKDVRISRELFISQRHFSAEQSLEYVQRINSRHMSLTKTAKTLASLPPSNATFPLPIPPGALLPSSHLSQKEAQSLAKIQNEWAQVLTLQDEKVKLAERLERIVLRAKERAKHQWVKVGGMEIEEVEKWSGTGELGNGEVVLPPGGLGSGIDGRPAKKRKPNIPSLSVNHTKQAIHPSISMPPPPPPSRPSLSARSSHSNVPSTSHTHTSSLGQHGSRSRRVSVASDEDADGEPDEGDTDMVDAADAEGETDETLYCICRQKSYGEMIGCDCDKCPYEWFHVKCVNISGPLPDTWYCPDCVARYGFSNDKGNKKARKK

SEQ ID NO: 18165 - protein, 631 aa, Dianthus caryophyllus
MELCDCIDTQWQDELLVKYQYISDFFIAVAYFSIPLELIYFVQRSAFFPYRWVLMQFGAFIVLCGATHLINLWTFSMHTKNVAIVMTIAKMATAAVSCVTALMLVHIIPDLLSVKTREMFLRHKAEKLDKERGLILTQEETGRHVRMLTHEIRSTLDRHTILKTTLVELGRTLNSEECALWTPSQTGMTMRLSHTLNHSMVVGSTVSMNLSVISEVFNNTGAVRIPHTCPLVRTRPVSDRYRAPDVVAVRVPLLHHSNFQINDWPDNSAKNYAVMVLISPSDGIRKFRDHELELVEVVADQVAVALSHAAILEDSMRARDQLMEQNVALDLARREAEMAIRARNDFLAVMNHEMRTPMHAIISLSSILLETELTPEQRMMLEIILKSSNLLSTLINDVLDLSRLEDGSLELDPTVFNLHAVFTEVIQLIKPIASVKKLSLTLGLAPEVPVYAVGDEKRLMQTILNVVGNAVKFTKEGFISVSASVARPESLTDWRASEFYPDLTDSQFYLRVQVRDSGCGINPQDIPLIFNKFTQFNRNSNGIGLGLAISKRFVNLMGGQIWIESDGHDKGSISTFVVKLGTCKGSSDTLTPATVRTHSEHGNTEFISNKQLFRGDDSINSIFKPYERSFR

SEQ ID NO: 18166 - protein, 480 aa, Arabidopsis thaliana
MVRRRMKGRRKWRRVVGLLKDLEEACETPLGRLRQMVDAIAVEMQAGLVSEGGSKLKMLLTFVDDLPNGSETGTYYALHLGGSYFRIIKVHLGGQRSSLEVQDVERHSIPTSLMNSTSEVLFDFLASSLQRFIEKEGNDFSLSQPLKRELAFTFSFPVKQTSISSGVLIKWTKGFAISEMAGEDIAECLQGALNKRGLDIRVAALVNDTVGALSFGHFHDPDTIAAVVFGTGSNACYLERTDAIIKCQNPRTTSGSMVVNMEWGNFWSSRLPRTSYDLELDAESMNSNDMGFEKMIGGMYLGDIVRRVILRMSQESDIFGPISSILSTPFVLRTNSVSAMHEDDTSELQEVARILKDLGVSEVPMKVRKLVVKICDVVTRRAARLAAAGIAGILKKVGRDGSGGGRRSDKQIMRRTVVAVEGGLYLNYRMFREYMDEALRDILGEDVAQHVVVKAMEDGSSIGSALLLASSQSVQTIPSI

SEQ ID NO: 18167 - protein, 345 aa, Bacillus clausii KSM-K16
MSKLKVAVVGCGSIAIHRHVPEYAANPNVELVAFCDLNIEVAQKLADQYGVKQVYDSHEAMLKEAKMDAVSVCTQNVDHAQVSIDAANAGCHVLCEKPMATSIEEAQQMIDAAKANNVKLMIGHNQRLMPPHVKAKEILQSGKIGKPLTFKTTFGHGGPDSWSIQGKDTWFFQKDKAFVGAMGDLGVHKIDLMRWLFDEEVAEVAAFVETLDKDADVDDNATTLLRMENGAIGTMAASWTYYKGEDNTTSIYGEKGVLEIHDDPNVQVVVKLADGTIERYSVGAIATNEAGGQVASGVIDEFVDAIANDRTPSITGESAMESLRTVLAALESTKSKTFVSVATIK

SEQ ID NO: 18168 - protein, 411 aa, Cicer arietinum
MPLKNIVREFKGMKNGIGSKSKRGGDSKHWLCRSKSHVAPDVTPFEPIQQGQWASLPPELLLDIIRRVEESETSWPARAVVVFCASVCKSWRSVTKEIIKTPQQCGRITFPISLKQPGPRDCPIQCFIRRNRESSTFLLYLGLVPSEHESNKLLLVARKIRRATGTEIVISLAADDFSRASNNYVGKLRSNFWGTKFTIYDSQPPHDIIVQPNCRGGKFNSKQVSPRAPACSYLVSSISYELNTLWTRGPRRMHCVMNSIPVSAIEEGGNAPTPTLLPQIFDEPFSPSPALKGKSPMTDSYSGNLSELPELSQGSVEPLVLKNKAPRWHEQLQCWCLNFVGRVTVASVKNFQLVAAVDPSHNVSSEEQERVILQFGKIGKDIFTMDYSYPLSAFQAFAICLTSFDTKPACE

SEQ ID NO: 18169 - protein, 438 aa, Cicer arietinum
QLFDKTIEHDKATGSFINVHIVKFPATQLGLPIGVENLFAASDNQTASKIVMAAHILKPEIEAFMKQNPPDVFIPDIMFTWSESTAKILQIPRLVFNPISIFDVCMIEAIKSHPEAFVSDSGPYHIPELPHPITLPIKPSPGFARLTEPLVEAEKGSHGVIVNSFAELDEGYTEYYENLTGRKVWHVGPTSLMIKTTLEKTDNISNGSSTKHKCLTWLDTKEPSSVVYISFGSLCSLSNDQLLELAKGIEASKHQFLWVVHRKGDDDDDDDENWLPKGFKERMKEENRGMLIKGWVPQPLILDHPSIGGFLTHCGWNATVEAISSGVPMITMPGFGDQYYNEKLVTEVHRIGVEVGAAEWSMSPYDAKKTVVSWERIEKGVKSLMDGDGGGNEIRKRAKDMKEKAWKAVQEGGSSQNCLTALVDYLQSVVGPRQSINN

SEQ ID NO: 18170 - protein, 507 aa, Pneumocystis carinii
MQKVSGSGKKTTAFQQRKSDSVYNNNEMNKGTSSISYDPVYFVRDASSFTKTTHERAASVKLKLEHLYKVTVEQTVERNQRRMDFEAKLAQDRGSEERKKRQLNSLGQKESQFLRLRRTKLSLNDFHTVKVIGKGAFGEVRLVQKIDTGKIYAMKTLLKSEMFKKDQLAHVKAERDVLAESDSPWVVSLYYSFQDSQYLYLIMEFLPGGDLMTMLIKYDTFSEDVTRFYIAECILAIEAVHKLGFIHRDIKPDNILIDKTGHIKLSDFGLSMGFHKTHDNAYYQRLFESKINTSTSSTQNSLMVDTISLTMSSKDKIATWKKNRRIMAYSTVGTPDYIAPEIFTQHGYGQECDWWSLGAIMFECLIGWPPFCSENAHETYRKIINWRENLYFPEDLHLSAEAEDLIRKLLTSADQRLGRYGANDIKLHPFFRGVNWDTIREINAPFIPQLKSITDTSYFEEIDTIPNITMNSPPVLQNKIPSDVDQNLAFVGYTYKRFDMMTQKGIL

SEQ ID NO: 18171 - protein, 361 aa, Streptococcus pneumoniae R6
MMDSPKKLGYHMPAEYEPHHGTLMIWPIRPGSWPFQGKAAKRAFTQIIETIAEGERVYLLVEQAYLSEAQSYLGDKVVYLDIPTNDAWARDTGPTILVNDKGKKLAVDWAFNAWGGTYDGLYQDYEEDDQVASRFAEALERPVYDAKPFVLEGGAIHSDGQGTILVTESCLLSPGRNPNLTKEEIENTLLESLGAEKVIWLPYGIYQDETNEHVDNVVAFVGPAEVVLAWTDDENDPQYAMSKADLELLEQETDAKGCHFTIHKLPIPAVRQVVTEEDLPGYIYEEGEEERYAGERLAASYVNFYIANKAVLVPQFEDVNDQVALDILSKCFPDRKVVGIPARDILLGGGNIHCITQQIPE

SEQ ID NO: 18172 - protein, 207 aa, Pseudomonas syringae pv. phaseolicola 1448A
MLKIWGRKNSSNVRNALWIAEEVGVPYETQDAGGAFGLVNEAAYRAKNPNGRIPMIEDGDFVLWESNAIVRYLAARHAPDSDLYPADLQARANADKWMDWTSSTIAAPFSPVFWGVVRTPPEKQDWPAIEQGIKTLHSLLLVADEALSRQPYLSGEAFGMGDIPLGCFAYGWFEMPIERPPLPHLQAWYERLKTRPAYRKAVMSPLT

SEQ ID NO: 18173 - protein, 291 aa, Streptococcus pneumoniae R6
MRNVRVATIQMQCAKDVATNIQTAERLVRQAAEQGAQIILLPELFEHPYFCQERQYDYYQYAQSVAENTAIQHFKVIAKELQVVLPISFYEKDGNVLYNSIAVIDADGEVLGVYRKTHIPDDHYYQEKFYFTPGNTGFKVWNTRYAKIGIGICWDQWFPETARCLALNGAELLFYPTAIGSEPILDTDSCGHWQRTMQGHAAANIVPVIAANRYGLEEVTPSEENGGQSSSLDFYGSSFMTDETGAILERAERQEEAVLLATYNLDKGASERLNWGLFRDRRPEMYRQITD

SEQ ID NO: 18174 - protein, 334 aa, Pyrococcus horikoshii
MKPKVFITREIPEVGIKMLEDEFEVEVWGDEKEIPREILLKKVKEVDALVTMLSERIDKEVFENAPKLRIVANYAVGYDNIDIEEATKRGIYVTNTPDVLTDATADLAFALLLATARHVVKGDRFVRSGEWKKRGVAWHPKWFLGYDVYGKTIGIIGLGRIGQAIAKRAKGFNMRILYYSRTRKEEVERELNAEFKPLEDLLRESDFVVLAVPLTRETYHLINEERLKLMKKTAILINIARGKVVDTNALVKALKEGWIAGAGLDVFEEEPYYNEELFKLDNVVLTPHIGSASFGAREGMAELVAKNLIAFKRGEIPPTLVNREVIKIRKPGFE

SEQ ID NO: 18175 - protein, 395 aa, Oryza sativa
MSISVNGQSVVPPGFRFHPTEEELLTYYLKKKVASERIDLDVIRDVDLNKLEPWDIQERCRIGSGPQNDWYFFSHKDKKYPTGTRTNRATAAGFWKATGRDKAIYSSSNRIGMRKTLVFYKGRAPHGQKSDWIMHEYRLDDPSSASASVSVNLPSYYSSSSSSSSPMHGVAGDQGAQEEGWVICRVFKKKNLVHHGGGAAAASHHAAAKLAAAAMEGSPSNCSTVTVSDHVKAQMLHSSASDDALDHILQYMGRSGCKQETKPAAMSASSAAAAAALEQHLSTPQYGKFMKLPPLEHVAGGVGLLAAAGGGGEYCSAADASGIADWDTLDRLAASYELNGALSDVASGKNMAGFFDVVDQPAGAAAFSSGDGDLWSLARSVSSSLHADLTTMNNV

SEQ ID NO: 18176 - protein, 139 aa, Cicer arietinum
MAPAKAEKKPAEKKPAAEKAPAEKKPKAEKKISKEGTSDKKKKRVKKSVETYKIYIFKVLKQVHPDIGISSKAMGIMNSFINDIFEKLAQEASRLARYNKKPTITSREIQTAVRLVLPGELAKHAVSEGTKAVTKFTSS

SEQ ID NO: 18177 - protein, 483 aa, Streptomyces avermitilis MA-4680
MTQGPLTTEAGAPVADNQNSETAGVGGPVLVQDQLLLEKLAHFNRERIPERVVHARGAAAYGTFTLTRDVSQWTRAAFLSEVGKQTETFLRFSTVAGNLGSADAVRDPRGWALKFYTEEGNYDLVGNNTPVFFIKDAIKFPDFIHTQKRDPYTGSQEADNVWDFWGLSPESTHQVTWLFGDRGIPASYRHMNGYGSHTYQWNNEAGEVFWVKYHFKTDQGIKNLTTEEAVNVSGLDPDSHQRDLRESIERGDFPTWTVQVQIMPAAEAAGYRFNPFDLTKVWPHEDYPPIEIGKLELNRNPENIFAEVEQSIFSPAHFVPGIGPSPDKMLQGRLFAYGDAHRYRVGINADHLPVNRPHATEARTNSRDGFLYDGRHKGTKNYEPNSFGGPFQTDRPLWQPISVTGVTGDTEAPVHTEDNDFVQAGNLYRLMSEDEKTRLVDNLAGFISKVSRDDIAERAINNFRQADGDFGKRLEAAVQALRG

SEQ ID NO: 18178 - protein, 140 aa, Archaeoglobus fulgidus DSM 4304
MGMLIDPFEELRRMQERFNRLLEEFGRFPEVKEFRVTMPVDVIDEGEQIRVVADLPGFSKEDLEIYFEDGDLVIKAEKKEEFEEKKGEYLRRERRMGKVYRRIALPAGLDIDAVKAKYNNGVLEITIPKLKKDRKAVQIE

SEQ ID NO: 18179 - protein, 458 aa, Xanthomonas campestris pv. vesicatoria str. 85-10
MRPVRCRQGSCNARSTVGWRLPATCCRSPGSVPGQASGQRSVAALHSAATTGVRYACAMTTSFQISRRAQALTSSAIREILKVTERPEVISFAGGLPSPATFPVERMRAASDQVLRDAPQAALQYGPTEGYAPLREWVAARLSRDGASIRPSQVLITTGSQQGLDLLGKVFIDEGSKVLVETPSYLGALQAFSLFQPAFVGMPSDEDGVVVDALDPALLADARFLYCLPNFQNPTGRRLPLARRQALVARAAETGVPIVEDDPYGELYYSGQPLPSLLSMNPEGVIYMGSFSKVLAPGLRLGYVVAPEAVLGKLIQAKQAADLHTPSFTQRVVYQTLQDDFLQTHIPQIRALYARQCSLMLEALDRHFPSQVQWNRPEGGMFLWVTLPPGLDGTALLARAIARNVAFVPGAPFFATLPQTNTLRLSFVTVPGEKIDAGIQVLGELLREALAELPGLGA

SEQ ID NO: 18180 - protein, 633 aa, GIBBERELLA ZEAE PH-1
MDAKPFRPRGAENAPHLQQQHKSTGNLANMAKSTTAAGFRGPAKRAAFGDVTNVSKQIGHTRDDGKSIKVYATNGVSHGLTGVPVSKENGAYGKEAFSRPAQRIANQASTRTALENKNFDANKKPYVRKDGHVATKPPAPSSVQNAPSLQPRHHKSQPQLKPQQQPNSLRRTQSKQLDKVVPKPDADTGHKATNPAGFQLQETEYPYDHAAYLDSMYLPIEAGAPLDVLQKEEYPELPAKLPEISEDDAAIHSFEEAHMPAMSEPEECWEEDEDEDYDDQDQAYTTAHSVRSRDMTAGGATEIDPLPRVTARVQRELEDAREEVERTRTTDEIEEEMWDVSMVAEYGDEIFEYMRELEIKMLPNAHYMDDQTEIQWSMRSVLMDWLVQVHNRFGLLPETLFLTVNYIDRFLSQKIVSIGKLQLVGATAILVASKYEEINCPSLGEIVYMVDNGYTAEEVLKAERFMLSMLSFELGWPGPMSFLRRVSKADDYDLDTRTLAKYFLELTIMDERFVASPPSFLAAGAHCLSRLILKKGDWTKQHVYYSGYTWGQLKSLVTMMIECCDRPHLHHAAVFDKYTDRRYKEASLLVQSALDAGFTLPHQVAPVRQELDAYREDSAELPIAQPQLIPIEG

SEQ ID NO: 18181 - protein, 225 aa, Lactobacillus plantarum WCFS1
MTELVLVRHGESTANRDNTYTGWSDVPLTAVGIAQAHQAGKRLRATGLQFGAVHTSVLKRAIVTANIMLSEIDQLWLPEYKTWRLNERHYGALRGQNKDVTRQEYGKAQVQQWRRSFYTVPPLLTPAELDHDRRYTKYGAAVEPRGESLKMAYDRIMPYWIDEIAPRLLDGQNQLVVAHGSTLRAMIKYLEHISDTGIDGVEVANGVPICYHLDRQLHVIGKEEY

SEQ ID NO: 18182 - protein, 610 aa, Campylobacter upsaliensis RM3195
MNSYGIDIWGDNNFIIKNGKVCVNSGKKPAIINMVKELRNDGYRGPLLLRFPHLIQKQIENIYGSFTKARKEFDYKGGFNAVYPLKVNQYPGFVKNLVKLGKDYNYGLEAGSKAELLLAMAYNNENSPITVNGFKDRELINIGFIAAEMGHNITLTIEGLNELEAIIDIAKERFKPKPNIGLRVRLHSAGVGIWAKSGGIHSKFGLTSTELIEAVNLLKENKLIEQFTMIHFHLGSQINEIHPLKKALNEAGNIYTELRKMGAKNLKAINLGGGLAVEYSQFKDEKSRNYTLREYANDVVFILKNIAEQKSDIEPDIFIESGRFVAASHAILIAPVLELFSQEYAENKLVLKKQNPKLIDELYDLYQNIKPSNALEYLHDSIDHLESILTLFDLGYVDLKDRSNAEILTQLISKKAILLLKDKPSADLIAIQNEVQERYLVNFSLFQSMPDFWGLEQNFPIMPLDRLDEKPTRSASIWDITCDSDGEISYSKDNPLLLHDVDVEKENYFLGFFLMGAYQEVLGMKHNLFTHPTEASVYIDENGYVLKDIIEAQSILDILEDIDYDIHAIMDILNERISESSLVDEKQKKHILGELYLFLNDNGYLKSIGV

SEQ ID NO: 18183 - protein, 883 aa, Arabidopsis thaliana
MPWWSKSKDEKKKTNKESIIDAFNRKLGFASEDRSSGRSRKSRRRRDEIVSERGAISRLPSRSPSPSTRVSRCQSFAERSPAVPLPRPIVRPHVTSTDSGMNGSQRPGLDANLKPSWLPLPKPHGATSIPDNTGAEPDFATASVSSGSSVGDIPSDSLLSPLASDCENGNRTPVNISSRDQSMHSNKNSAEMFKPVPNKNRILSASPRRRPLGTHVKNLQIPQRDLVLCSAPDSLLSSPSRSPMRSFIPDQVSNHGLLISKPYSDVSLLGSGQCSSPGSGYNSGNNSIGGDMATQLFWPQSRCSPECSPVPSPRMTSPGPSSRIQSGAVTPLHPRAGGSTTGSPTRRLDDNRQQSHRLPLPPLLISNTCPFSPTYSAATSPSVPRSPARAEATVSPGSRWKKGRLLGMGSFGHVYLGFNSESGEMCAMKEVTLCSDDPKSRESAQQLGQEISVLSRLRHQNIVQYYGSETVDDKLYIYLEYVSGGSIYKLLQEYGQFGENAIRNYTQQILSGLAYLHAKNTVHRDIKGANILVDPHGRVKVADFGMAKHITAQSGPLSFKGSPYWMAPEVIKNSNGSNLAVDIWSLGCTVLEMATTKPPWSQYEGVPAMFKIGNSKELPDIPDHLSEEGKDFVRKCLQRNPANRPTAAQLLDHAFVRNVMPMERPIVSGEPAEAMNVASSTMRSLDIGHARSLPCLDSEDATNYQQKGLKHGSGFSISQSPRNMSCPISPVGSPIFHSHSPHISGRRSPSPISSPHALSGSSTPLTGCGGAIPFHHQRQTTVNFLHEGIGSSRSPGSGGNFYTNSFFQEPSRQQDRSRSSPRTPPHVFWDNNGSIQPGYNWNKDNQPVLSDHVSQQLLSEHLKLKSLDLRPGFSTPGSTNRGP

SEQ ID NO: 18184 - protein, 447 aa, Kineococcus radiotolerans SRS30216
MAEQTSDPARPTRPDPAYLDAVRAGIERAAATATPLTSGYAGAAEALRAEAEAAVEAAGPELLALSHDLHAHPEEAFAEHRSVRALADLLARHGVEAAVGVHGLGTALRAQVGGGDGPVVAVLAEYDALPGIGHGCGHNVIGAAAVGAFLGLARALRSGGVAGTAVLLGTPAEEGGGGKETMAREGAFAGVDAVVMLHPFSYDVAVQPFLGRRQVRATYTGVPAHASAQPFMGRNALDAVVAGYQGIAMLRQHVPPTDRVHGIVLDGGQRPNVVPATAVSEYYVRSAEPATLTDLCARVDTILRAAAAMTGCGVELEWDRAPAYLPIRANREMAARWTLHQRRRGRTSLPPGIVPETLAGSTDLGNVSVRVPSIHPMLAVAGPGLSLHTAEFAAAAGSPSGDAGVLDGAVGLALTALDLLADADLLAAVRAEFEAAGGVLDVEAFLA

SEQ ID NO: 18185 - protein, 369 aa, Bacillus sp. UTB2301
MDIFTKAYEHEQIVFCNDPDSGLRAIIAIHNTTLGPALGGCRMLPYASTEEALEDVLRLSKGMTYKCAAADVDFGGGKSVIIGDPNKDRSPQLFRAFGQFVESLNGRFYTGTDMGTTPEDFVHAAKETNCIVGIPEEYGGSGDSSVPTALGVIYGIKASNKVAFGDEKLEGKTYSIQGLGKVGFKVATQLLENGANLYVTDINEKAIQDLVELSKQYDGTVKVVSSDEIYSVDADVFVPCALGAIINDDTIQQLKVKAIAGSANNQLLNEERHGQELYEKGILYAPDYIVNAGGLIQVADELYGPNKNRVLKKTEAIYSSLLEVYKYSESEKIPTYKAANLFVEKRIEERKKRNSFFTHHKRPKWDIKK

SEQ ID NO: 18186 - protein, 356 aa, Bacillus sp. UTB2301
MEHQFPKIQIVDENGNIVDSKYEDKLTPEFIKELYERLMFVRTFDRKAISLQRQGRLGTYAPFEGQEAAQVGSALALEKDDWLFPTYRDHAATITFGHKLSTVFLYWNGRVEGCVPPEGKKIFPPAVPIATQLPHATGAAMAEKYKGTKNAAIVYFGDGATSEGDFHEGLNFASVFKAPVVFFNQNNSFAISVPIHKQMNSKTIAQKSVAYGIPGIRLDGNDIFAVYFYTKEALDRARNGEGPTLIEAVTWRYGAHTTADDPTKYRNQEESLERREKYDPILRVERLMKNKGIWDEKWAASVEEKASQTIEEAVKEMEAFPAPDVNDLFDHVFEKPTWTIEEQKQAYFEYLRGEKR

SEQ ID NO: 18187 - protein, 161 aa, Triticum aestivum
  misc_feature (102)..(102): Xaa can be any naturally occurring amino acid
  unsure (1)..(161): unsure at all Xaa locations
KKDPGEKTIAWLDKLRNANGSLPTSKIRLNMQRIMQNNAAVFRTQETLTEGCELISEAQERFHDVKLSDRSLIWNSDLIETIELENLLINACITMHSAEARXKESRGAHAREDFKTRDDDKWMKHSLGYWEDEKVRLEYRPVHMNTLDDEVETFPQKARVY

SEQ ID NO: 18188 - protein, 764 aa, Pseudomonas stutzeri
  misc_feature (490)..(490): Xaa can be any naturally occurring amino acid
  unsure (1)..(764): unsure at all Xaa locations
MLSQPRRIAERVVEGVNALKDEGAELVGLGGFTSIVGNRGLQTLDRTQIPVTTGNSLTAYAAYMNLLGVLSALEIPPEKAEVAVLGYPGSIALAIVCLLAPLGCRLRLVHRGGKQQVDTLLEYLPSQFHGQVTLHAGLEDCYAQVRLFVAATSTGGVIDPRRLACGSVVVDAALPKDMQPGWEKRDDILVIDGGLVSATDAVDFGAMALGLGPKRNINGCLAETMILALQGRAEAFSIGRELPAEKVLEIGRIAEGHGFLPYPMASGGESVDGARFDELRRFHGARPPAVVHDLNTGSQELRSEVLRCFGTHINPILREFYEFNHVERVFSNGQGCWLTDLDGRRYLDFVAGYGCLNTGHNHPEIAARLQEYLTQQHPTFVQYLSAPLHASLLAKRLAELAPAGLERVFLSNSGTEAVEAALKLALAASDKSTLLYCTNGYHGKTLGALSVTGREKHRKAFEPLLPRCEEIPFADVSALRNRLLKGDVAXFIMEPIQGEGGVTMAPDGYLRVVRDLCSEHECLWILDEIQTGLGRTGKMFACEWEDVSPDIIVLSKSLSGGLVPIGATLSSKEVWQRAYGNIDRFALHTSTFGGGNFAAAAAMAALDVIEHEDLPGNAALVGAHLRQGLEALARKHYFIKEVRGRGLMIAIEFQNDVSNGIEAFVRDMTSRMPANAAATYRMMPAKAREHLEAAMRELESTLADMFVLRIMTKLSQEHGILTFVTANNNRVMRIQPPLVLSLAEADRFIKALGEVCEDLSTFES

SEQ ID NO: 18189 - protein, 285 aa, Zea mays
MAKNYPTVSAEYSEAVEKARRKLRALIAEKSCAPLMLRLAWHSAGTFDVSSRTGGPFGTMKHQSELAHGANAGLDIAVRLLEPIKEEFPILSYADFYQLAGVVAVEVTGGPEIPFHPGREIPLTVSDNHFFMTRDFIAAGNLCFPDKPQPPPEGRLPDATKGSDHLRQVFGKQMGLSDQDIVALSGGHTLVCYCHSCLFQGRCHKERSGFEGAWTTNPLVFDNSYFKELLSGDKEGLLQLPSDKALLSDPVFRPLVEKYAADEKAFFDDYKEAHLKLSELGFADA

SEQ ID NO: 18190 - protein, 256 aa, Rhodobacter sphaeroides
MRLDGKTALITGSARGIGRAFAEAYVREGARVAIADINLEAARATAAEIGPAACAIALDVTDQASIDRCVAELLDRWGSIDILVNNAALFDLAPIVEITRESYDRLFAINVSGTLFMMQAVARAMIAGGRGGKIINMASQAGRRGEALVGVYCATKAAVISLTQSAGLNLIRHGINVNAIAPGVVDGEHWDGVDAKFADYENLPRGEKKRQVGAAVPFGRMGRAEDLTGMAIFLATPEADYIVAQTYNVDGGNWMS

SEQ ID NO: 18191 - protein, 379 aa, Cryptococcus neoformans var. neoformans JEC21
MPDINELLRWSIANSTAPDTDASEQLQIRFNPNSTQSGTSTLHASDSGPPDISPASTPGPVTPDDGSSLPLPPGTEVPVTKKEDLTTEMLDLILGKGDSITMKEKMAFATDENNSVEDRVEALDDFEMLIELIDNANNMPILKLWDPLLTLLSSSHPEIVAHTCWIIGTAIQNNIKAQAAFYIHETFSRILEIIYPPSSISSYPPSVRAKATYALSAALKHWPLASYALYTATSSAENGYSVLRRGVNDPQAIVRRKMAFLVGTLAMQSGERYEGEIPSEVRNYIEENEKNAPSESLVEGLKREGVFTALVDGLKQGVDDVEYEENAMRALVRAHQKGGLTVSEKSDLKTIWEKWGKQGRQERGLDGEDGKEVSETLSS

SEQ ID NO: 18192 - protein, 557 aa, Oryza sativa (japonica cultivar-group)
MEGVESCNGRHADADDRRTSKKDRRTTWASAFILVNNFMQYTAYFGVSTNLVNYLKYRLHEGSKSAANDVTNWQGTGSITPLVAAYLADAFLGRYWTILLFMAISVLGYGVLAASAAAPALLHGGAAAFYAGLYLVALGSGLLVVMAPFGAGQFDEADEGERRRQSSFFNWFYLSLNFGSLVGGTVLVWVQTSVGWGIGYGVPAIFSALSVAVFLAGTAAYRRCQPPGGSPLTRIAQVVVAAARKHDVEVPADASLLHECCDAVDGMSAIQGSRRLVHTDQFRFLDKAAVETAGDKAEPSPWRLCTVTQVEELKCVLRLLPVWASGIIFAAAYTQMTTTFVLQGDTLDPRIGGFKVPAAVLSVFDTLSVMLWVPLYDRAIVPLARRVTGHDRGFTQLARMGVGLVILTVAMLVAGTLEVARRRVIARHGLYGDDGDGGYLPLSIFWQVPQYVVVGASEVFTFIGQMEFFYDQAPDAMRSLCSGLSSTSFALGNYASSAIVVVVARATARGGRLGWIPDNINRGHLDDFFWLLAVLCVANFAAYLLIARWYTYKKTVD

SEQ ID NO: 18193 - protein, 222 aa, Pseudomonas wisconsinensis
MSIRRLACSLLLSSLALPVLAAECPAMLQGELPKLRAKGENIELCQYAGKPLVVVNTASFCGFTPQFKGLEALYQRYKDQELEVLGVPSDDFRQESADSKETATVCYVNYGVTFAMTEPQPVSGANAIPLFKGLAEQSRQPRWNFFKYVVDRQGKVVASFSSLTKPDDPELIAARREGDRLATLIPSRFTALHPSGRWALSVCLPRLARRRTQFTRRALQEQ

SEQ ID NO: 18194 - protein, 545 aa, Oryza sativa (japonica cultivar-group)
MEGVESNDRHGGAAADRRKSNRRNRWACTFILANNFFQNMAYFGVSTNLVNYLKYRLHEGSKSAANNVTNWEGTGSIAPLVAGYLADAFLGRYWTIVLSMVISAVVRSSPPPAMQGYGVLAASASVIRLESAALYAGMYLVALGGVLEPIMAPFGADQFDDGEDDQRGRRQSSFFNWFYLSLNCGSLVGGTVLVWVQTSVGWGVGYGVPAIFSALSVAVFLAGTATYRRDQPPGGSPLTRIAQVVVAAVRKFDVEIPSDSSMLYESDAVDGMPAIHGRRRLLHTGQFRFLDRATVKTAGEKAAQSPWRLCTVTQVEELKCVLRLLPVWATGIIYAAAYTQVTTTFILQGDTLDRSLGRFKVPAAALSIFHTLSVILWVALYDRAIVPLARRVTRHDGGFTQLARMGVGLVILTVAMAAAGALEAARRRLIARPSVFWQVPQYAVVGASEVFTLIGQMEFFYDQAPDAMRSLCSALSSTSFALGDYASSALVVVAARRGGAPGWIPDDINRGHLDYFFWLLTALCVANFAAYLLIARWYTYKKTVD

SEQ ID NO: 18195 - protein, 496 aa, Pseudomonas sp. VLB120
MNSSLSAIDGLRLPHQMLIGGQWVSAQSGKTLNVYNPATGDILTEVPDGDVEDVNAAVESAAATLRSDTWRPCLPVLASVFCCAWRISSEVHGDELARLETLNNGKLLIYSKLMEVGASAQWLRYMAGWATKLTGSTLDLSLPLPPEVRSRASTQRVPVGVVAAIIPWNFPLLMAVWKIAPALACGNTVVLKPAEETPLTALRLAELAMEAGLPAGALNVVTGRGETAGDALVRHPKVAKVAFTGSTEVGRIIGSACGRSLKAVSLELGGKSPVIVLADCDPQEAAEGAAAAIFFNHGQVCTAGSRLYVHESIYEDVIQRLAVIGESIVVGSGLEQGVHMGPMVSKKHHENVLRHIRNGIEDGADLICGGTEAPCAQGFFVKPTIFANREKKDIRLLSQEVFGPVLVATPFSDIAEVVNEANRSVYGLGASIWTNDLSAALRINDELEAGTVWVNTHNMVDPNLPFGGFKDSGVGREHGAAAIEHYTTTRSLVIAY

SEQ ID NO: 18196 - protein, 539 aa, Staphylococcus aureus
MVKQLKFSEDARQAMLRGVDQLANAVKVTIGPKGRNVVLDKEFTAPLITNDGVTIAKEIELEDPYENMGAKLVQEVANKTNEIAGDGTTTATVLAQAMIQEGLKNVTSGANPVGLRQGIDKAVKVAVEALHENSQKVENKNEIAQVGAISAADEEIGRYISEATEKVGNDGVITIITIEESNRLNTELELGMQFDRGYQSPYMVTDSDKMVAELERPYILVTDKKISSFQDILPLLEQVVQSNRPILIVADEVEGDALTNIVLNRMRGTFTAVAVKAPGFGDRRKAMLEDLAILTGAQVITDDLGLDLKDASIDMLGTASKVEVTKDNTTVVDGDGDENSIDARVSQLKSQIEETESDFDREKLQERLAKLAGGVAVIKVGAASETELKERKLRIEDALNSTRAAVEEGIVAGGGTALVNVYQKVSENEAEGDIETGVNIVLKALTAPVRQIAENAGLEGSVIVERLKNAEPGVGFNGATNEWVNMLRRGIVDPTKVTRSALQHAASVAAMFLTTEAVVASIPEKNNDQPNMGGMPGMM

SEQ ID NO: 18197 - protein, 206 aa, Pseudomonas aeruginosa PAO1
MLTIWGRKNSSNVRKALWCAEEAGLEYRTVDAGGAFGLVDEPAFRAMNPNGRVPVIEDDGFVLWESNAIVRYLAARYAPGDLYPQDPVRRADADKWMDWTTSTLAGPFRDLFWGTLRTPPEQRDEALIAKALQTCGELLRVPDQTLAGQPWLSGERFGMGDIPLGCFIYAWFEMPIERPPLPHLEAWYLRLRERPAFRTAVMTELT

SEQ ID NO: 18198 - protein, 265 aa, Zea mays
  misc_feature (65)..(65): Xaa can be any naturally occurring amino acid
  unsure (1)..(265): unsure at all Xaa locations
MAPLGDGGAAAAAASNNLVVSFGEMLIDFVPDVAGLSLAESGGFVKAPGGAPANVACAIAKLGGXDLGLVRRARVFHYGSISLISEPCRSAHMAAMRAAKAAGVLCSYDPNVRLPLWPSPDAAREGILSIWKEADFIKVSDDEVAFLTRGDANDEKNVLSLWFDGLKLLVVTDGDKGCRYFTKDFKGSVSGFKVDTVDTTGAGDAFVGSLLVNVAKDDSIFHNEEKLREALKFSNACGAICTTKKGAIPALPTVATAQDLIAKAN

SEQ ID NO: 18199 - protein, 259 aa, Listeria monocytogenes str. 1/2a F6854
MWKLALCQTDVVFKYPDANYARIEKAIVEAAKNGADIAVLPEMWNTGYALNELAGVADLNGERTKEFLATLSEKHQIAIIGGSVSISEGTKFSNTMYAFDKYGGLLSSYKKVHLFQLMNEHLYLEAGNDKNLFRLDGVSCAGFICYDIRFPEWIRKHTSEGSEVIFVSAQWPAERVTQWEQLLIARAIENQAFVVAVNRVGDDPNNHFNGHSLVINPLGNIVVHGGEEEGNIYAEIDLNLVAETRGIIPVFTDRRPELY

SEQ ID NO: 18200 - protein, 223 aa, Zea mays
MAPRNALPAASAVANGMVMEPRFRGVRKRPWGRFAAEIRDPARKARVWLGTFDTAEAAARAYDAAALHFRGPKAKTNFPVAFAALPPPPPPKKPAAVTVSPSSSSTVESSSSSSSRDSPATPPRAASPSQQAPSLDLSLGGTPAMVAAQPFLFLDPRLAVTVAVPAPVPYRPTAVAAGANKRDAASCREEEQSDTGSSSSVVDASPAVGVGFDLNMPPPAEVA

SEQ ID NO: 18201 - protein, 376 aa, Streptococcus pneumoniae R6
MNNRSETMKYKRIVFKVGTSSLTNEDGSLSRSKVKDITQQLAMLHEAGHELILVSSGAIAAGFGALGFKKRPTKIADKQASAAVGQGLLLEEYTTNLLLRQIVSAQILLTQDDFVDKRRYKNAHQALSVLLNRGAIPIINENDSVVIDELKVGDNDTLSAQVAAMVQADLLVFLTDVDGLYTGNPNSDPRAKRLERIETINREIIDMAGGAGSSNGTGGMLTKIKAATIATESGVPVYICSSLKSDSMIEAAEETEDGSYFVAQEKGLRTQKQWLAFYAQSQGSIWVDKGAAEALSQHGKSLLLSGIVEAEGVFSYGDIVTVFDKESGKSLGKGRVQFGASALEDILRSQKAKGVLIYRDDWISITPEIQLLFTEF

SEQ ID NO: 18202 - protein, 180 aa, Triticum aestivum
  misc_feature (17)..(17): Xaa can be any naturally occurring amino acid
  unsure (1)..(180): unsure at all Xaa locations
QAPSSHRPYYQLIRHGXEGYRNIMENCQENAMVVKEGLEKTGRFNIVSKDEGVPLVAFSLKDHSRHDEFEISDMLRRFGWIVPAYTMPADAQHVTVLRVVIREEFSRTLAERLVLDIDTVMAQLDALPSKLAPPALLPATLPKTVVVANGHVKKTELETQKSVTEAWKKFVLAKKTNGVC

SEQ ID NO: 18203 - protein, 420 aa, Streptococcus pneumoniae R6
MVSRQEQFEQVQAVKKSINTASEEVKNQALLAMADHLVAATEEILAANALDMAAAKGKISDVMLDRLYLDADRIEAMARGIREVVALPDPIGEVLETSQLENGLVITKKRVAMGVIGIIYESRPNVTSDAAALTLKSGNAVVLRSGKDAYQTTHAIVTALKKGLETTTIHPNVIQLVEDTSRESSYAMMKAKGYLDLLIPRGGAGLINAVVENAIVPVIETGTGIVHVYVDKDADEDKALSIINNAKTSRPSVCNAMEVLLVHENKAASILPRLDQMLVAERKEAGLEPIQFRLDSKASQFVSGQAAETQDFDTEFLDYVLAVKVVSSLEEAVAHIESHSTHHSDAIVTENAEAAAYFTDQVDSAAVYVNASTRFTDGGQFGLGCEMGISTQKLHARGPMGLKELTSYKYVVAGDGQIRE

SEQ ID NO: 18204 - protein, 138 aa, Triticum aestivum
MVSSMKQQYRDEADAPSSLSLSLSLGAIADRSKKMRRGAADGEFVCKTCSRSFPSFQALGGHRTSHLRGRNGLALGLAAGSDQPATRKTTDQKQAHRCHICGLEFEMGQALGGHMRRHREHGAATTAQAPPVLLQLFV

SEQ ID NO: 18205 - protein, 416 aa, Ustilago maydis 521
MSSDRDLFITYGVLMGGAVAPIYFGSFASLKTPKTTRDLLKAARKKRKAAKGSDDSDSDSDSDSDSDLDDDDTLDRVTSSDAIWFPIMGSAVLFGLFLVFKYLNKEYVNLLLSFYFGFIGCLALSQALVSTSRAIVGRELWKKLPIFRLYLDQRGQGRLFKLSFTHVDVALIFVSAVLVGVYLVTKSWIISNLLALSLSLNAIALMSLDSFRTGAIMLGGLFVYDIFWVFATPVMVSVARNFDAPIKIVWPRNMLQVLLALQAREPQPKLQFSMLGLGDIVIPGIFVALALRYDQLVASEAKPSLGFTKSYTRFDKPYFKATLAAYVAGLATTMGVMHFFQAAQPALLYLSPACTGAVFLTAALRGEFKDVWNWTDGEQEQDKGKEQTKFNDSNGAKEPKHGVRRSSRRAISSKKD

SEQ ID NO: 18206 - protein, 279 aa, Stictis radiata
SIEHGAVNVVAVNDPFIEAHYAAYMLKYDSTHGQFKGEIKVDGNDLIVNGQKVKFYQEKDPANIPWSETGAYYVVESTGVFTTTDKAKAHLKGGAKKVVISAPSADAPMFVMGVNEKSYKSDIEVISNASCTTNCLAPLAKVVHDNFTIIEGLMTTIHSYTATQKTVDGPSAKDWRGGRTAAQNIIPSSTGAAKAVGKVIPSLNGKLTGMSMRVPTSNVSVVDLTCRLEKSVTYDQIKEAIKKASDGELKGIMAYTEDEIVSTDLIGDNNSSIFDAKAG

SEQ ID NO: 18207 - protein, 339 aa, Vibrio sp. Ex25
MKVLVTGGMGYIGSHTCVQMIEAGIEPIIVDNLCNAKLEVLNRIEALTGKQPAFHQGDVRDEAFLDTVFAQHDIQAVIHFAGLKAVGESVAKPLEYYDNNVNGSLVLARSMRKAGVKSIVFSSSATVYGDPEIVPITEDSPTGATTNPYGRSKYMVEQCLSDLFHAENDWSITLLRYFNPVGAHPSGCMGEDPQGIPNNLMPFIAQVAVGRREKLAVFGSDYPTPDGTGVRDYIHVMDLADGHIAALKSVGETSGLHIYNLGTGKGSSVLEMVDAFAAACGKPVPYEFCPRRPGDIAECWASTEKAERELGWKATRTVAEMTADTWNWQSNNPSGYSPE

SEQ ID NO: 18208 - protein, 269 aa, Stictis sp. 2-MW-2004
AVNDPFIEAEYAAYMLKYDSTHGQFKGEIKVDGNDLVVNGQKVKFYQKKDPADIPWSETDAYYVVESTGVFTTTEKAKAHLKGGAKKVVISAPSADAPMFVMGVNEKEYKSDIEVISNASCTTNCLAPLAKVLHDNFTIIEGLMTTIHSYTATQKTVDGPSAKDWRGGRTAAQNIIPSSTGAAKAVGKVIPSLNGKITGMAMRVPTANVSVVDLTCRLEKSVSYDQIKETIKKASEGELKGILAYTEDDIVSTDLNGDNHSSIFDAKAG

SEQ ID NO: 18209 - protein, 332 aa, Archaeoglobus fulgidus DSM 4304
MAKIYRDADADLKYLDGKTVCIIGYGSQGHAHALNLKDSGVNVVVGLPEWDKATWERAEKDGMVVKKLSEAADGADVIAMLIPDMVQPAVYREHIQDKLKEGAMLMFAHGFNIHYNQIVPPEYVDVAMVAPKGPGPLVRRMYVEGKGVPSLVAVEQNYTGKALEVALAYAKGIGATRAGVIETTFKEETETDLFGEQVDLCGGVAEMIKMSFETLVEAGYQPEIAYFEVLHELKLIVDLIYEGGIYNMWSAVSETAKYGGMTRGKRIFTEQTREEMRKILKEIQTGEFAREWILENMAGRPVYNKLLQMEREHPIEKIGKELRAMMPWLKKD

SEQ ID NO: 18210 - protein, 257 aa, Stictis sp. 2-MW-2004
  misc_feature (40)..(40): Xaa can be any naturally occurring amino acid
  unsure (1)..(257): unsure at all Xaa locations
AYMLKYDSTHGQFKGEIKVDGNDLVVNGQKVKFYQKKDPXDIPWSETDAYYVVESTGVFTTTEKAKAHLKGGAKKVVISAPSADAPMFVMGVNEKEYKSDIEVISNASCTTNCLAPLAKVLHDNFTIIEGLMTTIHSYTATQKTVDGPSAKDWRGGRTAAQNIIPSSTGAAKAVGKVIPSLNGKITGMAMRVPTANVSVVDLTCRLEKSVSYDQIKETIKKASEGELKGILAYTEDDIVSTDLNGDNHSSIFDAKAG

SEQ ID NO: 18211 - protein, 398 aa, Propionibacterium acnes KPA171202
MYGPMKDELSAKIAALKEEGLYKAEAPLTSPQSGKITVDDGREVINLCANNYLGLADSPVLIEAAKKALDEWGFGMASVRFICGTQTLHQKLERAITEFLHPDDPDNWDTILYSSCFDANGGLFEVLLGPDDAIISDELNHASIIDGVRLCKAQRFRYRNQDMADLEAQLQAAKDCRHIMIATDGVFSMDGFVAPLPQICDLAEKYGAMVMVDDSHAVGFVGEHGAGTPEQWGVRDRVDVLTGTLGKALGGASGGYTCSHREVVEMLRQNSRPYLFSNSLAPSIAGASLATLDLLKSSGDLLTKLRENTEYFRSEMTRRGFEIPESDHPIVPVMVGDAVKAAKMADAMLAKGIYVRAFSYPVVPKGKARIRTQMSAGLTREQLDKAIKAFEEARAEIG

SEQ ID NO: 18212 - protein, 272 aa, Conotrema populorum
  misc_feature (243)..(243): Xaa can be any naturally occurring amino acid
  misc_feature (249)..(249): Xaa can be any naturally occurring amino acid
  misc_feature (265)..(265): Xaa can be any naturally occurring amino acid
  unsure (1)..(272): unsure at all Xaa locations
SIEHGAVNVVAVNDPFIEAEYAAYMLKYDSTHGQFKGEIKVDGNDLVVNGQKVKFYQKKDPAEIPWSETDAYYVVESTGVFTTTEKAKAHLKGGAKKVVISAPSADAPMFVMGVNEKEYKSDIEVISNASCTTNCLAPLAKVLHDNFTIIEGLMTTIHSYTATQKTVDGPSAKDWRGGRTAAQNIIPSSTGAAKAVGKVIPSLNGKITGMAMRVPTANVSVVDLTCRLEKSVSYDQIKETIKXASEGEXKGILAYTEDDIVSSDXNGDNNSS

SEQ ID NO: 18213 - protein, 642 aa, Neisseria meningitidis Z2491
MSKNQNHEEYQDDARPLTIEEQRARLRQLIIMGKERGYITYSEINDALPDDMSDADQIDNIVSMISGLGIQVTEHAPDAEDILLSDNAAVTDDDAVEEAEAALSSADSEFGRTTDPVRMYMREMGQVDLLTREDEIIIAKKIENALKNMVQAISACPGSIAEILELIEKIRKDEIRVDEVVEAIIDPNEVLLNELGLGHLETTAPEKPSNDNSDENEDDEESEEDADEISAANLAELKQKVIGHFAQIEKDYKKMIGRLEKHHSRHKDYLAYRDAIANKLLEVRFATRQIDSLSSSLRGKVENIRKLEREIRDICLDRVHMERDYFIQNFLPEITNLEWIEEEIAKGRVWSDALDRFRHAILEKQTELADMEKETRISIEELKEINKNMVSSEKETAAAKQEMIQANLRLVISIAKKYTNRGLQFLDLIQEGNIGLMKAVDKFEYRRGYKFSTYATWWIRQAITRSIADQARTIRIPVHMIETINKMNRISRQHLQETGEEPDSAKLAELMQMPEDKIRKIMKIAKEPISMETPIGDDDDSHLGDFIEDANNVAPADAAMYTSLHEVTKEILESLTPREAKVLRMRFGIDMNTDHTLEEVGRQFDVTRERIRQIEAKALRKLRHPTRSDRLRSFLDSEDSKL

SEQ ID NO: 18214 - protein, 426 aa, Ralstonia eutropha JMP134
MTELDLNQYMDRVGRQARAASRAMARASTADKNRALLTIAAAIRRDADKLKAVNARDVERARANGQDAAFVDRLTLSDKAIKTMAEGLEQIAALADPIGEISNMKFRPTGIQVGQMRVPLGVIGIIYESRPNVTIDAAALCLKSGNATILRGGSEAIESNTALAALVAEGLASAGLPPEAVQVVETTDRAAVGRLITMTEYVDVIVPRGGKSLIARLMEEARVPMIKHLDGICHVFIDADADLDKAVRVCDNAKTQRYAPCNTMETLLVSQDIAARALPPLCRIYQEKGVELRVCPATRAMLEAAGFSGLVDAHEEDWRLEYLAPILAIKTVAGLDEAIAHINEYGSHHTDSIITENYSTGMRFIREVDSASVMINASTRFADGFEYGLGAEIGISNDKLHARGPVGLEGLTSLKYVVFGHGEIRT

SEQ ID NO: 18215 - protein, 452 aa, Ralstonia eutropha JMP134
MQRGLGERHIRLMALGSAIGVGLFLGSANAIRMAGPAIMLAYLIGGAMIFLIMRALGEMAVHNPVAGSFCRYAQDHMGPLAGYLTGWNYWFLWLVTCVAEITAVAIYMGVWFPDVPRWIWALAALATMGSVNLLTVKAYGEFEFWFAMIKIVTIVLMLFGGGAMIVFGLGNGGIATGISNLWAHGGFMPNGASGVLMSLQMVMFAYLGVEMIGLTAGEAKNPRKSIPDAINSVFWRILIFYVGALFVILSLYPWNEIGAQGSPFVMTFERLGIKTAAGIINFVVLTAALSSCNGGIFSTGRMLYNLAQQGQAPAAFARVDRNGVPRRALLVSIGALLCGVLLNYLVPEKVFVWVTSISTFGAIWTWAIILVTQMQFRKNLSPAERDKLAFRMPFWPYGSWIALAFLALVIALMAYFPDTRIALYVGPAWLVLLTVLYYRLGMQARGPVTYQA

SEQ ID NO: 18216 - protein, 173 aa, Zea mays
LKQDTNIQHGLNVTYACITACMEWMDQKHWVSSLIYSSSRPAGGRSPSSYLPHHVVLSRDEDVDGVDDGRDVAQDGERQADPELNPDAVAEEDADRRQQDGQQDLRERLRPHCRRRRRRRRLLVVVSRGAAQSQRKVSLPARLSAQGPSWEGETPVAADEEARRGREPGRRPR

SEQ ID NO: 18217 - protein, 552 aa, ASPERGILLUS NIDULANS FGSC A4
MGVEETKKGLDVEATSAAPPPYVQDGHILSYEEEDFWTRNGLNFKSFQRRPAHVVELNRSMKTRHMHMIAIGGSIGLSLEYSSCWCADRSVYALGELAVMYPISGGFYTYSTRFIDPSWGFAMGWNYVFQWAIIVPLELTVAGLTIDYWQVDVSVAVWITVFLIAIIIVNIFGALGYAEEEFLSSCLKLGAIIVFMIIALVLVCGGGPSDGMYNEYWGARLWYDPGAFRNGFKGFCSVFVTAAFSFSGTELVGLAAAESKTPTKSLPGAIKQVFWRITLFYIVGLFFVGLLVRSDNERLLGSGLIDTKASPFVILAYDAGLKGYDHFMNVIILISVLSIGVSGVYGSSRTLTALAEQGYAPKFFAYVDRSGRPLWSVLITILFGVLGYVNVSSSGEEVFAWLQALSGLAALFTWGSICLAHIRFRRAWAYNGRSLDEIPFKAVGGIYGSYLGLFLIFIVLVAQFFVAVAPPGGGPDGGTYNDAKGFFKSYLALPVVLFFWICGYLWKRQGWLRTSQIDIDSGRREVDWDSINAERARVAAMPAWKRLLNIII

SEQ ID NO: 18218 - protein, 263 aa, Triticum aestivum
  misc_feature (226)..(226): Xaa can be any naturally occurring amino acid
  unsure (1)..(263): unsure at all Xaa locations
HYRTSLYKKAGWYRSGIPGISSTHASAGIISKTISKKGMLEVYNSLSEEGKKEFNKAYSASFYPCMDILYECYEDVASGSEIRSVVLAGRRFYDKEGLPAFPMGKIDQTRMWKVGEKVRSTRPDGDLGPLHPFTAGVYVALMMAQIEVLRKKGHSYSEIINESVIESVDSLNPFMHARGVAFMVDNCSTTARLGSRKWAPRFNYILDQKAFVTVDKDDPFNQDLSXLMSDPVPGGFEVCAKLRPTVNIPGKGRCQFLAPGTPE

SEQ ID NO: 18219 - protein, 92 aa, Glycine max
MPVGTAEPERTRDAGSGGNTNHARPASNIVNIVKPVGYSASVASGMQDVLVTFVASKSDGTEVMVDNKYLKAFNPLLLINFYEQHLRYSPTL

SEQ ID NO: 18220 - protein, 124 aa, Brassica napus
HQWISPYPPPPYSSSSITAALLLLLRRTRYRRMGLPPGSLGLPLIGETLQLIAAYKTENPEPFVDARVARYGSVFMTHIFGEPTVFSADPETNRFVLQNEGKLFECSYPASICNLLGKHSLLLM

SEQ ID NO: 18221 - protein, 330 aa, Mycobacterium avium subsp. paratuberculosis K-10
MRAMRVLITGGTGFVGGWTAKAISDAGHSIRFLVRNPGKLHTSVAKLGVDVSDFAVADITDRVAVREALQGCDAVVHSAALVATDPRQTAEMLATNMQGAQNVLGQSVELGLDPIVHVSSFTALFHPDLETLTAELPVVGGADGYGTSKAQVEIYARGLQDAGAPVNITYPGMVLGPPVGDQFGEAGEGVRAALQMHAIPGRSAAWLIVDVRDLAALHAALLEPGRGPRRYTAGGHRVPASDLAALLGEVAGTPMVAVPIPDTALRVAGAVLDRAGRFLPFETPFTWAGMQYYTQMPASDDSPSERELGITYRDPRQTLADTFAALSATS

SEQ ID NO: 18222 - protein, 587 aa, Glycine max
MESVKFINMNAKHSSIFLLAMIFVLILASANAKIHEHEFVVEATPVKRLCKTHNSITVNGQYPGPTLEINNGDTLVVKVTNKARYNVTIHWHGVRQMRTGWADGPEFVTQCPIRPGGSYTYRFTVQGQEGTLWWHAHSSWLRATVYGALIIRPREGEPYPFPKPKHETPILLGEWWDANPIDVVRQATRTGGAPNVSDAYTINGQPGDLYKCSSKDTTIVPIHSGETNLLRVINAALNQPLFFTVANHKLTVVGADASYLKPFTTKVLMLGPGQTTDVLITGDQPPSPYYMAARAYQSAQNAAFDNTTTTAILEYKSPHHSNHSHHHSKGALKKKTKPIMPSLPAYNDTNTVTAFSKSFRSPRKVEVPAEIDQSLFFTVGLGINKCPKNFGPKRCQGPINGTRFTASMNNVSFVLPNNVSILQAHHLGIPGVFTTDFPGKPPVKFDYTGNVSRSLWQPVPGTKAHKLKFGSRVQIVLQDTSIVTPENHPIHLHGYDFYIVAEGFGNFDAKKDTAKFNLVDPPLRNTVAVPVNGWAVIRFVADNPGAWLLHCHLDVHIGWGLATVLLVENGVGKLQSIEPPPLDLPLC

SEQ ID NO: 18223 - protein, 519 aa, Ipomoea purpurea
MATLTLIFCTLVFAIFLYFLILRVKQRYPLPLPPGPKPWPVLGNLPHLGEKPHQSIAAMAERHGPLMHLRMGFVDVVVAASAAVAAQFLKVHDANFSNRPPNSGAEHIAYNYQDLVFAPYGPRWRMLRKITSVHLFSAKALDDFCHVRQEEVATLTRSLASAGKTPVKLGQLLNVCTTNALARVMLGRKVFNDGGSKSDPKAEEFKSMVEEMMVLAGSFNIGDFIPILGWFDLQGIVGKMKKLHARFDAFLNSILEEHKFVNNQHTTLSKDVDFLTTLIRLKDNGADTDSEEGKLTDTEIKALLLNLFTAGTDTSSSTVEWAFAELLRNPKILNQAQQELDSVVGQNRLVTESDLTHLPFLQAIVKETFRLHPSTPLSLPRMGAQGCEINGYFIPKGATLLVNVWAIARDPNVWTNPLEFKPHRFLPGGEKPNVDIKGNDFEVIPFGAGRRICSGMSLGIRMVHLLVATLVHAFDWDLMNGQSVETLNMEEAYGLTLQRAVPLMLHPKPRLQPHLYTLN

SEQ ID NO: 18224 - protein, 380 aa, Prochlorococcus marinus str. NATL2A
MPEIPNSRIRKLRTWAPGKRSSELIGEDENKNQITLIDLASNDYLDLARHPLLIEAARHTLETDGVGSGGSRFITGSRNIHQKLETKLAEWLDREIVLIYPSGFQANLAAVLALSDRHTTVICDRLIHHSLLVGVKASGAKLFRFKHNNLSELEKLLKKSRQNNPRKQPLVITESLFSMEGTTAPIKEISKLCVQYDSKLLIDEAHAFGVMGSAGRGESFELKEPISIISGTFGKAFGSGGAFLATDKITGKNLIQNCGAFRYTTALAPSLCASALAALNLIESNPNWGSELKEKSNALRDRLSQVGWQRPAGEGPIISIILGSDRLAMDYQERLEAQGLLTVAIRPPTVPEGKSRLRLVIRRNTPDQAFERLIEILKNK

SEQ ID NO: 18225 - protein, 449 aa, Streptomyces coelicolor A3(2)
MRTDSSPGSLPAREHLPAAGAGTPVLDVVVPVYNEEKDLGPCVRRLHEHLDRTFPYAFRITVADNASTDGTPQVAARLAADLAAVRSVRLERKGRGRALRTVWSASDAPVLAYMDVDLSTDLNALLPLVAPLISGHSDLAIGSRLARSSRVVRGAKREFISRTYNLILRGSLQARFSDAQCGFKAIRRDVAQVLLPLVEDTGWFFDTEMLVLAERAGCRIHEVPVDWVDDPDSTVHIVRTATEDLKGVWRVGRALATGSLPLDRLARPFGDDPRDRDLTGVPQGLARQLVGFCVVGALSTLFYLLLYSGFRHFAGSQLANALALLVSAVANTAANRRLTFGVRGRGGAVRHQAQGLVVFGIGLALTSGSLAALSAATAHPDHSTELAVLIAANLAATVLRFLLFRAWVFPDAPPTTHTPDPHLPDPHLPDPHLPDPHLPDPHRTWSDAR

SEQ ID NO: 18226 - protein, 554 aa, Lactobacillus acidophilus NCFM
MINLGKKIIYQIYPKSFYDSNGDGVGDLQGIIQKIDYIKKLNVDMIWFNPFFVSPQNDNGYDIADYYNIDPRFGTMADFEKLVKKLKEIGVGVMLDMVLNHCSTENIWFKKALAGNEKYRKFFYLRKGKNGGLPNNWQSKFGGTAWSKFGDTDYYYLHLYDPTQADLDWHNPEVRKELFKVVNFWRSKGVHGFRFDVINVTGKAEKLVDSTDPVEEKSLYTDTPIVHKYLKELNAATFGQDPESITVGEMSSTTIANSIEYSKPSEHELSMVFTFHHLKVDYQDGEKWSKMPFDFMKLKELFTEWQEKMDQGDGWNALFWDNHDQPWALTRFGDTGKYRGKSAEMLATATHLMRGTPYIYMGEEIGMIDPDYSSMDDYVDVEAKNAFKALTKKGLSDKEAFEIVKSKARDNSRVPMHWNSEKYAGFSEHKPWLIPTDQEKINVEEELAHGEIFNYYQKLIKLRRSEDLISDGHIKMFLKDDPQVFAYERYLKDSDKKLLVFTNFYGKEHSVKLPEEYQNKEYQVLINNYDTKDSQLTDEIILKPYEALAIKIKQ

SEQ ID NO: 18227 - protein, 541 aa, Listeria monocytogenes str. 1/2a F6854
MLHLSLLFKFHRFFKAFSSFFHIWGLLWKYINAKFAERKEDMDEKEKNLNENSENESTPKREVEDTLHTPESAQPVQETPIVEGVTPEGEKFAGATEDAAEASSTNAFFEEASNKESEPARPAPGPRRAGTTGGGAVPPNRVNNGGSGNGNGEPPKRGKHYIGYFLTALIGVIIGGLIIFFVAWDNGDNADTTSNSNNKATKVEKVSVDTTSDVTKAVDKVQDAVVSVLNYQSSSSLDGTTTSEQEASSGSGVIYKKANGKAYIVTNNHVVADANKLEVTFTNGKKSEAKLLGTDEWNDLAVLEIDDKNVTTVAAFGDSDSLKLGEPAIAIGSPLGTEFSGSVTQGIISGLNRAVPVDTNGDGTEDWEADVIQTDAAINPGNSGGALINIEGQVIGINSMKISMENVEGISFAIPSNTVEPIIEQLETKGEVERPSLGVSLRDVDTIPETQQKNILKLPDSVDYGAMVQQVVSGSAADKAGLKQYDVIVELNGQKVTNSMTLRKILYGNDVKIGDKVKVKYYRDGKEKSTDIKLEAAKTTT

SEQ ID NO: 18228 - protein, 293 aa, Triticum aestivum
  misc_feature (175)..(175): Xaa can be any naturally occurring amino acid
  misc_feature (202)..(202): Xaa can be any naturally occurring amino acid
  misc_feature (274)..(274): Xaa can be any naturally occurring amino acid
  unsure (1)..(293): unsure at all Xaa locations
MAKDIEAAPPGGGYAAKDYSDPPPAPLFDAEELTKWSLYRAVIAEFVATLLFLYITVATVIGYKHQADPAGPNAADAACSGVGILGIAWAFGGMIFVLVYCTAGVSGGHINPAVTFGLFLARKVSLVRALLYIIAQCLGAICGVGLVKGFQSAFYVRYGGGANELSSGYSTGTGXLAAEIIGTFVLVYTVFSATDPKRSARXDSHVPVLAPLPIGFAVFMVHLATIPITGTGINPARSLGAAVIYNNEKAWDDHWIFWVGPFIGAAIAALYHQXYVLRASATKFGSSASFGSR

SEQ ID NO: 18229 - protein, 117 aa, Flammulina velutipes
HPFHLHGARIASTILRDEQLYKLWESEVKHMADRIIQMRDRLYDNLVGQNTPGEWSHIKKQIGMFSFTGLTQPQTKALAEKAHIYMTADGRISMAGLNGNNIDYFSESVSKAVKGDL

SEQ ID NO: 18230 - protein, 406 aa, Triticum aestivum
  misc_feature (30)..(30): Xaa can be any naturally occurring amino acid
  unsure (1)..(406): unsure at all Xaa locations
FLRAPGARTPVIVRFSTVIHERGSPETIRXPRGFAVKFYTREGNWDLLGNNFPVFFIRDGIKFPVVMHAFKPNPKCHVQEYWRVFDFLSHHPESLHTFFFLFDDVGIPTDYRHMDGFGVNTYTFVTRAGKSHYVKFHWRPTCGVSCLMDDEATLVGGKNHSHATQDLYDSIDAGNFPEWKLFVQVIDPDDEDRFDFDPLDDTKTWPEDLVPLQPVGRLVLDRNVDNFFNENEQLAFGPGLVVPGIYYSDDKMLQCRVFAYADTQRYRLGPNYLMLPVNAPKCGFKNNHYDGAMNFMHRDEEVDYYPSRHAPLRQAEPASFPVPTRPVVGRREKTRIKKENDFVQPGERYRSWAPDRQDRFVRRFADALAHPKVSHELRVIWIDFLSKCDKSCGMKVANRLNVKPSM

SEQ ID NO: 18231 - protein, 153 aa, Lilium longiflorum
LKPLKSMDSKFEVDHSLIAKLNQLTEFLANRNQPLRAPFVPDARAMPAAATDIKDMPGAYVFIIDMPGVESEEIKIDVEEGNMLVISGERKREEEEERYLEMQRRMGKMMRKFKLLENANSGAISAVCKNGVLTVTVEKLPSQEPKAIEIKIA

SEQ ID NO: 18232 - protein, 279 aa, Mesorhizobium loti MAFF303099
MPRAGSNVSLAERAYRIRRHAVRMGEVQGQGYVGQALGVADVLAVAYFHALRYRPDDTLWEGRDRFLLSIGHYAIALYAALIEAGVLPEEELETYGTDDSRMPMSGMAAYTPGMEITGGSLGHGLGIAVGMCLGLKRKQSDCFVYNLLSDGELGEGSTWEAAMSAAHHKLDNLIAIVDFNNLQADGPSTAMLSSEPVTDKFEAFGWHAQRVDGNDIEALRAAFDNARGLKDPRPRIIVCDTRMAKGVPFLEARDITHFIRVEPYEWALALEALEKGRPQ

SEQ ID NO: 18233 - protein, 452 aa, Geobacter metallireducens GS-15
MKSFDVVIIGGGPGGINAGIMLSKAGKNVALIQEEAVSFGGTCLNSGCMPTKSLLKAATAYRYAKQAERYGLDLQAGPVDLGKLCAVTETDLNMLRGAIKGMLAETSITAFRGNGSFASEHEVTVTMAGGEQETIWGETIIIATGSSPRELPSAPFDGLHILSSDQMLTNTDLPKKLLIVGGGAIGCEFATLYKTFGSEVVLIEAMETLLPREDRDAGKKLQAAFEAQGITVRTGTSIDRLIVVDEKIRIQFDNGDSIDSIDKVLVGIGRAPNIEGLNLEAAGLRTEHGAVKVNELMQTNVPHIYAIGDVTGGLTLAHAAQREAQLLVQNLLHGSSHALKELAVPRVAFSYPEVAAVGASQEGNGIRAYTLPQVPNGRSVVDKVAPAFVKLFLKEQTSEIAGAVIIGEAATEIIHEMALAVENGLTLQQVGNTVHVHPTHSKNILYAIQSCG

SEQ ID NO: 18234 - protein, 678 aa, Ralstonia metallidurans CH34
MSALAHPATSPYANQPVKLMADAIRVLAMDAVQQANSGHPGAPMGMADMAVALWGRHLKHNPVNPHWPDRDRFVLSNGHGSMLIYALLHLTGYDLPIEELKNFRQLHSKTAGHPEYGITPGVETTTGPLGQGITNAVGMALAERLLGEEFNRPGFDIVNHHTYVFMGDGCLMEGISHEACSLAGTLKLNKLIGFWDDNGISIDGDVVHWFADDTPKRFEAYGWNVIRAVDGHDVAAVDNAIALAKASDKPTLICCRTVIGKGAPNKAGGHDVHGAPLGGAEVLATREALGWTHAPFEVPQDAYLAWDAKPNGHALEKAWDALFDAYAEVHPYEAGEFKRRVRGELPGAFDAAVDAYIAKCEEKAETIATRKASQNSIEALAPVLPELLGGSADLTGSNLTNWSGTQAVRFDSWGNHINYGVREFGMSAIMNGIALHGGYIPYGATFLTFSDYSRNALRMAALMKIRSLFVFTHDSIGLGEDGPTHQSIEHVASLRLIPNMDVWRTADTTETAVAWAQSIRRENGPSCLIFSRQNLPFQKRDDVTRANIARGGYVLRDGTNPRKKRPDAVIIATGSEVGLAVGAADALAVEGVHVRVVSVPSTSVFDKQDAAYKASVLPAGVPRIAVEAGVTDFWWKYQVQAVVGIDTFGESAPAGVLFKHFGFTVENVADTVRATLAQ

SEQ ID NO: 18235 - protein, 332 aa, Ralstonia metallidurans CH34
MTIKIGINGFGRIGRMVFRAAAANFKDIEVVAINDLLEPDYLAYMLKYDSVHGRFDGEVSVEGNTLVVNGKKIRLTAVKDPSELKWGEVGADVVIESTGIFLTKEGAQKHIDAGAKKVIMSAPSKDDTPMFVFGVNHETYKGEAIISNASCTTNCLAPVAKVLNDKWGIKRGLMTTVHAATATQKTVDGPSNKDWRGGRGILENIIPSSTGAAKAVGVVIPQLNKKLTGMSFRVPTSDVSVVDLTVELENPAKYEEICAEMKAQSQGALKGVLGYTEDKVVATDFRGDARTSIFDAEAGIALDGTFIKVVSWYDNEWGYSNKCLEMARVVAK

SEQ ID NO: 18236 - protein, 544 aa, Neisseria meningitidis Z2491
MTKFIFVTGGVVSSLGKGIAAASIAAILESRGLNVTMLKLDPYINVDPGTMSPFQHGEVFVTDDGAETDLDLGHYERFIDSTMTRRNSFSTGQVYENVIAKERRGDYLGGTVQVIPHITDEIKRRIHEGAAGYDVAIVEIGGTVGDIESLPFLEAIRQMRSQLGRNNTLFAHLSYVPYIAAAGEIKTKPTQHTVKEMLSIGLQPDILICRMDRTMPADERRKIALFCNVEERAIVGSYDVDSIYECPEMLHDQGIDNIITEQLQLNVQQADLTAWKKIVHAIQNPKHTVKIAMVGKYVDLTESYKSLIEALKHAGVHTETDVQITFVDSESIEKNNGDVSMLKDMDAILVPGGFGSRGVEGKIAAVRYARENNVPYLGICLGMQIALIEYARDVAGLKGANSTEFDLKCAAPVVALIDEWQTADGSVETRDESADLGGTMRLGAQEVELKAGSLAAKIYGSEHIRERHRHRYEVNNNYVPTLEQAGLVIGGVSAGRERLVETIELPNHPWFFACQFHPEFTSNPRKGHPLFTAFVKAALNNKKA

SEQ ID NO: 18237 - protein, 414 aa, Staphylococcus aureus subsp. aureus MRSA252
MSQNIRVVITGMGALSPIGNDVKTTWENALKGVNGIDKITRIDTEPYSVHLAGELKNFNIEDHIDKKEARRMDRFTQYAIVAAREAVKDAQLDINENTADRIGVWIGSGIGGMETFEIAHKQLMDKGPRRVSPFFVPMLIPDMATGQVSIDLGAKGPNGATVTACATGTNSIGEAFKIVQRGDADAMITGGTEAPITHMAIAGFSASRALSTNDDIETACRPFQEGRDGFVMGEGAGILVIESLESAQARGANIYAEIVGYGTTGDAYHITAPAPEGEGGSRAMQAAMDDAGIEPKDVQYLNAHGTSTPVGDLNEVKAIKNTFGEAAKHLKVSSTKSMTGHLLGATGGIEAIFSALSIKDSKVAPTIHAVTPDPECDLDIVPNEAQDLDITYAMSNSLGFGGHNAVLVFKKFEA

SEQ ID NO: 18238 - protein, 158 aa, Arabidopsis thaliana
MGEIGFTEKQEALVKESWEILKQDIPKYSLHFFSQILEIAPAAKGLFSFLRDSDEVPHNNPKLKAHAVKVFKMTCETAIQLREEGKVVVADTTLQYLGSIHLKSGVIDPHFEVVKEALLRTLKEGLGEKYNEEVEGAWSQAYDHLALAIKTEMKQEES

SEQ ID NO: 18239 - protein, 316 aa, Bacillus cereus ATCC 10987
MIPVTILTGFLGSGKTTLLNRILSENHGQKLAVIVNEIGQIGIDNQLIMNVEEEIMEMTNGCLCCTVREDLLVALKQLLDVKAEGKMDFDGLVIETTGLANPGPIIQTFFLDPVIQSAYQINGVVTVVDSYHIYKHFEKGLEAKEQIAFADVVLVNKLDLIEESEKENLLHELQGINPTAKLIQSTNCDVDIPSLLQIQTFKTKDTLQIYPHTEHNHLEGVKSFVLREERPLDLQKLNEWMSAVVQELGEYLYRYKGILSIDGVDKRIVFQGVHTLFAASYDREWQEGEDRVSEVVFIGKDINKEWFQAHFEECVK

SEQ ID NO: 18240 - protein, 128 aa, Brassica napus
  misc_feature (126)..(126): Xaa can be any naturally occurring amino acid
  unsure (1)..(128): unsure at all Xaa locations
PQTIFSSISPDPIAAASLGQVYKAHLRYSGQVVAVKVQRPGIEEAIGLDFYLIRGVGKLINKYVDFITTDVLALIDEFACRVYQELNYVQEAQNARRFKKLYADKADVLVPDIFWDYTSRKVLTMXMG

SEQ ID NO: 18241 - protein, 332 aa, Ralstonia eutropha JMP134
MTIKIGINGFGRIGRMVFRAAAANFKDIEVVAINDLLEPDYLAYMLKYDSVHGRFDGEVSVDGNTLVVNGKKIRLTAVKDPAELKWGEVGADVVIESTGIFLTKEGAQKHIDAGAKKVIMSAPSKDDTPMFVYGVNHETYKGEAIISNASCTTNCLAPVAKVLNDKWGIKRGLMTTVHAATATQKTVDGPSNKDWRGGRGILENIIPSSTGAAKAVGVVIPQLNKKLTGMSFRVPTSDVSVVDLTVELEKSASYEEICAEMKAQSQGALKGVLGYTEDKVVATDFRGDARTSIFDAEAGIALDGTFIKVVSWYDNEWGYSNKCLEMARVVAK

SEQ ID NO: 18242 - protein, 677 aa, Ralstonia eutropha JMP134
MSALAHPATSPFASQPAKLMADAIRVLAMDAVQQANSGHPGAPMGMADIAVALWGRHLKHNPANPHWADRDRFVLSNGHGSMLIYALLHLTGYDLPIEELKNFRQLHSKTAGHPEYGITPGVETTTGPLGQGITNAVGMALAERLLGEEFNRPGFNIVNHYTYVFLGDGCLMEGISHEACSLAGTLKLNKLIALWDDNGISIDGDVVHWFNDDTPKRFEAYGWNVIRGIDGHDVTAVDLAISQAKASDKPTLICCRTKIGKGAPNKEGGHDVHGAPLGGAEVLATREALGWAHAPFEVPADVYDAWDAKATGLALEKAWNALFEGYADRHPYEAGEFQRRMRGELPGSFDAAVDAFIAKCEEKAETIATRKASQNTIEAFGPVLPEFLGGSADLTGSNLTNWSGSQAVRVDAWGNHINYGVREFGMSAILNGITLHGGYIPYGATFLTFSDYSRNALRMAALMKIRSLFVFTHDSIGLGEDGPTHQSIEHVASLRLIPNMDVWRTADTTETAVAWAEAIRRENGPSCLIFSRQNLPFQQRDDATRANIARGGYVLRDGTNANTGRPDAVILATGSEVGLAVGAADQLAAEGVHVRVVSIPATTVFDKQDSAYKASVLPAGVPRVAVEAGVTDFWWKYQVQAVVGIDTFGQSAPAGVLFKHFGFTVENVVRTVKDTLQ

SEQ ID NO: 18243 - protein, 50 aa, GIBBERELLA ZEAE PH-1
MSHKSFRTKQKLAKAQKQNRPVPQWIRLRTGNTIRYNAKRRHWRKTRIGI

SEQ ID NO: 18244 - protein, 312 aa, Zea mays
  misc_feature (284)..(284): Xaa can be any naturally occurring amino acid
  unsure (1)..(312): unsure at all Xaa locations
MSHSPLPPPVFQNISLRFSESFSLQGTETTGAFTPPAFPSPPGTTGLLAIIHPSMAKLVNKLVDSFDHDEAPAPDVGCVRAVLAELVLTFLFVFTGVSASMAAGAGGKPGEAMPMATLAAVAIAHALAAGVLVTAGFHVSGGHLNPAVTVGILVRGHITKLRALLYVAAQLLASSLACILLRYLSGGMVTPVHALGAGIRPMQGLVMEVILTFSLLFVTYAMILDPRSQVRTIGPLLTGLIVGANSLAGGNFTGASMNPARSFGPAMATGVWTNHWVYWIGPAXSAGSLAGFVYESLFMVNKTHEPLLNGDI

SEQ ID NO: 18245 - protein, 689 aa, ASPERGILLUS NIDULANS FGSC A4
MAEADGAIVPYSSSNDVVLRHDGSVVVYDPVSRQLVLQDAAEAEKHDNDPQCPYCRRPLRDEASGQDNYHSRTQPEFVNPEYFRMLHNSLPPASVDSATAQPQSRRLVQPVLADSPSSGSGQSRVPNGHGISSAAFTPDYFKRFFVEESVLGKGGKGVVLLVKHVLDGVSLGHYACKRVPVGDDHEWLEKVLIEVQTLQHLSHQNLVSYRHVWLENAKITTFGPSVPCAFILQQYCNAGDLHNYICGSMQTSTTPQELKERIRRRSRGGPEAPLGLHEPRKLHFDEIYSFFKDITSGLRYLHASGYIHRDLKPNNCLLHKTNDGIRVLVSDFGEVQPQDAIRRSTGATGTVSYCAPEVLRREYPNGPFANFTFKSDIFSLGMILYFLCFAQLPYRNADLINEEKEDLEKLREEIMDWPGFDQGRMRPDLPEQLYTFLWRLLSVDPDLRPSADEVLSGLEVGANANENLRTKRGSSSSSAPDVHSASRIRPLDDTTDTVSPRRSFSRGPAIRRNSVFESNGSVGDLTPVFEDMDGTQRRGSLSPERDLVVRPRFSNTQSVSPPRNEPHSVGPSIGPTTIEPSIRLLPPPPGGSFLPRRLSGWYPPFFAVQLSLFLAKIAMALQPCSPLAVNPWVLYFLIIAAGINLRTKSLQMQLASLVLHALVVFLSMKLEILCIWPSTTAGMVHGNEL

SEQ ID NO: 18246 - protein, 720 aa, Cryptococcus neoformans var. neoformans JEC21
MTATRNTNGHGELNREAHTTNKVVSEKEEQLVLNTIRCLAADLCQQYKGGHPGTVMGASAIGIALWRYEMRYNPLNPDWFNRDRFVLSAGHACLFQYIFLHLSGYEAWTLDQIKMYHSPATSGSMAAGHPEIEYPGIEVTTGPLGQGISNAVGMAIASKQLAATYNREGLDIVDNKIWCFTGDGCLQEGVGQEAISLAGHLGLDNLILVYDNNAVTVDGRIDNCFTENTSKKLQAQGWNVIDVYDGSNDLAAILEGFDKAKQFKGKPSLVNIRTVIGYSSRKANTGPAHGQALGDDEVAYVKTQLGFDPAQKFVIPDKAYEYFAECKIKGAKANEEWNEKFEAYSKAYPDLYKQLTDRMNGRFAPDGWETLLPAKKDLPQGDQPTRKSSGIAVQTLVPKNNTFIAGSADLLESTFVNFDGQVEFQNPSSGLGDYTGRQIRFGIREFAMVGLGNGMAAYHKGMFIPIMSTFFMFWIYAAPAARMAALQHLRFIGVATHDSIGIGEDGPTHQPIALAAFYRALPNINLIRPADAEECMGMWLLALSDQSANTPSIFALSRQPVPLLSGTDRTKVAQGAYIVYGDDRSPDMTIIATGAEVARAIESAKLLKSVKKVRVVSMPSQKHFDIQTAEYKELVLKSSTALVVAIEAWASYGWARYAHASLSMQTFGHSAPQQQLYEHFGFSPKAMAEKIDEWAARWQTKGGRPGLGDFEELLLRYTQH

SEQ ID NO: 18247 - protein, 302 aa, Pediococcus pentosaceus ATCC 25745
MNTVTIIGSINLDRTIRVKQMPKPGETMHTKEIFSAGGGKGANQAVAAKRSEAKTNFIGAVGNDDAGRAMLELLEHENIDMSGIETLDNQSTGQAYIVVDDAGENQIMIHAGANTAFTPEYVQSKADLIKNSDFIIAQFESSLDSVTEAFKIAREAGVKTILNPAPAVEKVPSDLLAVTDMIIPNETETEILTGIEVTDEASMKKASKALHDEGIEAVLITIGSKGTFYDVNGKSGIIPAFKVKAVDTTSAGDTFIGAMSTVLNKDFSNLEDAILYGNKASSLTVQRFGAQPSIPYKKELEK

SEQ ID NO: 18248 - protein, 324 aa, Pseudomonas syringae pv. tomato str. DC3000
MKKTVLAFSRVSPEMAERLAQDFNVIVPNPKQGDINAQFDEALPHSHGLIGAGRKLGREQLHSATQLEVVSSISVGYDNYDVDYLSERGILLTNTPDVLTESTADLGFSLIMSSARRVAELDAYTKAGQWTRSIEQPHFGTDVHGKTLGIVGMGNIGAAIARRGRLGFNMPILYSGNSRKTELEQELGAQFRSLDQLLAEADFVCLVVPLSEKTKHLIGRRELSLMKPGAILVNIARGLIVDEPALIEALQNGTIRGAGLDVYEKEPLSESPLFQLKNAVTLPHVGSATTETRQAMADRAYNNLRSALLGERPQDLVNPQVWKG

SEQ ID NO: 18249 - protein, 475 aa, Cucurbita maxima
MGILSRKATCNSHGQDSSYFLGWEEYDKNPYDEILNPKGIIQMGLAENQLCFDLLERWLKENPDAAGFKRDGKSIFRELALFQDYNGLPAFKKALAEFMSEIRGNRVTFNPDHIVLTAGATSANETLMFCLAEPGDAFLLPTPYYPGFDRDLKWRTGIEIVPIHCSSSNGFRITESALLEAYQSAQSRDLKVKGVLVTNPSNPLGTTITTQELNLLLQFIASKNLHLISDEIYSGTVFRNPGFVSVMDILNQNYKHNHQIRKQVHIVYSLSKDLGLPGFRVGAIYSNDDVVVAAATKMSSFGLVSSQTQYLLSAMLSDKKFTKNYIKENQKRLEKRQKMLVRGLQKAGIKCHKGNAGLFCWVDMRHLLGANTFESEMELWRKIVFEGAVERVARTVVPLLRTRLVPCLFCQHVRGNVGPCNAETKGFWVYSTELHSPTTTTTTNHLPTKRKNMVKWVFRLSFNDRVVDHTNDNLG

SEQ ID NO: 18250 - protein, 130 aa, Methylobacillus flagellatus KT
MTKVFKTDAEWREQLTPLQYEVTRHAATERAGTGEYAFHFEHGIYHCVCCGTPLFASDTKFDAGCGWPSYFEALDPDNIREKADYAYGMVRTEVICNVCDAHLGHVFPDGPPPTGLRYCINSASLRFEPS

SEQ ID NO: 18251 - protein, 556 aa, Streptomyces coelicolor A3(2)
MTVRSTASTPDLSSKDPNWWRQAVIYQVYPRSFADADGDGLGDLRGVTQRLTHLAALGVDALWLSPFYPSELADGGYDVDDYRDVDPRLGTLDDFDELAAEAHRLGLKVIVDLVPNHTSHRHAWFREALAAGPGSAARDRYVFRDGRGAHGELPPTDWQSVFGGSAWQRVPDGQWYLHLFAPQQPDLNWENEQVRADFRTTLKFWCDRGVDGFRVDVAHALVKDLTEPLRDLGAPELSGEAALAQFAPGTHPFYDRDDVHEVYRDWRKILDAYTPPRTAVAEAWVPGPRRVLYARPDELGQAFNFEYLQTGWDAAELREVITGSLADARAAGASATWVLSNHDVVRHATRLVLPPDTDTDAWLLSGGRAPAVDPAAGLRRARAATLLMLALPGSAYLYQGEELGLPEVAGLPTEVLQDPIWEQTGHVRKGRDGCRVPLPWTTEGPSYGFGAGGAWLPQPPDFAAYAVQAQDGVAGSTLELYRTALRLRRKLLAGESLTWSDDVPAGVLRFDRSDGWRCVTNLSGTAVDLPAGEVLLSSAPLEDGRLGPDTTVWLGL

SEQ ID NO: 18252 - protein, 284 aa, Triticum aestivum
MAGGGELVVSFGEMLVDFVGKLGDDEFGRMLAAILRDNGVDDGAVVFDAGARTALAFVTLRADGEREFMFYRNPSADMLLTADELNVDVIKRATVFHYGSISLIAEPCRSAHLRAMEIAKEAGALLSYDPNPREALWSSREEARTKILSIWDQADIVKVSESEVEFLTGIDSVEDDVVMKLWRPTFKLLLVTLGGKGCKYYARDFRGVVPSYKIQQVDTTGAGDAFVGALLRKIVQDPSSLQNQEKLEEAIKFANACGAITTTKKGAIPSLPTEIEVLQLMENA

SEQ ID NO: 18253 - protein, 284 aa, Vibrio sp. Ex25
MTTNKHPSLLGECLAEFIGTGLLIFFGVGCVAALVLTGASFGQWEISIVWGLGVAIAIYCTAGVSGAHINPAVTIALAMFHGFDKAKVMPYIIAQMLGAFCSAALVYSLYSNLFTDYEIAHNFVRSSQDALATAGIFSTYPHASLSFFGAFAVEFVITAVLMFAILALGDENNGAARGAMNPLLIGILIAVIGGSLGPLTGFAMNPARDFGPKLFAYFAGWDYALTGAKDIPYFIVPLLAPIAGACFGGWLYPKAIAAYLPQQGHGCTIPNQCETEEETEEARA

SEQ ID NO: 18254 - protein, 426 aa, Ralstonia metallidurans CH34
MTEFDLHAYMTRVGQQARAASRAMARASTADKNRALLTIAAAIRRDADKLKAVNARDVERARTNGQDAAFIDRLTLSDKAIATMAAGLEQIAALADPIGEISNMKFRPTGIQVGQMRVPLGVIGIIYESRPNVTIDAAALCLKSGNSTILRGGSEAIESNTALAALVAEGLAAAGLPSEAVQVIETTDRAAVGRLITMTEYVDVIVPRGGKSLIARLMEEARVPMIKHLDGICHVYIDDDADLEKAVRVCDNAKTQRYAPCNTMETLLVSREIAAKALPPLCRIYQEKGVELRVCPATRATLEAAGFSGLVDATEEDWRLEYLAPVLAIRTVDGLDAAIAHINTYGSAHTDSIITENYTTGMRFLREVDSASVMINASTRFADGFEYGLGAEIGISNDKLHARGPVGLEGLTSLKYVVFGHGEIRT

SEQ ID NO: 18255 - protein, 634 aa, Oryza sativa (japonica cultivar-group)
MPSVLVDRATNDMLIGPDWAMNLEICDTLNRDPGQAKDVVKSIKKRIAHRNAKVQLLALTLLETMIKNCGDIVHMQVAEKDILHEMVKIVKKRPDFHVKEKILTLIDTWQEVFGGVRARYPQYYAAYQELLRAGAVFPQRSNGSVPIFTPPQTQPLQNYPASLRSAQQEPPGSSVPDLPSLSLAEIQNARGIMDVLSEMLNALDPSNREGLRQEVIVDLVDQCRSYKQRVVELVNTTSNEELLSQGLSLNDDLQRVLAKHDAIAAGVAVRLEKTKSLQTKIDSSPPANPGTSKAPVQSSSGTASASNQSTLALPAPASSSSPKAPAAPVPVIDLLSGDDYIKPEPANSLALVPVTEYSAADQNVLALADMFEQNNANRSNNNLTNSFNTSAPNSNFPASQAYPAPVQPALPQHPVAYSNGVSSNAIVPYYDDQNGGLPPPPWEIQQSMDNPPQPTQLGQMPLQPGQPVGMHPQSPHSGQFGQGSFMSPQQMANGQLGGTQPRQSPQPQSAPNLQYGGMMMYPNSMQVNQGAGMYSQPMFGGQFYGMSHHHQMYAVQMAGYGFGQQPGAYYIPNAAYAYVSANELTQRMNAVSVQEGNSHGGAMASRPEDSLFGDLVSIAKMKQNKPAAGKVGGL

SEQ ID NO: 18256 - protein, 367 aa, Archaeoglobus fulgidus DSM 4304
MDIIEELRAYREKDIPYSRVLSSMCTVPHPVAVEAHRMFIETNLGDPGIFRGTVELEAKLMRLIGDILHCETPAGYICSGGTEANIQGIRAARNVQKKENPNIVIPKTAHFSFEKIGDILGVKIKRAGVDEEYKVDVGQVEDLMDENTVAIVGIAGTTELGQIDPIVELSKLAEERQVELHVDAAFGGLVIPFMDNPYPFDFQNRGVSSITIDPHKMGMATIPAGGIIFRNESYLRALEVETPYLTSKTQFTLTGTRPGTGVASAYAVLKSLGFEGMREVVKNCLKNTRILVEEMRDLGFEPVIEPVMNVVSFRTDEAERIKEELYRMRWVISTIREPKAIRFVVMPHVTEEVIKNFISDFRKVLRR

SEQ ID NO: 18257 - protein, 586 aa, Bacillus acidopullulyticus
MFREAIYHRPKDNYAYACANGELHIRIRTKKDDMKEVTLVYGDTYEFDDNKWTYSTAHMKKTGSDQLFDYWLASVTPRYKRLRYGFIVNDRKDSTCFTEKGFYPEPPVNDISYYFSFPYVNQADIFQAPEWVKDTVWYQIFPERFANGNKDNDPDGTLPWGSREPEIDNFFGGDLEGVIEHIDYLKELGIGGIYFTPIFKAHSNHKYDTIDYMEIDPQFGTKETLKKLIDVCHKNGIKVMLDAVFNHSGVFFPPFQDVVEKGKNSKYQDWFHIREFPLVMEPRPNYDTFGFTSSMPKFKTENPEVKEYLLEVGRYWVREFDIDGWRLDVANEVSHAFWREFRREVKAIKPDLYILGEIWHDSLPWLRGDQFDAVMNYPLSTNIVNLFANQSVSVKEFVENMSHVIHMYPDTVNEAAFNLVGSHDTPRILTQCGEDVERLKQVFVLLLTFIGTPCIYYGDEIGLTGGQDPGCRKCMEWNPDQQNRELLQHVRKLIQLRSENPLLANEGELTFVPPKNEEDPCLAYTKSNEEKTIMIIINKSKNSVEYPLSFDAAEQTVKNLWNQEQLILQNGQTLELKANDFKILEF

SEQ ID NO: 18258 - protein, 92 aa, Bixa orellana
EQDRYMPIANVIRIMRKVLPTHAKISDEAKETIQECVSEFISFITSEANERCQREQRKTITAEDVLFAMSRLGFDDYVDPLSIYLQRYREFE

SEQ ID NO: 18259 - protein, 446 aa, Quercus petraea
  misc_feature (405)..(405): Xaa can be any naturally occurring amino acid
  unsure (1)..(446): unsure at all Xaa locations
MREILHIQGGQCGNQIGAKFWEVVCAEHGIDPTGKYQGDSDLQLERINVYYNEASCGRYVPRAVLMDLEPGTMDSIRSGTYGQIFRPDNFVFGQSGAGNNWAKGHYTEGAELIDSVLDVVRKEAENCDCLQGFQVCHSLGGGTGSGMGTLLISKIREESPDRMMLTFSVFPSPKVSDTVVEPYNAPLSVHQLVENADECMVLDNEALYDICFRTLKLTTPSFGDLNHLISATMSGVTCCLRFPGQLNSDLRKLAVNLIPFPRLHFFMVGFAPLTSRGSQQYRALTVPELTQQMWDAKNMMCAADPRHGRYLTASAMFRGKMSTKEVDEQMINVQNKNSSYFVEWIPNNVKSTVCDIPPTGLKMASTFIGNSTLYPGNVPSCKRAVHCYVRRKAFLHWYTGEGMDXMEFTEAESNMNDLVSEYQQYQDATADEDEYEEEEEEEVDGM

SEQ ID NO: 18260 - protein, 445 aa, Arabidopsis thaliana
MSFRGIVQDLRDGFGSLSRRSFDFRLSSLHKGKAQGSSFREYSSSRDLLSPVIVQTSRWANLPPELLFDVIKRLEESESNWPARKHVVACASVCRSWRAMCQEIVLGPEICGKLTFPVSLKQPGPRDAMIQCFIKRDKSKLTFHLFLCLSPALLVENGKFLLSAKRTRRTTRTEYIISMDADNISRSSNSYLGKLRSNFLGTKFLVYDTQPPPNTSSSALITDRTSRSRFHSRRVSPKVPSGSYNIAQITYELNVLGTRGPRRMHCIMNSIPISSLEPGGSVPNQPEKLVPAPYSLDDSFRSNISFSKSSFDHRSLDFSSSRFSEMGISCDDNEEEASFRPLILKNKQPRWHEQLQCWCLNFRGRVTVASVKNFQLVAARQPQPQGTGAAAAPTSAPAHPEQDKVILQFGKVGKDMFTMDYRYPLSAFQAFAICLSSFDTKLACE

SEQ ID NO: 18261 - protein, 774 aa, Emericella nidulans
MVQSAVLGFPRMGKLRDLKKATEAYWGEKISRDELLSEGKRLRAEHWKIQKDAGVDIIPSNDFAFYDQVLDHIQLFGVVPERYSKYNLHPLDEYFAMGRGLQKPAKDGQPAIDVPSLEMVKWFDSNYHYVKPTLQDNQTFKLAANPKPVVEFLEAKEAGIVTRPVILGPVSFLTLAKADRGQTLDPISKIDELLPLYVELLTKLKEAGVEDVQIDEPVLVFDLPLKSKNAFKPAYEKLGSLGAQAPRLVLATYFGDIVHNIDVLPALHNIYGIHIDLVRNPEQLDSVIGALGPKQVLSAGVVDGRNIWKTNFKAAIEKVELAIQKLGKDRVIVSTSSSLLHVPHTLASEKNLDPEVQDWFSFAVEKTSEVVVIAKAVTEGPAAVREQLEANAKSVQARASSKRTNDPKVKERQAAVTPEQHNRKSPFPVRIAEQTKSIKLPLFPTTTIGSFPQTKEIRIQRNKFTKGEITAEEYEKFIEKEIAEVVKIQEELGLDVLVHGEPERNDMVQYFGERLTGYVFTTHAWVQSYGSRCVRPPIIVGDISRPAPMTVKESKYAVSISSKPMKGMLTGPITCLRWSFPRDDVHQSVQAQQLALALRDEVVDLEAAGVKVIQVDEPALREGLPLRAGKEREDYLQWAVAAFRLSTSGVSDGTQIHSHFCYSEFQDFFHAIAALDADVLSIENSKSDAKLLKVFIDEAYPRHIGPGVYDIHSPRVPSEQEIKDRVEEMLAYLRPEQLWINPDCGLKTRQWPETKAALSNLVQAAKYFREKYAK

SEQ ID NO: 18262 - protein, 474 aa, Chlamydia muridarum Nigg
MKITHTAIEFAPVIKAGGLGDALYGLAKALAVNHTTEVVIPLYPKLFTSLHEQDLFATQKIPYFFAGEQEATAFSYFYEGIKVTLLKLDSQPELFEEAETIYTNDDAFRFCAFSAAAAAYIQKEGADIVHLHDWHVGLVAGLLKQQPCPQLQKIVLTLHNFGYRGYTTREVLEASSLNEFYLSHYQLFRDPQTCVLLKGALYCSDFVTTVSPTYAKEILQDYSDYEIHDAITARQHHLKGILNGIDYTILDPETDPHLAKNYSKVLFEDPKAFFEAKAENKKALYETLGLSLDKSPCMCIISRIAEQKGPEFMKQAILHALENAYTLIIIGTCYGGQIHKEFSNLQESLADSPNVRILLTYSDVLARQIFAAADMICIPSMFEPCGLTQMIGMRYGTVPVVRATGGLADTVTDGVNGFSFSNPHDFHEFRNMLSKAIATYRDDQDKWQQIVRSCLEFSSDLETAANKYLEIYQQ

SEQ ID NO: 18263 - protein, 748 aa, Staphylococcus epidermidis RP62A
MTTIKTSNLGFPRLGRKREWKKAIENYWAHKIDKAELDQTLTDLHKENLLLQKNYHLDSIPVGDFSLYDHILDTSLLFNIIPERFQGREVNDDLLFDIARGNKEHVASALIKWFNTNYHYIVPEWDNVEPKVEKNTLLERFKYAQSINVNAHPVIVGPITFVKLSKGGHQSFEEKVETLLPLYKEVLQSLVDAGAEYIQIDEPILVTDDSESYEDITRKAYDYFANEGLGKYLVIQTYFERVHLKFLSSLPVGGLGLDLVHDNGYNLKQIEDGDFDQSKALYAGIIDGRNVWAADIEAKKQLIETLQQHTQQLVIQPSSSLLHVPVSLDDETLDESIAEGLSFATEKLDELDALRRLFNDNDLSKYEHYKARYERFQSQSFKNLEYDFESVPTHRKSPFAKRKQLQNQRLNLPDLPTTTIGSFPQTREIRKFRADWKNNRITDAEYQEFLQNEIARWIKIQEDIGLDVLVHGEFERNDMVEFFGEKLQGFLVTKFGWVQSYGSRAVKPPVIYGDVKWTAPLTVKETVYAQSLTDKPVKGMLTGPVTILNWSFERVDVPRKVVQDQIALAIDEEVLALEEAGIKVIQVDEPALREGLPLRSEYHEQYLEDAVHSFKLATSSVHDETQIHTHMCYSQFGQIIHAIHDLDADVISIETSRSHGDLIQDFEDINYDLGIGLGVYDIHSPRIPTEEEITTAINRSLQQIDRSLFWVNPDCGLKTRKENEVKDALTVLVNAVKKKRQESESTTA

SEQ ID NO: 18264 - protein, 214 aa, uncultured bacterium
QTGGSFYEPFNSYNSGLWQKADGYSNGDMFNCTWRANNVSMTSSGEMRLALTSPSYNKFDCGENRSVQTYGYGLYEVRMKPAKNTGIVSSFFTYTGPTEGTPWDEIDIEFLGKDTTKVQFNYYTNGAGNHEKLADLGFDAANAYHTYAFDWQPNSIKWYVDGQLKHTATTQIPAAPGKIMMNLWNGTGVDDWLGSYNGVNPLYAHYDWVRYTKK

SEQ ID NO: 18265 - protein, 214 aa, uncultured bacterium
QTGGSFYEPFNSYNSGLWQKADGYSNGDMFNCTWRANNVSMTSSGEMRLALTSPSYNKFDCGENRSVQTYGYGLYEVRMKPAKNTGIVSSFFTYTGPTEGTPWDEIDIESLGKDTTKVQFNYYTNGAGNHEKLADLGFDAANAYHMYAFDWQPNSIKWYVDGQLKHTATTQVPAAPGKIMMNLWNGTGVDDWLGSYNGVNPLYAHYDWVRYTKK

SEQ ID NO: 18266 - protein, 142 aa, Brassica napus
VEPLASKRPWMVTQGNHEIEFFPIIEHTTFKSYNSRWLMPYTESLSESNLYYSFDVAGVHTVMLGSYTDFDCDSDQYQWLQADLAKVDRKTTPWVIVLLHAPWYNTNEAHEGEGESMREAMESLLFNARVDVVFAGHVHAYE

SEQ ID NO: 18267 - protein, 95 aa, Oryza sativa
MASGQQQQGRSELDRMAREGQTVVPGGTGGKSLEAQENLAEGRSRGGQTRKEQMGEEGYREMGRKGGLSTGDESGGERAAREGIDIDESKYKTKS

SEQ ID NO: 18268 - protein, 739 aa, Mesembryanthemum crystallinum
MEAYSSGEELVIKTRKPYTITKQRERWTEEEHNRFLEALKLYGRAWQRIEEHIGTKTAVQIRSHAQKFFSKLEKEALVKGVPIQQAIDIEIPPPRPKRKPSNPYPRKTGAAGSPSTQIKVKDGNKVPPGSSHTANQLLDLEKEPPPENTTGDDGKQNAKETCGAYKCSETFTLFQEAPSTLTASGNENSAITTGATRKSCKVDDPVPKKLLVDIDGSDCPAADGRQRNQKLDKTDTVETAQNDTENEMHAVKNFPRHTPVHILDGSLGACSQALSSDVSYQESAFHRMGIPGYPAIFSNPAVSAAVESQNSTSRTTNQQMFTSFHPPFTPFPNTPEDYSSFVQMSATFSSLIVSALLQNPAAHAAASFAASFWPCSNMENSANCPAGLSGGFPPRPMNTAPSMAAIAGATVAAATAWWAAHGLLPLCAPVHSGFNCPPASANAPLTNVAQSQATNKEREENNFQNPGSQVQQPDQELSEALQPQHSASKPSATSSSDSGDSAGAKMEIEIPTNDNEIKVPAMTEQKDSSKGKSKKLVDRSSCGSNTPSGSDVETDALQKNDKGKEEPLEPDISQIAGELNNRRNRIASNNLNDSWKEVSEGGRLAFQALFSRERLPQSFSPPQDVSIMDQVMNNGVERNGQNATETNEDASQLDLNSNTWESCSGDQGHLENTGLREKENGKDHFLSIGLAQGKPRDRRTGFKPYKRCSVEARESRLNSNSQDQEKCPKRIRLEGEAST

SEQ ID NO: 18269 - protein, 521 aa, Buchnera aphidicola (Uroleucon astronomus)
MAAKDVKFGNEARIKMLRGVNVLADAVKVTLGPKGRNVVLDKSFGAPSITKDGVSVAREIELEDKFENMGAQMVKEVASKANDAAGDGTTTATLLAQSIVNEGLKAVAAGMNPMDLKRGIDKAVISAVEELKNLSVPCSDSKAITQVGTISANADEKVGALIAEAMEKVGNDGVITVEEGTGLQNELEVVKGMQFDRGYLSPYFINKPETGIVELENPYILMADKKISNVREMLPILESVAKSGKPLLIISEDLEGEALATLVVNSMRGIVKVAAVKAPGFGDRRKAMLQDISILTGGSVISEELAMELEKSTLEDLGQAKRVVISKDTTTIIGGIGEKHTIQSRISQIRQEIQEATSDYDKEKLNERLAKLSGGVAVLKVGAATEVEMKEKKARVEDALHATRAAVEEGVVAGGGVALVRVAGKISHLRGQNEDQNVGIRVALRAMEAPLRQIVSNSGEEPSVVTNNVKDGKGNYGYNAASDQYGDMIDFGILDPTKVTRSALQYAASVAGLMITTECMV

SEQ ID NO: 18270 - protein, 237 aa, Pediococcus pentosaceus ATCC 25745
MVNHLLAEFMGTALMIIFGVGVHCDEVLKKTKYAGSGHLFAITTWAFGISVVLFIFGGVCINPAMALTQAILGMIPWSYFIPYTIAEVLGGVVGAVIVYIMYADHFKESEGSIDPIAIRNIFSTNPNLRNLPRNYFVETFATFVFLTSILAIVHGYDSMSPIAVGLLVWAIGMGLGGTTGFAMNQARDLGPRLAFQLLPIKNKANNDWQYGLIVPGTAPFVGSILAAAFVRFYLHIY

SEQ ID NO: 18271 - protein, 392 aa, Cryptococcus neoformans var. neoformans JEC21
MSLLAESLAGAKYMVATNDDRESSTNGAAEFLRRKRWPEILLKELVGSAVFCLKPTLILGSRQYQNGEAWSWKIIYSSPSVYEMLGQRPADLEGRDFFDLVLVDDRPQLQSFFNSLLAPPLLNVEPTLLSSEGPDTLGGSRTTYIRMLSAAPGPSRSDSSSRSSSGQRSLPQSNYGTPVGRILGPVVWEIRAHATGIGEDLGEAAGNGETLRMAADGTVVSAIREGDGKHKAIWLMARQVGEGMNEDQKSLEAFLEVKLENERLLAELQELEEEVGMTVEDSINNNQSASTPSSHSSTDTPPGGDKNKNKAGRPPKTNTQVSASGHKRQKSGTGGPAGASEGETMHVCVTCGRTDSPEWRKGPLGPKTLCNACGLRWAKRNSTHIPKKDKQS

SEQ ID NO: 18272 - protein, 563 aa, Cryptococcus neoformans var. neoformans JEC21
MPVPTDEDKRLPVTLLSGFLGSGKTTLLSYILKSKEHGLRCAVVVNDMGSLNIDAALINNHKLTQKEEKVVQMQNGCICCTLRADLLEEIATLAEAGQYDYLIIESSGISEPIQVAETFTTEFAETMGEGTVEEIIDSLPEDASTTPESRRRLAELIHAGGLSKVARLDCCVSMVDCTTFLDDFDTTDFLTDRHGKEVAPEDERNITDLLTDQIEFANVILLNKTDMVSREHVAKVEGLVKTLNPTAKIILTSYSKVDLKDILNTRLFDFGKAAMGAGWLQSLRENTLTEFTDARGNKKMVPKPETLEYGIGSFVYTARRPFHPRRLWDLVSKPFCILQTTFEDDEDQDSDEEDEDDEMIQELTEEEGKQAMFEQMQKEKAELDLPGRAKYKRESPIWKGLLRSKGFVWLATRPHVHGEWSQAGIMFTLNGGGPWMCRIPESEWPGGDDQEVIDAIKLDFMGPWGDRRQELVFIGQNLDKELITKTLNNTLLNDKEWAQWEKIMNSRRSEEKKLERLCNVFDDGWEAWMDPEASVEEEEVNEGHRHAHAHDVPLVTKKAKLSA

SEQ ID NO: 18273 - protein, 544 aa, Mesembryanthemum crystallinum
MVQFGDMENDEGGPSNARGSDPFIDRSKVRILLCDNDSKSCEEVFGLLSNCSYQVTAVRSARQVIDALNAEGPDIDIILSEVDLPTKKGLKMLKYIMRDRDLQRIPVIMMSTQDEVSLVVKCLRLGAADYLVKPLRTNEMLNLWTHMWRRRQMLGLAEKNIVNYDFDLAASDHSDANTNSTTLFSDDTDDRSRRGVNLEMSMTIQEEDESNKATSDPMPADLFDCRPDVPGICDRRTGQFVPFAKKSELKIGECSAFFTYVKSSAVKNNCQAADVEVNHAQPSRLEDKSERLNEVVNNGNMRCENGETWENNSNEDFRSSTSVPDSTSMERSCTPVSLDFMPNKSMDEGLSQVHMNSRNGAHFDVSGLAHSAYPYYMSGMMNQVMMSSSAHMYRKDLQEHGTSAVMPHYNHLSHCPPHVPGMAPPYTYYPLNLCIQQGQLPSNHQMPSFGNSSSSEVKLREVDRREAALIKFRQKRKERCFDKKIRYVNRKKLAERRPRVRGQFVRKVNGVTVDLNGDPSPADLDDEDEDDDDPRDSYAEDDAT

SEQ ID NO: 18274 - protein, 523 aa, Buchnera aphidicola (Uroleucon caligatum)
  misc_feature (439)..(440): Xaa can be any naturally occurring amino acid
  misc_feature (519)..(521): Xaa can be any naturally occurring amino acid
  unsure (1)..(523): unsure at all Xaa locations
MAAKDVKFGNEARIKMLRGVNVLADAVKVTLGPKGRNVVLDKSFGAPSITKDGVSVAREIELEDKFENMGAQMVKEVASKANDAAGDGTTTATLLAQSIVNEGLKAVAAGMNPMDLKRGIDQAVISAVEELKNLSVPCSDSKAITQVGTISANADEKVGALIAEAMEKVGNDGVITVEEGTGLQNELEVVKGMQFDRGYLSPYFINKPETGIVELENPYILMADKKISNVREMLPILESVAKSGKPLLIISEDLEGEALATLVVNSMRGIVKVAAVKAPGFGDRRKAMLQDISILTGGTVISEELAMELEKSTLEDLGQAKRVVITKDTTTIIGGIGEKHNIQSRISQIRQEVQEATSDYDKEKLNERLAKLSGGVAVLKVGAATEVEMKEKKARVEDALHATRAAVEEGVVAGGGVALVRVAGKISHLRGHNEDQNVXXRVALRAMEAPLRQIVSNSGEEPSVVTNNVKDGQGNYGYNAASDEYGDMINFGILDPTKVTRSALQYAASVAGLMITTEXXXTD

SEQ ID NO: 18275 - protein, 523 aa, Buchnera aphidicola (Uroleucon helianthicola)
  misc_feature (17)..(18): Xaa can be any naturally occurring amino acid
  unsure (1)..(523): unsure at all Xaa locations
MAAKDVKFGNEARIKMXXGVNVLADAVKVTLGPKGRNVVLDKSFGAPSITKDGVSVAREIELEDKFENMGAQMVKEVASKANDAAGDGTTTATLLAQSIVNEGLKAVAAGMNPMDLKRGIDKAVISAVEELKNLSVPCSDSKAITQVGTISANADEKVGSLIAEAMEKVGNDGVITVEEGTGLQDELEVVKGMQFDRGYLSPYFINKTETGIVELENPYILMADKKISNVREMLPILESVAKSGKPLLIISEDLEGEALATLVVNSMRGIVKVAAVKAPGFGDRRKAMLQDISILTGGTVISEELAMELEKSTLEDLGQAKRVVISKDTTTIIGGVGEKRTIQSRINQIRQEVQEATSDYDKEKLNERLAKLSGGVAVLKVGAATEVEMKEKKARVEDALHATRAAVEEGVVAGGGVALVRVAGKIAHLRGQNEDQNVGIRVALRAMEAPLRQIVSNSGEEPSVVTNNVKDGKGNYGYNAASDQYGDMINFGILDPTKVTRSALQYAASVAGLMITTECMVTD

SEQ ID NO: 18276 - protein, 523 aa, Buchnera aphidicola (Uroleucon jaceae)
MAAKDVKFGNEARIKMLRGVNVLADAVKVTLGPKGRNVVLDKSFGAPSITKDGVSVAREIELEDKFENMGAQMVKEVASKANDAAGDGTTTATLLAQSIVNEGLKAVAAGMNPMDLKRGIDKAVISAVEELKNLSVPCSDSKAITQVGTISANADEKVGALIAEAMEKVGNDGVITVEEGTGLQNELEVVKGMQFDRGYLSPYFINKPETGIVELENPYILMADKKISNVREMLPILESVAKSGKPLLIISEDLEGEALATLVVNSMRGIVKVAAVKAPGFGDRRKAMLQDISILTGGSVISEELAMELEKSTLEDLGQAKRVVISKDTTTIIGGVGEKHTIQSRISQIRQEIQEATSDYDKEKLNERLAKLSGGVAVLKVGAATEVEMKEKKARVEDALHATRAAVEEGVVAGGGVALVRVAGKISHLRGQNEDQNVGIRVALRAMEAPLRQIVSNSGEEPSVVTNNVKDGKGNYGYNAASDQYGDMIDFGILDPTKVTRSALQYAASVAGLMITTECMVTD

SEQ ID NO: 18277 - protein, 323 aa, Nostoc punctiforme PCC 73102
MVADVINNSVPVTVLTGYLGAGKTTLLNHILTYEHGKKVAVIVNEFGEVGIDNQLIIDADEEIFEMNNGCICCTVRGDLIRIIGNLMKRRDKFDHLVIETTGLADPAPVIQTFFVDEDLQSQISLDAVVTVVDAKHIWQHWDADEAQEQIAFADVILLNKTDLVAPEELDELEKRIRAMNAIAKIYRTQNSELGMDALLGVKAFDLDRALEIDPDFLGEDAHVHDETVYSVALVEAGAVDGEKLNTWLSKLLRTQGPDIFRMKGILNIAGEDNRFVFQGVHMIFDGKPDRPWKPSETPKNELVFIGRNLDAAQLKQDFLACLA

SEQ ID NO: 18278 - protein, 1076 aa, Candida glabrata CBS138
MADRISVTPAQQFRKEHKSVQYQLRQIIGRGSYGVVYKATNKKTAQEVAIKEVNYQDDDELVDIMSEIDLLKNLNHINIVKYHGFIQKQHNLYIILEYCAKGSLKNLISRNRPMSEHEAKPYVRQTLNGLNYLHEQGVIHRDIKAANILLDSENVVKLADFGVSTKVNNTAMTLAGSLNWMAPEIIGNRGASTLSDIWSLGATVVELLTGNPPFHNLIDMNIYYAIENDSYFPPSSLSSGAKDFLQQCFAKNMYKRPTAVQLLQHNWLENDNSKDSTMDKQVIPSVEKLNLYQEKFEDSDLCWDDDFEEKDLNLSSPSKKDLVKTKIPSDEFIPDVFNISEVNQGNQGNQGNQGNQGNQGNQGNQGNDPIKNEQARSNNNIVIQSQLERSSTPFTMDRNKGNADFLQNSSLDEDNLLQIVKSGKSIENVDYFFQKCSIDMLALTLIELTMNKKDMIREHLAPSNHELNLYKFFEYDEKKNKSKLKRKFIQLGGLPSLFHYEKLLSIFFVDDFVDDLIRAGIIPYVRDYKNGSLVLSIINKHMELMSIQSWCKWCNFNLPIDIILENLIARKAQSILLKISTYGSKEFKLEILKNIVNYNYNSSNQKILLDSQVMYVIFKSVFYILRSLHLNSGTSNNSAMLLNFHSHHISTTGSNTGNTPSLSSSPTKSPVSSWKTQSPPLSPTRTLSGKSQGYPSGVSNPPNALSSNNNGFIVPENVFLWMEEFLRSKYFCSLMDIHVWKYFNRAFYYTTYNNKPRLLKLLADDCYTRFCIRVADTVSDKNGRQVMGQASLVLMRMSNELLSSLHNNQILSGNKKISISPSLITIATKFLGKREFIYEGIEIVLNCIQFISHQNEDTGNVNTFNRRGNQRNRNGERLMVLHSDKLLFSEENVLVDMNDIVDCFFIFPENDSNFGNYVVKFMKLCMVQQLEYVCQRIVLKEQFYERIVAFFGFYCNSLLIQIDLLKLVKTLFTRALHSNNERSNILDSLKTLLAFLSENWDPLKGNNKGQVGYNSVLIKQLCSDIAALLSYRPNTKRSNGLDHLGVSQFALDKNITSSGPVVDRGRLPVPRPEFNT

SEQ ID NO: 18279 - protein, 288 aa, Chryseobacterium indologenes
MRQLKITKQVTNRETASLDKYLQEIGKVELITADEEVELAQRIRAGDRAALEKLIKANLRFVVSVSKQYQNQGLSLPDLINEGNLGLMKAAKRYDETRGFKFISYAVWWIRQSILQALAEQSRIVRLPLNKIGSINKINKAYAHLEQENERPPSPEELAEVLDMSEEDIKESMKNSGRHLSMDAPLVEGEDSNLYDVLRSGESPSPDKDLMLESLQIEIERALNTLTPREADLVRLYFGLNGKHPMTLEEIGETFDLTRERVRQIKEKAIKRLKHNTRSKILKSYLGK

SEQ ID NO: 18280 - protein, 189 aa, Triticum aestivum
MTKRFAFEEKEMARMLLLVSREQAMPMPMPVAVPGDRAPERVFVCKTCDRVFPSFQALGGHRASHKKPRLDDGGDLKPKLHGCSVCGLEFAIGQALGGHMRRHRAMAAGGGGGVMAITPPTAAIKKHGDSSDDAVVGMKRGLWLDLNHPPCDEYGTSSESDDECGHDAAAGGYTFHQFLDTGTMEVDCV

SEQ ID NO: 18281 - protein, 342 aa, Listeria monocytogenes str. 4b F2365
MKNNVLVTGGTGFLGMHIIFQLLQQGYQVKTTVRSLKSKEKVIEVMQNNGITDFTQLSFVELDLSKDEGWKEAMLDCKYVLSVASPVFFGKFKNEEELIRPAIEGITRILQAAKEAKVKRVVMTSNFGAIGFSNADKNSITTEAYWTDELAKGLSAYEKSKLIAEKEAWKFMENETELEFATINPVAIFGPSQSSHVSGSFDLLKNLLNGSMKRIISIPLNVVDARDVADLHIRAMITPEANGERFIASADGEISMADIAHLLQRERPELVSKMPKKTLPNAAIRAAAIFSKHAKEGELMINMNRQISNSKARDLLGWQPISTKEEAVLAAVDSLAKYGLLD

SEQ ID NO: 18282 - protein, 326 aa, Pisum sativum
MAEGKGRVCVTGGTGFLGSWIIKSLLENGYSVNTTVRPDPKRKRDLSFLTNLPGASERLHFFNADLSDPKSFSAAVKGCVGVFHTATPVNFAVSEPEKIVTKRTVDGALGILKACVNSKTLKRFIYTSSGSAVSFNGKNKEVLDETDWSDVGLLKSVKPFGWSYSVSKTLAEKAVLDFGQQNGIDVATLILPFIVGSFICPKLPDSVDKALVLVLGKKEQIGVTRFHMVHVDDVARAHIYLLENSVPGGRYNCAPFIVTIEEMSQLFSAKYPEFQILSVDELKEIKGARLAELNSKKLVAAGFEFKYSVDDMFEDAIQCCKEKGYL

SEQ ID NO: 18283 - protein, 352 aa, Bacillus cereus G9241
MTIDRICTIGPASNNKETLAQLINNGMKIVRLNLSHGTHESHKDIIRLVKSLDDSIKILGDVQGPKIRLGEIKGEQITLQAGDSFILHTQPVTGSSTEASVDYEGIAHDVKVESRILMNDGEVELIVEKVSTDKIETKVKTGGNISSHKGVNLPGTIVSLPAITEKDKKDIQFLLEEGVDFIACSFVRKPRHIKEIRDFIKEHKETVPNLIAKIETMEAIENFQDICKEADGIMIARGDLGVELPFQFIPLLQKMMIQECNRTNTYVITATQMLQSMVDHSIPTRAEVTDVFQAVLDGTNAVMLSAESASGEHPIESVKTLRLVSEFAEHVKKDGPFAMKDVLELLHKSLNE

SEQ ID NO: 18284 - protein, 663 aa, Shigella flexneri 2a str. 301
MSSRKELANAIRALSMDAVQKAKSGHPGAPMGMADIAEVLWRDFLKHNPQNPSWADRDRFVLSNGHGSMLIYSLLHLTGYDLPMEELKNFRQLHSKTPGHPEVGYTAGVETTTGPLGQGIANAVGMAIAEKTLAAQFNRPGHDIVDHYTYAFMGDGCMMEGISHEVCSLAGTLKLGKLIAFYDDNGISIDGHVEGWFTDDTAMRFEAYGWHVIRDIDGHDAASIKRAVEEARAVTDKPSLLMCKTIIGFGSPNKAGTHDSHGAPLGDAEIALTREQLGWKYAPFEIPSEIYAQWDAKEAGQAKESAWNEKFAAYAKAYPQEAAEFTRRMKGEMPSDFDAKAKEFIAKLQANPAKIASRKASQNAIEAFGPLLPEFLGGSADLAPSNLTLWSGSKAINEDAAGNYIHYGVREFGMTAIANGISLHGGFLPYTSTFLMFVEYARNAVRMAALMKQRQVMVYTHDSIGLGEDGPTHQPVEQVASLRVTPNMSTWRPCDQVESAVAWKYGVERQDGPTALILSRQNLAQQERTEEQLANIARGGYVLKDCAGQPELIFIATGSEVELAVAAYEKLTAEGVKARVVSMPSTDAFDKQDAAYRESVLPKAVTARVAVEAGIADYWYKYVGLNGAIVGMTTFGESAPAELLFEEFGFTVDNVVAKAKALL

SEQ ID NO: 18285 - protein, 414 aa, Arabidopsis thaliana
MENGATTTSTITIKGILSLLMESITTEEDEGGKRVISLGMGDPTLYSCFRTTQVSLQAVSDSLLSNKFHGYSHTVGLPQARRAIAEYLSRDLPYKLSQDDVFITSGCTQAIDVALSMLARPRANILLPRPGFPIYELCAKFRHLEVRYVDLLPENGWEIDLDAVEALADENTVALVVINPGNPCGNVYSYQHLMKIAESAKKLGFLVIADEVYGHLAFGSKPFVPMGVFGSIVPVLTLGSLSKRWIVPGWRLGWFVTTDPSGSFKDPKIIERFKKYFDILGGPATFIQAAVPTILEQTDESFFKKTLNSLKNSSDICCDWIKEIPCIDSSHRPEGSMAMMVKLNLSLLEDVSDDIDFCFKLAREESVILLPGTAVGLKNWLRITFAADATSIEEAFKRIKCFYLRHAKTQYPTI

SEQ ID NO: 18286 - protein, 513 aa, Rickettsia prowazekii str. Madrid E
MVNLKIFLIVIVLMFNNIILAKENSNALKVVDQEENEFTAINSAPLKISEAARYSFADIVEPLIPAVVNISTIEYVNDKSENSEKDLLQENKHLGFMSDVLEKLNIPLNLEEIAKTPKSIPLGSGFIIAPNGLIVTNYHVIANVEKINIKLADNTEFLAKLIGSDSKTDLALLKIDSEEPLPFVEFGDSNDARVGDWVIAIGNPFGNLGGTVTSGIISSKGRDIDVDTDNIVDNFIQTDAAINNGNSGGPMFNLDQKVIGVNTAIFSPLGTNIGIGFAIPSNTAKPIIERLKKDGKVSRGRLGVTIQDLTEEISEVLGFKGTNGVLVSKVQENGPGYKAGIKKGDIIIKFGDRLVKNTKKLRVIIADTPINQEVKLKILRDAQELELPIKVTADNEEVINDSTEETNKAVIINKKENNLSITKNNITFSNLTEELRKKYDIPQDKTGIVIINIDEEESVFKLGDLITNINHDSIDDIRKLEVLYENAKKLEKQNILLLIERGDTSVFIPLSVS

SEQ ID NO: 18287 - protein, 401 aa, Archaeoglobus fulgidus DSM 4304
MGEFSKFEKLIVLLAAAIGWSHDAVGLTLLNFLAEPIMREFNVGTLEIGFIFSAQYIFCIFGAMLFGEMGDRFGRKNALILSILWVAVFSVLSAFAPNFWTLAILRLISGMGVTWGLAFTYMSEFYSPKRRGLFGGLIHATFVFGFILSALSVSLIYPIYGWRACFFVTLYPIPFLILFAKYLPESRIWEKHSAEMDKSLRLAEIVRESRYLRLLVLATFLFWLAEFAYHAIVDWSPTFIIRQFNYRPEEASMIVLRISLVALIVLPFFGLISDYIGRRSSFAISASIGLLGCLMLAYFTLVNYNPGLALLSLFVIPIGFGSHALFGVWSSEMFPTKVRATATSVIFSIARGLSVGGLIVGYVATFSSLLYGMLLGGIAFLLMCIFPWLLPETKGRELEEF

SEQ ID NO: 18288 - protein, 542 aa, Saccharomyces cerevisiae
MKSTLSLTLCVISLLLTLFLAALDIVIVVTLYDTIGIKFHDFGNIGWLVTGYALSNAVFMLLWGRLAEILGTKECLMISVIVFEIGSLISALSNSMATLISGRVVAGFGGSGIESLAFVVGTSIVRENHRGIMITALAISYVIAEGVGPFIGGAFNEHLSWRWCFYINLPIGAFAFIILAFCNTSGEPHQKMWLPSKIKKIMNYDYGELLKASFWKNTFEVLVFKLDMVGIILSSAGFTLLMLGLSFGGNNFPWNSGIIICFFTVGPILLLLFCAYDFHFLSLSGLHYDNKRIKPLLTWNIASNCGIFTSSITGFLSCFAYELQSAYLVQLYQLVFKKKPTLASIHLWELSIPAMIATMAIAYLNSKYGIIKPAIVFGVLCGIVGSGLFTLINGELSQSIGYSILPGIAFGSIFQATLLSSQVQITSDGPDFQNKFIEVTAFNSFANPWALRLEGYGGNDIHCITQKPDALFPIKHTTIYVCRNTLAYSTEHYDGPQSSLSKFINTAIHDVFYCALGCYALSFFFGIFTSSKKTTISAKKQQ

SEQ ID NO: 18289 - protein, 1051 aa, Vibrio parahaemolyticus RIMD 2210633
MVGIFSWNNLSVKHKLFGLVLLPIISLFFLAGQHVHNLSTQAQDLQKAQLFSVYIDKVSYLFNLPNNPSIPNKAEKTAQLIQELKETTPRVFGDNSEVLPLLASFEEASLSMFTAIDIEEKLDIAEWRADTFEQILLNLDKVYFSNVSYETDRHLSSLMQLEWLMFWSTEERRLSEYLIYSANKRLHYDDAVRDEIQSLIQNQQLLVERFVALNANHNQVQLLIETFSNKVFQTSQEFRDKLLNQEELQALSPLKTGAGLAALNTRLALLHDINDTMEHELQTKLAQTIKATTQQRLVFIVLMSLVTILVISLTIRLVRKVTNNLHLVLEFLSRENYSEDSPLSELIKGKDELSKFAQEVEKLSHEREQAKQKLTKAKEDAERAKDDAIEASKAKSSFLANMSHEIRTPLNGVIGISEVLADTPLTATQRDYVDTIETSSQLLLSLINDVLDFSKIESGMLLISPHSTCVRESIYDIASIVSPKAKEKGIELTVSISPNTPYHIVIDDHRLRQVIMNFMSNAVKFTERGSVELSITTLESNESEAIIEFSVQDSGIGIDEQQQKRIFAPFAQEDDSTTRQFGGTGLGLAISTQLVELMGGSIQLESEKGRGSRFYFQLTAPISQAHFRARHTVNNQIWLVCDDSDLETKLRNELSFYQIQVHQSVHDLSALPTWINDKERIIILYVETTPDAAVKNTDLMRNLEHQHVQVCLIKHLHSQQLDFGHRVAAIITQPLLGQRLLKALESCAGRFTQSISVVQPATRLETLPKVLVVDDNTVNQKIAGLHVTKAGFSFDVAANGEEAVDLFRTSQYCLILMDCMMPVMDGFEATKQIRQIEQKENRTFRIPIIALTASVVDDDIQKCFDVGMDDYVPKPFKADLLKEKLDKAVGLRLPVTASTKLNQSSLTAFEEPEFKQRVGETLSAAPMRRERILLVEDNRVNQKVASLLLSKAGYQFEVAENGQIAVEMFQRDGGFDIILMDCMMPVMDGFEATKQIRAYEASLGLEKTPIIALTASVVDDDIQRCFDSGMDAYVPKPVRKEKLLHQIENVM

SEQ ID NO: 18290 - protein, 620 aa, Candida albicans
MSEQAQPQASADQQQHQHNHHHHHHHHHHNENQSQQQVPIDPAANPANRIGRYQILKTLGEGSFGKVKLAQHLGTGQKVALKIINRKTLAKSDMQGRVEREISYLRLLRHPHIIKLYDVIKSKDEIIMVIEFAGKELFDYIVQRGKMPEDEARRFFQQIIAAVEYCHRHKIVHRDLKPENLLLDDQLNVKIADFGLSNIMTDGNFLKTSCGSPNYMPAPEVISGKLYAGPEVDVWSAGVILYVMLCGRLPFDDEFIPALFKKISNGVYTLPNYLSAGAKHLLTRMLVVNPLNRITIHEIMEDDWFKQDMPDYLLPPDLSKNKNSKIDVDEDVIRALSVTMGYDRDCKIVNVIEKANKQVAAGNSSSQQSKSSNEILDAYLLMKENHALVKDLKKSKSENIESFLSQSPPPSPFPNRGSTSSAPGVQQSLTYQTLATVPDLSTLPNSTIAILPTSLPSIHRAYMAETKQNGDPSQQHAPPPTKKSKTRWHFGIRSRSYPLDVMGEIYRALKNLGAEWAKPTEEELWTIRVRWKYDTSAQFECGSAPNLMKMQIQLFQLEPNNYLVSFKFSGWESAHGNAGTDSPQSHRQQDLDEVGSFSAYPFLHLATRLIMELAVNSQSG

SEQ ID NO: 18291 - protein, 596 aa, Rickettsia prowazekii str. Madrid E
MTKAYNIIHHKFDVVVVGAGGAGLRSAFGMAKEGLNTACITKIFPTRSHTVAAQGGISAALGNMGEDDWRWHMYDTVKGSDWLGDQDAIEYMCKNAPDAILELEHYGVPFSRTVDGKIYQRPFGGMTTEYGKGKAAQRTCAAADRTGHAILHTLYQQSLKHKVQFFIEYFAIDLLMEDGECRGVVAWNLDDGSLHCFRAHNVVLATGGYGRAYFSATSAHTCTGDGGGMVIRAGLPLQDMEFVQFHPTGIYSAGCLITEGARGEGGYLVNANGERFMERYAPAAKDLASRDVVSRAMTIEIREGRGVGEHKDHVFLHLNHLSPEILHRRLPGISETAKIFAGVDVTKDPIPVLPTVHYNMGGIPTNYQGQVIIKDGKNHNSIVNGIMAIGEAACVSVHGANRLGSNSLLDLVVFGRSSALKAAELIKPASPHKPLQKETLEKIINRFDKVRYANGNILVADLRLKMQRTMQSHVSVFRTQKLLDEGVGMISEIRNRYKDIKINDKSLIWNSDLVEALELDNLLDQALVTVCSAAARKESRGAHAREDYPDRNDRDWIKHTLSSIDDSGKVVLDYKPVTLTTLTDAISAIPPVKRVY

SEQ ID NO: 18292 - protein, 172 aa, Streptomyces coelicolor A3(2)
MAAQTQRAVLAGGCFWGMEELIRRLPGVTATRVGYTGGDVPNATYRNHGTHAEAIEILFDPEATDYRALLEFFFQIHDPSTKNRQGNDIGLSYRSAIYYVDDEQKRIAEDTIADVDASGLWPGKVVTEVEPVGPFWEAEPEHQDYLQRYPDGYTCHFPRPGWRLPARSGSEG

SEQ ID NO: 18293 - protein, 407 aa, Brassica oleracea var. botrytis
MESRVLLRATETVTGVPQLRRPIRAINRQFSTASSSFTAFAKPIGSIGEGGNLISGRQLRPLLLLDSLPEKREILKPVRAASAEGGDSAGETKVGFLGKYPWLVTGILLLMWYFLNVIFNILNKKIYNYFPYPYFVSVIHLFVGVVYCLVSWSVGLPKRAPVNSDILKVLIPVAVCHAIGHVTSNVSFAAVAVSFTHTIKALEPFFNASASQFLLGQPIPITLWLSLAPVVLGVAMASLTELSFNWLGFISAMISNISFTYRSIFSKKAMTDMDSTNVYAYISIIALFVCLPPAIIVEGPQLLKHGFNDAIAKVGMTKFISDLFWVGMFYHLYNQLATNTLERVAPLTHAVGNVLKRVFVIGFSIVIFGNKISTQTGIGTGIAIAGVALYSVIKAKIEEEKRQGKTA

SEQ ID NO: 18294 - protein, 523 aa, Buchnera aphidicola (Uroleucon obscurum)
  misc_feature (15)..(15): Xaa can be any naturally occurring amino acid
  misc_feature (19)..(19): Xaa can be any naturally occurring amino acid
  misc_feature (36)..(36): Xaa can be any naturally occurring amino acid
  misc_feature (45)..(46): Xaa can be any naturally occurring amino acid
  misc_feature (335)..(336): Xaa can be any naturally occurring amino acid
  misc_feature (367)..(368): Xaa can be any naturally occurring amino acid
  unsure (1)..(523): unsure at all Xaa locations
MAAKDVKFGNEARIXMLRXVNVLADAVKVTLGPKGXNVVLDKSFXXPSITKDGVSVAREIELEDKFENMGAQMVKEVASKANDAAGDGTTTATLLAQSIVNEGLKAVAAGMNPMDLKRGIDKAVISAVEELKNLSVPCSDSKAITQVGTISANADEKVGALIAEAMEKVGNDGVITVEEGTGLQDELEVVKGMQFDRGYLSPYFINKTETGIVELENPYILMADKKISNVREMLPILESVAKSGKPLLIISEDLEGEALATLVVNSMRGIVKVAAVKAPGFGDRRKAMLQDISILTGGSVISEELAMELEKSTLEDLGQAKRVVISKDTTTIIGXXGEKHTIQSRISQIRQEVQEATSDYDKEKLNXXLAKLSGGVAVLKVGAATEVEMKEKKARVEDALHATRAAVEEGVVAGGGVALVRVAGKISHLRGQNEDQNVGIRVALRAMEAPLRQIVSNSGEEPSVVTNNVKDGKGNYGYNAASDQYGDMIDFGILDPTKVTRSALQYAASVAGLMITTECMVTD

SEQ ID NO: 18295 - protein, 523 aa, Buchnera aphidicola (Uroleucon solidaginis)
  misc_feature (368)..(368): Xaa can be any naturally occurring amino acid
  unsure (1)..(523): unsure at all Xaa locations
MAAKDVKFGNEARIKMLRGVNVLADAVKVTLGPKGRNVVLDKSFGAPSITKDGVSVAREIELEDKFENMGAQMVKEVASKANDAAGNGTTTATLLAQSIVNEGLKAVAAGMNPMDLKRGIDKAVISAVEELKNLSVPCSDSKAITQVGTISANADEKVGALIAEAMEKVGNDGVITVEEGTGLQNELEVVKGMQFDRGYLSPYFINKPETGIVELENPYILMADKKISNVREMLPILESVAKSGKPLLIIAEDLEGEALATLVVNSMRGIVKVAAVKAPGFGDRRKAMLQDISILTGGSVISEELAMELEKSTLEDLGQAKRVVISKDTTTIIGGVGEKHTIQSRISQIRQEIQEATSDYDKEKLNEXLAKLSGGVAVSKVGAATEVEMKEKKARVEDALHATRAAVEEGVVAGGGVALVRVAGKISHLRGENEDQNVGIRVALRAMEAPLRQIVSNSGEEPSVVTNNVKDGTGNYGYNAASDQYGDMINFGILDPTKVTRSALQYAASVAGLMITTECMVTD

SEQ ID NO: 18296 - protein, 206 aa, Bartonella quintana str. Toulouse
MGRTLVLIRHGQSEWNIKNLFTGWKDPGLTEKGHAEAITAGKNLKAAGLKFDIAYTSALQRAQKTAQHILEQMGQSDLPLIKNSALNERDYGDLSGLNKDEVRQQWGEQQVQIWRRSYAVAPPNGESLRDTGARVWPYYLYHIQPHILRSQTVLIAAHGNSLRALIMALEGLNSEEIISQELTTGIPLIYTFNSDSTISSKTIITP

SEQ ID NO: 18297 - protein, 180 aa, Zea mays
MADAPASPGGGGGSHESGSPRGGGGGGGGSVREQDRFLPIANISRIMKKAIPANGKIAKDAKETVQECVSEFISFITSEASDKCQREKRKTINGDDLLWAMATLGFEDYIEPLKVYLQKYREMEGDSKLTAKSSDGSIKKDALGHVGASSSAAQGMGQQGAYNQGMGYMQPQYHNGDIKK

SEQ ID NO: 18298 - protein, 523 aa, Buchnera aphidicola (Uroleucon sonchi)
MAAKDVKFGNEARIKMLRGVNVLADAVKVTLGPKGRNVVLDKSFGAPSITKDGVSVAREIELEDKFENMGAQMVKEVASKANDAAGDGTTTATLLAQSIVNEGLKAVAAGMNPMDLKRGIDKAVISAVEELKNLSVPCSDSKAITQVGTISANADEKVGALIAEAMEKVGNDGVITVEEGTGLQNELEVVKGMQFDRGYLSPYFINKPETGIVELENPYILMADKKISNVREMLPILESVAKSGKPLLIISEDLEGEALATLVVNSMRGIVKVAAVKAPGFGDRRKAMLQDISILTGGSVISEELAMELEKSTLEDLGQAKRVVISKDTTTIIGGIGEKHTIHSRISQIRQEIQEATSDYDKEKLNERLAKLSGGVAVLKVGAATEVEMKEKKARVEDALHATRAAVEEGVVAGGGVALVRVAGKISHLRGQNEDQNVGIRVALRAMEAPLRQIVSNSGEEPSVVTNNVKDGKGNYGYNAASDQYGDMIDFGILDPTKVTRSALQYAASVAGLMITTECMVTD

SEQ ID NO: 18299 - protein, 541 aa, Mycobacterium avium subsp. paratuberculosis
MAKTIAYDEEARRGLERGLNALADAVKVTLGPKGRNVVLEKKWGAPTITNDGVSIAKEIELEDPYEKIGAELVKEVAKKTDDVAGDGTTTATVLAQALVREGLRNVAAGANPLGLKRGIEKAVEKVTETLLKSAKEVETKDQIAATAAISAGDQSIGDLIAEAMDKVGNEGVITVEESNTFGLQLELTEGMRFDKGYISGYFVTDAERQEAVLEDPFILLVSSKVSTVKDLLPLLEKVIQAGKPLLIIAEDVEGEALSTLVVNKIRGTFKSVAVKAPGFGDRRKAMLQDMAILTGGQVISEEVGLSLESADISLLGKARKVVVTKDETTIVEGAGDSDAIAGRVAQIRTEIENSDSDYDREKLQERLAKLAGGVAVIKAGAATEVELKERKHRIEDAVRNAKAAVEEGIVAGGGVALLHAIPALDELKPEGEEATGANIVRVALERPLKQIAFNGGLEPGVVAEKVRNSPAGTGLNAATGEYEDLLKAGIADPVKVTRSALQNAASIAGLFLTTEAVVADKPEKAAAPAGDPTGGMGGMDF

SEQ ID NO: 18300 - protein, 287 aa, Flavobacterium johnsoniae
MRQLKITKQVTNRETASLDKYLQEIGKVDLITADEEVELAQRIKAGDQRALEKLTKANLRFVVSVAKQYQNQGLTLPDLINEGNLGLIKAAQRFDETRGFKFISYAVWWIRQSILQALAEQSRIVRLPLNKIGSINKINKMYALLEQSNERPPSAEEIAKELDMTVNDVKESMKNSGRHLSMDAPLVEGEDSNLYDVLRSGESPNPDRELIHESLRTEIERSLETLTPREADVVRLYFGLGDQHPMTLEEIGETFDLTRERVRQIKEKAIRRLKHTSRSKILKTYLG

SEQ ID NO: 18301 - protein, 544 aa, Neisseria flavescens
MAAKDVQFGNEVRQKMVNGVNILANAVRVTLGPKGRNVVLDRAFGGPHITKDGVSVAKEIELKDKFENMGAQMVKEVASKTNDVAGDGTTTATVLAQSIVAEGMKYVTAGMNPTDLKRGIDKAVAALVDELKNIAKPCDTSKEIAQVGSISANSDEQVGAIIAEAMEKVGKEGVITVEDGKSLENELDVVEGMQFDRGYLSPYFINDAEKQIAGLDNPFVLLFDKKISNIRDLLPVLEQVAKASRPLLIIAEDVEGEALATLVVNNIRGILKTVAVKAPGFGDRRKAMLQDIAILTGGVVISEEVGLSLEKATLDDLGQAKRIEIGKENTTIIDGFGDAAQIEARVAEIRQQIETATSDYGKEKLQERVAKLAGGVAVIKVGAATEVEMKEKKDRVEDALHATRAAVEEGVVAGGGVALLRARAALENLHTGNADQEAGVQIVLRAVESPLRQIVAKAGGEPSVVVNKVLEGKGNYGYKAGSGEYGDMIEMGVLDPAKVTRSALQHAASIAGLMLTTDCMIAEIPERKPAMPDMGGMGGMGGMM

SEQ ID NO: 18302 - protein, 523 aa, Buchnera aphidicola (Uroleucon rudbeckiae)
  misc_feature (411)..(412): Xaa can be any naturally occurring amino acid
  misc_feature (461)..(462): Xaa can be any naturally occurring amino acid
  misc_feature (518)..(519): Xaa can be any naturally occurring amino acid
  unsure (1)..(523): unsure at all Xaa locations
MAAKDVKFGNEARIKMLRGVNVLADAVKVTLGPKGRNVVLDKSFGAPSITKDGVSVAREIELEDKFENMGAQMVKEVASKANDAAGDGTTTATLLAQSIVNEGLKAVAAGMNPMDLKRGIDKAVISAVEELKNLSVPCSDSKAITQVGTISANADEKVGALIAEAMEKVGNDGVITVEEGTGLQNELEVVKGMQFDRGYLSPYFINKPETGIVELENPYILMADKKISNVREMLPILESVAKSGKPLLIISEDLEGEALATLVVNSMRGIVKVAAVKAPGFGDRRKAMLQDISILTGGSVISEELAMELEKSTLEDLGQAKRVVISKDTTTIIGGVGEKHTIQSRISQIRQEIQEATSDYDKEKLNERLAKLSGGVAVLKVGAATEVEMKEKKARVEDALHATRAAVEEGXXAGGGVALVRVAGKISHLRGQNEDQNVGIRVALRAMEAPLRQIVSNSGEXXSVVTNNVKDGKGNYGYNAASDQYGDMIDFGILDPTKVTRSALQYAASVAGLMITTXXMVTD

SEQ ID NO: 18303 - protein, 544 aa, Neisseria gonorrhoeae
MAAKDVQFGNEVRQKMVNGVNILANAVRVTLGPKGRNVVVDRAFGGPHITKDGVTVAKEIELKDKFENMGAQMVKEVASKTNDVAGDGTTTATVLAQSIVAEGIKAVTAGMNPTDLKRGIDKAVAALVEELKNIAKPCDTSKEIAQVGSISANSDEQVGAIIAEAMEKVGKEGVITVEDGKSLENELDVVEGMQFDRGYLSPYFINDAEKQIAGLDNPFVLLFDKKISNIRDLLPVLEQVAKASRPLLIIAEDVEGEALATLVVNNIRGVLKTVAVKAPGFGDRRKAMLQDIAILTGAVVISEEVGLSLEKATLDDLGQAKRIEIGKENTTVIDGFGDAAQIEARVAEIRQQIETATSDYDKEKLQERVAKLAGGVAVIKVGAATEVEMKEKKDRVEDALHATRAAVEEGVVAGGGVALLRARAALENLHTGNADQDAGVQIVLRAVESPLRQIVANAGGEPSVVVNKVLEGKGNYGYNAGSGEYGDMIGMGVLDPAKVTRSALQHAASIAGLMLTTDCMIAEIPEEKPAVPDMGGMGGMGGMM

SEQ ID NO: 18304 - protein, 523 aa, Buchnera aphidicola (Uroleucon rapunculoidis)
  misc_feature (314)..(314): Xaa can be any naturally occurring amino acid
  misc_feature (337)..(337): Xaa can be any naturally occurring amino acid
  misc_feature (339)..(341): Xaa can be any naturally occurring amino acid
  misc_feature (350)..(351): Xaa can be any naturally occurring amino acid
  misc_feature (385)..(385): Xaa can be any naturally occurring amino acid
  misc_feature (517)..(520): Xaa can be any naturally occurring amino acid
  unsure (1)..(523): unsure at all Xaa locations
MAAKDVKFGNEARIKMLRGVNVLADAVKVTLGPKGRNVVLDKSFGAPSITKDGVSVAREIELEDKFENMGAQMVKEVASKANDAAGDGTTTATLLAQSIVNEGLKAVAAGMNPMDLKRGIDKAVISAVEELKNLSVPCSDSKAITQVGTISANADEKVGALIAEAMEKVGNDGVITVEEGTGLQNELEVVKGMQFDRGYLSPYFINKPETGIVELENPYILMADKKISNVREMLPILESVAKSGKPLLIISEDLEGEALATLVVNSMRGIVKVAAVKAPGFGDRRKAMLQDISILTGGSVISEELAMELEKSTXEDLGQAKRVVISKDTTTIIGGVXEXXXIQSRISQIXXEIQEATSDYDKEKLNERLAKLSGGVAVLKVGAAXEVEMKEKKARVEDALHATRAAVEEGVVAGGGVALVRVAGKISHLRGQNEDQNVGIRVALRAMEAPLRQIVSNSGEEPSVVTNNVKDGKGNYGYNAASDQYGDMIDFGILDPTKVTRSALQYAASVAGLMITXXXXVTD

SEQ ID NO: 18305 - protein, 203 aa, Lentinula edodes
MGRVLLKVIILGDSGVGKTSLMNQYVNKRFSNQYKATIGADFLTKEVMVDDRLVTMQLWDTAGQERFQSLGVAFYRGADCCVLVYDVNSAKSFETLDSWRDEFLIQASPHDPENFPFVVLGNKIDVEENKRQVTQKRAMTWCQSKGNIPYFETSAKEAINVEQAFQTVAKNALTQEAEEQLYVDYPDPIQLDSESSQSYGCNC

SEQ ID NO: 18306 - protein, 529 aa, Shewanella oneidensis MR-1
MSADHTVTQLDSFSATTHSHATHSVQPELNFWQIFNMCFGFLGIQFGFALQNANVSRIFQTLGASIDEIPILWIAAPLTGLLVQPIIGYLSDNTWGCLGRRRPYFLIGAILTTLAIFVMPHSPTLWIAAGMLWIMDASINIAMEPFRAFVGDNLPPSQRTQGYAMQSFFIGIGAVVASALPYILSNFFNVANTAPAGEIADSVRYAFYFGGTVLFLAVTWTVISTKEYSPEELAAFHAKTKTDVEEQCKRSRTHKDYQFASFVWMGLGALLTFTVWAQDLDKQLYILSIGIFAFGPLQLYCALRLSQSQPSQRAQLGMVFNVVDDLFHMPKAMHQLAIVQFFSWFALFAMWIYTTSAVTSYHFGSSDVLSQAYNDGADWVGVLFASYNGFSAIAALFIPLLAKRIGIKLTHTFNMFCGGFGLISFYFIKDPNLLWLAMIGVGIAWASILSIPYAILSGTLPPKKMGVYMGIFNFFIVIPQLLAASVLGLILNGLFDGQPIYALITGGVFMLCAGIAVLFVEQPKALTPH

SEQ ID NO: 18307 - protein, 541 aa, Neisseria gonorrhoeae
MAAKDVQFGNEVRQKMVNGVNILANAVRVTLGPKGRNVVVDRAFGGPHITKDGVTVAKEIELKDKFENMGAQMVKEVASKTNDVAGDGTTTATVLAQSIVAEGIKYVTAGMNPTDLKRGIDKAVAALVEELKNIAKPCDTSKEIAQVGSISANSDEQVGAIIAEAMEKVGKEGVITVEDGKSLENELDVVEGMQFDRGYLSPYFINDAEKQIAGLDNPFVLLFDKKISNIRDLLPVLEQVAKASRPLLIIAEDVEGEALATLVVNNIRGVLKTVAVKAPGFGDRRKAMLQDIAILTGGVVISEEVGLSLEKATLDDLGQAKRIEIGKENTTVIDGFGDAAQIEARVAEIRQQIETATSDYDKEKLQERVAKLAGGVAVIKVGAATEVEMKEKKDRVEDALHATRAAVEEGVVAGGGVALLRARAALENLHTGNADQEAGVQIVLRAVESPVRQIVANAGGEPSVVVNKVLEGKGNYGYNAGSGEYGDMIGMGVHDPAKVTRSALQHAASIAGLMLTTDCMIAEIPEEKPAVPDMGGMGGMM

SEQ ID NO: 18308 - protein, 351 aa, Nostoc punctiforme PCC 73102
MVNTLPKPEIKTPSKETVLTPRFYTTDFETAANLDLSAQETELKAMLAEMRTDYNRHHFVRDEVFNQSWEHIEGEARQAFIEYLERSCISEFSGFLLFKELSRKLKNRSPLLAEIFQLMARDEARHAGFLNKAMGDFKLSLDLGNVTKTRTYTFFPIEWVLYTVYLSEKIGYWRYIIIYRHLEKHPENEFYPIFQYFESWCQDENRHGDIFKALLRSQPQLWNNWKARLWSRFFLLSVFATHTLTVHERAGFYTSLGLDATEFDREVVRNTNETAGRAFPVMLNTEHPKFFPRLQRCAGYNMKIAEIESSSVPKVVKLIRKLPLIAAIVWNLLLVYLIKPVDAEVLRETVR

SEQ ID NO: 18309 - protein, 572 aa, Erwinia carotovora subsp. atroseptica SCRI1043
MLRRFFSYYSPYKGLFVLDFGCAIIAGLLELGFPMAIKAFIDKLLPAQDWSLILLASVALLAVYLLNTSLMAIVNYWGHALGVGIETDMRRQAFEHLQNLPFRYYDNMKTGHIITHVTKDLEEVGEIAHHGPEDLFLAIMTFIGAFILMATVHLNLALLTIIIVPFMGYLVSRYGARMTETWRQLFGQVGNFNARIEESVGGIRVVKAFANEAHEKKLFSHDNENYRRTKLQAYRIMTASMTLSYLSTRLIQLIVMLAGIWYVIQGELTYGGFIGFLLLIEVFFRPIAKITSVLESYPKGIAGFKRFTQLIDTIPEIADAPDARNAGPLKGDIQFNQVSFGYSADRPILRNIDLSVRAGETVAFVGPSGAGKTTLCSLLPRFYDLTHGTITIDGMDIRQMTQASLRSQIGIVQQDVFLFGGTIRENIAYGKLGASDGEIMEAARQARLDELIENLPEGLDTMVGERGVKLSGGQKQRLSIARIFLKNPPILILDEATSALDTATEQAIQQSLSELSTGRTTLVIAHRLATIQNAGRIVVVDNGSIIEQGSHQTLLEQSGIYAKLHQAQFGQA

SEQ ID NO: 18310 - protein, 416 aa, Thermotoga maritima
MPEKSLYEMAVEQFNRAASLMDLESDLAEVLRRPKRVLIVEFPVRMDDGHVEVFTGYRVQHNVARGPAKGGIRYHPDVTLDEVKALAFWMTWKTAVMNLPFGGGKGGVRVDPKKLSRNELERLSRRFFSEIQVIIGPYNDIPAPDVNTNADVIAWYMDTYSMNVGHTVLGIVTGKPVELGGSKGREEATGRGVKVCAGLAMDVLGIDPKKATVAVQGFGNVGQFAALLISQELGSKVVAVSDSRGGIYNPEGFDVEELIRYKKEHGTVVTYPKGERITNEELLELDVDILVPAALEGAIHAGNAERIKAKAVVEGANGPTTPEADEILSRRGILVVPDILANAGGVTVSYFEWVQDLQSFFWDLDQVRNALEKMMKGAFNDVMKVKEKYNVDMRTAAYILAIDRVAYATKKRGIYP

SEQ ID NO: 18311 - protein, 156 aa, Methanosarcina mazei Go1
MFSGSLPSSQKKAADPIYSLKFRETCCSHNPKIGSRTLKSYVNGAKFMARDIGLNIPAPSEECDDAYCPFHGTLPVRGQILVGTVVSSKMDNTVVIERQYMKMVSKYQRYEKRRSKIHAHNPACISAKVGDIVTIVECRPISKTKSFVVVKAEVPK

SEQ ID NO: 18312 - protein, 402 aa, Brassica oleracea var. botrytis
MQSSAVFSASPSLPLLKPGRLSLRHPVTASSNLSVSPPNVVSVPPLPRRSWRLASSDSPLRAWSGLPSVSSPSLDTNRFKTAATAVPEEGEGSGKMTKVLELGLLFAMWYLFNIYFNIYNKQVLKALHAPMTVTLVQFAVGSVLITFMWALNLYKRPKISAAQLAAILPLAVVHTLGNLFTNMSLGKVSVSFTHTIKAMEPFFSVVLSAMFLGEVPTPWVIGSIIPIVGGVALASVTEVSFNWAGFLSAMASNLTNQSRNVLSKKVMVKKDDSLDNITLFSIITLMSLFLMAPVTFFSEGIKFTPSYIQSAGVNVQQIYTKSLIAALCFHAYQQVSYMILARVSPVTHSVGNCVKRVVVIVSSVIFFKTPVSPVNAFGTGIALAGVFLYSRVKRIKPKPKTA

SEQ ID NO: 18313 - protein, 338 aa, Chlamydia muridarum Nigg
MMHFSNYLYQAFEDLPEPLYQKFQICHQTYIEAATRKCSIERAESLCSQWLKVIIDDLKNPIIFPPYHKKIRTPIDLYQFGIDFFSVLIDDQKSQVLHSNRLDQIQEYICSGHNVVLLANHQTESDPQLMYCLLGASHPQLMENMIFVAGDRVTSDPLARPFSMGCDLLCIYSKRHINHPPELKEEKLNHNQKSMRTLKMLLSEGSKFIYVAPAGGRDRKNSQGELYPAEFHPDSIEMFRLLAKSSGKPTHFFPFAMKTYDILPPPPTIEETIGEHRVISFAPIAFNFGEELLLDELCSSEEADSHDKHSLRALRASRVFSIVTDLYKEILIDEPRSF

SEQ ID NO: 18314 - protein, 644 aa, Gloeobacter violaceus PCC 7421
MGIWQNDVIAVDITNASALNFSKNLQRWFSEFRIQTRLLAAAALIISLVLASFTFWALNYIQEDARRSDQRFGEAVGNLLAATAAPLIALDQYPQLGEFTEEFLASNADNILYVLYADSKGDILYGSPFNTNDTRANAPVPALIRHIELPPVLPAKRQHRTPRGLVTDIFVPIEYGERQLGVVLVGINPEANLVSRSDLTRDVTVAVFVLVWIIAILGSVFNALTITQPLKELVQGVQRIAQGNFKQRVTLAYPGEIGELITSFNLMAQRLQSYEEQNIEEITAEKAKLETFIATIADGGILLDSSLRILLVNPAMLRIFGWGSRVVGKNILDLLPVGMRAEVEEPLDSVSRNILEQAECRVVLDKRTLRVLISPVLAPRGDNLLKGVVLTVQDLSKEAELNQAKSQFISNVSHELRTPLSSIKSYIETVYEFGDSLDDSTKNEFLKTANQETDRLTRLVNDVLDLSRLESGREYHFEPVDLVQPIEQTLRTHRLTARDREIELVSDIATDLPLVLGNYDLLQQVFSNLVGNALKFTEPGGRVTLSARRTDDPAKVRVAVTDTGIGISEEDQRRIFERFFRVENRVHTLEGTGLGLSIVDNIVKKHNAQVHIESEVGQGSTFWFDVEAYMETCEWPRREQEEVI

SEQ ID NO: 18315 - protein, 292 aa, Arabidopsis thaliana
MMKVDQDYSCSIPPGFRFHPTDEELVGYYLKKKIASQRIDLDVIREIDLYKIEPWDLQERCRIGYEEQTEWYFFSHRDKKYPTGTRTNRATVAGFWKATGRDKAVYLNSKLIGMRKTLVFYRGRAPNGQKSDWIIHEYYSLESHQNSPPQEEGWVVCRAFKKRTTIPTKRRQLWDPNCLFYDDATLLEPLDKRARHNPDFTATPFKQELLSEASHVQDGDFGSMYLQCIDDDQFSQLPQLESPSLPSEITPHSTTFSENSSRKDDMSSEKRITDWRYLDKFVASQFLMSGED

SEQ ID NO: 18316 - protein, 287 aa, ASPERGILLUS NIDULANS FGSC A4
MSVSIETTSTPVVPLKQEAPAVATTNRLPEFSLAGKVVCVSGGARGLGLTQAEALLEAGARVYALDRLEEPSPDFYTIQKRAREELGTELQYRRIDVRDTELLHSTIEAIANAEGRMDGLVAAAGIQQETPALEYTAQDANRMFEVNITGVMMTAQAVAKQMIRFGNGGSIALIASMSGTIANRGLICSAYNASKAAVIQLARNLASEWGQYNIRVNTISPGYIVTAMVEQLFVQYPERRDEWPKHNMLGRLSSPQEYRGAAVFLLSDASSFMTGSDLRIDGGHAAW

SEQ ID NO: 18317 - protein, 317 aa, Burkholderia fungorum LB400
MTTALDQLKQYTTVVADTGDFQQLAQYKPQDATTNPSLILKAVQKDDYKPLLEKTVKAHASKPVGAIIDQLLIAFGTEILKIIPGRVSTEVDARLSFDTEGSIAKGRELIALYKEHGIGRERVLIKLASTWEGIRAAEVLQKEGIHCNMTLLFSLAQAAACAEAGAQLISPFVGRIYDWYKKNAGSAWDEAKDGGANDPGVKSVRRIYAYYKKFGYKTEVMGASFRTPGQILELAGCDLLTISPDLLQKLHESTEKVERKLSPDIAKESDIERVPVDESSFRFLVNDEAMATEKLAEGIRAFAADAIKLEKLIDALR

SEQ ID NO: 18318 - protein, 323 aa, ASPERGILLUS NIDULANS FGSC A4
MSLPSHFSLNTGAKIPAVGFGTWQAKPLEVENSVEVALKQGYRHIDCAAIYRNETEVGNGIRKSGVPREEIFLTGKLWNTKHAPEDVEPALDKTLKDLGVEYLDLYLMHWPCAFKASDKWFPLDDNGVFQLADIDYVTTYRAMEKLLNTGKVRAIGVSNFNVRRLEDLLSKVSVVPAANQIEAHPYLQQPDLLRYCQSKGIIIEAYSPLGNNQTGEPRTVDDPVVHTVAGQLSMDPGPLLASWAVQRGTVVLSKSVTPSRIAANLQVKRLPDDAFATLAALERHKRFNFPAFWGYDIFDEAGEEAVKKAAMDAAPINKTKFTV

SEQ ID NO: 18319 - protein, 541 aa, Enterococcus faecalis V583
MAKEIKFAEDARAAMLRGVDVLADTVKVTLGPKGRNVVLEKSFGSPLITNDGVTIAKEIELEDHFENMGAKLVSEVASKTNDIAGDGTTTATVLTQAIVREGLKNVTAGANPLGIRRGIELATKTAVEELHNISSVVDSKEAIAQVAAVSSGSEKVGQLIADAMEKVGNDGVITIEESKGIETELDVVEGMQFDRGYLSQYMVTDNDKMEAVLENPYILITDKKISNIQDILPLLEQILQQSRPLLIIADDVDGEALPTLVLNKIRGTFNVVAVKAPGFGDRRKAMLEDIAILTGGTVITDDLGLELKDTTIENLGNASKVVVDKDNTTIVEGAGSKEAIDARVHLIKNQIGETTSDFDREKLQERLAKLAGGVAVVKVGAATETELKELKLRIEDALNATRAAVEEGMVSGGGTALVNVIGKVAALEAEGDVATGIKIVVRALEEPIRQIAENAGYEGSVIVDKLKNVDLGIGFNAANGEWVNMVEAGIVDPTKVTRSALQNAASVSALLLTTEAVVADKPEPAAPAPMMDPSMGMGGMM

SEQ ID NO: 18320 - protein, 460 aa, Prochlorococcus marinus str. NATL2A
MSNTQKVPVTILTGFLGSGKTTLLNRILSEEHGKKIAVIENEYGEVGIDQGLVINADEEVFEMSNGCICCTVRGDLIRVLGNLMKRRDKFDYVLVETTGLADPGPVAQTFFMDDEIREEFSLDGIVTLVDAAHIEQQLGRSDESSEQVAFADVLVLNKTDLVSDESLDNLESRLRDMNRMARVIRSKQADVSIDTVLNLSAFDLDQVLQRRPTFLEPEYPFEWTGVFSLEKGRYELTLEEGPDPTMSLVQLLDQGKDETALNTGAESCVRLYAEQEQLMNPGDLVPVGKHVNLQLQSEGTKSFFIDVDKARDIGLFTQHTAEEFNMKLTKVNTPSTDEIDNDQNISTISPIAERVWVAEHEHDDEVGSFAIEREGDVDPEKLNRWLSRLLSEKGVDIFRTKGFISYAGESKRIVFQGVHMLFTAQPDKEWGNEPRRNQLVFIGRNLDEAEMIKEFDKCLV

SEQ ID NO: 18321 - protein, 515 aa, Ustilago maydis 521
MVGCFAFLKPTRSGDKADKNKTGGKCDCKCDTRSTAACTTSSLNSSEKTPLSASIYYDACNPPPFSADEQSRCCGGYSSSGFAHAHLPTYGDSQSHSRSSNRARYAESAPEPSAQMLDVAKSIESEIAKLDSELRSLSLDMHDHPEIMWEERRTHDLFVKYLSSKKGWKVTPHAYGQQTAFEALFQHKASNDSRVIGFQSELDALPGIGHACGHNLIAISGVAAALSVAATLVAHDIAGTVILLGTPAEEGGGGKIRLERNGAYKRMDACLMVHPAPVSGTGPMLAVQPVVVTYKGRTAHSGAAPWEGVNALDAAVLAYNNISALRQQILPTQRVHGIIKGNNWAPNVVPGESTLIYNVRSPTVSGLKSLVARVQKCFEAAALATGCTGEYDWQTAYADVHNTPSLSHAYAGVLKQRYNLDVSDDAFAASTDFGNITYALPSLHAEYAIHLDDPRTQGNHTIGFAEAARSIEAHERTKEAALGIAVIGARVLVDKQFRDHIWHEWRQWRKDADGP

SEQ ID NO: 18322 - protein, 303 aa, Actinobacillus pleuropneumoniae serovar 1 str. 4074
MKKLCVLGSVNADHVIRVPYFPKAGETLKGGHYHIAYGGKGANQAVAAARVRNTSLVEVDFIACIGADDIGRAMKQAFVQDGINPEHIVEVADQMTGIAMIQVADSGENSIVISAGANANLDESVVAQHQATIERADCLLVQLETPLQAVEKALKIAKANHTQVILNPAPAQPLSDEILANIDMITPNETETALLTGIQVVDEQTAQQAANVFHQKGIQTVLITLGAKGAFLSENGNGEIIAGFKVTPVDTTAAGDTFNGALAIALLEGKSMRDAVMFAHKASSISVTRMGAQSSIPTRAELV

SEQ ID NO: 18323 - protein, 901 aa, Neurospora crassa
MDAIVGASVVVPCPVAARSCGIAAVDRSRALQHLTAVEVRPRESLGNPQAFTVPNPSGALVYCPSTRVRHQTSPLPIMKTAKPPAAEAPSGPSGSNRRAQPVRQTRINPPRTSSLNRTNSFPNGPTPEQPIDIFPAVTHFTDAITALPKELVRHFTLLKEVDAKIFAPEATLFELVDAALKAPVPDRTRSVTDGNNSVAPASTPMSAQNSTSGRVASNANPATVPPSITDSAHAAVFDPTNLPRRHLFRQAAWKIQEMLVSLEEKNHVISTANDALHKQLSRIEEIWPHLENEFSDEAKWGSTTHWAYAENRVPKTNHKEAERSRREGAATLSAAAQQIAEEAAARSSDRKQALAAKKNNKGQATEPEADSKAQETTKKGPGTGKSRKHQAEATPVGLGIANGTPTNGTGPSKRRKVEKEPKANGSAPMERAMSSVFGNGTAKSKTTASPRGSPAPDGATPTGPTTKKRKALPSGSTQAKKSRTNAANSPSVAASPLLGSLPDTKAGRNSPVPLPPRPASSRARGNSTASTTLPIQQRPATATTNKPNGITPAVAEAVPQSKSTSDAKAPKEADPPAPTPAKTEAAKPETEIKPPVPPEPVANASTSKKENSKAVTAPAEEPETKKRTNSIVSQTAILPPPISTTVTTTKSGRASKPSTPATGTFAEAANATTTTARSRPSRNSTNQSDKDSNSTSGKDTFGNSTTTTSGTTTSKRSHKKGASSVSAVAVSVALQDEKPGKSAAASDEKKDAASDENSGRPTTSGRGKGSAAAHRDSKAERGSERDRGGERDTKTETNHGHGHGRRGTATAAAARAQQQQPQHQQRQEEEDDDDDDDDVDADEQRYCFCNGISYGEMVACDGDGCPREWFHLECVGLKVAPKGNAKWYCEDCKKRLRASGR

SEQ ID NO: 18324 - protein, 458 aa, Erwinia carotovora subsp. atroseptica SCRI1043
MANDQQELVLKRGLKNRHIQLIALGGAIGTGLFLGISQTIQMAGPSVLLGYAIAGMIAFLIMRQLGEMVVEEPVAGSFSHFAFKYWGDFAGFLAGWNYWAMFILVGMAELTAVGIYIQYWWPDTPTWLSAAIFFVLINLINLVNVKMFGETEFWFAIIKVLAIVGMIVFGSWLLLSGNGGETATVRNLWIHGGFMPNGASGLIMAMAVIMFSFGGLELVGITAAEAADPKRSIPQATNQVVYRILIFYIGALSILLSLYPWGNVVGGGSPFVLIFQALNSNIVANVLNVVVLTAALSVYNSGVYCNSRMLYGLAKQGNAPKSLAKVNARGVPVRSIALSALATSLGVAINYVMPGKAFELLMALVVSTLVINWIMICFAHLRFRQAMMEKGIVPAFKAFWYPWSNYLCLAFLAGILVIMLLSPGIRISVMLIPFWIAVIWLGFRFSRKTYSPAKIVPR

SEQ ID NO: 18325 - protein, 602 aa, Magnaporthe grisea 70-15
MQRALSSRTRTSALRSSAAAAKFRPGAGLSQQLRFAHKVSCASFGGSQRATELKFGVEGRAALLAGVDTLAKAVSTTLGPKGRNVLIESSYGSPKITKDGVTVAKAITLKDKFENLGAKLLQDVASKTNEVAGDGTTSATVLARAIFSETVKNVAAGCNPMDLRRGIQAAVDAVIEFLHKQKRDITSAEEVAQVATISANGDVHVGKMIANAMEKVGKEGVITVKEGKTLVDELEVTEGMRFDRGFVSPYFITDAKAQKVEFEKPLILLSEKKISAVQDIIPALEISTQTRRPLVIIAEDIEGEALAVCILNKLRGQLQVAAVKAPGFGDNRKSILGDIAVLTNGTVFTDELDVKLEKATIDMLGSTGSITITKEDTIVLNGEGSKDMITQRCEQIRGVMADPTTSEYEKEKLQERLAKLSGGVAVIKVGGSSEVEVGEKKDRFVDALNATRAAVEEGILPGGGTALLKAASQALGDVKSANFDQQLGVSIIKNAITRPARTIVENAGLEGSVIVGKLMDEFGSDFRKGYDAAKGEYVDMIDAGIVDPLKVVRTGLLDASGVASLLGTTEVAIVEAPEEKGPAGGMGGMGGMGGMGGMGGMM

SEQ ID NO: 18326 - protein, 201 aa, Shewanella oneidensis MR-1
MKLLKPLFDNNLRWAGRISQEHPDFFEQLAKQQNPEYLWIGCSDSRVPSNQIIDLMPGEVFVHRNIANMVIHTDLNCLSVLQYAIDVLKVKHIMVVGHYGCGGVRAAMGNQRLGLIDNWLGHLRDVYRLHHDELMQMDEAKRFDRLCELNVIEQVSNVTSSTIVQEAWARGQELAVHGWIYGIDNGLLTDLDVTVDRAQVV

SEQ ID NO: 18327 - protein, 217 aa, Listeria monocytogenes str. 4b F2365
MNDIIHDYLLKNIPKSSPFFEELEAYAKENEVPIMEPDSLYCLLQILDIQKPKRILELGTAIGYSALKMADKLPDAEIITVERDEERYEQAIHNIQRYGANDRVKVLLTDAIEGAEEILAHGPFDAIFIDAAKAQYEKFFHIYTDSLAENGVIYSDNVLFKGLALDMTPEKQRKLRVARKMRHFNDFLVTHPDFETTTIPLGDGLSISKRKKTGGVS

SEQ ID NO: 18328 - protein, 316 aa, Zea mays
ISAFGIRADLVPAYVRLLRDNEAEVRIAAAGKVTKFCRILNPQLSVQHILPCVKELSSDSSQHVRSALASVIMGMAPVLGKDATIEQLVPIFLSLLKDEFPDVRLNIISKLDQVNQVIGIDLLSQSLLPAIVELAEDRHWRVRLAIIEYIPLLASQLGVGFFDDKLGALRMQWLEDKVFSIRDAAANNLKRLAEEFGPEWAMQHIIPQVLEKINNPHYLYRMTILQAISLLAPVMGAEITCQKLLPVVINSSKDRVPNIKFNVAKVLKSLVPILDQSVVEKTVKPCLVELSEDPDVDVRYYANQALQACDQMMVSS

SEQ ID NO: 18329 - protein, 166 aa, Trilisa paniculata
MFPMVTEFMNYGQQTVRAARYIGQGFMITLSHANRLPVTIQYPYEKLITSERFRGRIHFEFDKCIACEVCVRVCPIDLPVVDWKLETDIRKKRLLNYSIDFGICIFCGNCVEYCPTNCLSMTEEYELSTYDRHELNYNQIALGRLPISIIDDYTIRTILNLPEIKT

SEQ ID NO: 18330 - protein, 292 aa, Arabidopsis thaliana
KDPLAQLSLPPGFRFYPTDEELLVQYLCRKVAGYHFSLQVIGDIDLYKFDPWDLPSKALFGEKEWYFFSPRDRKYPNGSRPNRVAGSGYWKATGTDKIITADGRRVGIKKALVFYAGKAPKGTKTNWIMHEYRLIEHSRSHGSSKLGDWVLCRIYKKTSGSQRQAVTPVQACREEHSTNGSSSSSSSQLDDVLDSFPEIKDQSFNLPRMNSLRTILNGNFDWASLAGLNPIPELAPTNGLPSYGGYDAFRAAEGEAESGHVNRQQNSSGLTQSFGYSSSGFGVSGQTFEFRQ

SEQ ID NO: 18331 - protein, 153 aa, Methanosarcina mazei Go1
MSKMSDLANQRRLASKVLECGLDRVWLNPEASEEIASAITREDIRGLIEKGVIKAKPVKGVSRGRARALAAKRKYGHCKGHGSRKGKKGARTPKKEQWMKKIRALRRRLKELRADGALDKSVYCRLYRKAKGGEYRSVSHLNSHLESEKLLQK

SEQ ID NO: 18332 - protein, 165 aa, Zea mays
GRLQVPVRNSRVDPRVRFAVESIRKKRVRKGKVEYLVKWKGWPPKYSTWEPEEHILDPRLVMAYEEKEERDRASGYRKRGPKPRRLLLQESAAPDVVQTPGDWEPMEQAPEEEAEADLTNGPPPWTPTLPSSEVTVTDITANSVTVTFREAQAAEGFFRDRNEKL

SEQ ID NO: 18333 - protein, 481 aa, Vibrio parahaemolyticus RIMD 2210633
MSKGMTMQQIQNQSLVSFMVANPQQGIAVTNPATGELLGYAPVSTENDILNSIERAHVAQKEWSALPAKTRAGMLNRWFQLLLENKADLGRLMTLEQGKPLAEAQGEVLYGASFIEWFAEEAKRTYGETIPAPSADKRLVTIKQPIGVACAITPWNFPIAMITRKAAPALAAGCSFVVKPSESTPLSAFAVAELAYQAGIPRDVLQVVLGENSRQVGAIFTSHPLIRKLSFTGSTQVGRVLMQQSAADIKRTSMELGGNAPFIVFDDADIDAAVAGAMASKFRNAGQTCVCANRFYVHSKVYDEFVAKFDAAVQQLKVGNGLEEGVNIGPVISESAKQGIQALIDGAIEQGAKPVSALKELDGLFMQPVVLKGVTHDMKIVSEEIFGPVAPVIRFDSDEQLIEMANDTIYGLASYFYSQNIHRVWKIAEALEYGMVGINEGMISTEVAPFGGVKQSGIGREGAKQGIDEYMDVKYLCFGGN

SEQ ID NO: 18334 - protein, 360 aa, Vibrio parahaemolyticus RIMD 2210633
MKLSTTPAQDGFYFPAEFQPVSEVWLAWPERKDNWRDDALPAQETFARIANLIAEVTKVCVAVCSHNFDRARQMLHSDVRLVEIPFNDAWMRDIGPTVLVNQAGERRGISWQFNAWGGEYNGLYDNWQQDDLVAGSVCDIIGIDYYRAPFVLEGGAIHTDGEGTLYTTEECLLSPGRNPQLSKAQIEEQLKVYLGIEKIIWLPNGLFNDETDGHVDNLMHVIAPGKVVLSWTDDPSDPQYALSRQAEQVLKSQHDAKGREIEIVRLPLPGPLHYSEREANGIDASSGMSRQAGERLSASYANFLIVNGHVFLPMLDEDTDAIAIDILQNAMPEYQIIAIPSREVLLGGGNIHCITQQIPA

SEQ ID NO: 18335 - protein, 769 aa, Staphylococcus aureus subsp. aureus MRSA252
MDIGKKHVIPKSQYRRKRREFFHNEDREENLNQHQDKQNIDNTTSKKADKQIHKDSIDKHERFKNSLSSHLEQRNRDVNENKAEESKSNQGSKSAYNKDHYLTDDVSKKQNSLDSVDQDTEKSKYYEQNTEATLSTNSTDKVESTDMRKLSSDKNKVGHEEQHVLSKPSEHDKETRIDFESSRTDSDSSMQTEKIKKDSSDGNKSSNLKSEVISDKSNSVPILSESDDEVNNQKPLTLPEEQKLKRQQSQNEQTKTYTYGDSEQNDKSNHENDLSHHTPSISDDKDYVMREDHIVDDNPDNDINTPSLSKIDDDRKLDEKIHVEDKHKQNADSSETVGYQSQSSASHRSTEKRNMAINDHDKLNGQKPNTKTSANNNQKKATSKLNKGRATNNNYSAILKKFWMMYWPKLVILMGIIILIVILNAIFNNVNKNDRMNDNNDADAQKYTTTMKNANNAVKSVVTVENETSKDSSLPKDKASQDEVGSGVVYKKSGDTLYIVTNAHVVGDKENQKITFSNNKSVVGKVLGKDKWSDLAVVKATSSDSSVKEIAIGDSNNLVLGEPILVVGNPLGVDFKGTVTEGIISGLNRNVPIDFDKDNKYDMLMKAFQIDASVNPGNSGGAVVNREGKLIGVVAAKISMPNVENMSFAIPVNEVQKIVKELETKGKIDYPDVGVKMKNIASLNSFERQAVKLLGKVKNGVVVDQVDNNGLADQSGLKKGDVITELDGKLLEDDLRFRQIIFSHKDDLKSITAKIYRDGKEKEINIKLK

SEQ ID NO: 18336 - protein, 491 aa, Methanosarcina mazei Go1
MTLRDTLEPFFNKLPAVASPEKHVHFKDKLWWTLGILVLYFALANVPLFGMSQDSIDLFESYRAFFAGASGTLVLLGIGPIVTASIVLQLLVGADIIKLDLSDPRDQSFFQGSQKFLVFVMIILEALPQLLGGYIQPDPGLASTLGVGLGVITLLLLVQIFIGGVLVLFMDEVVSKWGIGSGVGLFIVAGISQQIVTGIFNWEMENGLPVGLIPKWIYIAQNTDAGYLLSGEGLLFMLVSGGILALLSTIAIFLLVVYVESTRIEIPLAHSAVRGARGRFPVKLIYASVLPMILVRALQANIQMVGIILSGRGITFLGEFSGSTPLNGIMYYLSPINSPYDWIPSLVQQSFASYGATAPAMWQIALHVFIDATFLIAGGIIFALFWIETTGMGAKQTAQKIFNSGMQIPGFRRNISSIEKVMQRYIPKVTVIGGAFIGLLTLIASLLGTLGSAGGTGLLLTVSIVYRLYEDIASEQMMEMHPMIRSFFGEQ

SEQ ID NO: 18337 - protein, 360 aa, Brassica napus
  misc_feature (68)..(68): Xaa can be any naturally occurring amino acid
  misc_feature (261)..(261): Xaa can be any naturally occurring amino acid
  misc_feature (273)..(273): Xaa can be any naturally occurring amino acid
  misc_feature (300)..(300): Xaa can be any naturally occurring amino acid
  unsure (1)..(360): unsure at all Xaa locations
CLTPRILSPNGFLSLATKFTTRGYRLLCAIAMARSAVDETSDSGAFQRTASTFRNFVSRDSNSQFPAXESGRYHLYISYACPWASRCISYLKIIGLDDAISFSSAVPPCGGAKESDEHMGWVFPDSDNEVEGAEPDHLNGAKSVRDLYEIASPNYTGKYTVPVLWDKKLKTVVNNESAEIIRMFNTEFNHIARNPDLDLYPSHLQAKIDEANEWIYSGINNGVYRCGFAKKQEPYEEAVQQVYEALDRCEEILGKHRYILXGTPLTETDIRVXVTLIRFDEVYAVHFKCTKKLLREYPNXLFTSPKYIFQVPGMSSPVTMNHIKQHYYGRPPFYLTLLGIIPHGPNIDYSSPHDRHRFSK

SEQ ID NO: 18338 - protein, 386 aa, Campylobacter upsaliensis RM3195
MLLEIYNKFELTLARGEGVHLYDDEDREFLDFASGIGVCALGYNHKLFNEALKRQIGQILHTSNLYHNKEVQKAARNLAKVSKLHRVFFTNSGTESVEGAMKVAKKYAFNKGIKNPSFIAFKNSFHGRTLGALSLTANEKYKKPFKPLISGIKFATFNDLESVKKLLNEKTCAIVLESVQGEGGINPATPEFYKGLRKLCDERDLLLISDEIQCGMGRSGKYFAYEHSQIVPDVAVFAKALGCGVAVGAFGVSEKVAQNSLKAGDHGSTYGGNPLACAAVNAVFEIYAKEKILSRVAKLTPYLEKALYELTSEFDFCEERRGLGFMQGLSLNHKIKVADVLKKCRENHLLLLSCSKNDLRFLPPLIIEKEHIDVMAEKLRKVMRSF

SEQ ID NO: 18339 - protein, 136 aa, Glycine max
  misc_feature (119)..(119): Xaa can be any naturally occurring amino acid
  unsure (1)..(136): unsure at all Xaa locations
MARYGEGDKRWIVEDRPDGTNVHNWHWSETNCLDWSKTFFSNLLSNLPILHGEANLFLKTTSLRSLDGEAYVNVRKGKIIPGYEISLTLNWQGEAKDSQGTSLLKVDGTVEIPYICDEXADEDPEVRVTVNDEGPD

SEQ ID NO: 18340 - protein, 370 aa, Cryptococcus neoformans var. neoformans B-3501A
MTLEKDEAIPVTCFTGFLGAGKTTTILSLIQQLPKEYKVVLLKNEYGDVEVDSVLASQSNITGVSEILNGCLCCTSVGLISNALMEVKSTMKPDRIIIESSGSAFPATLALQIKELEPEGFKLDGVVTVVDCVNFEGYEDSSPSAKLQAKYTDLILLNKHHLPNPRQFDTLLDRLNDLNDETPKLRIGPAPSNPPKPEVIFGLDSKLWSVKDGERKDWGEMATREGWHGDEVEVKGVYKGKKPKHEHKRVGGKGEGKECGDCQKPEVEENVGPVEPIERELLEKELSKLSYEIYRVKGIVRFMSPSNPSKAFDTYILNYAFSRYTLTPAPSLDDDPALEGVSIRLTVMGERGEVARRARRFGEAIGAMME

SEQ ID NO: 18341 - protein, 591 aa, Arabidopsis thaliana
MTMMSDLSLDLVEEILCRVPITSLKAVRSSCKLWNVLSKNRILCKTEARNQFLGFTIMNHRLYSMRFNLHGIGLNENSEEFIDPSIKPIGNLLNQVEISKVFYCEGLLLCVTRNHSSKLVVWNPYLGEIRWIKTRNDYHIGVTYALGYDNNKNHMILRFFSEQGYYEIYDMNSSDSWDCFYGIPNKGLKCYQPGASLNGNAYFLTEGREVMEGYDCLLGFDFTTKKFGPLLSLSFSHDFIETGRLSCVKGEKLAVLYQRCYTYEMEVWVTTKIEPNAVSWSKFLAVEMEPLTSLKFNDDSGSFFIDEEKKIVVVFDIDESERNNTAYIIGDYGCLKEVDLDEVVNPQESVEVGDRIYSFSPFVCSCSYVPSLVKFKEDAEHERKDKKRKSKRKRTNKDGYDFILCFDFTTERFGQILPLPFKHSFRDTWTLSSVKEEKLAVAVLYWKNTCVMIEIWMTIKIDPNVESWSKFLRVDRKPCIDLRFDDRNDSFFIDEEKKVVVFFSSDKVKTSTAYVIGDNRYLRTVDLEKAANSQESVEVGERVYCFSPLVCSCSYYVPSLVKINHNAGRKRKEKKTKRKSKDKQMKLSNKV

SEQ ID NO: 18342 - protein, 369 aa, Gloeobacter violaceus PCC 7421
MVALVVKIGTSSLSDPSTGDLRLATLGGLAETLTRLRRAGHRIILVSSGAVGVGCARLGLKERPATVAGKQAAAAVGQGLLMSMYDRLFGALGQPVAQVLLTRQDLMDRVRYLNARETLSELWRLGTVPIVNENDTVATDELRFGDNDALSALVAGLVEAQWLVLLTDVAGLYSANPRLDPQARLLSEVTEISEELLQSARGRSLWGSGGMASKLEAARIAASAGVATVITEGNTPQNIERILAGEAIGTRFALARPGGRLSLRKRWIGYGLVPAGALHLDEGAVLAVREGGKSLLPAGVRGVEGRFETGALVRLIDGQGLEFARGLVNYSSEELEKIRGRKSHEIAALLGIEGQPPTAVHRDNLVTLS

SEQ ID NO: 18343 - protein, 227 aa, Brassica napus
  misc_feature (131)..(131): Xaa can be any naturally occurring amino acid
  misc_feature (207)..(207): Xaa can be any naturally occurring amino acid
  unsure (1)..(227): unsure at all Xaa locations
IFLSLLKDEFPDVRLNIISKLDQVNQVIGIDLLSQSLLPAIVELAEDRHWRVRLAIIEYIPLLASQLGVGFFDDKLGALCMQWLQDKVHSIREAAANNVKRLAEEFGPEWAMQHIVPQVLEMISNPHYLYXMTILRAVSLLAPVMGSEITCSKLLPVVMTGAKDRVPNIKFNVAKVLQSLIPIVDQSVVEKTIRPGLVELSEDPDVXDGRFFANQALQSIDNGMMSS

SEQ ID NO: 18344 - protein, 497 aa, Chlamydia muridarum Nigg
MMKRLLCVLLSTSVFSSPMLGYSAPKKDSSTGICLAASQSDRELSQEDLLKEVSRGFSKVAAQATPGVVYIENFPKTGSQAIASPGNKRGFQENPFDYFNDEFFNRFFGLPSHREQPRPQQRDAVRGTGFIVSEDGYVVTNHHVVEDAGKIHVTLHDGQKYTAKIIGLDPKTDLAVIKIQAKNLPFLTFGNSDQLQIGDWSIAIGNPFGLQATVTVGVISAKGRNQLHIVDFEDFIQTDAAINPGNSGGPLLNIDGQVIGVNTAIVSGSGGYIGIGFAIPSLMAKRVIDQLISDGQVTRGFLGVTLQPIDSELAACYKLEKVYGALITDVVKGSPAEKAGLRQEDVIVAYNGKEVESLSALRNAISLMMPGTRVVLKVVREGKFIEIPVTVTQIPAEDGVSALQKMGVRVQNLTPEICKKLGLASDTRGIFVVSVEAGSPAASAGVVPGQLILAVNRQRVSSVEELNQVLKNAKGENVLLMVSQGEVIRFVVLKSDE

SEQ ID NO: 18345 - protein, 264 aa, Solanum tuberosum
MAELREKWCLKGTTALVTGGSKGIGYAIVEELANFGARVYTCSRNENELQECLDIWRKKGLKVEGSVCDLLSRTEREKLMKTIEDVFDGKLNILVNNAGVAIHKEAKDFTKEDYNIIMGTNFEAAYHLSQIAYPLLKASQNGNVIFVSSIAGFSALPSLSLYSASKGAINQMTKNLACEWAKDNIRVNSVAPAVILTPQIETAIKKNPQQKEEIDSIVVKTPLGRAGKPEEVSAVIAFLCFPAASYITGQIIWADGGFTANGAF

SEQ ID NO: 18346 - protein, 310 aa, Triticum aestivum
MARHFLLNTGAKIPSVGLGTWQADPGVVGAAVYAAVKAGYRHIDCARVYGNEKEIGLALKKLFEEGVVKREDLFITSKLWNDHHAPEDVPEALNESLNDLQLDYLDLYLIHWPFRVKKGTNNNPENIVTPDIPATWAAMEKLHDAGKALAIGVSNFSSKKLGDLLDVARVPPAVNQVECHPCWQQTKLHNFCQSTGVHLSAYSPLGSPGTSWMNGNVLEEPIIISIAEKLRKTPGQVALLWNIQMGHGVLPKSTNPERIKQNLDVYDWTFPADMLAKFSEIKQARLLRGNMMINPQSVYKTYEELWDGEI

SEQ ID NO: 18347 - protein, 403 aa, Staphylococcus aureus
VITGMGALSPIGNDVKTTWENALKGVNGIDKITRIDTEPYSVHLAGELKNFNIEDHIDKKEARRMDRFTQYAIVAAREAVKDAQLDINENTADRIGVWIGSGIGGMETFEIAHKQLMDKGPRRVSPFFVPMLIPDMATGQVSIDLGAKGPNGATVTACATGTNSIGEAFKIVQRGDADAMITGGTEAPITHMAIAGFSASRALSTNDDIETACRPFQEGRDGFVMGEGAGILVIESLESAQARGANIYAEIVGYGTTGDAYHITAPAPEGEGGSRAMQAAMDDAGIEPKDVQYLNAHGTSTPVGDLNEVKAIKNTFGEAAKHLKVSSTKSMTGHLLGATGGIEAIFSALSIKDSKIAPTIHAVTPDPECDLDIVPNEAQDLDITYAMSNSLGFGGHNAVLVFK

SEQ ID NO: 18348 - protein, 389 aa, Burkholderia fungorum LB400
MWQLSERARKLTSSAIREILKVTERPEVISFAGGLPSPATFPAERMRAAADRILRDEPAAALQYSATEGFAPLREWIAKRYSVNGAQIRASQVLITTGSQQALDLLGKVLVCPDSPVLVETPTYLGALQSFSMYEPRYVQVPTDEHGLIPEALTPELTAGARLLYAQPNFQNPTGRRLPIERRRALAQFAKTAPFPVIEDDPYGALDYAGEPLPTMLSMAPDHIVHLGSFSKVLAPGLRVGYIIAPEELIFKLVQAKQATDLHTPSFTQRIVYEVIKDGFLDTHVPTIRELYRNQCAAMLASLERYMPEGVSWNRPEGGMFVWVNLPAQIDSMKLLEEAVAQNVAFVPGGPFFANEAQHNTLRLSFVTVPPARIDEGVSRLAALIRAKI

SEQ ID NO: 18349 - protein, 279 aa, Triticum aestivum
  misc_feature (252)..(252): Xaa can be any naturally occurring amino acid
  unsure (1)..(279): unsure at all Xaa locations
LYRTSLYKKAGWYRSGIPGISSTHASGDVKRIVVKVGTAVVTGQNGRLAMGRLGALCEQVKELNFQGYEVILVTSGAVGVGRQRLKYRKLINSSFADLQNPQLDLDGKACAAVGQSGLMAIYDTLFSQLDVTSSQLLVTDRDFRDPSFGHQLRETVVSLLDLKVIPVFNENDAISTRRAPYEDSSGIFWDNDSLATLLAKELDADLLIMLSDVEGLYSGPPSDPQSKIIHTYINEKHRKLIIFGENPRVGRXGGMQPKMAPAVTAALKAVPCCKLQGNL

SEQ ID NO: 18350 - protein, 292 aa, Triticum aestivum
  misc_feature (183)..(183): Xaa can be any naturally occurring amino acid
  unsure (1)..(292): unsure at all Xaa locations
MARHLALNTGGTIPSVGYGTWQSKPDEVGQSVYAAVKAGYRHIDCARAYRNEDEVGLALQKLFEEGVVKREDLFITSKLWHDHHAPEDVPESIDRSLNDLQLEYLDLYLIHWPFRLKKGTDASNPENFVRPDIPATWGAMEKLYDTGKARAIGVSNFSTKKLGDLLDVARVRPAVNQVESHPXYSPLGSPGTPWMNSNVLQEPVITSIANKLGKTPPQVALRWNIQMGHSVLPKSLNEERIKQNLDVYDWSIADDLLAMISEIKQVRQFRGDFTINQQSVYKTLEELWDGEI

SEQ ID NO: 18351 - protein, 366 aa, Oryza sativa
FRHLFICVSAGLWAGLVIGYVTEYFTSNAYGPVQTVAQSCRTGAATNVIFGLAVGYKSVIVPIFAIAGAIYASFRLAAMYGIALAALGMLSTIATGLTIDAYGPISDNAGGIAEMAGMPRRVRERTDALDAAGNTTAAIGKGFAIGSAALVSLALFGAYVSRAGIRTVNVVSPRVFVGLLAGAMLPYWFSAMTMRSVGSAALRMVEEVRRQFDEIPGLAEGLAAPDYATCVRISTDASLREMVAPGALVMASPLVAGTLFGVEALAGLLAGALVSGVQVAISASNSGGAWDNAKKYIEAGATEEARSLGPKGSEAHKAAVIGDTIGDPLKDTSGPSLNILVKLMAVEALVFAPFFAAHGGIVFYPL

SEQ ID NO: 18352 - protein, 566 aa, Cryptococcus neoformans var. neoformans JEC21
MNLFCMTFLGTEHCLLRPGRSITTTNEIDPVLVITRYPQLGIFSFHPEIFPVTSKYLSPAQLPQRTLLYILPLFSWTTLLALPSHLTSTSTTQTAMYGQQNNYGTPPPQQWGQAPPQGYQPGYQNGPPAATYGAHPSQQQQWGAPPGPPQHQPYGAPPANQYGAPPQHQQGYGGHSPQPPFGAPSPAPAGYGVPPIAPPQGQYGASSPYPQQPPQQGFGGPQQGYGSQPQGQGPMMYLGVPIPAPPPAVPVSTLAGYDARFDAERIRKATKGFGTDERTIIDTLSPLDAFQMDVLSRTYEQTVGRSLKTTLEKELSSWLEYTLVLLSLGPLGGDVYLLHRACKGMGTHEDLLNEVLLGRTNQEIFLLKEAYRRTYNKDLVQIVQGELSMKTERMFNMALSGQRDESPYLNHQLVQQDVETLYRAGPGKIGTDEIAICGILISRSKEHLKAIAQAFPARHRVSLSQMIKSEFSGHMCDALFFIARGVEADGDGVVRDCELLHAAMAGMGTKDERMIYRLVRNHWNRARFNAIKNQYQVLYRNSLRRAVEGETTGKYEKALVGIIEQN

SEQ ID NO: 18353 - protein, 346 aa, Pediococcus pentosaceus ATCC 25745
MALTMAIIGFGKSANRYHIPYIKERDIKIKYIYNHRRHREKEQGFYDADTIFTDKLDQVLNDSEVQLITICTPPATHFEYGKLVLEHGKNVLIEKPFVANQGEAKELFALAQSKKLLAMPYQNRRFDSDYLTLKKVIELGYVGKPLSLESHFDKYRPDDRLHEGSQVDGQFYGLGVHMLDQILGLFGKPQTVSYDIRAIQNSASTVDDFYETQLFYDNFKATVVSNPLAARPYPRFLLHGTNGTYVKYDIDQQENDLKLGIMPGDLNFGIDTPSQFGVVKYKNQNGDWIEKQIPTINGDYGRVYDSIAKTLTNRDAKLVSDEQALWNMEILEAGITEKGPHLYNLK

SEQ ID NO: 18354 - protein, 568 aa, Cryptococcus neoformans var. neoformans JEC21
MHDDGAGRCGTRTEHCLLRPGRSITTTNEIDPVLVITRYPQLGIFSFHPEIFPVTSKYLSPAQLPQRTLLYILPLFSWTTLLALPSHLTSTSTTQTAMYGQQNNYGTPPPQQWGQAPPQGYQPGYQNGPPAATYGAHPSQQQQWGAPPGPPQHQPYGAPPANQYGAPPQHQQGYGGHSPQPPFGAPSPAPAGYGVPPIAPPQGQYGASSPYPQQPPQQGFGGPQQGYGSQPQGQGPMMYLGVPIPAPPPAVPVSTLAGYDARFDAERIRKATKGFGTDERTIIDTLSPLDAFQMDVLSRTYEQTVGRSLKTTLEKELSSWLEYTLVLLSLGPLGGDVYLLHRACKGMGTHEDLLNEVLLGRTNQEIFLLKEAYRRTYNKDLVQIVQGELSMKTERMFNMALSGQRDESPYLNHQLVQQDVETLYRAGPGKIGTDEIAICGILISRSKEHLKAIAQAFPARHRVSLSQMIKSEFSGHMCDALFFIARGVEADGDGVVRDCELLHAAMAGMGTKDERMIYRLVRNHWNRARFNAIKNQYQVLYRNSLRRAVEGETTGKYEKALVGIIEQN

SEQ ID NO: 18355 - protein, 160 aa, ASPERGILLUS NIDULANS FGSC A4
MATELTVQSERAFQKQPHIFLNPKTKAKSKKVGQTRRWYKDVGLGFRTPKTAIEGSYIDKKCPFTGMVSIRGRILTGRVVSTKMHRTIIIRREYLHYVPKYNRYEKRHKNLAAHVSPAFRVEEGDWVTVGQCRPLSKTVRFNVLRVLPRTGKAVKAFSKF

SEQ ID NO: 18356 - protein, 92 aa, Alstroemeria hybrid cultivar 'Samora'
AKIQDKEGIPPDQQRLIFAGKQLEDGRTLADYNIQKESTLHSVLRLRGGMQIFVKTLTGKTITLEVESSDTIDNVKAKIQDKEGIPPDQQRL

SEQ ID NO: 18357 - protein, 1653 aa, Saccharophagus degradans 2-40
MNKSSFNYLTRNSKWLIPTFAAIVLLTLAIAVDRVIYSRFALEERTAVHNEASKLRASIESTINSNLQAVQGLVLVLNAFPEPSQEEFASFAAPLFNQNTQLRNIAAAPGMVIKYMHPLEGNEAAIGLDFRATPAQKEAAERAERTGQLVLAGPVNLKQGGQGFIGRIPVFTYNKQNNTKSSWGLLSTVIDLDRFYSATGITQFNETLQLALRGKDAKGAQGQVFYGDEALFHADAVLLEVSVPSGSWQLAILPKQGWANSAEDSALLRIILLLIILAILIPIIISVNLLANRHDSDLKFRGLFELSPVGIALNRFTDGKYVETNTALENMLGYSADELHGKTYLEITSPVYEDHQKAVINSLKNYGRYGPYEKEFIRRDGTLLPVIMNGMLVTDSNGEKLIWSIVEDITSRKQAELALAQNRKQLEQIIDSTSVAIWDWNIVTGEIVINERWAEIIGYSLMDLEPVSIDTWTNFTHPEDLDKSSELLNAHWNGESNHYQCEARMHHKDGHWVWVLDSGKVIEWTSEGKPLRMVGTHLDITEQKESQRLIEQSQIELKNFFDLSPNFMCIIDREGFFERINDTFLSQLDFTRDDFFSCKYIDFVHPDDREITQDHFEKMKSGALTQVFTNRYMHSNGDYLYLQWYTFADPASGMVYTTALDITNQKLDEKRMARQQEMLLSMSEQGRIGAWEVNLEEQQMYWSTMTKDIHEVDANYTPHYESAIDFYKEGESRDTISRLLNLAINKGIPASIELPIITAKHNERWVSVTVQPEFRNKQCIRLFGSIQDIDARKRIEQGVQLANTKLEKQMTLVNAIAAAQASFIQQTDIAIAFRNLLDGVLELAESEYGFVSEILYTEKNEPYIRTHAIANRSTHDRYNAFFAAQGENPIEFFNLDSLLGAAVTSCKPVIANSPTTDSRRAGVPDGHPQLESYLGIPIILNGSIIGLIGLANNPNGYNQALVDWLAPLINTVGQMIENTRAIRERDNAQQALVKAKNAAELAARTKSEFLAMMSHEIRTPLNGVLGMLNLVKRTQLEDKQRYQIDIAKSSAESLLNLINDILDFSKVDAGKLDLEVVDFNIITLLEDIAHAMAGRALERGNELIIDTTKLEFTYLSGDPSRLRQILVNLIGNAIKFTQNGEVTVTASLTKNTSGFNLNISVADTGIGIAEEKIPLLFSAFTQVDASTTRKYGGTGLGLAICKKLCALMGGDINITSQEGNGSEFSFQILVKNSVKNIDLPPLIEQKVDLNDKTIFIAESNPKNTAILENMISSKRCIAVSSLPDSNLNLPNEPIDVAFIDRKLLTSMESITPLKNKPNFANTQWLMLTAINQTKDIENYTAKGFDTYLTKPITQSGLTLSLKSLKLDSNQAESEQQQTSEKLTLPQSPQGEASQFAARILLVDDNTVNQDVAKMMLEDFGLIIDVANNGLEAIAALDACSIREPYSLILMDCQMPELDGYETTKRIRKGATDFDNTKIPIIAMTANAMKGDKEKCIAAGMDDYLSKPIEADALEHMLKLWLPLHNFSQDSNTQATSQHPQVVEGFWQHDELLATLKGREDRLKILVASFTKRIPALLEEFEEATASNDLEALSFIAHSVKGSAGQLKCNLLFVCASELELTAKNGDLTTALELSQNFKQYTLDFYNLLNKYLA

SEQ ID NO: 18358 - protein, 422 aa, Streptomyces sp. 275
MRRRVVVTGLGLVAPGASAPRPSGNSSAPGGRPPGRSPCATPPRSVPGSLPSATSTRSCTDSHPKRSAAWTGPPSSPPPPRHEAVAEAGLRFEDLDPHRTGVTVGSAVGCTTSLEREYATVSNGGRAWLVDHTYAVPHLYGHFVPSSMAAEVAWRVGAEGPVGVVSTGCTSGLDAVAHARELILEGSADIMVAGATDAPISPITLACFDAIKATTPRNDDPEHASRPFDATRNGFVLGEGAAMFVLEEHGHAVRRGARVLAELSGFASRCNAFHMTGLRPDGREMAEAIRGALTEAGARPDDIDYVNAHGSGTKQNDRHETAAFKAALGESAYRTPVSSIKSMVGHSLGAIGAIEIAACVLALRHGVIPPTANLHEPDPECDLDYVPLTSRRADLATVLTVGSGFGGFQSAMVLSRPGEHAA

SEQ ID NO: 18359 - protein, 166 aa, Brassica napus
YDNGVDNVSSPKHYVVWNMNMNTHVYPEFVVSFKLLSIPNAEGNLLSAAQSKHESSELTLEGAKGSLSNELGSGNKSTGSRTRRPSSNLMPYSLLFKAISSKIAQKDMDLITAYYQQLREKKISREGFSKKLRMIVGDDHLLKTTITALQRLPHTAVKMELITGGC

SEQ ID NO: 18360 - protein, 346 aa, Polaromonas sp. JS666
MNTITFTKDPVDALLKDGLKNLWYPICPSGFVGERPISLRRLGKKIALWRDAAGTLHALEDHCPHRGAPLSQGMVLGDRLACPYHGVEVRCDGTVTKVPGSPGCKLEGTRAALSFHVQEAWGAIFLYNSDVNIDTPPPMTMPEELNSPEYSHFLCYAEWKGDYRYALDNVMDPMHGTFLHKQSHSMAEGESTATFQIRTTDTGFVFEKTGQRGVNFDWTEWGSTGVHWMRLEIPYPKSGGPGGNFAIVGCATPVDGNTTAVFFWRCRKVSSWQRDTWRFLYRNRLEARHWAVLEQDRIMLEQMEPDANQHENLYQHDIGVVRLRRHLRNLAEEQLEAAAAKAGNPA

SEQ ID NO: 18361 - protein, 404 aa, Shewanella oneidensis MR-1
MRPIIKSNKLDTVCYDIRGPVHKEARRLEDEGHRILKLNIGNPAPFGFEAPEEIVRDVILNLPSAQGYCESKGLFSARKAIVQHYQAQGIYDVDIEDVYIGNGVSELIMMAMQGLLNTADEILIPSPDYPLWTAAANLAGGKAVHYRCDEEADWFPDLDDIKSKISSRTRGIVLINPNNPTGAVYSKELLLQVVELCREHNLILFADEIYDKILYDEAKHIPAASLSDDILTVTFNGLSKAYRAAGFRIGWMMLSGNLKAAKSYIEGLDMLASMRLCANVPNQHAIQTALGGYQSINELILPSGRLTVQRDTCYELLNQIPGVSVKKPKGALYAFPKLDMKKFNLRDDERLVLDLLRDKKILLVHGTAFNWPEPDHLRVVFLPYKEDLTKALTEFGNFLETYKQ

SEQ ID NO: 18362 - protein, 164 aa, Ralstonia metallidurans CH34
MSNVYQFEANSLSGQPQPLADYRGKVLLIVNTASECGFTPQYAGLQTLQASYQARGFDVLGFPCNQFGKQEPGDAEQIGAFCESRFHVTFPMFEKIDVNGADAHPLYKWLTSEKRGFLGTQAIKWNFTKFLLRRDGTVFKRYASTTKPEEIRADIESLLAEQPA

SEQ ID NO: 18363 - protein, 236 aa, Shigella flexneri 2a str. 301
MGYRSIDTAAAYKNEEGVGKALKNASVNREELFITTKLWNDDHKRPREALLDSLKKLQLDYIDLYLMHWPVPAIDHYVEAWKGMIELQKEGLIKSIGVCNFQIHHLQRLIDETGVTPVINQIELHPLMQQRQLHAWNATHKIQTESWSPLAQGGKGVFDQKVIRDLADKYGKTPAQIVIRWHLDSGLVVIPKSVTPSRIAENFDVWDFRLDKDELGKIAKLDQGKRLGPDPDQFGG

SEQ ID NO: 18364 - protein, 349 aa, Arabidopsis thaliana
MAHATFTSEGQNMESFRLLSGHKIPAVGLGTWRSGSQAAHAVVTAIVEGGYRHIDTAWEYGDQREVGQGIKRAMHAGLERRDLFVTSKLWYTLILRKMINLSSPLMNVLVGTCLNKRCTELSPERVRPALQNTLKELQLEYLDLYLIHWPIRLREGASKPPKAGDVLDFDMEGVWREMENLSKDSLVRNIGVCNFTVTKLNKLLGFAELIPAVCQMEMHPGWRNDRILEFCKKNEIHVTAYSPLGSQEGGRDLIHDQTVDRIAKKLNKTPGQILVKWGLQRGTSVIPKSLNPERIKENIKVFDWVIPEQDFQALNSITDQKRVIDGEDLFVNKTEGPFRSVADLWDHED

SEQ ID NO: 18365 - protein, 455 aa, Methylobacillus flagellatus KT
MWSENTWRSLCCLICNQSTIHDSRMMKPSKVTLTFDDGSAPIELPILPGKLGPSVIDIRSLSKHGYFTYDPGFLSTASCDSNITFIDGEEGLLFYRGYPIEQLAEHSDFMEVSYLLIYGELPNAEQKEKFTNTITRHSMVHDQLTHIFRGFRRDAHPMAVMVGVVGSMSAFYHEAIDVSDPRNREFAAHRLLAKVPTIAAWSYKYNVGQPFMYPKNRFNYAENFMHMMFATPCEDYEPNPVLAKAFERILILHADHEQNASTSTVRLAGSSGANPFACVAAGIASLWGPAHGGANEATLKMLEEIGDISRIGEYIKRAKDKTDSFRLMGFGHRVYRNMDPRAAIMRQTCHQVLDELGLNDDPMFKLALELEKIALEDEYFVSRRLYPNVDFYSGIVMRAMGIPNSMFTAIFALARTVGWVAQWNEMMSDPGSKIGRPRQLYTGPERRDFLPLDQR

SEQ ID NO: 18366 - protein, 166 aa, Melampodium leucanthum
MFPMVTEFMNYGQQTVRAARYIGQGFMITLSHANRLPVTIQYPYEKLITSERFRGRIHFEFDKCIACEVCVRVCPIDLPVVDWKLETDIRKKRLLNYSIDFGICIFCGNCVEYCPTNCLSMTEEYELSTYDRHELNYTQIALGRLPMSIIDDYTIRTILNLPEIKT

SEQ ID NO: 18367 - protein, 503 aa, Polaromonas sp. JS666
MTSAALKNTRLVVALLAAGAMGGASVSALNALHGSAVAAPTSAAVATTGSVASTPVALPDFSRITERHGPAVVNISVTGTTKVSSGSPLAQGDGDDDDDALAGDPFFEFFRRFQQGQGRQGRGGQQEVPTRGQGSGFIVSSDGIILTNAHVVRDAREVTVKLTDRREFRAKVLGADPRTDVAVLRIAASNLPVVTLGKTSELKVGEWVLAIGSPFGFENTVTAGVVSAKGRSLPDDSTVPFIQTDVAINPGNSGGPLFNARGEVVGINSQIYSRSGGYQGVSFAIPIDIAARIQKQIVANGKVEHARLGVAVQEVNQTFADSFKLDKPEGALVSTVEKGSPAEKAGLQSGDVVRKVNGQPIVSSGDLAALIGLAAPGDTVKLDVWRQGSAKEITARLASADEKSAQAAGKKDSPSQGKLGLALRPLQPDERQEAGLDSGLVVQQASGPAALAGVQAGDVLIAINGTPVRNVEQVRSVVAKADKSVALLIQRGDSKIFVPVNLG

SEQ ID NO: 18368 - protein, 243 aa, Helianthus annuus
ARAPIGNNPDQFYNNLLQGVSGITQIEAFDCSSYPTRIAGEIKNFSTDGWVAPKLSKRMDRFMLYMLTAGKKALADAGISPSDSDEIDKSRCGVLIGSAMGGMKVFNDAIEALRVSYRKMNPFCVPFATTNMGSAMLAMDLGWMGPNYSISTACATSNFCILNAANHIIRGEADMMLCGGSDAVIIPIGLGGFVACRALSERNTDPAKASRPWDSGRDGFVMGEGAGVLLLEELEHAKKKGAK

SEQ ID NO: 18369 - protein, 468 aa, Bradyrhizobium japonicum USDA 110
MEAARVFDSKPNSAEARDIAFHLHSQTNPQRHAEIGPLIMARGEGVHVYDASGKRYLEAMAGLWCTSLGFSETRLKAAAATAYDKFGFYHSFNHKTPDNTIELAEKLVEISPIPDAQAYFATSGSEATETMVKLAWVYHAVRGKPGKRKIIARDRGFHGSTIVAASMCGLPRMHREFGLPLDGFLHTHCPDAYRGTRPGESEAAFVDRLAADLEALIMAEGPDTIAAFIGEPINAGGGIVVPPKGYFAAIEAVLRRHDILVLGDEVVCGFGRTGNWFGCETVGMKPDMVALAKGITSSYFPMSAVLLGRPIRDALSEMNKGGELFGHGFTNSGHPVGAAIALETLNIYHEMDVVPHVRRMGSRLRAGLEQIARDSRIVGQVRGEGLMIGVELVAAPATRQAFDPALKVGAMFDALAIENGLIIRAMGDTIGFCPPLIIDEAGVDEALDLFGRTLFSAEAKLAEKRPSA

SEQ ID NO: 18370 - protein, 199 aa, Colwellia psychrerythraea 34H
MTKIQHLFDNNKQWAERITKEDPNFFKALSEQQSPKYLWIGCSDSRVPANALLNMDPGEVFVHRNIANQVIHTDLNCLSVIQYAVDVLKVQHIIVCGHYGCGGISAALDNKSHGLIDNWLRHIEDVYRFHKEEMDKLTDETERINLLCELNVMEQVANICNTTTLVNAWKNNQDTTVHGVVYNLHDGILKDLNVSATGK

SEQ ID NO: 18371 - protein, 432 aa, Gloeobacter violaceus PCC 7421
MVTSAFQTAQSHRLFAEAQQLMPGGVNSPVRAFKSVGSEPVFIERAEGAYLWDVDGNRYIEYINTWGPSIVGHSHPEVISALREALPKGTSYGAPTRLENQMARTVIDAIPAVEMVRFVNSGTEATMSALRLARAFTGREKIIKFEGCYHGHADMLLVQAGSGVATLGLPDSPGVPKSTTAATLTAPYNDLAAVEALFKQYPSDVAGLILEPVVGNAGCLVPEIGFLEGLRDLTHAHGTVLIFDEVMTGFRLSYGGAQARYGIEPDLTCLGKIIGGGLPVGAYAGRREIMQMVAPAGPMYQAGTLSGNPLAMTAGIKTLEILQRPGTYERLEGLSARLADGLLAAAREAGHAATGNRVGAMFTLFFTEGPVRNFADAKRSDLQKFARFHRGMLERGVYLAPSQFEAGFMSLAHTEEDIDYTVAAARTVLAAL

SEQ ID NO: 18372 - protein, 290 aa, Triticum aestivum
MQDFQSIPGLAGRLFGGAAAADIRRVQGPASRCGVFSQAASAQPEAAVKCPRCESTNTKFCYYNNYNLSQPRHFCKSCRRYWTKGGVLRNVPVGGGCRKAKRSSSSASAPSTPAGHGTPRAKRAPPSSSSSSRSNRGSASPTANGEDTPTTTTDPPPATPSSNSNANAVSFASRTTNYPFAADVPPPAPIFADQAAALASLFAPPPPPPLPVFSFSAEPKMEEAIGSLLLPGQEPAQEPEEPTCTSTVADMAPFMSLDAGIFELGDASPADYWNGGSCWTDVQDPSVYLP

SEQ ID NO: 18373 - protein, 126 aa, Methanosarcina mazei Go1
MADMKWAVAHIKSSFNNTIITVTDITGAETIAKSSGGMVVKAARDESSPYTAMQMAGQLADQLRDKGINGIHIRVRAPGGNKQRSPGPGAQAAIRAFARAGIRIGRIEDVTPVPHDGTRPKGGRRV

SEQ ID NO: 18374 - protein, 287 aa, Lycopersicon esculentum
MKRFSFSDSSGKLLYPTEEKKENLGYSNEFQAMLDGLEDEDGIEESGCGTGKKRRLRVDQVQALEKIFEVDNKLDPDRKVKIAQELGLQPRQIAIWFQNRRARWKTKQLERDYNILKSNYEALQHNYTKVEQEKEGLITELKGLKEKLGEETLLSPVFQRPQEILNKLKNSSDFVDSKDGSSDSDSSGVMNEETYNISTLNYQQLMPKVSSYSNSLDHLSLSSSTYTQLMDPRASNSTSSSMRAYNNNNNNNDDNNNSNNQQQQQAVGRIEEAKWFYNRGFLQHLLC

SEQ ID NO: 18375 - protein, 515 aa, Zea mays
MVLTEYGDHWRKMRRIMTSALLHQQGGGPQPYQEVGRGLNKARRPEERPLSRGPAGKKKKKKKKKKKKKKKKKKKKNRSIGDPEARRGRGAHSRRPSPRHRPLRRQPMASAMELSLLNPAATHRHRGGLAGLPLARRSVVRFRVSASAAATAPPKSSGPKKRGKTEIQETLLTPRFYTTDFDEMERLFNAEINKQLNQAEFDALLQEFKTDYNQTHFVRNPEFKAAADRMEGPLRQIFVEFLERSCTAEFSGFLLYKELGRRLKKTNPVVAEIFSLMSRDEARHAGFLNKGLSDFNLALDLGFLTKARKYTFFKPKFIFYATYLSEKIGYWRYITIFRHLKANPEYQVYPIFKYFENWCQDENRHGDFFSALLKAQPQFLNDWKAKLWSRFFCLSVYVTMYLNDCQRTAFYEGIGLDTKEFDMHVIIETNRTTARIFPAVLDVENPEFKRKLDRMVEINQKIIAVGESDEIPLVKNLKRIPLVASLVSEIIAAYLMPPIESGSVDFAEFEPRLVY

SEQ ID NO: 18376 - protein, 137 aa, Helicobacter pylori J99
MKQRTLSIIKPDALKKKVVGKIIDRFESNGLEVVAMKRLHLSVKDAENFYAIHRERPFFKDLIEFMVSGPVVVMVLEGKDAVAKNRELMGATDPKLAQKGTIRADFAESIDANAVHGSDSLENAHNEIAFFFAAREF

SEQ ID NO: 18377 - protein, 668 aa, Methanosarcina acetivorans C2A
MVYETSKQLEIDSEPLLEKVYGEDKVVEMFANTLEIVERAGPECTTSLKQLEIDIKPALEKVYGEDRVDEMFANILEIIERARSERAASLKMDDLTRDCSWYKDEIMYTFYADQFGVKNKNTTNTFKDLIEMLPYLKGLGVTTLYILPFMDSPMGDAGFDVRDPQKVREDLGGIAEFDQFMAEAKKYGFKIQADLVLNHFSDQHEWFQDALNGDVSKLDYFIFRKEPPKYERSQKGTIIKYFEEDGVPPSERRIVFADASEETHYRKVDIGGKDYYLYHTFYPFQLDINWENPEVLYYVLEKIIAFWSNKGIDIFRLDAIPFLIKEKGTNAENQPGTHCIIKILSSFNQAIGPRSIFHAEACEPPKEVLKYFSKERVFNIYGGENLTRTDGVQVAYNFPYMPAIWASLITGSNEYFWNVHEETPSIPESAAWAQFLRVHDELTVEMADTGTRKIIYDALLSKGKDFKGLGISGRMANFLDKNPAKIGLAFAILLSLPGIPVIYYGDEIGAENNTNYGEEAGNKRKEVLNKINTNFCSFDSRDINRGPILKSDFYSSEKDNVIHKTVKNLIEVRKGMSVLGRGKLSRLESDNKEIFSYLIDSDDQYVIVVNNLSGEKLETSLTLSNDLVEKIDKTTGMVNLIDRGKINVCLKCKKLIVSLEPYQTLWLN

SEQ ID NO: 18378 - protein, 166 aa, Zea mays
MAQLPPRVPTAVHRWPEGGHHGAAAWADDFAEFAALRRGAHRRSLSDSVAFVEVAPAAGEFDRLDDDQLMSMFPDEAAAGGGGGGSSAAGSENNGGSSDSYAAASTELIRDPKRVKRILANRQSAQRSRVRKLQYLSELERSVTTLQNEGSALSPRVAFLDQQRTI

SEQ ID NO: 18379 - protein, 322 aa, Thermobifida fusca YX
MRAIVVEETGGPEVLRPTETADPVPGPGEAVVDIAARGVNFIEIYQRTGIYPVSLPWIPGSEGAGVVSAVGEGVTEVSVGDRVASVALRGSYAERAVAAAKDLVPVPDEVTLDQAAAVLLQGLTAHYLTHSTYPIQQGDTVLVHAAAGGTGQLIVQLAKRRGARVIGTVSTEAKERQARAVGADEVIRYTEQDVTTEVRRLTGGEGVPVVYDGVGAATFDVSLACLRPRGMLVLFGQSSGVVPPFDPQRLNAAGSVYLTRPSLGHYTRTREELLERASAVLGLVASGELAVQIGGRYPLAEASRAHTDLASRATMGKLLLVD

SEQ ID NO: 18380 - protein, 433 aa, Streptomyces sp. 275
MTAVAVTGMGILAPNGAGTPAYWAATLSGRSGLGGLTRFDPSPYPVRLAGEIQDLDAAALLPSRLRAQTDELTRLSLVAAEWALADAGLDPADLPEYAVGVVTANTAGGFEFGQRELENLWSKGSGYVSAYQSFAWFYAVNTGQISIRHGLRGPGSVVVTDGAGGLDALAAARRLLRRGAQAMVTGAVDGSLCPWSWTALLAEGRLSTREDPDDAYLPFDSRADGHVAGEGGALLVVEDTEAARARGARTHGLIEGYGTAFDPAPGSGRAPGLRRAVTQALDEAGWRPSDVDVVFADAAGTPQLDRQEAAALAAVFGPGGVPVTAPKTMTGRLAAGSGPLDVATALLALRDQVIPPTVNVSCPKEEYCIDLVTTVRRTRLRRALVLARGHGGFNSAVALSGPVAGRRPCRSQTLGGTRGVPGMEGSKVGSQVQ

SEQ ID NO: 18381 - protein, 322 aa, Zea mays
ATNVIFGLALGYKSVIIPIFAIAVSIYVSFSIAAMYGIAVAALGMLSTIATGLAIDAYGPISDNAGGIAEMAGMSHRIRERTDALDAAGNTTAAIGKGFAIGSAALVSLALFGAFVSRAGVKVVDVLSPKVFIGLIVGAMLPYWFSAMTMKSVGSAALKMVEEVRRQFNTIPGLMEGTAKPDYATCVKISTDASIKEMIPPGALVMLTPLIVGTLFGVETLSGVLAGALVSGVQIAISASNTGGAWDNAKKYIEAGASEHARTLGPKGSDCHKAAVIGDTIGDPLRDTSGPSLNILIKLMAVESLVFAPFFATQGGLLFKYL

SEQ ID NO: 18382 - protein, 150 aa, Pediococcus pentosaceus ATCC 25745
MGDLPMSTEKSLILVKPDGVQCGHIGHVISRIENRRYEIKALKMVNATEEQLRQHYSQLVDKPYYADIEKFMTSGPIVAIIAEGNEIIDTFRKMAGPTNPSEAMAGTIRGDFARAWGPGPIKNVVHSSDSVESAEKEIKIWFPERINTEN

SEQ ID NO: 18383 - protein, 541 aa, Lactobacillus acidophilus NCFM
MTNAYNILNDPFLNKGTAFTKSERESLGLIGALPAKVQTIDEQATRIYDQDQLHEKGIDQRKFLMELFNTNRTLFYYVIEQHIEELMPIIYDPVIAPAIEEYSEIFMKPQGAAFLSIDNPGEIEASLTNAAGGRKIKLIVVTDGEGILGIGDWGSNGVNISVGKLMVYTAAAGIDPREVLPIVLDVGTDNQTLIDDPLYLGEKHARVTGDKYYDFVDKFVKIARKVFPDVYIHFEDFGRDNATKILNKYRKEIPVFNGDVQGTGIVCLAGVLGVLNISKQKFSDQIFLTFGAGTAGMGIANMMYREMLVEGMDPEEAKKHFYLVDKQGLLFSDTPGITPEQRPFVRERSEFVNADELTNLEAVIKTVHPTVMIGTSTTPGAFTEKAIKEMATHTERPIIFPISNPTKLIEASAEDLIKWTDGRALVATGVPSDPVKYNGVTYHIGQANNALIYPGLGLGVLASKAKLVTDEMLSAAAHSLGGIVDPNEKGASVLPPISKIRIFSDKEAISVAQTAIDQKLATPNITDAKAATENIKWIPKY

SEQ ID NO: 18384 - protein, 140 aa, Pediococcus pentosaceus ATCC 25745
MANEMMNRRNDMWDPFFDRLSRGFFNNGWDGTSKTLKTDVSESDTDYKVKIDVPGIDKKDIKLDYQDGVLNVEVKKDSFADHEDEKHNVTMTERSYGIMRRSYELPRVKAEDIKAKVDNGVLSITLPKASGEKTSGIEIE

SEQ ID NO: 18385 - protein, 957 aa, Oryza sativa
MMHGLWVQDQGVVDHLAQLVPLLHECASHVTEGSFEKADFSFKKIRMLTIADGPLQRLSTIIVDSLAHRLLSSIQGLPGALIDPSDYFEKSTLRAARHNFFKLNPYLSTGFVTINWAIMEAMEDEKCRFVKISSRKHAEFFGDQSRFAGCHIVDLSCSAAHPWQWLKLLDDFHGRPGGAPELYLTVLHDDNDFLADMQSLLSKKAESLGVSFHFISVIGRLETLDFSNLRSTFQIKFGVAVAISCALQMHRLLLVDDNLSSTSIAQLQKMANFTQPKQMASSVCSPASTLNYLQTPSPRTPKLLARLLSAIRALKPNIMLIMEQDADHNTLLFRDRFNEVLNYYAALFDCFHAVAAANPGRTDERLRVDRMILREEIKNILVCEGVHRHERHERLDQWAMHMEESGFHNVQLSFSAIREAYVWQLKVQADNLRLCCTDRGMFQDDMLSSATSSPASSVYSPSPSPSNGSWVQELSHDQQSVRLIGLLYQCAAEVSAGSFDRANLCLEHITQLASLDAPHALQRLAAVFADALARKLLNLILGLSRALLSSANSADAHLVPVARRHMFDVLPFLKLAYLTTNHAILEAMEGERFVHVVDFSGPAANPVQWIALFHAFRGRREGPPHLRITAVHDSKEFLANMAAVLSKEAEAFDIAFQFNAVEAKLDEMDFDALRHDLGVRSGEALAVSVVLQLHRLLAVDDGRRHAAAGCLTPVQIIARSSPRSFGELLERELNTRLQLSPDASVVSSLSPHSPAAATAAHPTTSTPKLGSFLSAVRSLSPKIMVMTEQEANHNGGAFQERFDEALNYYASLFDCLQRSAAAAAERARVERVLLGEEIRGVVACEGAERVERHERARQWAARMEAAGMERVGLSYSGAMEARKLLQSCGWAGPYEVRHDAGGHGFFFCWHKRPLYAVTAWRPAASRRGHTLHGRRSEGTRESVPWPPRSRRRCGRAR

SEQ ID NO: 18386 - protein, 452 aa, Nostoc punctiforme PCC 73102
MQQLKSAEEIPGSYGLPILGETLEIFRDSELYLWRRFQQYGSVFKTSVLGRKRAYLIGPSANRLVLVEQAENMSSRIGWYFLESTFGNNILLQDGEEHRLTRRLMYPAFHGKAIATYFDTIQNIVQDFLKDWGERGTISLNSSFRQLTLMIATRLFLGSQNKSEVEQTSQWFTQLLDSSMAIFKWNVPFTLYGRGQNARGKLVAFLREAIAQRIEQGNLEESKDVLGLLLAAVDEDGNKLSETQVINEALLLLFAGHETTASLLTWVIFELGNHPEWRERLRQEQLAVVGNNPLSLSHLKQFPQLTNVLKEAERLYPPVYAYNRGVLKDIEYGGYRIPAGWFVTISPMLTHRLPELYTEPDRFDPDRFAPPREEDKKHPLALMGFGYGSHSCLGMEFAQMEMKIVLSTLLRHYDWTVKPDYSAIAPVRQPSKVKDILQAYIEPLLIKHPLDS

SEQ ID NO: 18387 - protein, 290 aa, Zea mays
MRASALVCFVAVSACIACIAHGGNFYQDTEMTWGQGRGKVVDGGRGLDLSLDRASGSGFQSKDEYLFGKIEMQMKLVPGNSAGTVTTLYLSSQGDAHDEIDLEFLGNVSGEPYTLHTNVFTRGRGQREQQFRLWFDPTADFHTYSVVWNPRHVIFAVDGTPVRDFANREARGVAFPRTQPMRVYASLWNADDWATQGGRVKADWARAPFVASFRGFSADACVWSGGRSQCPVGTMEEAGGGGGWWNQQLSDASYRRMRWVQRKFMIYNYCTDAKRFPQGRGVPAECRLRR

SEQ ID NO: 18388 - protein, 479 aa, Shewanella oneidensis MR-1
MFRRTKIVTTLGPATDRDDNLRRIIAAGANVVRLNFSHGSPEDHLKRATQAREIAKELGVHVAILGDLQGPKIRVSTFKDNKKIQLKLGQTYILDAELAKGEGDENQVGIDYKQLPDDVNVGDILMLDDGRVQLRVERVEGRKVHTTVTVAGPLSNNKGINKQGGGLSAAALTEKDKADILTAAMIQVDYLAVSFPRSGADLEYARSLAQQAGSNALIVAKVERAEAVASDEAMDDVILASDVVMVARGDLGVEIGDAALVAVQKKLIARSRQLNKIVITATQMMESMISSPMPTRAEVMDVANAVLDGTDAVMLSAETAAGDFPEETVKAMANVCVGAESHPSVKVSKHRLDARFTSVEETIALSTMYAANHLEGVKAIIALTESGATPKLMSRISSSLPILGLSRHDTTLAKMALYRGVLPIYFDSTIYPADELAQKALESLTKAGYLHSGDLVLMTKGDAMETIGGTNTCKVLIVA

SEQ ID NO: 18389 - protein, 416 aa, Nostoc punctiforme PCC 73102
MTDHTRKRVVVTGVGAITPIGNTATEYWDGLLSGRNGIDYITFFDASSHDCRIAGEVKNFDPHDYLERKDAKRMDRFAQFGVSAAKQAIANAQLVINELNAEQVGVMIGSGVGGIKVLEDQQTIYLNRGPDRCSPFMIPMMIANMAAGLTAIHTGAKGPNSCPVTACAAGSNAVGDAFRLIQGGYAKAMICGGTEAAVTPLSMAGFAACKALSFRNDDPAHACRPFDRDRNGFILGEGSGILILEELQHALSRGAHIYAEMIGYGMTCDAYHITSPVPGGLGAARAIELALKDASITPEQISYINAHGTSTPANDSTETSAIKKALGEHAYKVAISSTKSMTGHLLGGSGGIEAVATVLAIANDQIPPTINLENPDPECDLDYVPNYSRVQKVEVAISNSFGFGGHNVTLAFKKYV

SEQ ID NO: 18390 - protein, 231 aa, Zea mays
  misc_feature (69)..(69): Xaa can be any naturally occurring amino acid
  misc_feature (180)..(180): Xaa can be any naturally occurring amino acid
  unsure (1)..(231): unsure at all Xaa locations
MAGAAPPPPPPSSSSCGTDAAYLLFRGETLLPDGARASLYAVALAYCFVGLSAVTARFFKSMEQIMRHXREVVVGVDPRTGAPVVRRDKVWNYTVADIALLAFGTSFPQISLATIDAIRNLGQLTAGGLGPGTLVGSAAFDLFPIHAVCVLMLRAGSKKKMLDLGVWLVELFWSFWAYIXLYVILEVWTPRVITLWEASLTVLQHGLLLLHAYAQDKRWPFVSIPLYDPDS

SEQ ID NO: 18391 - protein, 675 aa, Nostoc punctiforme PCC 73102
MTVATQSAKELSVEELAINSIRFLAIDAVEKAKSGHPGLPMGAAPMAFVLWDRFLKFNPKNPKWFNRDRFVLSAGHGSMLQYALLYLTGYDSVTIEDIKQFRQWGSKTPGHPENFETPGVEVTTGPLGQGIANGVGLAIAEAHLAAKFNKPDTKIVDHYTYVIVGDGCNMEGISGEACSFAGHLGLGKLIALYDDNHISIDGSTDVAFTEDVSKRFEAYGWHVQHVEDGNTDLAAIAKAIEAAKAVTDKPSFIKVTTIIGYGSPNKANTAGVHGAALGADEIALTRKNLGWEYEPFDVPQEALNHTRKAVERGASYEAEWNKTFADYKAKYAQEAAEFERYLSGKLPDGWDNVLPTYTPEDKGLPTRKHSETCLNKLAAVLPELIGGSADLTHSNLTEIKGKGDFQKGHYENPNIHFGVREHAMGAICNGIALHTSGLIPYGATFLIFTDYMRAAIRLSALSQAGVIWVMTHDSIGQGEDGPTHQPIETLASLRAIPNLLVFRPADGNETSGAYKIAIEKAKQNAPSLLAFTRQNVPNLAGTSVEGVAKGGYTVVDSEGTPDIILIGTGSELSLAVSAAEKLKAEGKKVRVVSLPSWELFEAQDAAYKESILPKAVTKRLSVEAAASFGWHKYVGTEGDTVSIDRFGASAPGNVCLEKFGFSVDNVLAKAKQLLG

SEQ ID NO: 18392 - protein, 230 aa, Zea mays
  misc_feature (19)..(19): Xaa can be any naturally occurring amino acid
  misc_feature (215)..(215): Xaa can be any naturally occurring amino acid
  unsure (1)..(230): unsure at all Xaa locations
QIEFPEPFKKPYSGLSPEXLICQEGKPEATVDRTLDTKVFKGWVETDNPWTSDDETDNAEMTYVNLQLNPERYTGYTGDSARRIWDAIYKENCPKYPSEDMCQEKKALYKLISGLHSSISVHIAYDYLLDESANLWGHNLSLLHDRVLKYPERVENLYFTYLFVLRAVTKAADYLEQAEYNTGNPEEDLKTQSLVRQLLYNHKLRSACPLPFDEXKLWQGENGPELKQEI

SEQ ID NO: 18393 - protein, 1010 aa, Gloeobacter violaceus PCC 7421
MPLIAGWKSHQGDLPDAASPAFDDSAWPVAKPDAKGNIGWPKGRRVLWLRQWVTIPRDWQGYASAGTRVHLNLIWWAEKAEIYVGGRFVQAGDLYDAVQRVPVTAAARPGERVLIAVKLTSPGHDSGALSQSRLDIDAPAGRTDPGLLADELEVVDSYLKEIATPTERRQWRPALDRALAALDWRALSRRDQARFEASLTRSRERLVPTAQLTRARTIALLGHSHIDMAWLWTVPETKEVIERTFRSALGLMEDHPRLDFAQSTAQSYQWLERERPQLFDAIRQRVNDGRWELVGGMWVEPDLNLPDGESLVRQVLYGKQYFQSRFGRDIRVGWNPDSFGYTWQLPQIYKKSGIDYFLTTKLDWNDTTKFPHRIFWWQGPDGSKILTYFSNLLGAQIEAVPMAEKARAYEKNTGLPKLMWIYGVGDHGGGPTRDMLDQAERLASSPVYPKIEKTTALAYFEQLAAADPKARRFPTWNSELYLEFHRGTFTTHAGQKQKNRRMEVTLAEAEKFSAASTVLQSTAYPAAELEVIWKKVLFNQFHDILPGSAIPAVYEQADREWREAQAAGEDLRTGALRALAAQADTQGAGLPVVVFNSLATPRDAPVALPAPGNLRGARLVAVDRTGKDVPVQAAGDWLHFWAAGVPGIGHKVFWLRPADAPAPATTGLENAYLRVEVDPRTGDLASIFDKRTGRETLNGPGNRLQFFKDEGQYWDAWNIDPDYEKHPLEAPTLVSLQTVEQGPVRAVVRVVRRFRQSTFEQDLILYRDAPHLEIANRVDWQERHVFVKAAFPLAVRSEQATYEIPFATIERSTLRDTPARKAQWEVPALRWADVADARSGVSLMNDSKYGHDARRTDTGTLLRLSLLRGPEWPDPKADLGEHSFRYALYPHPGDWREAATVRAGLEFNTPLHALPQTIHPGTLPESFLQLDNPQVVVAAWKQVEDGKGWLLRLYESQGQPAAARLRLAIPVRSVVKTDLLERPIAALAVQDGQASLQLGPYEIQTVRVQF

SEQ ID NO: 18394 - protein, 193 aa, Triticum aestivum
MTTPTATAAPLTGMDKYEEVRDIGSGNFGVARLMRHRENDGLVAVKLIERGHRIDENVYREIVNHRSLRHPNIIQFIEVILTPTHLAIVMEYAAGGELFDRIVDRGRFSEDEARYFFQQLICGVSYCHHMQICHRDLKLENVLLDGSPAPRLKICDFGYSKSSVLHSRPKSAVGTPAYIAPEVLRRQEYDGKM

SEQ ID NO: 18395 - protein, 212 aa, Glycine max
MVSLKLQKRLAASVLKCGKGKVWLDPNEVNEISMANSRQNIRKLVKDGFIIRKPTKIHSRSRARRMKEAKRKGRHSGYGKRKGTREARLPTKILWMRRMRVLRRLLRKYRESKKIDKHMYHDMYMKVKGNVFKNKRVLMESIHKSKAEKAREKTLSDQFEAKRAKNKASRERKNARREERLAQGPGERPSAAQTTTPATASQPAQALKKSKK

SEQ ID NO: 18396 - protein, 176 aa, Triticum aestivum
MLPRIQKSIFHLGEEGGDGHRGADDHHGDNIVDIQRRLGGHTHGRRLRRGGRDPADVVVGLQILVQHHPQPCHVVLKQMVSSPPARRRLSGSFSGACFLCRRELSPDKDVYMYRGDQGFCSEECRRQQILSDEAREHEAMVSKERRGLAHRRHHPGPWPAPPVAIRGAPRRLLAVA

SEQ ID NO: 18397 - protein, 808 aa, Polaromonas sp. JS666
MPSATPGKSKKPKKPQTTQSKAAVMPTAKTAAKPAAKPAARHGPQNVKVEKPGKPAISVKASSPNAPVSKKPLKSAKPDTSLKKVPAVPTKSSPESKPVAAVADVPVKKKPGRPPKNPAAADSAPASTGAKRGRKPKNAGAAKVGEDLDLSDIEEDLVGEPVAETTEKVKPLRMKISKAKERALMKEFGLDETVLSEEDMLKRRMRLKTLIKLGKTRGYLTHGEISDHLPDKLVDAETLEVVVNMLNDMGVAVYEQAPDAETLLLNNTGPTVATEEEAEEEAEAALSTVDSEFGRTTDPVRMYMREMGTVELLTREGEIEIAKRIEGGLMKMMEAISESPATIAEIMRLGEEIREGKIVISTVVDGFSNPNEADDYVAEEDFDEFDEEDDDDGKGGSKALTKKLEELKKEALSRFDKIASLFEKVHKTYDKEGYGTPTYVKAQKALSDELMTVRFTAKTIEKLCDMLRGQVLDVRKKERELRRIIVEKCGMPQETFIKDFPPNLLNLKWVEKQVASGKPWSTVMARNIPPIQELQTKLAELQARVVVPLGQLKDINKRMNEGESNSRDAKKEMIEANLRLVISIAKKYTNRGLQFLDLIQEGNIGLMKAVDKFEYRRGYKFSTYATWWIRQAITRSIADQARTIRIPVHMIETINKMNRLSRQHLQEFGFEPDASILAAKMEIPEDKIRKIMKIAKEPISMETPIGDDDDSHLGDFIEDSANTAPLEAAMQAGLRDVVKDILDSLTPREAKVLRMRFGIEMSTDHTLEEVGKQFDVTRERIRQIEAKALRKLKHPSRSDKLRSFIDTL

SEQ ID NO: 18398 - protein, 405 aa, Nostoc sp. PCC 7120
MVSTFPNPASVDLSRVRLAIRSLQPQLVEWRRQLHQKPELSFQEKLTAAFVSSKLQAWGIEHQTNIAQTGIVATIKGEKPSAKVLAIRADMDALPIQELNEVPYCSQHDGVMHACGHDGHTAIALGTAYYLQQHRQNFAGTVKIIFQPAEEGPGGAKPMIEAGVLKNPDVDAIIGLHLWNNLPLGTVGVRSGALMAAVELFDCTIFGKGGHGAIPHQTIDSVVVAAQIVTALQTIIARNVNPIDSAVVTVGALHAGTAHNVIADTATMKGTVRYFNPTFQGFFPQRIEQVIAGICQSHGAKYDFKYTELYPPVINDATVAELVRSQAEELIETPIGIVPECQTMGGEDMSFFLQEVPGCYFFLGSANPDKDLAYPHHHPRFDFDETALAMGVEIFVRCVEKFFNE

SEQ ID NO: 18399 - protein, 1283 aa, Haematonectria haematococca mpVI
MIDDAALAAAAEIVASIAPDSRLPNSIPVGVASQVQLPGRDTPAKRKLEIELQNLALRVGKLESQASATSTFPETPNEAIDTLFGGEDTSNTNVPVTTRPKPKVIHAQGSLHSPHLPSYQLTKEALEGLRDHVDDQSKLLDSQREELAGVNAQLLEQKQLQERALEVLEQERIATLERELWKHQKANEAFQKALREIGEIVTAVARGDLTMKVRMNTVEMDPEITTFKRTINAMMDQLQTFASEVSRVAREVGTEGLLGGQARIGGVDGTWKELTDNVREIASVTTAVAHGDLTKKIERPARGEILQLQQTINTMVDQLRTFASEVTRVARDVGTEGMLGGQADVGGVQGMWNDLTVNVNAMANNLTTQVRDIIKVTTAVAKGDLTQKVQADCRGEIFDLKSTINSMVDQLQQFAREVTKIAREVGTEGRLGGQATVHDVEGTWRDLTENVNGMAMNLTTQVREIAKVTTAVAKGDLTKKIGVEVKGEILELKNTINQMVDRLGTFAVEVSKVAREVGTDGTLGGQAQVANVEGKWKDLTENVNTMASNLTVQVRSISTVTQAIANGDMSQKIKVGANGEIQVLKETINNMVDRLSSFCYEVQRVAKDVGVDGKMGAQADVAGLDGRWKEITTDVNTMASNLTTQVRAFSDITNLATDGDFTKLVDVEASGEMDELKRKINQMISNLRDSIQRNTQAREAAELANKTKSEFLANMSHEIRTPMNGIIGMTQLTLDTDLTQYQREMLNIVNNLANSLLTIIDDILDLSKIEARRMVIEEIPYTLRGTVFDALKTLAVKANEKFLDLTYKVDSSVPDYVIGDSFRLRQIILNLVGNAIKFTEHGEVSLTIKERVEQRNVRPGEYAVEFIVEDTGIGIAKDKLDLIFDTFQQADGSMTRKFGGTGLGLSISKRVVNLMGGDLWVISEQGKGSEFHFTCLVKLAHDDAAMIEQQIRPYRGHQVLFVDKAQSKGGASIKGMLEQIGLHPVVVESEKSPALTRLQASGSLPYDAILVDSIDTARRLRAVDDFKYLPIVLLAPVVHVSLKSCLDLGITSYMTTPCKLIDLGNGMIPALENRATPSLADNTKSFEILLAEDNTVNQRLAVKILEKYHHVVTVVGNGWEAVEAVKRKKFDVILMDVQMPIMGGFEATGKIREYERGIGTHRTPIIALTAHAMMGDREKCIQAQMDEYLSKPLQQNHLIQTILKCATLGGPLLEKNRERELALHAEAKSSKHKEGGQGLLRPALESRSFTSREPLSGNGKESPALLSPDEDPMARVYMRSLSS

SEQ ID NO: 18400 - protein, 609 aa, ASPERGILLUS NIDULANS FGSC A4
MTNPAQPFDSRRSTIYNRQPEELHIPAGNSTSGGHPRQPMSHEYPTSPDTHLPSINIHSSSSQSNQYGGASGGVTGGTLPGSLQPGNSANRPPTVSMNTAPSTIPTLPHLSTQIQQQPQPQPQSTTPRSNAANSHGHSRSSPAGYRPHGSSPNAAFQPPTPQGAKYSPLGLADIRPSGDLLGDHATNAGAAASKSVENQVPTNSNYITPWPIYAVDWCKWPISGNPGSFGGKIALGSYLEDHHNYIQILDTHLAYPDPDTPDASAGELKLEYVKSAEATHSYPVTRILWEPPSSQKQSTDLLATSGDHLRLWSLPNSQPQHSSNSITRPSGQRDMPAAKLSPLALLSNSKSPEHTAPITSLDWNTISPSLIITSSIDTTCTIWDIPTLTAKTQLIAHDKEVYDVRFCANSVDVFVSCGADGSVRMFDLRSLEHSTIIYEPTEKNEKLMSPGNGSPSAPTTTWPPPLLRISASPHDAHLLATFSQDSNIVRVLDVRQPGQALLELKGHSAPLNTVEWSPNRRGVLASGADDCLVLLWDLINQHNTTPVPPGVHNPGAPSTTTERGPAAAWQCDYEISNISWSPQGGTTSAGHPRDWLGVCGGRGVWGVAL

SEQ ID NO: 18401 - protein, 476 aa, Methanosarcina acetivorans C2A
MKNYDLIVIGTGSGMNYVNSIIDSKPEMKIAVIDKDEPGGICLTRGCIPSKLLLYPAELVREIWTAPLFGIRLEIKDIDFRMIMERMRRRIGKDIDTIRDGLNEDTYLDYYHEAAEFISPYTLRVGEETLHSEMIFLCTGSKPSIPPVKGLEETGYLTSDTVLELEERPKSLAILGGSYIGAEYGHFFSAMGAEVTVIGRNSHFLPQEEPEISELARIKMSEYMKIITNHEAIEVRKESNGQKTVVAKDRKSGEEIKITADEILVATGRTPNTDILHPEKAGIKIDSQGWIMVDKYLETSQPNIWAFGDANGKYLLKHVGNYESGIVYLNAIMKEKVRADYHAVPHAVFSYPEIAGVGMSEKEALEEYGENRVVIGFKLFEDTAKGSAMEARGYFVKVILDSLEETILGAHIIGPHASILIHQIIPLMYAPSRSAKPIIRSMDIHPSLSEVVTRAFYSRFSPEQYHHIMKHLGLED

SEQ ID NO: 18402 - protein, 548 aa, Magnaporthe grisea 70-15
MSSPAANADEHTPLLDGDVPNVPVPGQQPPPAQSDGDDEVTVVQDEMSKTKLYFILGTSYVGVFLGAVDGTIFATLSGQISSEFKSLSLMSWLATAYLIANAAFQPISGRMTDLFGRGPGLVFSNIMFAAGNLICGLAQTGEIMILGRVVAGIGGGGLMSISTFLGSDLIPLRQRGVFQGIGNVAYGSGAMLGGVFGGFINDKTALGWRLAFLVQVPVVLISAALCFALIRIPPKVSNRSLISRIDFTGVALTISFLVLLLLGLNAGGNLVPWSHPLVLTTIPLSIVMFLGFIWWESRTPQPVIPVRLLVDRTILTACFTNLFCSMAIFMVIFYIPLYLQVLGYTTADAGLRLIGTPIGTAISSVVGGYAMKKTGRYLGLGISVLLIKAVGLAVICTLGRDSNSWTPMAGLFLVGMGYGAMLTITMVACVAAVDHSQQAVVTSATYAFRSIGSTLGITVASAIYQNELRRGLWQRFGHLPGAAEEIGRIRDDLGELKRLPDGWKDGVIDSFMEGFSGVWYMALSLGLLALVCISLMRQHTLHDTLARK

SEQ ID NO: 18403 - protein, 267 aa, Zea mays
MATYDHAATPTPQSPGVGGVPFSSCIGDLLRFVLSSHAAAYPGDDTVAFPLSPSYCARLLNDGELFEKLEACIQQCLEEGRLPGPPAVVGIPAEEEGPEERGWKLLLPEKGAELKRMYDAVEFELHVQEPYFTQLRAGVKKVEGRLATGNYNRITQGSLLLFNKCLLLNVEAVRKYNSFSEMLQGEKISNVLPGISSIVEGVKVYRKFYAEEKENSYGVLAISVSKPTSQPYITMNNILAVSATLQNFTQNYSKKGQRRVAHMLVDS

SEQ ID NO: 18404 - protein, 1062 aa, Debaryomyces hansenii CBS767
MASMNNQDHGSQSSLHGLNAELDNIYSTYTSSNNNGSVDTLDSNSDQAPGRSERVFRTTRLIPNHKRLPDVHISSRLSSLNLLEDRDITHSAPQSPNSSTSFDFNPRDHHAVTNSSLNVLLDTPTTEAEFMNLVDSTPTPTAESLGDFQAQESNLDPSVAQNNNENWNDRGAAVRKVEDKKSKFRLIKRGVQDFEFGKSLGEGSYSTVVLATDKHTSQKYAVKILDKRHIIKEKKVKYVNIEKHALNRLSNRVGIISLYFTFQDKASLYFVLDYASNGELLTLIKKYSTLNEDCVRYFGAQILDAIKYMHDNGVVHRDIKPENILLDDKLRIQITDFGTARILEKKNDESEDYPVDVRAKSFVGTAEYVSPELLENKYCGKPGDIWAFGCIVYQMIAGKPPFKATNEYLTFQKITKLQYAFSAGFPMIVRDLIKKILVLQPSKRITIPQIQKHFFFQSVKWNDTDLIWNSSPPELGPYKMNAKSMMKVPELNEPTQGSSRKSKKLANGGSANRANGKPVNPASVAAFVLNKKDDSSDTDLLDLETNSNDGLDENVPVSKTESRSSSSAGGSSRVLSAADYIPGTNILRPTVNTRASFSRAPPHQKKQPKKKSKPEIMEPTPISSLEIAWASYLTHPDERIMKIGPVIFSKQLTEVFERRYKGILHNAPLDYATKLQATKSRGSSSFLSHVVHGPSKGLRGSVSSLEGDTVDEDESKAITTYKDIEELANPTLPRSSTDSSNNPASGTSGKQSKSSKLKKFLLPGNKGNDNADSSSGNGSNAARQTLDKGITCTMMVTSHGRVLIFYRNDIDSEYALINEIKLNYPFIQFKEVVSTSTAKFQKGMPSTGIFAIESSITTFVFEIEKFDINQWTESLARSKLNQFEREILGVSESEPVKPKTSKSPPTRSSPKPVESPVFTKATKRTVSPVEKQKAIERAVSPASTESKTRHKENMLAHRLKGKSVKRKPPPPINTHHNSINHSTGLASPTEAYQDGGLLHAAQLAVSNNANHIPNESKRTSFTKETQNKYVILPSSPNQSSNSASKNITSMNSKFLARSQRKK

SEQ ID NO: 18405 - protein, 594 aa, Exiguobacterium sp. 255-15
MNKAAVFHRALSPYVYTYDQEAVHIRLMSAKGDLDRIELIHGDPYEWDAEKEEDRDWNFDPDKEKFWKTETTDMTFAGSDATHDFWFVAIRPPKKRVRYGFNVHANGESAVYTERGWYDEVPLDHPGYYFAVPYMNAVDVFDAPSWVKDTVWYQIFPDRFANGDLTNDRPGTIAWGAEAPAFDNHFGGDFQGVIDHIDYLKELGITGIYFCPVFVAPSNHKYDTLDYLRLDPAFGTEETFREMIHLLHQNGIRILLDAVFNHVSVDHPAFQDVIAHGNESQYANWFMMDSFPVQSTPVPNYEVFAFEGNMPKLNTAHPDVKEYLLKVGRYWVEEFHVDGWRLDVASEVDHAFWREFRREVRAANPEAYIVGECWTDSQPWLLGDQFDAVMNYGLTEAFLTFFATNESTASEFSHAIVRNLNSNTMNVNEVMFNLVDSHDTPRALTRANGDRDRMKLLMLSLLTFTGSPVIYYGDEIGMTGGQDPDNRKCMVWDQAEQDRDLLAYITKLVDLRKSHPALANASGYQFEQMDDETASFLVRRQSDEATYLIGFNNGSEEIRFDLDKAAVDLMDGQRYLGTVTVRPLSGKILRVETT

SEQ ID NO: 18406 - protein, 145 aa, Listeria innocua Clip11262
MDESKKNERLKQLTDIQYNVTQKADTERPFQNEFYDNVAKGIYVDIVSGKPLFSSNDQYDAGCGWPSFTKPIDEAEVIEHRDLSHGMIRTEVKSVEADSHLGHVFPDGPQDQGGLRYCINSAALRFIPVDKLEEEGYQTYKKIFE

SEQ ID NO: 18407 - protein, 397 aa, Saccharophagus degradans 2-40
MSLESELQKELSSRKAINRYRSRRVALSPSGVRMRVEGETKELIAFCSNDYLGLAQHPKVIEAFTQAARHYGVGSGASHLVNGHSQEHHQLEEELAAFTGRPRALLFSTGYMANMGVINGLLGRGDAVFQDKLNHASLLDGGLISGAKFHRFRHNDCEHLNTQLEKSTAARKLIVVDGVFSMDGDAANLNQLAASAKKHNAWLMVDDAHGFGCMGENGKGVVDACGLTLDDVPILMGTLGKAFGTFGAFVAGSETLIEALIQLARTYVYTTALPPAVAAATRASLHLLETEHWRREKLNALIQQFRGGCEALNLQLMPSQSPIQPIVLGEDAVALNVSKKMAERGFWITAIRPPTVPEGTARLRITLSAEHSEQDVEQLLNALAEVMREVSGELQSE

SEQ ID NO: 18408 - protein, 667 aa, Bacillus licheniformis ATCC 14580
MKTIELKSVATIRTLSIDAIEKAKSGHPGMPMGTAPMAYALWTKMMNVSPENPNWFNRDRFVLSAGHGSMLLYSMLHLSGYDVSIEDLKNFRQWGSKTPGHPEFGHTPGVDATTGPLGQGIGMAVGMALAERHLAETYNRDDYRVVDHYTYSICGDGDLMEGISSEAASLAGHLNLGRLIVLYDSNDISLDGELNRSFSENVKQRFEAMNWEVLYVEDGNNIAEITAAIEKAKQNEKQPTLIEVKTTIGFGSPNRAGTSGVHGAPLGSEEAKLTKEAYEWTYEEDFYVPSEVYEHFNETVKEAGKKKEAEWNELFSAYKKAHPELAEELELAIKGELPEGWDQKVPVYEKGSSLASRASSGEVLNGIAQQVPFFFGGSADLAGSNKTTIKNGGDVSAKDYAGRNIWFGVREFAMGAALNGMALHGGLRVFGGTFFVFSDYLRPAIRLAALMGLPVTYVFTHDSIAVGEDGPTHEPIEQLASLRALPNLSVIRPADGNETAAAWKLALQSKDQPTALVLTRQNLPTIDQSAETAYEGVKKGAYVVSKSQNEKPEAILLASGSEVGLALDAQSELQKEGIDVSVVSVPSWDRFDKQPAEYKNAVLPTDVTKRLAIEMGSPLGWERYTGTDGDILGIDQFGASAPGETIMKEYGFTPANVVDRVKKLLNR

SEQ ID NO: 18409 - protein, 137 aa, Ehrlichia ruminantium str. Gardel
MSYSESLLEHYKNPKNVGTLPKEDYNVGTGLVGAPSCGDVMKLQIKVDDNGKIIDAKFKTFGCGAAIAASSLATELIKGKTVDEAHELKNTVLAKELSLPPVKIHCSLLAEDAVKAAINDYYMKQANKKNATKNPNE

SEQ ID NO: 18410 - protein, 705 aa, Pseudomonas syringae pv. tomato str. DC3000
MTQPAATILIVDDDVHVRDLLEVLLQNQGYETLTAESGEQALAMVDARAPDLILLDIMMPGMDGYEVASVLKAGKGTANIPIIMLSALDEQGARLSGLEAGAEEYLSKPVESAELWLRVRNLLRLKAFGDYLKSHSMILEDQLQQRTIDLERFRTVMDASEDAIFLINRNTMSLIEFNRRACQLLGYTAEELAHKTPAELGETSMENLEVVYDQIIAGKGPSEPLETQIRDKSGRDVEVEIHRQAYRTGEDWVIVGIVRDITQRKESDQRLLTMAHYDTLTGLPNRDLFFTSLQMGLTQAAVSRWKLATLTVNLDGFKNINETWGHVLGDQVLLEVSHRLSECINASDTLGRVDGDQFALILMIRVGQPDTRQTLERIRKALRVPFMVEGQSIVMTASIGIALYPEDGEDARELVRHAYTAMNSAKKIGPDTYRFYTAQMNADVSARLDLEAALRDAVEKQAFEIVYQPKLSLVTGRICGLEALLRWPRPGQQGVSPAVFVPVLESLGLIGEVGNWVVDRVCAQIAHWQRTGLGLFQVAVNVSGQQISNSSLVADIRQALTNHRVAPQWLEVELTESSLMENTSHTIATLETLKANGVSISIDDFGTGYSSLAYLRRFPIDKLKIDIAFIREVTSNPQDAAIARAIIELAHSLGLKVIAEGVETPEQLAFLRDNQCDQIQGYLISKPLPLAELETFLSTPERQFG

SEQ ID NO: 18411 - protein, 150 aa, Oryza sativa
MSKRKTREPKEENVTLGPTVREGEYVFGVAHIFASFNDTFIHVTDLSGRETLVRITGGMKVKADRDESSPYAAMLASQDVAQRCKELGITALHIKLRATGGNKTKTPGPGAQSALRALARSGMKIGRIEDVTPVPTDSTRRKGGRRGRRL

SEQ ID NO: 18412 - protein, 400 aa, Malva pusilla
HENKRSFKYAWVLDKLKAERERGITIDIALWKFETTKYYCTVIDAPGHRDFIKNMITGTSQADCAVLIIDSTLVGFEAGISKDGQPREHALFAFTLGVKQMICLSHKMDACSPKYSKGRYDEIVREVSSYLKKLGYNPDKIPFVPISGFEGDNMIERSTNLDWYKGPTLLEALDQINEPKRPSDKPLRLPLQDVYKIGGIGTVPVGRVETGVLKPGMVVTFGPTGLTTEVKSVEMHHESLPEALPGDNVGFNVKNVAVKDIKRGFVASNSKDDPAKEAANFTSQVIIMNHPGQIGNGYAPVLDCHTSHIAVKFAEILPRIDQGSGKRNSEEPKFLKNGDAGMVKMIPTKPMVVETFSAHSPVCRFAVRDMRQTVAVGVIKSVEKKDPTGAKITKAAAKKK

SEQ ID NO: 18413 - protein, 166 aa, Oblivia mikanioides
MFPMVPEFMNYGQQTVRAARYIGQGFMITLSHANRLPVTIQYPYEKLITSERFRGRIHFEFDKCIACEVCVRVCPIDLPVVDWKLETDIRKKRLLNYSIDFGICIFCGNCVEYCPTNCLSMTEEYELSTYDRHELNYNQIALGRLPMSIIDDYTIRTILNLPEIKT

SEQ ID NO: 18414 - protein, 245 aa, Brassica napus
  misc_feature (227)..(227): Xaa can be any naturally occurring amino acid
  unsure (1)..(245): unsure at all Xaa locations
MLGIFSGRIVSLPEELVAAGNRTPSPKTTGSVLVNKFVEKNPSAVSVQVGDYVQLAYSHHKESPLRPRSFGAKDEIFCLFQGSLDNLGSLKQQYGLAKNANEVLLVIEAYKTLRDRAPYPANHVVSHLSGDFAFVVFDKSTSTLFVASDQEGKVPLYWGITADGYVAFADDIELLKGACGKSLASFPQGCFYSTALGGLRSFENPKNKITAIPAREEEIWGATFKVXKEQQFLHMESERIKIHLS

SEQ ID NO: 18415 - protein, 270 aa, Glycine max
INVSLVAEAESALILVRHGESLWNEKNLFSGCCSVPLTNRGVEEAIEAGQRISYIPIDMIFTSALIRAQMTALLAMTRHSQKKVPIIIHDESEQATTWTQVYSEKTTKQSIPVITAWQLNERMYGELQGLNKQETAERYGKEKVHEWCRSFDIPLPKALYWIFYDTDILLGIETYEISTGIEPPLKSGKHVMVAAHGNSLRSIIMYLDGLTSQEVTSLEISTGIPLLYIYKEGKFNSRGSPVGPTEAGVYAYTQSLAVYRQQLDDMSSCY

SEQ ID NO: 18416 - protein, 166 aa, Oxypappus scaber
MFPMVTEFMNYGQQTVRAARYIGQGFMITLSHANRLPVTIQYPYEKLITSERFRGRIHFEFDKCIACEVCVRVCPIDLPVVDWKLETDIRKKRLLNYSIDFGICIFCGNCVEYCPTNCLSMTEEYELSTYDRHELNYNQIALGRLPISIIDDYTIRTIFNLPEIKT

SEQ ID NO: 18417 - protein, 491 aa, Schizosaccharomyces pombe
MTVVRADKKHRRRGSIYMVTPYMDHDLSGLLENPSVKFTEPQIKCYMKQLFAGTKYLHDQLILHRDLKAANLLIDNHGILKIADFGLARVITEESYANKNPGLPPPNRREYTGCVVTRWYRSPELLLGERRYTTAIDMWSVGCIMAEMYKGRPILQGSSDLDQLDKIFRLCGSPTQATMPNWEKLPGCEGVRSFPSHPRTLETAFFTFGKEMTSLCGAILTLNPDERLSASMALEHEYFTTPPYPANPSELQSYSASHEYDKRRKREQRDANSHAFEQTANGKRQFRFMTRGPSDPWYGIRRPNYNSQPQYQRGSYNREGGNMDRSRNVNYQPKRQQNFKPLTSDLPQKNSEFSETNAMNQTSNHSHADGQRYYRPEQDRSQRLRNPSDYGRQGRQSSQSQQPAWNVSSRYQNNSKVQTTSRASENADTNKTQHNIKYIDSYVPEYSIARQSANQKTNEQHPSSTSLHQQSTSDLKSPSFHENSNVDDTPK

SEQ ID NO: 18418 - protein, 333 aa, Magnetospirillum magnetotacticum MS-1
MMMQEGRLLRLAESCRVKRQDFLDAYYGSELDPNWLEQVAQRSKQWKDFAARHGKDAADIRATIAEISGEAGLPISEYRRIVQTVQRGERESSRAKKEMIEANLRLVISIAKKYTNRGLQFLDLIQEGNIGLMKAVDKFEYRRGYKFSTYATWWIRQAITRSIADQARTIRIPVHMIETINKLVRTSRQMLHEIGREPTPEELAEKLSMPLEKVRKVLKIAKEPISLETPIGDEEDSHLGDFIEDKNAVLPLDAAIQANLRETTTRVLASLTPREERVLRMRFGIGMNTDHTLEEVGQQFSVTRERIRQIEAKALRKLKHPSRSRKLRSFLDT

SEQ ID NO: 18419 - protein, 166 aa, Palafoxia arida
MFPMVTKFMNYGQQTVRAARYIGQGFIITLSHANRLPVTIQYPYEKLITSERFRGRIHFEFDKCIACEVCVRVCPIDLPVVDWKLETDIRKKRLLNYSIDFGICIFCGNCVEYCPTNCLSMTEEYELSTYDRHELNYNQIALGRLPMSIIDDYTIRTILNLPEIKT

SEQ ID NO: 18420 - protein, 314 aa, Oryza sativa
MAMEKSRVLIVGGTGYIGRRIVAASLAEGHPTFVLLRPEIGLDIDKLQILLAFKAQGARLLEASLDDHDGLVAAVRQVDVVVSAMSGVHLRSHNLMLQLKLVEAIKEAGNVKRFLPSEFGMDPSRMGNALEPGRVTFDEKMEIRRAIEDAKIPHTYVSSNCFAAYFCPNLSQLTSFLPPKERVNVYGDGNVKAFFVDEDDVGTYTIKSIDDPRTLNKTIYIRPQDNCLTHNELIAMWEKLSGKSLTKFHIPAEEFLAPMKDMQFAFQVGITHFYHIFYEGCLTNFDIGDNGAEATILYPEVQYTRIDEFLKRYL

SEQ ID NO: 18421 - protein, 149 aa, Brassica napus
  misc_feature (16)..(16): Xaa can be any naturally occurring amino acid
  misc_feature (34)..(34): Xaa can be any naturally occurring amino acid
  unsure (1)..(149): unsure at all Xaa locations
EYLAPEIIKGEGHGSXVDWWTFGIFLYELLFGKXPFKGSGNRATLFNVVGQPLRFPDSPVVSFAARDLIRSLLVKEPQHRLAYKRGATEIKQHPFFEGVNWALVRCASPPEIPKPVEIEPVNCTPPAVPAAASTSVRSDQSNYLEFDFF

SEQ ID NO: 18422 - protein, 469 aa, Arabidopsis thaliana
MGKGAIKEEESEKKRKTWRWPLATLVVVFLAVAVSSRTNSNVGFFFSDRNSCSCSLQKTGKYKGMIEDCCCDYETVDNLNTEVLNPLLQDLVTTPFFRYYKVKLWCDCPFWPDDGMCRLRDCSVCECPENEFPEPFKKPFVPGLPSDDLKCQEGKPQGAVDRTIDNRAFRGWVETKNPWTHDDDTDSGEMSYVNLQLNPERYTGYTGPSARRIWDSIYSENCPKYSSGETCPEKKVLYKLISGLHSSISMHIAADYLLDESRNQWGQNIELMYDRILRHPDRVRNMYFTYLFVLRAVTKATAYLEQAEYDTGNHAEDLKTQSLIKQLLYSPKLQTACPVPFDEAKLWQGQSGPELKQQIQKQFRNISALMDCVGCEKCRLWGKLQVQGLGTALKILFSVGNQDIGDQTLQLQRNEVIALVNLLNRLSESVKMVHDMSPDVERLMEDQIAKVSAKPARLRRIWDLAVSFW

SEQ ID NO: 18423 - protein, 177 aa, Listeria innocua Clip11262
MTKESLEKATFAGGCFWCMVKPFDTQPGIEKVVSGYTGGHTVNPTYKEVCSGTTGHTEAVEITFDPAVFPYEKLVEVYWQQTDPTDAAGQFVDRGDSYRPVIFYHNEEQRQIAEKSKAALDASGRFKKPVVTEIAKAETFYPAEEYHQDFYKKEKAHYEGYQVASGRAAFIDANWKG

SEQ ID NO: 18424 - protein, 418 aa, Thermobifida fusca YX
MSPRPSGADSVPASWSAEQHIAVAERRSAHNYHPLPVVIAHGEGAWVTDVAGRRYLDCLAGYSAVNFGHRNPELLAAARAQLDRITLTSRAFHHDRFAPFVAALADLVGKEQVLPVNTGAEAVETGIKIARKWGYEVKGVPDGRAVIVVASGNFHGRTTTIVSFSTDPAAYRGFGPPTPGFRIVPYGDAAALADAIDADTVAVLVEPVQGEAGVIVPPADYLPRVRDLCTRAGILLIADEVQSGLGRTGTVRACDHSGVDADIYLFGKALGGGILPVAAAVGDAEVFDVIRPGQHGSTFGGNALACAVGTAVVSLVRDGPYLDHVRALAPVLRARLDQLVGNGVVAARSIGLWAGIDVDPTLATGRELCERLLQRGVLVKDTHGSTIRLSPPLVITEDELHWAVDQIAAVLADLRAGR

SEQ ID NO: 18425 - protein, 433 aa, Cytophaga hutchinsonii
MNEVVVFWFRRDLRLTDNAGLFQALTSGYAVLPVFIFDINILNALEHKNDARVEFIHDTIQSLKNELQKIHSDMEVYHATPAEAFEQLVKKYTVKAIYTNTDYEPAAIKRDNEISDWAAQQQIAFKSFKDQVIFEKNEILTDTGAPYRVYTPYKNKWLKKLTENPVTHSPSEKHTDAFLRMEAKPIVTLKQLGFTPSSIQIPPLETLRKTIQEYDKTRDYPYLEHGTSLLGIHFRFGTISIREKVVKALPLNATWLSELIWREFFMQLLFHFPHVVTESFQSKFNRLEWRYSQADFEKWCTGKTGYPLVDAGMRELNTTGHMHNRVRMVVASFLTKHLFIDWRWGEAYFAQKLLDYDLSANNGNWQWAAGTGADAQPYFRIFNPISQQEKFDPDFIYIKKWVPEFGTSSYIEPIIEHKKATERAKLLFSVLKN

SEQ ID NO: 18426 - protein, 326 aa, Helicobacter pylori J99
MAKHDLVGSALWDAYSKEVQRRMDNPTHLGVITEEQAKAKNAKLIVADYGAEACGDAVRLYWLVDESTDIIIDAKFKSFGCGTAIASSDMMVELCLNKRVQDAVKITNLDVERGLRDDPDTPAVPGQKMHCSVMAYDVIKKAAGMYLGKNAEDFEEEIIVCECARVSLGTIKEVIRLNDLKSVEEITNYTKAGAFCKSCVRPGGHEKRDYYLVDILKEVREEMEAEKLKATANKSQNGELAFREMTMVQKIKAVDKVIDENIRAMLMMDGGDLEILDIKESDDYIDVYIRYMGACDGCMSATTGTLFAIENALQELLDRSIRVLPI

SEQ ID NO: 18427 - protein, 472 aa, Arabidopsis thaliana
MEPWIDELTDDLQSVSFTSAGTTVNRSTSSGSRSSSSAAALTPAPSAHGSFSSSKLPPSLRSSLSLSDLRFRLRLGSGDIGSVFLAEFKSLTAVTETTAVKLPLLAAKVMDKKELASRSKEGRAKTEREILESLDHPFLPTLYAAIDSPKWLCLLTEFCPGGDLHVLRQKQTHKRFHESAVRFYVSEVIVAIEYLHMLGIVYRDLKPENVLVRSDGHIMLTDFDLSLKCDESTSTPQIVLNRNNLPNGSSDQNENQGMDHRQTTSSSCMIPNCIVPAVSCFHPRIRRRKKKTDHRNNGPELVAEPVDVRSMSFVGTHEYLAPEIVSVYIMYNFPMWYPNMKRKMWMAGEGHGSAVDWWTLGIFMFELFYGTTPFKGMDHELTLANIVARALEFPKEPTIPSAAKDLISQLLAKDPSRRLGSSLGATAVKRHPFFQGVNWALLMCTRPPFLPPPFRKELLSDDICPETHVDYY

SEQ ID NO: 18428 - protein, 461 aa, Photobacterium profundum SS9
MNNRSSGDLLGHPKGLFLLFGTELWERFSYYAMRAILVLYLTDKTINGGLGWSTQDALNLYGIYTGLVYITPLIGGWIADNFLGQRRSIIIGGVLMALGQFTLALPHSMIDLNAITAFYLGLALLIVGNGLFKPNISTMVGDLYQDGDHRRDGAFTIFYMGINLGSLLAGIIAGTASMTYGWKAGFLTAGIGMVISLITQLIFAERILGDIGKVPAAKRAAEMNKSGKKEPLTLQERDRLKVIMIMGLFVVIFWAGFEQAGGLMNIFSQQYTDRMIGSFEVPAAWFQSLNPFFVITLAPIIAALWVKMGPKEPNSPVKFAMGLFFLAIGFVFMMGAVMQQGGDITVKTSMLWLVGAYFFHTLGELCLSPIGLSMVTKLAPLRLASLMMGAWFGFNAVANYVAGIIGSLMGESGPMAIFSGIAIAAVVAGVLLLLCSNQLVRWMHGAEGKAVEDVNGKAVEA

SEQ ID NO: 18429 - protein, 912 aa, Lactobacillus acidophilus NCFM
MTFTKLENSSDQAVVAEEVKILTKLLNESTRQLIGDDAFAKIQDLIDTSASKDQKQLESKISSLNNREMIVVARYFATLPLLINISEDVELASKVNVFNNTDQDYLGKLSDTIDLVAQKDDAKRILENVNVVPVLTAHPTQIQRKTVLELTDKIHHLLRSYRDVKNGTINQREWTEQLRACIEILMQTDIIRGHKLKVSNEITNVLAYYPKALIPAITKFTTRYKELAKEHNLTLDQATPITMGMWIGGDRDGNPYVTADTLELSATLQSQVIFEYYMKELKKLYRAISLSTSYMQPSAAVEKLSKLSNDDSPFRTDEPYRRAFYYIESRLVHTEKELLGIIDKNIFIKPHDLENLDNIPVYNNPQEFKSDLETIKASLDEDHDQAVTHSFFTQILEAIDVFGFHLATIDMRQDSSVNESCVAELLKSAGICDNYSDLSEKEKVELLLSELENDPRNLHANNKPKSELLQKELKIYKTARQLKDRLGEDVIKQHIISHTESVSDMLEQAIMLKEYNLVDSEKARIQVVPLFETVEDLLNAREIITQYLSFPIVKKWLVSQNNYQEIMLGYSDSNKDGGYLASCWNLYKAQKDLTAIGEKLGVKITYMHGRGGTVGRGGGPSYEAITAQPFKSINDRIRMTEQGEIIQNKYGNKDTAYYNLEMLASAAIDRMVSKQAVSEERITDFRSSMDKIVEESNKIYRKLVFENPAFLDYFFQATPIKEISNLNIGSRPASRKKLTDFSGLRAIPWVFSWSQSRIMFPGWYGVGSAFANFINADPTHLKELQEMYKGWPFFHSLLSNVDMFLSKSNMEIAREYASLCDDEETKKVFDIIYQEWKLTKKVILQIEDHDDLLAEAPILKQSLDYRMPYFNILNYIQIEMIKRGREDEIQGVYQSIIPITINGVASGLRNSG

SEQ ID NO: 18430 - protein, 384 aa, Cytophaga hutchinsonii
MPKILIIDDERSIRSTLTEILEYEKYTVEEAKDGEEGLKMILENDYDVVLCDIKMPKMDGMEVLEKVYTSGKDIPFIMISAHGSIETAIDATRKGAYDFITKPPDLNRLLVSVRNAMDRSNLVTETKTLKKKVNKSYQIIGKSKEIEHIFKTIEKVAPTDARVMITGPNGAGKELVARAIHTQSKRANELLIEVNCAAIPSELIESELFGHEKGSFTSAIKQRIGKFEQASGGTLFLDEIGDMSLSAQAKVLRALQENTITRVGGEKEIKVDVRILAATNKNLQKEIAEGRFREDLFHRINVIPIEVPALKDRADDIPLLIEHFLAIVADDYGTTPKKIDAKAVAELKSLPWTGNIRELKNVVERLVIMSDKTITLEDVKTYVK

SEQ ID NO: 18431 - protein, 239 aa, Pediococcus pentosaceus ATCC 25745
MDNSLSLQLLGEFIGTFVLVLLGDGVVAGVSLRKSKAEGSGWIAITLGWGLAVTLGVYASSFLSPAHLNPAVSVGMAIAGKFPWSSVIPYSIAQILGGLVGGIIVWIHYYPHWKETKDKDAILGTFATEPAIRNYSMNFISEVVGTAVLIFGLLAFTRGQFTQGLNPIAVGVLITAIGLSLGGTTGYAINPARDLGPRLAHAMLPIANKGGSDWAYSWVPILGPVVGAILGAICFNLIP

SEQ ID NO: 18432 - protein, 305 aa, Brassica napus
MQIFVKTLTGKTITLEVESSDTIDNVKAKIQDKEGIPPDQQRLIFAGKQLEDGRTLADYNIQKESTLHLVLRLRGGMQIFVKTLTGKTITLEVESSDTIDNVKAKIQDKEGIPPDQQRLIFAGKQLEDGRTLADYNIQKESTLHLVLRLRGGMQIFVKTLTGKTITLEVESSDTIDNVKAKIQDKEGIPPDQQRLIFAGKQLEDGRTLADYNIQKESTLHLVLRLRGGMQIFVKTLPGKTITLEVESSDTIDNVKAKIQDKEGIPPDQQRLIFAGKQLEDGRTLADYNIQKESTLHLVLRLRGGF

SEQ ID NO: 18433 - protein, 139 aa, Brassica napus
  misc_feature (18)..(18): Xaa can be any naturally occurring amino acid
  unsure (1)..(139): unsure at all Xaa locations
DLGVWLVELVWSFWAYIXISGGRSLWTPNVVTLVEALLTVLQYGLLLVHAYAQDKRWPYLSLPMSRGDRPEEWVPEEIDTSKDDNDVHDVYSDAAQRAVESGNRNIVDIFSIHSATNDAGITYHTVADTPVGSSTSKRM

SEQ ID NO: 18434 - protein, 290 aa, Candida glabrata CBS138
METEHQADKNAELGYDSGSTVAPPNKYSTLRSRFNLGPDTMRNHVIAFFGELVGTFMFLWCAYVIANIANHDVLLDVYPDGSHPGQLIMIALGFGFSVMFSIWCFAGVSGGALNPAVSLSLALSRTITPMRCIVMWVAQMLGGMAAGGAASGMTPGPVLYANTLGNGCSRTRGLFLEMFGTTILCLTVLMTAVEKGESNFMCALPIGISLFIGHLALTGYTGTGVNPARSFGAALAARSFPVYHWIYWIGPLLGAILAWFVWQVLQWLDYSSYVTREKEAAAKTKVMVEP

SEQ ID NO: 18435 - protein, 460 aa, Candida glabrata CBS138
MSSQVNEPEFQQAYHEVVSSLKDSSLFEKHPKYAKVLPVVSVPERIIQFRVTWENDNHEQEVATGYRVQFNSAKGPYKGGLRFHPSVNLSILKFLGFEQIFKNALTGLDMGGAKGGLCVDLKGRSDNEIRRICYAFMRELHRHIGADTDVPAGDIGVGGREIGYLFGAYRHYTNSWEGVLTGKGLNWGGSLIRPEATGYGLVYYTQSMIDYATKGKESFSGKRVAISGSGNVAQFAALKVIELGGIVVSLSDSKGCIISETGITTEQIASIAEAKIKFKSLEQIVGEYSAFAENKVEYVAGARPWTLVGKVDIALPCATQNEVSGDEAKALVAAGVKFVAEGSNMGCTPEAIDVFESSRATASAPGEAVWYAMGKNSNLGGVLTSGLEMAQNSQRMSWTSEEVDQELKKGMVNCFNDCIEAAEKYSNESNKNALPSLVKGGNIASFIKVADAMFDQGDVF

SEQ ID NO: 18436 - protein, 166 aa, Parthenium hysterophorus
MFPMVTEFMNYGQQTVRAARYIGQGFMITLSHANRLPVTIQYPYEKLITSERFRGRIHFEFDKCIACEVCVRVCPIDLPVVDWKLETDIRKKRLLNYSIDFGICIFCGNCVEYCPTNCLSMTEEYELSTYDRHELNYNQIALGRLPMSIIDDYTIRTIFNLPERKT

SEQ ID NO: 18437 - protein, 66 aa, Brassica napus
  misc_feature (63)..(63): Xaa can be any naturally occurring amino acid
  unsure (1)..(66): unsure at all Xaa locations
MRASGYFRTESDDFNMPSHKSFMIKKKLAKKMRQNRPIPHWIRLRTDNTIRYNAKRRHWRRTXLGF

SEQ ID NO: 18438 - protein, 383 aa, Candida glabrata CBS138
MRSLAYFKTGDIHFTDKIDTPKINNDHELMIDVAWCGICGTDLHEFLEGPIFMPKDGDTHYLSGLDLPLPMGHEMSGIVKEVGKGVTRFKPGDRVVIEATTSCGDTHRWPKSKVAKGELCPACEMGLPNCCTHGSFQGLGSVGGGFAEQVVVGEKHVVKIPDKLPLDVAALVEPLSVAWHAARLAEFKEGSNALVLGSGPIGLAMILALKGMKAGKIVVSEPAKLRRELAEKLNVVVFNPTHTRAQNAIEKLKELSPKDHGFDYTFDCSGVQDTFNAAVKAACIQGHIVNVAIWGPKPVAFHPMDMTYGEKKLTGTMGYVTRDFEEVVDAIDKGYISIEECKLLITGRVKLEDGMEKGFHELIEHKETNVKILLTPNNHGELQ

SEQ ID NO: 18439 - protein, 498 aa, Glycine max
MGKVAVGAAVVCAAAVCAAAALVVRHRMISSRKWSRAMAILKEFEEKCGTPIVKLRQVADAMDVEMHAGLASEGGSKLNMLISFVDNLPTGDEEGLYYALDLGGTNFRVLRVHLGGKDKGVIGQEFEEVSIPPNLMTGSSDALFDFIAAALAKFVGSEPEGFHPPPGRQRELGFTFSFPVRQTSIASGTLIKWTKGFNIEDAVGEDVVGELTKSMEKIGLDMRVAALVNDTIGTLAGGRFYNQDVIAAVILGTGTNAAYVERAHAIPKWHGLIPKSGDMVINMEWGNFRSSHLPLTEYDLALDAQSLNPGEQIFEKLISGMYLGEVVRRALLKMAEEADFFGDTVPPKLKVPFILRTPDMSAMHHDTSSDLKVVGNKLKDILEISNTSLKMRKIVVELCDIVATRGARLAAAGILGILKKIGRDTVKVGEKQKSVIALDGGLFEHYTKFRECLESALKELLGDEAAETIVIEHANDGSGIGAALLAASHSQYLGVEES

SEQ ID NO: 18440 - protein, 166 aa, Perityle lindheimeri
MFPMVTEFINYGQQTVRAARYIGQGFMITLSHANRLPVTIQYPYEKLITSERFRGRIHFEFDKCIACEVCVRVCPIDLPVVDWKLETDIRKKRLLNYSIDFGICIFCGNCVEYCPTNCLSMTEEYELSTYDRHELNYNQIALGRLPMSIIDDYTIRTILNLPEIKT

SEQ ID NO: 18441 - protein, 343 aa, Vibrio sp. Ex25
MKIKALSKLKPEEGIWMTEVDKPEVGHNDILIKIKKTAICGTDVHIYNWDEWSQKTIPVPMVVGHEYVGEVVAIGQEVRGFEIGDRVSGEGHITCGHCRNCRGGRTHLCRNTIGVGVNREGAFAEYLVIPAFNAFKIPDEISDDLASIFDPFGNAVHTALSFDLVGEDVLITGAGPIGIMAAAVAKHVGARHVVITDVNEYRLELARKMGVTRAVNVAEEKLEDVMAELGMTEGFDVGLEMSGNPAAFNSMLTTMNHGGRIALLGIPPSDMGIDWNQVIFKGLVIKGIYGREMFETWYKMASLIQSGLDLSPIITHHYKIDDFQEGFDVMRSGMSGKVILDWE

SEQ ID NO: 18442 - protein, 166 aa, Perymeniopsis ovalifolia
MFPMVTEFMNYGQQTIRAARYIGQGFMITLSHANRLPVTIQYPYEKLITSERFRGRIHFEFDKCIACEVCVRVCPIDLPVVDWKLETDIRKKRLLNYSIDFGICIFCGHCVEYCPTNCLSMTEEYELSTYDRHELNYNQIALGRLPMSIIDDYTIRTILNLPEIKT

SEQ ID NO: 18443 - protein, 397 aa, Vibrio sp. Ex25
MSSAFYQQIQQQIEEVKTEGLYKSERVITSQQQAAVKISTGEEVLNFCANNYLGLANHPALIEAGKAGMDEHGFGMASVRFICGTQDIHKELEQKLSKFLGKEDTILYTSCFDANAGLFETILGKEDAIISDALNHASIIDGVRLCKAMRFRYSNNNMEELEQQLIAAKEAGARHILIVTDGVFSMDGVVANLPAICDLAEKYGALTMVDDSHAVGFMGKTGAGTHEYHNVVDRIDIITGTLGKAMGGASGGYTSGKAEVIDWLRQRSRPYLFSNSVAPAIVSASIRVLDLLEESGDLRDRLWENAAHFRARMEAAGFTMGGADHAIIPIMLGDAKVAAEFAERALEKGIYVIGFSFPVVPKGQARIRTQMSAAHSREQLDRAIDAFIEVGKDMGLI

SEQ ID NO: 18444 - protein, 359 aa, Helicobacter pylori J99
MKILSYLKKFYLFLLIGAIMQANESMGAKLPKTDERVIYLAGGCFWGLEAYMERIYGVIDASSGYANGKTSSTNYEKLHESDHAESVKVIYDPKKISLDKLLRYYFKVIDPVSVNKQGNDVGRQYRTGIYYVNSADKEVIDNALKALQKEVKGKIAIEVEPLKNYVRAEEYHQDYLKKHPGGYCHIDLKKADEVIVDDDKYTKPSDEVLKKKLTKLQYEVTQNKHTEKPFENEYYNKEEEGIYVDITTGEPLFSSADKYDSGCGWPSFSKPINKDVVKYEDDESLNRKRIEVLSRIGKAHLGHVFNDGPKELGGLRYCINSAALRFIPLKDMEKEGYGEFIPYIKKGELKKYIQDKKSH

SEQ ID NO: 18445 - protein, 509 aa, Arabidopsis thaliana
  misc_feature (151)..(151): Xaa can be any naturally occurring amino acid
  unsure (1)..(509): unsure at all Xaa locations
MDVEEKKPLIESSDRNLPDFKKSVKLKYVKLGYHYLITHGMYLFLSPLVLVIAAQISTFSVTDLRSLWEHLQYNLISVVVCSMLLVFLMTIYFMTRPRPVYLVNFSCFKPDESRKCTKKIFMDRTKLFWSFTKENLELQRKILQRSGLLEXTYLSEAVLNVPPNLFMKEARKEAETVMFGAIDELLAKTNVNPKDIGILIVNCSLFNPTPSLSAMVVNHYKLRGNILSYNLGGMGCSAGLISIDLAKHLLHSIPNTYAMVISMENITLNWYFGNDRSKLVSNCLFRMGGAAILLSNKRWDRRRSKYELVDTVRTHKGADDKCFGCITQEEDSASKIGVTLSKELMAVAGDALKTNITTLGPLVLPTSEQLLFFATLVGRKLFKMKIKPYIPDFKLAFEHFCIHAGGRAVLDELEKNLKLTEWHMEPSRMTLYRFGNTSSSSLWYELAYSEAKGRIKKGDRIWQIAFGSGFKCNSSVWRAVRSVNPKKEKNPWMDEIHEFPVEVPKVSTI

SEQ ID NO: 18446 - protein, 575 aa, Triticum aestivum
  misc_feature (214)..(214): Xaa can be any naturally occurring amino acid
  unsure (1)..(575): unsure at all Xaa locations
MRRTRGGPFPIQVGNWWEGESVRASSLLRQLAKGGFASRRLSWVTPGFSQSRRCKTTASECNTTHYRANWARRRMLPAAMAGLAWSRPRSPIYRATPLALTPSYHSPRPPPPPPPPPLGSFSFLPVSAMGKEKTHINIVVIGHVDSGKSTTTGHLIYKLGGIDKRVIERFEKEAAEMNKRSFKYAWVLDKLKAERERGITIDIALWKFETTKYXSTVIDAPGHRDFIKNMITGTSQADCAVLIIDSTTGGFEAGISKDGQTREHALLAFTLGVKQMICCCNKMDATTPKYSKARYEEIVKEVSSYLKKVGYNPEKVPFVPISGFEGDNMIERSTNLDWYKGPTLLEALDQINEPKRPSDKPLRLPLQDVYKIGGIGTVPVGRVETGVIKPGMVVTFGPTGLTTEVKSVEMHHESLLEALPGDNVGFNVKNVAVKDLKRGFVASNSKDDPAKEAANFTSQVIIMNHPGQIGNGYAPVLDCHTSHIAVKFAELVTKIDRRSGKEIEAAPKFLKNGDAGIVKMIPTKPMVVETFATYPPLGRFAVRDMRQTVAVGVIKGVEKKDPTGAKVTKAAIKKK

SEQ ID NO: 18447 - protein, 475 aa, Burkholderia fungorum LB400
MSRLIVVSNRVAPTQEGRPAAGGLAIGVLDALKETGGVWFGWSGETVSEPSAPVIEKQGNVTYATVGLTKRDYDQYYRGFSNATLWPTFHYRNDLSRYDRQEYAGYQRVNATLAKQLKELLKPDDIIWVHDYHLLPFARCLRELGVKNPIGFFLHIPFPVPEVLRTIPPHEELVKAMCSYDVIGFQTDADRQSFVDFIERGQHGTSSEDGMVHAYNRFLKVGAYPIGIYPDAIAKAAEQFTDRKPVRSLRDGMRGRKLIMSVDRLDYSKGLVERFQAFERLLLNAPGWHGRVSLVQIAPPTRADVQTYQRIRQTLEGEAGRINGRFAQLDWTPIQYLNRKYERNLLMALFRQSQVGYVTPLRDGMNLVAKEYVASQDPADPGVLVLSQFAGAAEQLPGALVVNPFDLSQMAEALERALSMPLAERQARHADMMAPMRENNLSVWRDTFLADLRNVATASSVTAKAVKLADVTASS

SEQ ID NO: 18448 - protein, 169 aa, Zea mays
MEERYEALKELGAGNFGVARLVRDKRTKELVAVKYIERGKKIDENVQREIINHQSLRHPNIVRFKEVCLTPTHLAIVMEYAAGGELFEKICSAGRFSEDESRYFFQQLISGVSYCHSMEICHRDLKLENTLLDGSPTPRVKICDFGYSKVLYTDPALLCVLTLPATDFS

SEQ ID NO: 18449 - protein, 670 aa, Nostoc sp. PCC 7120; identical to SEQ ID NO: 1398

SEQ ID NO: 18450 - protein, 335 aa, Debaryomyces hansenii CBS767
MTYSTITVIGSLNYDLVTYTKAVPEGGETYQANSFENHIGGKGLNEAIATSRLSGKQSKCHVRMIGNVGNDSFGKELKQALVNSGVDTKYVKTLEKQSSGVAVIIVEEESGENRILITAGANGELCPTKEEYETYFPKDVDGAQFVILQNEYPDTVKSIEWLKANRQKINIAYNPSPFKPEFISQQFWSKIDFLIINEGEALSVASKLLTDEENAKFNKTIKLDKVEGFSDLADKLQEMINPDNVSTVIITMGSKGSIFTSRNAKSTFVKSHKVENVVDTTGAGDTFFGGVVLQLANGSSIEKAVEFATKASSLVIQKKGAAESIPTLEEINKYI

SEQ ID NO: 18451 - protein, 542 aa, Pediococcus pentosaceus ATCC 25745
MTEKAMSILNNPYLNKGTAFTKEERDQLGLNGLIPPYIQTIDEQVEQVYAQFQTKANDLEKRLFLMQIFNENRVLFYKLFSQHVVEFMPIVYDPTIADTIENYSELYVQSQNATFLSIDDPDMMEEALKNSAAGRDIRLIVVTDAEGILGIGDWGTNGVDISVGKLMVYTAAAGIDPSQVLPVVLDVGTNNQDLLKNPMYLGNRHERIKGDRYYDFVDKFVETAENLFPNMYLHFEDFGRDNAANILNKYKDRYVIFNDDIQGTGIITLAGILGALNISKQKITDQVYLSFGAGTAGAGILGRIYEEMIENGLSEEEAKKHFYMVDKQGLLFDDDETLTPEQKPFARKRSEFDNADELTDLLSVVKAVHPTIMVGTSTQPGSFTEEVVREMAAHTERPIIFPLSNPTKLAEAKAEDLLKWTDGRALIATGIPVGDIEYNGVTYQIGQANNALVYPGLGLGVIASTAKVLNDTMISKAAHSLGGIVDVDQPGAAVLPPVSKLSDFSNTVAKAIAQSAVDQGLTKEKIDNVDQAVEDTRWNPEY

SEQ ID NO: 18452 - protein, 404 aa, Photobacterium profundum SS9
MKRAVITGMGIVSSIGNDVKEVLASLKSGKSGINFSEQFAENKLRSNVWGDLKMNPAEHIDRKKMRFMGDAAAFAYLSMEQAIEDSGLSDDQVSNDRTGLVAGSGGASSYNQVAAVDIIRNKGVKRVGPYMVPRTMSSTVSACLATPFKIRGVNYTMSSACATSAHCIGHAVELIQLGKQDVVFAGGGEELDWSLTMMFDAMGALSTKYNDDPSKASRTYDADRDGFVISGGGGMVVIEELEHALARGAKIYGEVVGYGATSDGYDMVAPSGEGAVRCMKMAMKDLDAPIDYINTHGTSTPVGDVKELGAIQELFGKNSPAISATKAMTGHALGAAGVHEAIYSTLMLNNNFVAPSINIDNLDPAAEGLDIVTETRETELTTVMSNSFGFGGTNATLVIKKYEG

SEQ ID NO: 18453 - protein, 450 aa, Oryza sativa
MAQWDALVDAALARLASRSLLRATRPIALAPPPAPPETFPCPGPWDRAAVEIRLDRATLHQWLAEGGEGSGQEEKVDEKLILFSGNDYMGLSSHPAIRHAAVKAAEEYGMGPRGSALICGYTTYHKMVEESLAELKKKEDCLLCPTGFSANMAVMTALGNISSLLAAGRKPAEDERIAIFSDALNHASIIDGIRLVERQQEVVSFVYKHCDMSHLELLLSSCSMEKKVVVTDSLFSMDGDFAPLPELVKLRRKYGFLLVIDDAHGTLVCGENGGGAPELFECENEIDISVGTLSKAAGCQGGFIACSTRWKRLIQSRGRSFIFSTALPVPVVASVYAALYVSREERWRRSVIWRHVQYFASLTKLNITSPIISIVVGSEKAALRAGRDMLRSGFHVTPIRPPTVPPNSCRLRITLSASHSSDDIKRLVDALTPWLPHKHDIQIYAVASKL

SEQ ID NO: 18454 - protein, 443 aa, Lactobacillus acidophilus NCFM
MKKYDYIILGSGPVAIHLLAKLERTTNKVLLIEKGLWGGTCPNTGCQPKIFMEGTVRPVLNSYYLAGKGIKEAAKIDWPTLVARKKKIWTAFHKNERKSMTSEHTDTVQGKGVITGPHTVKVGDQEYEGKNIVIGTGLAPRDLDVPGNEYAITNNEFFDLDKLPKRAIVIGGGYVAMELATILQAAGAEVTILQHSDRLLRPFDQEMVGTLKRIMEDRGIKFHLNAPVKEIAKDGDQYTVTTENGDTFDTDLVINAAGRKPNVEGIGLEDVGIEFDPNKGIKVNEHMQTNIPSIFAAGDVADNGQPSLTPVAWVDAYHIINFVENGITDPIQYPPVATNAFTYPEIAQVGICEDEMEEGDYIKTLDLSDMFFSMGEGDSHAKLKVILNKNGEVRGASELSIHAAEDINNFVPLVGRKDPKKFVEENLTFAFPTPANNLDTLFR

SEQ ID NO: 18455 - protein, 474 aa, Actinobacillus pleuropneumoniae serovar 1 str. 4074
MSKEIKTQVVVLGAGPAGYSAAFRCADLGLETVIVERYSTLGGVCLNVGCIPSKALLHVAKVIEEAKHAEKNGITFGEPNIDLDKVRAGKEAVVSKLTGGLAGMAKARKVTVVEGLAAFTDPNTLVARDRDGNPTTIKFDNAIIAAGSRPIQLPFIPHEDPRVWDSTDALKLKEVPKKLLIMGGGIIGLEMGTVYNALGSEVEVVEMFDQVIPAADKDVVAIYTKQIEKKFKLMLETKVTAVEAKDDGIYVSMEGKACNDTKRYDAVLVAIGRVPNGKLIDAGKAGVNVDDRGFIAVDKQMRTNVPHIFAIGDIVGQPMLAHKGVHEGHVAAEVIAGQKHYFDPKVIPSIAYTEPEVAWVGKTEKECKQEGLNYEVAKFPWAASGRAIASECSEGMTKLIFDKDTHRLLGGAIVGSNGGELLGEIGLAIEMGCDAEDIALTIHAHPTLHESVGLAAEVFEGSITDLPNAKAKKR

SEQ ID NO: 18456 - protein, 504 aa, Neurospora crassa
MTSPYHAAAREKRAAERILDERNPNSGNVPRGSSSSRGPQQLPLHSDPIGTEGRGHGSHHHHHHHHHPPAPKSWFPVRAGGESGRSGIHPWHFFRIVFRSSSLASRMVNVLWPVVPAAIALRYAAPHQDLAIFILAYIAMVPCANLVGFAGQNLAKKVPHVFGVLAETTFGSLVEIILFIVLIKRYSPTQAVDYTQVIRAAILGSILATMLLCLGFCFVAAGFKREETHFSEIVSEAGSGLLLTAGFGLAVPTAFYNALHGRLDTKELERKTLEISRSTAVLLIIAYLVYVFFQMRTHHGIYDAIFEADAERDDDKHKELQSHRLTLIESIIALAVGVALVTIIAIMLVDRIHFLVEERGVSDAFLGLIMIPLVEKAAEHLTAVDEAYDNQMNIALSTVLGSTLQTALFNGPLVVIVGWGMNKPMGFNFELFDLAMLILAILTVGNFLRDQKTNYLEGMLCVIVYVAIGVAAAHYPNPQELHEAFPTAGTSPAPATSGSEGGHH

SEQ ID NO: 18457 - protein, 392 aa, Burkholderia pseudomallei K96243
MTEAVIVSTARTGLAKSWRGAFNMTHGATLGGHVVAAAVERAKLDPARVEDVLIGCANPEGATGANIARQIALRAGLPVGVPGMTVNRFCSSGLQTIALAAQRVIAGEGDVFVAGGVESISCVQNEMNRHMLREGWLDAHKPEIYWTMLQTAENVAKRYGISKARQDEYGVNSQLRATAAQAAGRFNAEIVPITVRAGVADKATGRLYTKEVTLAADEGIRPDTTLEGVAKIRAALPGGVITAGNASQFSDGAAACVVMNAKVAEREGLAPLGIFRGFAVAGCEPDEMGIGPVYAVPKLLKQAGLKVSDIDLWELNEAFAVQVLYCRDTLGIPDDRLNVNGGAIAVGHPYGVSGARLTGHALIEGKRRGAKYVVVTMCIGGGQGAAGLFEVV

SEQ ID NO: 18458 - protein, 168 aa, Brassica napus
  misc_feature (21)..(21): Xaa can be any naturally occurring amino acid
  unsure (1)..(168): unsure at all Xaa locations
MASSSSIYRSSSSSDGGNPSXSTHAVRDRKRKRMLSNRESARRSRMRKQKHVDDLTAQINQLSNDNRQILTSLTVTTQLYTKIQAENSILTAQMTELSTRLESLNEIVDLVTTTNGGVDQIDGCGFDDRTVGINCDGYYDDMMSGVNPWGGSVYSNQPIMANDMMNMY

SEQ ID NO: 18459 - protein, 400 aa, Bordetella bronchiseptica RB50
MSTLFASVELAPRDPILGLNEQYNADTRPGKVNLGVGVYYDDEGRIPLLQAVRKAEVARIEAAAARGYLPIEGIAGYNKGAQALLLGADSPLAAEGRVLTAQALGGTGALKIGADFLRQLLPQSKVLISDPSWENHRALFERAGFPVETYAYYDAATHGLNFEAMLAALQAAPEQTIVVLHACCHNPTGVDPTPQQWEQIAAVVKARNLVPFLDIAYQGFGEGLEQDAAVVRMFAALDLTMFISSSFSKSFSLYGERVGALTVVAGSKDEAARVLSQLKRVIRTNYSNPPTHGGTVVSTVLNTPELFALWENELAGMRDRIRLMRKELVEKIKAQGVAQDFSFVLAQRGMFSYSGLTAAQVDRLREEHGIYAVSSGRICVAALNSRNIDAVAAGIAAVLK

SEQ ID NO: 18460 - protein, 166 aa, Polymnia canadensis
MFPMVTEFMNYGQQTVRAARYIGQGFMITLSHANRLPVTIQYPYEKLITSERFRGRIHFEFDKCIACEVCVRVCPIDLPVVDWKLETDIRKKRLLNYSIDFGICIFCGNCVEYCPTNCLSMTEEYELSTYDRHELNYNQIALGRLPMSIIDDYTIRTIFNLPEIKS

SEQ ID NO: 18461 - protein, 151 aa, Arabidopsis thaliana
MTKRAPKSGPLSPSCSGGSSRNLELAVKSSEGARRSTRLRLQPLRKPKTSPKKKPVKLQTKMPKKPATAFFFFLDDFRKQYQEENPDVKSMREIGKTCGEKWKTMTYEEKVKYYDIATEKREEFHRAMTEYTKRMESGAHDESETDSDYSE

SEQ ID NO: 18462 - protein, 458 aa, Streptococcus agalactiae NEM316
MENHRYEDEGKFQRKMTSRHLFMLSLGGVIGTGLFLSSGYTIAQAGPLGAVLSYLIGAVVVYLVMLSLGELAVAMPVTGSFHTYATKFISPGTGFTVAWLYWICWTVALGTEFLGAAMLMQRWFPDVPAWAFASFFALVIFGLNALSVRFFAEAESFFSSIKVIAIIIFIILGLGAMFGLVSFEGQHKAILFTHLTANGDFPNGIVAVVSVMLAVNYAFSGTELIGIAAGETDNPKEAVPRAIKTTIGRLVVFFVLTIVVLASLLPMKEAGVSTAPFVDVFDKMGVPFAADIMNFVILTAILSAGNSGLYASSRMLWSLANEGMLSKSVVKINKYGVPMRALLLSMAGAVLSLFSSIYAADTVYLALVSIPGFAVVVVWLAIPVAQINFRKEFLKENRLEDLSYKTPFTPVLPYITIVLLLISIVGIAWDSSQRAGLYFGVPFIILCYIYHKLRYKTW

SEQ ID NO: 18463 - protein, 145 aa, Solanum tuberosum
AQPGAAGPPNDKVVILGDGNTKAVFNKEEDIGTYTINAVDDPKTLNKILYIKPPHNIITLNELVSLWEKKTGKNLERLYVPEEQVLKNIQEASVPMNVGLSIYHTAFVKGDHTNFEIEPSFGVEASEVYPDVKYTPIDEILNQYV

SEQ ID NO: 18464 - protein, 406 aa, Vitis vinifera
MDSMLIGSFPRPCSSYVSSDDWRTVKFKLGHSPSSYVPVQISRNGAGRSYTVSFQQHLTKHHVRGIQEGCTFYKRWNTKCVVNAASGQPLESEPGASSPKSTLTPVKNALGAFYRFSRPHTVIGTALSIISVSLLAVEKLSDFSPLFFTGVLEAVVAALLMNIYIVGLNQISDIEIDKVNKPYLPLASGEYSVGTGVGIVTSFAFMSFLVGWIVGSWPLFWALFVSFVLGTAYSIDLPLLRWKRFALVAAMCILAVRAVIVQIAFYMHVQTFVYGRPAVFSRPLIFATAFMSFFSVVIALFKDIPDIEGDRIFGIRSFSVRLGQKRVFWICILLLQMAYGAAVSVGATSSCLWSKLVTVLGHAVLASILWTRAKSVDLKSKAAITSFYMFIWQLFYAEYFLIPLVR

SEQ ID NO: 18465 - protein, 189 aa, Solanum tuberosum
SDGKVDKFIGGESSLPLHEIGSNAGGDGGRYYLGMFLGGAYEEALGGLHNLFGGPSVVRVLQSDSPHSFAVTRSVPGPSCADVLRAMQFEPELMFETLKHRAEEFLEQGEGEGEDKGLAFASLTSSLAQSFHNMPYLVSSSSSCCFTAEATATASANANANNGGYYYYSEDNAADCATEEDEIWSYCTA

SEQ ID NO: 18466 - protein, 409 aa, Petunia x hybrida
MASGIMPSAGGKHRTDAMLVDKLPEEINEMKIRDDKAEKEMEAAVVDGNGTEKGHIIVTTIGGKNGEPKQTISYMAERVVGQGSFGIVFQAKCLETGETVAIKKVLQDKRYKNRELQTIRLLDHPNVVALRHCFFSTTEKDELYLNLVLEYVPETVYRVLRHYSKANQQMPMIYVKLYTYQIFRALAYIHGIGVCHRDIKPQNLLVNPHTHQLKLCDFGSAKVLVKGEPNISYICSRYYRAPELIFGATEYTFAIDIWSVGCVLAELLLGQPLFPGESGVDQLVEIIKVLGTPTREEIKSMNPNYTEFKFPQIKAHPWHKIFHKRMPPEAVDLVSRLLQYSPNLRSTALEACTHTFFDELRDPKTRLPNGRPLPPLFNFRPQELKGASADLLNKLIPEHAKKQCTFLGV

SEQ ID NO: 18467 - protein, 415 aa, Glycine max
MVSTFEKKKNLSKLIIPSSSSSPNPSPSSPHVIFSRSHSFVGPSPRFVPSSTPLFFLEEEEEEEEEEELPFGPDPPKIGPSDFHILRVVGQGAFGKVFLVRKKGDCFDDADGVFAMKVMRKDTIIKKNHVDYMKAERDILTKVLHPFIVQLRYSFQTKSKLYLVLDFINGGHLFFQLYRQGIFSEDQARLYTAEIVSAVSHLHKNGIVHRDLKPENILMDADGHVMLTDFGLSKEINELGRSNSFCGTVEYMAPEILLAKGHNKDADWWSVGILLYEMLTGKAPFTHNNRKKLQEKIIKEKVKLPPFLTSEAHSLLKGLLQKDPSTRLGNGPNGDGHIKSHKWFRSINWKKLEARELEPKFKPDVSAKDCTSNFDQCWTAMPADDSPAPTPTAGDHFQGYTYVAPNPWLSSRSLD

SEQ ID NO: 18468 - protein, 386 aa, Azoarcus sp. EbN1
MLLDRLKADLAELDTRALRRTRRSLATPCAPHARVDGRDMLAFCSNDYLGLAANPALTRALQTGAVHWGAGCGASHLVSGHYAVHDELEARLAAFVDCERALYFSTGYMANTGTIPALVGRGDAIFADRLNHASLVDGALLSRAELHRYAHGDPAALERALAASSARRKLIVTDAVFSMDGDVAPLATLLELAERFDAWLMVDDAHGFGVLGPGGRGAVAEAGLASWRLIYVGTLGKAAGVSGAFVAGHADVVEWLMQKARTYIFTTGAPPALAETLLASLELIERGDERREHLVGLVALLRRELTLARWQLLPSRTPIQPVLIGDNAEALAVARALWDEGLWVPAIRPPTVPHGTARLRISLTAAHCADDVRRLAQALNRLEAQR

SEQ ID NO: 18469 - protein, 435 aa, Listeria innocua Clip11262
MLGKGKIAALGFQHVLAMYAGAVIVPLLIGGALGFNGEEMTYLVSIDIFMCGIATLLQLTVNRFFGIGLPVVLGCAVQAIAPIILIGQDMGIGAIYGSIIVSGLFVLLIAPFFSKVVRFFPPVVTGSVVTVIGLTLIPVAINNLAGGAGAKDFGSMYNLGLGFGTLLLIILVYRFGQGFSKAIAVLIGLVGGSLFAALYKGISLGPVSEASWFHMPKPFYFGTPTFEWPAIITMILIALVSMVESTGVYFALSDITERKLTQKDLTRGYRAEGLAIMLGGVFNTFPYTAYSQNVGLVQLSGIKTRKVIYAAAGFLIVLGLIPKIGAVTTIIPTPVLGGAMVAMFGMVVAQGIKMLGKVNFTSQENLLIIACAVGVGLGVTVVPDLFNAFPSFVRLFTSNGIVAGSVTAITLNIIFNMIPHRKDKKLADPEPQHAE

SEQ ID NO: 18470 - protein, 613 aa, Debaryomyces hansenii CBS767
MSRCRECCSPLSTVLGTTIQDTSISDFLTCTSPFGHLIGKICQGTRKSTANNRYNLGNIRKSSTSTNNYHNLDEEFSDLILHQVKRKQDAKHRQQNEQQVEHREIYTQNSSGTDGSNKSMQQQYHQFSNELIEDEFNELNAGLLDAEGTEVTRNILPNNNYNSDAMDTSEDHSLSSGLSLPQRGETPTPNLSKVDFTKLAAGASNAGDANMNSDVASPISKSNISNKSKNGRRIPVEIKWVNTNKENILKISIIGSFSSWRNIIHLSQSSQHENEFVTTIKLPLGVHKLLYIINNEYRVSDQLPTATDHEGIFFNWFEVLDEVHLFNHSQNQPNHIGASSDYDANIIPSLLTGETQTAGRYEVDKIRKKLNSFLAKVSKSEGFPDVEHVEYMNEDSPAPEVIPHVADDLETQRPQAERMQSDCSTNTNESNKYVPYHEQLSTSFLTEYQKAALSYSSDIPEMFVNYDYFKNKGPDYELPEPPQLPAHLNNVLLNKMSSNHQQNHAQNIPVVPPTITDHQHYQQVQQIQSNQYPYEYQTPSVAPNNSFKRPPLRRADSSYYASNQEAYHLSIPNHVILNHLMTTSIRNDVLIVACITRYSGKFVTQIMHSPADT

SEQ ID NO: 18471 - protein, 406 aa, Magnaporthe grisea 70-15
MSFSGMLNRLHGQPESYDKKSKYRFGKTLGAGTYGIVREAEGQTGKVAIKIILKKNVKGNERMVYDELEMLQRLQHPHIVRFVDWFESRDKYYIVTELATGGELFDRICEQGKFTEKDASQTIKQVLGAVDYLHSKNVVHRDLKPENLLYLSKAPDSDLVLADFGIAKMLDSRDEVLTTMAGSFGYAAPEVMMKKGHGKPVDMWSMGVITYTLLCGYSPFRSEGLQDLIEECSNAQVTFHDRYWRDVSEDAKNFIRSLLQANPDDRATSGQALRHPWLSGENATDHNLLPEIKSFMAKARLRRGIEMVKLANRIQTLKLQEEDPDNTDMPDDAVEAADDSQGNAGSSGGSGLFKPGEKKTMSKAVKGAIFREVVLAKVREMKTQEETLKVAEEVEKEARRKSFTGS

SEQ ID NO: 18472 - protein, 348 aa, Arabidopsis thaliana
MEIKADYNIQKESTLHLVLRLRGGMQIFVKTLTGKTITLEVESSDTIDNVKAKIQDKEGIPPDQQRLIFAGKQLEDGRTLADYNIQKESTLHLVLRLRGGMQIFVKTLTGKTITLEVESSDTIDNVKAKIQDKEGIPPDQQRLIFAGKQLEDGRTLADNIQKESTLHLVLRLRGGMQIFVKTLTGKTITLEVESSDTIDNVKAKIQDKEWIPPDQQRLIFAGKQLEDGRTLADYNIQKESTLHLVLRLRGGMQIFVKTLTGKTITLEVESSGTIDNVKAKIQDKEGIPPDQQRLIFAGKQLEGGPGGGGGSRASRHFQKAEALAFLADYNIQKESTLHLVLRLRGGSF

SEQ ID NO: 18473 - protein, 391 aa, Mycoplasma penetrans HF-2
MIKSSVIEYIKNHKESWNKLREEFHSTPELPLREFETTKKIKEQLLKYGFEIIEFDGVGIIGVLKHGNSENKIALKASIDGILQKEETDLPYKSVNNSMHANGNDGQIIMLLGACQYLSETREFNGTFYAIFAPGSNIQNGINKLIDRGLFDKIDPQSIFSLKPAPLIQLKKGKVGDLHFINPKTSSSNFIDLFKYKIIGQSSFGSSPENGYDPIVAASSIIMNLQTIVSRNISPFSNAAITVGSIKGGYTANAIAKLVTIKLSVSSNDKETREYILKRIESVIDSTCKAYECNFEKVNIGSSTSLQNNGVEYEFAKDLAVDLFDEEKVHIIDNLMINDDISFLLDKKPGTLVFINNGNSDDIYSSKFDFNNQAIPFGVCFFIGLVEKKLK

SEQ ID NO: 18474 - protein, 384 aa, Saccharophagus degradans 2-40
MHALLKFLIFIRWPVVTGLLASMAILLFYPSLRPTHNTGQEPAFLDFSGLEPKEQWHGPVSYAAAVSKASASVVNIYTRKQSEQRSHPYFTDPFFRRFLSRGNAPQQPKFDLGSGVIVTKDGYLLTNNHVISDAEEIVVALQDGRDAQARIVGTNQKNDLAVLKIDLDNLRPISMGSAETAQVGDVVLAIGNPFGVGQTVTQGIISATRRRGLNIADFENFIQTDAAINPGNSGGALIDTRGQLVGIATANLAQSGYTGGIGFAIPTDTAMQTLHDIIEHGRVVRGWLGVDVEGLAIRPPQGQTTQRLGGFLITGVDANSPAERAGLRAMDIIIRINDKEGNNLVWGEQEIAESRPGDKIEIEIIRDGQVQVVGVVLGENPSSG

SEQ ID NO: 18475 - protein, 582 aa, Actinobacillus pleuropneumoniae serovar 1 str. 4074
MQEKDLSTFKTFKRLFPTIRPYKLGLIAGAIALVLNALVDSSLIYLLKPLLDDGFGKADNSFLKLMAVLVVVFILIRGITNYIASYSLAWVSGNVVMTLRRNIFQHLMYMPVSYFDKNPTGRLLSRVTYDTEMVATSSSHALVTIVREGAYLISLFVVMIYTSWQLSFVLFVMAPIIGVLIGIVSKRFRTLSRNIQSSMGELTVTTEQMLKGHKVVLSFGGQKVEKDRFDRVSNDMRRKGMKIVSADGISDGAVQLIASFALSVVLYVATFPEVMSENLTAGSFTVVFSSMMAMLRPLKSLTNVNSQFQRGMAACQTLFEFLDLETEKDSGKREVERAKGDVVFNHVSFSYDGKDERALSNISFNIPQGKTVALVGRSGSGKSTIANLLTRFYDINEGEILLDGVNIQDYTLANLRRQCSVVSQQVHLFNDSIANNIAYAATEKYSREQIVEAARAAHALGFVEKLEHGFDTVIGENGASLSGGQRQRLAIARALLRNSPVLVLDEATSALDTESERAIQSALAELQKDKTVLVIAHRLSTIEKADEILVVDHGEIIERGSHNELLVKNGAYKQLHSLQFGQ

SEQ ID NO: 18476 - protein, 429 aa, Listeria monocytogenes str. 4b F2365
MQNYSKSEKAFKEAKKVLPGGVNSPVRAFNSVDASPVFMDHGKGAYITDVDGNEYIDYVLSWGPLILGHADPAVVNAITKAALKGTSFGTPTEIETELAKLVIERVPSIEIVRMVSSGTEATMSAIRLARGYTKREKILKFEGSYHGHGDSLLIKAGSGVATLGLPDSPGVTKGLAADTITVPYNDIEGAELAFQKYGEEIAAVIVEPVAGNMGVVPPIDGFLEGLRELTTKFGSLLIFDEVMTGFRVDYYSAQGYYVVTPDLTCLGKVIGGGLPVGAYGGKKEIMEQIAPAGSIYQAGTLSGNPLAMNAGFETVRQLTPQHYDVFRTLIKRMEEGLTEISARRQVPLSINKAGSMFGFFFTDQKVINFDTAKTSNLEFFRNYYREMLGQGIFLPPSQFEGVFISTMHTEKEIDKTLEAFDTTCKILRG

SEQ ID NO: 18477 - protein, 166 aa, Psathyrotes annua
MFPMVTEFMNYGQQTVRAARYIGQGFMITLSHANRLPVTIQYPYEKLITSERFRGRIHFEFDKCIACEVCVRVCPIDLPVVDWKLETDIRKKRLLNYSIDFGICIFCGNCVEYCPTNCLSMTEEYELSTYDRHELNYNQIALGRLPMSVIDDYTIRTILNLPEIKT

SEQ ID NO: 18478 - protein, 607 aa, Bifidobacterium longum DJO10A
MLDHYTTPGESIEIRDNQTIYSLLTDRLARTGADTVIAAKKIGPGRWQNVTTGEFHERVVSAAKGLIALGIAKGDAVTIFSSTRLEWGILDFALAAVGAVSVPIYDTDSAPQAQRIMNDSVVKLAFADNRERFDRLDSVKDHCPALKQILMIEGNALGALEGLGVTVSDEELNERVATVRADDLATIVYTSGSTGNPKGAELTHKNFVSITITASQALHEVVLDDHPRLLLFLPLAHCFARFIQYASIASDDGVVGYLPDTKSLLPDLRSFEPTYLLGVPRVFEKVYNAASHKAGAGWKGRLFVKAAEAARVWSRKEQAGEQHTFAEIAERAKYETLVYRTVRGALGPKIKYVACGGAPLSLDLAHFYNGIGLPMIQGYGMTETAAPFAATRVTDNVIGTVGQPAPGSSIRISDEGELQVKGPNVFRGYHNLPEKTAEAFTADGWLRTGDLAEIDDEGHIVITGRIKDIIITAGGKNVSPIPLEEEIAKCPIVEHCVVVGDQRPFIGALVTLDPESLALWLPAHGLSTETPVDRLATNAAVREEIQQYVDKANATVSRAESVRKFAVLDTQFTQENKCLTPSLKVVRPAVNRVFADVIDNEIYNGKR

SEQ ID NO: 18479 - protein, 166 aa, Psilostrophe gnaphalodes
MFPMVTEFMNYGQQTVRAARYIGQGFMITLSHANRLPVTIQYPYEKLITSERFRGRIHFEFDKCIACEVCVRVCPIDLPVVDWKLETDIRKKRLLNYSIDFGICIFCGNCVEYCPTNCLSMTEEYELSTYDRHELNYNQIALGRLPMSVIDDYTIRTILNLSEIKT

SEQ ID NO: 18480 - protein, 166 aa, Raillardella argentea
MFPMVTEFMNYGQQTVRAARYIGQGFMITLSHANRLPVTIQYPYEKLITSERFRGRIHFEFDKCIACEVCVRVCPIDLPVVDWKLENDIRKKRLLNYSIDFGICIFCGNCVEYCPTNCLSMTEEYELSTYDRHELNYNQIALGRLPMSIIDDYTIRTILNLPEIKT

SEQ ID NO: 18481 - protein, 144 aa, Zea mays
  misc_feature (20)..(20): Xaa can be any naturally occurring amino acid
  misc_feature (28)..(28): Xaa can be any naturally occurring amino acid
  misc_feature (47)..(47): Xaa can be any naturally occurring amino acid
  misc_feature (66)..(66): Xaa can be any naturally occurring amino acid
  misc_feature (79)..(79): Xaa can be any naturally occurring amino acid
  misc_feature (111)..(111): Xaa can be any naturally occurring amino acid
  misc_feature (123)..(123): Xaa can be any naturally occurring amino acid
  unsure (1)..(144): unsure at all Xaa locations
SEDYHLHLAVEHIMLMLGDXLSRVDYMXFAHRHVDDNAHITISCCSXVDESQHSAPMAFSYSLTRXDRALQISDETNGXPLEEMIVDTNLLNFAIDYPAEYPYIAAMGVYXFKRDAMLDLLKXGMLELHESGSEILPKALPEHN

SEQ ID NO: 18482 - protein, 580 aa, Oryza sativa
MSKQNQQPPQVAGAAPAAAAKPAATGSPQQKPASADAKSKPMTVDEKGDRLSLAGNSSVQKMLAKLGNNKPSPEVVSFSDFVIKINKREKEQTRVMLITDKAIYNLMPNNYGKCKRRIGIEALVAITASQISDEFVIHIPDEYDYRFKSSKKDKICETLGILFKNFQTAKQKKPTKLPVTYIQQSDLKDLAVTKAMARMQTREDVLKRKQALAAVAHESDKEETQAQKDEKADKVTQLMENTEKVRLDDFELLKVLGRGSFGKVMQVKKKTTGKIFAMKILKKRAIIARNQVEHTKAERKILQALQHPFLMTLRYAFQSKEKLYFVLDYYQGGELFFHLKNKRRFGEDVARIYVGEIAAALGHLHSLGVIYRDLKPENILLDDNGHVCLTDFGLSKDVDPSDKAHTFCGTPEYLAPEIVTGAGHDKAVDWWSLGILLYELTVGIPPFYSQNVNEMYNKIQHGVLRFPPFLSEGCKSLIVALLNRDPAKRLGSGKDLDDVKSHAFFKDLNWDKMMRKEIEVPYKPKVKSGDDTQNFDETFTKEPVVDSHVPTSKLTETVTNEPDAFKDFTFQQNESKLLQG

SEQ ID NO: 18483 - protein, 489 aa, Brucella melitensis 16M
MAIDLRPFIPFGRGALSQATDPFRAAVEFTLMPMLITNPHLPDNPIVFANPAFLKLTGYEADEVMGRNCRFLQGHGTDPAHVRAIKSAIAAEKPIDIDIINYKKSGEAFWNRLHISPVHNANGRLQHFVSSQLDVTLELSRLVELEKERKTLSIETARSKDQLDYIVEVANIGFWTREFYSGKMTCSAECRRIYGFTPDEPVHFDTILDLVVLEDRMTVVQKAHQAVTGEPYSIEYRIVTRLGETRWLETRAKALTGENPLVLGIVQDVTERKKAEANKALVSREIAHRFKNSMAMVQSIANQTLRNTYDPEQANRLFSERLRALSQAHDMLLKENWAGATIQQICATALAPFNSTFANRIHMSGPHLLVSDRVTVALSLAFYELATNAVKYGALSNEKGVINITWAIMEDKGEKKFHMRWAESRGPEVMQPARRGFGQRLLHSVLAEELKAKCDVEFAASGLLIDVLAPITPEVFPGMGHNVPEQRIA

SEQ ID NO: 18484 - protein, 544 aa, Chlamydophila pneumoniae
MAAKNIKYNEEARKKIHKGVKTLAEAVKVTLGPKGRHVVIDKSFGSPQVTKDGVTVAKEIELEDKHENMGAQMVKEVASKTADKAGDGTTTATVLAEAIYSEGLRNVTAGANPMDLKRGIDKAVKVVVDELKKISKPVQHHKEIAQVATISANNDSEIGNLIAEAMEKVGKNGSITVEEAKGFETVLDVVEGMNFNRGYLSSYFSTNPETQECVLEDALILIYDKKISGIKDFLPVLQQVAESGRPLLIIAEEIEGEALATLVVNRLRAGFRVCAVKAPGFGDRRKAMLEDIAILTGGQLVSEELGMKLENTTLAMLGKAKKVIVTKEDTTIVEGLGNKPDIQARCDNIKKQIEDSTSDYDKEKLQERLAKLSGGVAVIRVGAATEIEMKEKKDRVDDAQHATIAAVEEGILPGGGTALVRCIPTLEAFLPMLANEDEAIGTRIILKALTAPLKQIASNAGKEGAIICQQVLARSANEGYDALRDAYTDMIDAGILDPTKVTRSALESARSIAGLLLTTEALIADIPEEKSSSAPAMPSAGMDY

SEQ ID NO: 18485 - protein, 284 aa, Streptococcus agalactiae NEM316
MTTFTAKFIDQEWEVPVESGRYHMIVGEFCPYAQRPQIARQLLGLDKHISISFVDDVPSDIGLIFSQPEQVTGAKSLRDIYHLTDPTYKGPYTIPILIDKTDNRIVCKESADMLRLFTTDFSDLHQEDAPVLFSQETASLIDNDIKDINNNFQSLMYKLAFLDKQADYDTYSKEFFTFLDQKEHLLGQRPFLLGDNLSEVDIHFFTPLVRWDIAGRDLLLLNQKALEDYPNIFSWAKTLYNDFNLKTLTNPQSIKNNYYLGKFGRAVRHHTIVPTGPNMVKWEK

SEQ ID NO: 18486 - protein, 353 aa, Glycine max
IFCSVRLEQGTVTSLIEEKGTIKGVQYKTKDGQELATYAPLTIVCDGCFSNLRRSLCNPKVDIPSCFVGLVLENCELPCANHGHVILGDPSPILFYPISSTEIRCLVDVPGQKVPSISNGEMGKYLKTTVAPQIPPQLYDAFIAAVDKGNIRTMPNRSMPADPHPTPGALLMGDAFNMRHPLTGGGMTVALSDIVVLRNLLRPLSDLNDAPTLCKYLESFYTLRKPVASTINTLAGALYKVFCASPDQARKEMRQACFDYLSLGGLFSEGPVSLLSGLNPRPLSLVLHFFAVAIYGVGRLLLPFPSPKRVWIGARLISGASAIILPIIKAEGIRQMFFPATVPAYYRTPPVAQ

SEQ ID NO: 18487 - protein, 472 aa, Bartonella alsatica
MLREVASKTNDIAGDGTTTATVLGQAIVQEGIKAVAAGMNPMDLKRGIDAAVDEVVANLFKKAKKIQTSAEIAQVGTISANGAAEIGKMIANAMEKVGNEGVITVEEAKTAETELEVVEGMQFDRGYLSPYFVTNAEKMVADLDDPYILIHEKKLSNLQSLLPVLEAVVQSGKPLLIIAEDVEGEALATLVVNKLRGGLKIAAVKAPGFGDRRKAMLEDIAILTSGQVISEDVGIKLENVTLDMLGRAKKVNISKENTTIIDGAGQKAEINARVNQIKAQIEETTSDYDREKLQERLAKLAGGVAVIRVGGATEVEVKEKKDRVDDALNATRAAVEEGIVAGGGTALLRAASALTVKGSNPDQEAGINIVRRALQAPARQIASNAGEEAAIIVGKVLENKADTFGYNTATGEFGDLIALGIVDPVKVVRSALQNAASVASLLITTEAMVAETPKKETPMPPMPGGGMGGMGG

SEQ ID NO: 18488 - protein, 102 aa, Chlamydia trachomatis
MSDQATTLKIKPLGDRILVKREEEASTARGGIILPDTAKKKQDRAEVVALGTGKKDDKGQQLPFVVQVGDIVLIDKYSGQELTVEGEEYVIVQMSEVIAVLQ

SEQ ID NO: 18489 - protein, 544 aa, Chlamydia trachomatis
MVAKNIKYNEEARKKIQKGVKTLAEAVKVTLGPKGRHVVIDKSFGSPQVTKDGVTVAKEVELADKHENMGAQMVKEVASKTADKAGDGTTTATVLAEAIYTEGLRNVTAGANPMDLKRGIDKAAKVVVDQVKKISKPVQHHKEIAQVATISANNDAEIGNLIAEAMEKVGKNGSITVEEAKGFETVLDVVDGMNFNRGYLSSYFATNPETQECVLEEALVLIYDKKISGIKDFLPVLQQVAESGRPLLIIAEDIVGEALATLVVNRIRGGFRVCAVKAPGFGDRRKAMFEDIAILTGGQLISEELGMKLENANLAMLGKAKKVIVSKEDTTIVEGMGEKEALEARCESIKKQIEDSSSDYDKEKLQERLAKLSGGVAVIRVGAATEIEMKEKKDRVDDAQHATIAAVEEGILPGGGTALIRCIPTLEAFLPMLTNEDEQIGARIVLKALSAPLKQIAANAGKEGAIIFQQVMSRSANEGYDALRDAYTDMLEAGILDPAKVTRSALESAASVAGLLLTTEALIAEIPEEKPAAAPAMPGAGMDY

SEQ ID NO: 18490 - protein, 472 aa, Zea mays
  misc_feature (156)..(156): Xaa can be any naturally occurring amino acid
  unsure (1)..(472): unsure at all Xaa locations
MAFFRGLTAVSRLRSRMAQEATTLGGVRWLQMHSASELDLKSQLRELIPEQQDRLKKLKSEHGKVQLGNITVDMVLGGMRGIIGMLWETSLVDPEEGIRFRGLSIPECRKVLPTAVEGGEPLPEGLLWLLLTGKVPTKDQVDALSKELLARSTVPXHVYKVIDALPVTAHPMTQFTAGIMALQVESEFQKAYGNGLPKSKLWEPTYEDCLNLIARLPPVASYVYRRIFKDGKSIEADNSLDYAANLSHMLGFDDPRMLELMRLHVTIHADHEGGNISSHTGHLVGSALSDPYLSFASSVNGLAGPLHGLANQEALLWLKSIIQETGSDVTTDQLKDYVWKTLKSGKVVHGFGHGVLRRTDPRYLCQREFALKYLPEDPLFQLLSKLYEVVPPILTELGKVKNPWPNVDAHSGLLLNHFGLSETRYHTVLFGVSRSMGVGSQLIWDRALGLPLERPKSVTMEWLENYCKNKAA

SEQ ID NO: 18491 - protein, 355 aa, male-killing Rickettsia from Adalia bipunctata
GFMSTASCRSTITYIDGDKGILRYRGYDIKDLAEKSDFLEVAYLLIYGELPSSEQYNNFTKKVAVHSLVNERLHYLFQTFCSSSHPMAIMLAAVGSLSAFYPDLLNFKEADYELTAIRMIAKIPTIAAMSYKYSIGQPFIYPDNALDFTENFLHMMFATPCEKYKVNPIIKNALNKIFILHADHEQNASTSTVRIAGSSGANPFACVSTGIASLWGPAHGGANEAVINMLKEIGSSENIPKYIAKAKDKNDPFRLMGFGHRVYKNYDLRAAVLKETCKEVLKELGQLDGNPLLQIAIELEAIALKDEYFIERKLYPNVDFYSGIIYKAMGIPSQMFTVLFAIARTVGWMAQWKEM

SEQ ID NO: 18492 - protein, 315 aa, Oryza sativa
MASLTLPPAPTNPRQDAIDLHKAFKGFGCDSTTVINILTHRDSMQRALIQQEYRTMYSEDLSRRISSELSGHHKKAMLLWILDPAGRDATVLREALSGDTIDLRAATEIICSRTPSQLQIMKQTYHAKFGTYLEHDIGQRTSGDHQKLLLAYVGIPRYEGPEVDPTIVTHDAKDLYKAGEKRLGTDEKTFIRIFTERSWAHMASVASAYHHMYDRSLEKVVKSETSGNFELALLTILRCAENPAKYFAKVLRKSMKGMGTDDSTLIRVVVTRTEIDMQYIKAEYYKKYKKSLAEAIHSETSGNYRTFLLSLVGSH

SEQ ID NO: 18493 - protein, 355 aa, male-killing Rickettsia from Adalia bipunctata
GFMSTASCRSTITYIDGDKGILRYRGYDIKDLAEKSDFLEVAYLLIYGELPSSEQYNNFTKKVAVHSLVNERLHYLFQTFCSSSHPMAIMLAAVGSLSAFYPDLLNFKEADYELTAIRMIAKIPTIAAMSYKYSIGQPFIYPDNALDFTENFLHMMFATPCEKYKVNPIIKNALNKIFILHADHEQNASTSTVRIAGSSGANPFACVSTGIASLWGPAHGGANEAVINMLKEIGSSENIPQYIAKAKDKNDPFRLMGFGHRVYKNYDLRAAVLKETCKDVLKELGQLDGNPLLQIAIELEAIALKDEYFIERKLYPNVDFYSGIIYKAMGIPSQMFTVLFAIARTVGWMAQWKEM

SEQ ID NO: 18494 - protein, 577 aa, Cytophaga hutchinsonii
MKIKTKLTLGVGLLFLLIILLSAVGTRYINALKSDTENILVANYNSLEYARFMLSSLEEQSSQAISTFENNLTKQEANLTETGEKNITTEIRNQYNRYKINRSDSTLLPQIRHGIYKIMDLNMQGIQRKSEIAKSTANKAIFWIAVTGTLCFVIAFTLLINLPSNIANPIKELTESIQQIAEKKYSERVHFEGHNEFGELAKSFNTMAEKLEEYNSSNLAKLMMEKKRIESLINNMYDPVIGLDENLKILFVNEQAIKIIGISQEELIGHYTQELAIKNDLVRTLVQDLMVAENTPSNKAIPIKIYSNNKEGYFEKEILHISVTPTGEQVKQLIGHVIILRNITEYKELDFAKTNFIATVSHEFKTPISSIKMSLQLLENKQIGMLNEEQQNLLESIKEDANRLLKITGELLNMTQVESGNIQLSILPNDPKEILFYAINATKTQAEQKNISLKITAPDNIPHVLADNEKTAWVLINLLSNAIRYSYDNSTIQLAIASRDNKVTISVKDTGQGIASQYKDKIFNRYFRVPGTKKEGTGLGLAISKEFIEAQGGSISVDSEFGSGSTFTIGLLVAGGQ

SEQ ID NO: 18495 - protein, 120 aa, Brassica napus
MSASRFIKCVTVGDGAVGKTCMLISYTSNTFPTDYVPTVFDNFSANVVVDGNTVNLGLWDTAGQEDYNRLRPLSYRGADVFILAFSLISKASYENIAKKWIPELRHYAPGVPIILVGTKL

SEQ ID NO: 18496 - protein, 356 aa, Galdieria sulphuraria
MEHWSQYKDELIATAKALVTPGKGILAGDESTGTIGKRFASIQVENNEENRRSYRELLFTAPNFGHYISGVITFEETLYHKTSQGKPFVDVMKEAGVIPGIKVDKGVTPIPGTKDETSTQGLDSLLSRCQKYYETGARFAKWRAVIKISIADGCPSDVAIKENAWGLARYAAICQQAGLVPIVETRKFLWMEITLLKTLTSDREVLYEVYYALDQQHVLLEGTLLKPNMVLPGTDCKDKASPKKIAECTVRTLQRTVPAAVPGIVFLSGGQSEEEASVNLNAMNQVEMVKPWKLSFSYGRALQSSCLKAWQGKAENVRAAQEAFLARAKANGEATLGKYAGGTGNNESLFVKDYKY

SEQ ID NO: 18497 - protein, 355 aa, male-killing Rickettsia from Adalia decempunctata
GFMSTASCRSTITYIDGDKGILRYRGYDIKDLAEKSDFLEVAYLLIYGELPSSEQYNNFTKKVAVHSLVNERLHYLFQTFCSSSHPMAIMLAAVGSLSAFYPDLLNFKEADYELTAIRMIAKIPTIAAMSYKYSIGQPFIYPDNSLDFTENFLHMMFATPCEKYKVNPIIKNALNKIFILHADHEQNASTSTVRIAGSSGANPFACVSTGIASLWGPAHGGANEAVINMLKEIGSSENIPKYIAKAKDKNDPFRLMGFGHRVYKNYDLRAAVLKETCKEVLKELGQLDGNPLLQIAIELEAIALKDEYFIERKLYPNVDFYSGIIYKAMGIPSQMFTVLFAIARTVGWMAQWKEM

SEQ ID NO: 18498 - protein, 569 aa, Debaryomyces hansenii CBS767
MMTDNKSDSDSIEIHLAKEMTNIPRTSSTPTPVVGIPGGTKPQTIFIHKLYDMLEDGNISHLIWWTENSESFGLLPGEEFSKVLAQYFKHTNIASFIRQLNMYGFHKVNDAGQSENGGDNNVARWEFRHLANHFRKGDIESLKLIKRRSSKNINHTREAAKTAGGTEDDIHEAVNEDDTKGIHTGDQHDVRAHEQQQHYHQTLQLQQQDQIPQPPSAIQHHHLTQIDGAPSPSVLPPLSKLPQIYKLSSDKSLETRLNEATSNLGTLRHEHHQLQTQFDLVFNEQKKSQFDLIQLVEIMQRHAVKSEDDKKLDYELTNFKQVLLNKFNNLHVLLSQAQGHQTPTIHPQHLSHAHPSMKPQYNSSHLHYSYSQSSADSNTDSSNIETQKLSKNGSKQPVSDGPMAKDVQPPYTYAEKFLEKNNIPTSLHSPHTSEVRRGYQQYPFPNMNSDPRASAPSTPDQFGQSVPPRVSLPSTNTYEQRPQSIPTPNSSLSLSRLALSNSSVSSGSSYSSNISVETPPKLVPLPSVSELDKLIKNGGGGLPLYRMLNSYGPMKRKNSTEEETRKRQA

SEQ ID NO: 18499 - protein, 380 aa, Clostridium acetobutylicum ATCC 824
MSKKEIIAMILAGGQGSRLGILTRRTAKPAVPFGGKYRIIDFTLSNCSNSGIDTVGVLTQYKPLALNSHIGIGSPWDLDRTSGGVSVLPPYMKETGGNWYKGTANAIYQNRHFIENYDPEYVVILSGDHIYKMNYLEMLDFHKKKNADATIAVFEVPLNEASRFGIMNTDEDDRINEFEEKPKKPKNNLASMGIYIFNWRFLKRFLEEDARDESSNNDFGKNIIPNMLNKKRKLYAYRFNGYWKDVGTIQSLWEANMDLLDDNNSLNIYDPKWKIYSVNPTMPPQYIACNSDVKRSLVVEGCIVLGKVYNSVLFPGVYIGRDTIITNSVIMPNVIVGNNVIIKKSIIGSNARVDDNVIVGTNDNISVVGAGSKVKESIIQ

SEQ ID NO: 18500 - protein, 673 aa, Gossypium barbadense
MAFPASDIPSAEQQADDPLYRELWHACAGPLVTLPRVGERVYYFPQGHMEQLEASMHQGLEHQMPSFDLPSKILCKVASVQRKAEPDTDEVYAQITLVPEVDQSEVMSPDDPLQEPERCIVHSFCKTLTASDTSTHGGFSVLRRHADDCLPPLDMTQQPPWQELIATDLHGNEWHFRHIFRGQPRRHLLTTGWSVFVSSKKLVAGDAFIFLRGANGDLRVGVRRLMRQQANMPSSVISSHSMHLGVLATASYALSTRSMFSIFYKPRTSLSEFIVSVNKYLEARSHKLSVGMRFKMRFEGEEVPERRFSGTIVGVEADKSSGWADSEWRSLKVQWDEPSSIIRPDRVSPWELEPLVATSNSSISQPAQRNKRARPPVLPSPSSDLSSLGIWKSPVESPFSYCDAQRGQPSPKLSSTAKPNSVGFSGNSSLAAVSSSSKYWPNRVENVTESVAPVVNKESSERKQGTGNGCRLFGIQLIDNINMEENSPLATISGTGVNDQPLHSLDANSDQQSDPSNLNQSDLPSISCEPEKCLRSPQESQSKQIRSCTKVHMQGMAVGRAVDLTRFDCYEDLLKKLEYMFDIKGQLCGSTKNWQVVYTDDEDDMMMVGDDPWNEFCSMVRKIFIYTSEEVRKLSPKIKLPVNDDDDDSKATKAGVDTVINPEDRSSIVGQGC

SEQ ID NO: 18501 - protein, 372 aa, Clostridium acetobutylicum ATCC 824
MLNNYMSILSLNENDNDIKSLTKARPLASIPIAGRYRIIDFILSNLVNSGVKNIGILTQCKSRSLLDHLGSGKPWDLDRKLNGLFIFNFSGITSTLSDIEMLKSNMEYLYRSTQEKVILSSSAVICNIDFQRAAEFHEKSGKDITLIYKRTNNGKRKFLNCSVLNMDKNNNVISIGKNTGLDDVQNISLGMFIMNKKLLINILNNCIRTGFSLSLKQCIRKHMNNFTVNAYEFNGYAEYIDSVKSYYKVNMDMLNLDINREVFFKNGLIYTKVKDEAPTKYFNDSEVCNSLIANGSLIHGQIENSIIGRRVTISKGARIKNCVIMQNCTIKENVDLTNVIVDKNVIIDENTVLKGGKEFPLVIEKKSIYSEV

SEQ ID NO: 18502 - protein, 1099 aa, Gossypium arboreum
MGKSELTDGCLSDDAGEAPERRHINPELWQACAGPLVNLPAAGTHVVYFPQGHSEQVAASMKRDVDAQIPNYPNLPSKLLCLLHNVTLHADPETDEVYAQMTLQPVSSFDKEALLRSDLSLKSNKPQPEFFCKTLTASDTSTHGGFSVPRRAAEKIFPPLDFSMQTPAQELVARDLHENVWKFRHIYRGKPKRHLLTTGWSLFVSGKRLFAGDSVLFIRDETQQLLLGIRRANRQPANLSSSVLSSDSMHIGILAAAAHAAANNSPFTVFYNPRASLSEFVIPLAKYYKAVYNHQISPGMRFRMMFETEESGTRRYMGTITGISDIDPVRWKNSQWRNLQVGWDESTAGERRNRVSIWEIEPVTAPFFICPSPLFRSKRPRQPGMLADEYSDLDNLFKRPMPWLGDDICLKDSDAHPGLSLVQWMNMQQNPLLANSMQPNFMQSLAGSTMQNFDGADLSHQMGLSAPQMPQPNNLQFNAHRLPQKVQQLDQVPKLPSTMNSLGSIIQPQQLNDMTQQSRQNLVAQTLPSSQVLQPQALVRSNNILHQQQTSNPTHQLPLSLPQNLQQQQQYLVGPNHPQNLMHSQLPDPLNQHLQVPDNQVQFQLMQKLQQQQQLLLAQQSALQQPGLLAQPQDQQRQLLDASQSFSSSVTASQVLEMPQNIPTLLPQSNVAPQQMPKNNSQANVWFSQPPLQSKVQQQQTGMLPEVPGLVGPFQTTATNQFSTAVSSVMTSAAVAAPSVITDDNPSCSTSPSTNCPSVLQPMIDSRVHRSAGLGDDISQSAATVLNPNALETMSTKANMVKEQQQKSVKPLLNISKSQNQGSFAPQNCINGATAHADCLDTSSSTTSVCLSQSDAHLHQNTLSYNPQTMLLRDTSQEGEVRAYPRNNVSYGNNMDSQIEMPMNSDTLSAKGMMGLGKDFSNHLSSGGILASYENPKDAQQELSSSMVSQPYRVPDMAFNSIDPTINHSSFINRNAWTPPSQFQRLRTYTKVYKRGAVGRSIDITRYSGYDELKQDLARRFGIEGQLEDRGRVGWKLVYVDHENDVLLVGDDPWEEFINCVRCIKILSPQEVQQMSMDGEFGNSVLPNQDCSSSGNGNA

SEQ ID NO: 18503 - protein, 309 aa, Debaryomyces hansenii CBS767
MVELTDYQRQEKVGEGTYGVVYKALDTKHNNRVVALKKIRLESEDEGVPSTAIREISLLKEMKDDNIVRLYDIIHSDSHKLYLVFEFLDLDLKKYMESIPQGVGLGADMVKRFLNQLVKGIKHCHSHRVLHRDLKPQNLLIDKEGNLKLADFGLARAFGVPLRAYTHEVVTLWYRAPEILLGGKQYSTGVDMWSVGCIFAEMCNRKPLFPGDSEIDEIFRIFRILGTPSEETWPDVSYLPDFKSTFPKWSKKNLAEFVPTLDEDGIDLLEQMLVYDPSGRISAKRALIHPYFQEDGENYDSYPRSVNMG

SEQ ID NO: 18504 - protein, 233 aa, Rhodopseudomonas palustris CGA009
MMQLGKRGFDHIETWVFDLDNTLYPHHLNLWQQVDARIRDFVSDWLKVPPEEAFRIQKDYYKRYGTTMRGMMTEHGVHADDYLAYVHAIDHSPLLPNPAMGDAIERLPGRKLILTNGSTAHAGKVLERLGIGHHFEAVFDIIAAELEPKPAPQTYRRFLDRHGVDPARAAMFEDLARNLTVPHQLGMTTVLVVPDGSQDVVREDWELEGRDAAHVDHVTDDLTGFLGKLSPAK

SEQ ID NO: 18505 - protein, 160 aa, Oryza sativa (japonica cultivar-group)
MSLIRRSNVFDPFSLDLWDPFDGFPFGSGSRSSGTIFPSFPRGTSSETAAFAGARIDWKETPEHVFKADVPGLKKEEVKVEVEDGNVLQISGERSKEQEEKTDKWHRVERSSGKFLRRFRLPENTKPEQIKASMENGVLTVTVPKEEPKKPDVKSIQVTG

SEQ ID NO: 18506 - protein, 289 aa, Bifidobacterium longum DJO10A
MTNGHINPANVPDIALKDGHSIPQVGLGVLRIDDEGVVPVVESALEAGYRHIDGAAGYNNEAGVGRALAASGYNKGTKRETLWVTTKLRDSQQGYDSALKAFDNSLKLLQLDYVDMYMIHWPTPFDWRSTDTWKAFVKLRDEGMARTLGVCNFMPADLKRLHEETGAWPAVNQIELHPTWQQREVVAFCKEHGIAVEAYSPMARGADLNAGDGTIEKIAAAHEVSPAQVILRWHIENGTIIIPKSVHADRQKENLNLFGFALTADEHAAIDALDGPTRAGHDPLTFTYA

SEQ ID NO: 18507 - protein, 166 aa, Riencourtia oblongifolia
MFPMVTEFMNYGQQTIRAARYIGQGFMITLSHANRLPVTIQYPYEKLITSERFRGRIHFEFDKCIACEVCVRVCPIDLPVVDWKLETDIRKKRLLNYSIDFGICIFCGNCVEYCPTNCLSMTEEYELSTYDRHELNYNQIALGRLPMSIIDDYTIRTIFNLPEIKT

SEQ ID NO: 18508 - protein, 327 aa, Trichoderma atroviride
MATDTSQKTLSSTTYTLNTGAKIPAVGFGTFANEGAKGETYAAVTKALDVGYRHLDCAWFYLNEDEVGDAIRDFLARRPDVTRKDLFICTKVWNHLHEPEDVKWSAKNSCENLKVDYIDLFLVHWPIAAEKNADRTVKIGPDGKYVINKALTENPEPTWRAMEELVDSGIVKAIGVSNWTIPGLKQLLEFARIKPAVNQIEIHPFLPNTELVEFCFQNDILPEAYSPLGSQNQVPTTGERVRDNPTLNAVADRRGSSLAQVLLAWGLKRGYVVLPKSSTPSRIESNFIIPELSEEDFAAIQKVAEGRHVRFVNMKDTFGYDVWPEDK

SEQ ID NO: 18509 - protein, 206 aa, Zea mays
MDDPVERLKDGFHKFKTEVYDKKPELFEPLKAGQAPKYMVFACSDSRVCPSVTLGLQPGEAFTVRNIAAMVPAYDKTKYTGIGSAIEYAVCALKVEVLVVIGHSCCGGIRALLSLQDGAPDNFHFVENWVKIGFPAKIKVKKDHASVPFDDQCSILEKEAVNLSLENLKTYPFVKDGLANGTLKLVGGHYNFVSGEFLTWDNKQPS

SEQ ID NO: 18510 - protein, 416 aa, Magnaporthe grisea 70-15
MELKLSEPNQSQSRKEQIWSTGGRKEGSYLRFLRTKDKPENYNTIKIIGKGAFGEVKLVQKKSDNKVYAMKSLIKTEMFKKDQLAHVRAERDILAESDSPWVVKLFTTFQDANFLYMLMEFLPGGDLMTMLIKYEIFSEDITRFYIAEIVLAIEAVHKLGFIHRGGHVKLTDFGLSTGFHKLHDNNYYQQLLQGKSNRPRGDRNSIAIDQINLTVSNRAQINDWRRSRRLMAYSTVGTPDYIAPEIFTGHGYTFDCDWWSLGTIMFECLVGWPPFCAEDSHDTYRKIVNWRQSLYFPDDIQLGVEAENLIRSLICNTENRLGRGGAHEIKSHSFFRGVEFEGLRRIRAPFEPRLTSAIDTTYFPTDEIDQTDNATVLRAQQMQQQATTGAPVREETVEMSLPFIGYTFKRFDNNFR

SEQ ID NO: 18511 - protein, 166 aa, Rensonia salvadorica
MFPMVTEFMNYGQQTIRAARYIGQGFMITLSHANRLPVTIQYPYEKLITSERFRGRIHFEFDKCIACEVCVRVCPIDLPVVDWKLETDIRKKRLLNYSIDFGICIFCGNCVEYCPTNCLSMTEEYELSTYDRHELNYNQIALGRLPMSIIDDYTIRTIFNLPEIKP

SEQ ID NO: 18512 - protein, 170 aa, Brassica napus
DLDDSSTVSGDASVSSTGNQNPPPQSAVKKKRNLPGMPDPDSEVIALSPKTLMATNRFVCEICSKGFQRDQNLQLHRRGHNLPWKLRQRSSKEVRKKVYVCPVSGCVHHDPSRALGDLTGIKKHFCRKHGEKKFKCEKCSKSYAVQSDWKAHSKICGSKEYRCDCGTLFS

SEQ ID NO: 18513 - protein, 373 aa, Listeria monocytogenes str. 4b F2365
MTLSKGLENVYVAETSISSIIDDMLTYVGYGIDDLMENNASFEEVIYLLWHLRLPNKDEFKKFKREIQENMAVSETIITSLRMQNHQKLHPMSVLRTTVSMLGVFDTEAELDDGEAVYRKGLRLQAKMPTIVAAFSRIRRGLDPIPPREDLNMAANFLYMITGEEADALSVEAMNKALVLHADHEFNASTFTARVCVATLSDVYSGVTAAIGALKGPLHGGANERVFDMLEEIDQAGDVRNYIQEKIDTKQKIMGFGHRVYRGGDPRAQHLREMSRKLTAEKGEEKWFDISLQVEESVWELKHLKPNVDFYSASVYHALGIDRDLFTLVFSVSRVSGWLAHIFEQYRDNRLIRPRAIYVGPENRSYLPVEERI

SEQ ID NO: 18514 - protein, 340 aa, Boea crassifolia
MGRAPCCDKTGLLMKKGPWSQEEDQKLLDYIQKYGYGNWRTLPTNAGLQRCGKSCRLRWTNYLRPDIKRGRFSFEEEETIIRLHSILGNKWSLIAARLPGRTDNEIKNYWNTNIRKRLLRMGIDPVTHSPRLQLLDLSTILNSSLCNNSPTQMNFSRLQPRFNPELLRFAASLFSSNCQSQDFPMQNQITSNNQIPPPFMQTSVQDVAVLPDLCADTNLGTSFSVHDEVQEFQQNPAGYGMPSALTGEYVPVLNDGYYGSGDQPFVDPTPSSVTSNFQSYCSNSLGFQSIFSTPPSSPTPLNSNSTYVNSCSSTEDETESYYNSMWKFEIPDNLRINDFM

SEQ ID NO: 18515 - protein, 225 aa, Bacillus anthracis str. 'Ames Ancestor'
MIDILLVDDEPRMLELLTLYLTPIGYNCICARSGEEAISHIENQNFKFILLDIMMPKMDGWETCKKIRSFSNVPIIMVTARDQTIDVVQGLKLGADDYVTKPFHEEELFARIEAVLRRTNQHAQIQYHGILWNEAKHSASVHNEELLLTPIEFSLLGLFLRHVNYVLSRDQLIERIWGLNTNTEDRTVDSHIRNLRDKLRKVNFPIDNHLKTVYGVGYRWIDIEH

SEQ ID NO: 18516 - protein, 231 aa, Shigella flexneri
MFRKLAAECFGTFWLVFGGCGSAVLAAGFPELGIGFAGVALAIGLTVLTMAFAVGHISGGHFNPAVTIGLWAGGRFPAKEVVGYVIAQVVGGIVAAALVYLIASGKTGFDAAASGFASNGYGEHSPGGYSMLSALVVELVLSAGFLLVIHGATDKFAPAGFAPIAIGLALTLIHLMSIPVTNTSVNPARSTAVAIFQGGWALEQLWFFWVVPIVGGIIGGLIYRTLVEKRD

SEQ ID NO: 18517 - protein, 152 aa, Convolvulus arvensis
MTVPIDTISGPWGNNGGNFWSFRPINKINQIVITYSAGNNPIALTFSATKADGSKDTITVGGAGPDSITGTDTVDIGADEYVTGISGTFGIYLDNNVLRSIKFITNLKAYGPYGPNVGTPFSSENVVGNEIVGFLGRSGYYVDAIGTYNTPK

SEQ ID NO: 18518 - protein, 150 aa, Colwellia psychrerythraea 34H
MTKYHKSTHVISALTKEQYRVTQESGTERAGSGEHLNNTSPGIYVDIVSGEPLFASSDKYESGCGWPSFTKPITSKNIQELSDSSHAMVRTEVRSSHGDSHLGHVFKDGPTSKGGLRYCINSASLRFIHRDEMVSNGYGDYIDQVEDLSI

SEQ ID NO: 18519 - protein, 450 aa, Triticum aestivum
MREIISIHIGQAGIQVGNACWELYCLEHGIQQDGTMPSDTTVGVAHDAFNTFFSETGAGKHVPRAIFVDLEPTVIDEVRTGAYRQLFHPEQLISGKEDAANNFARGHYTVGKEIVDLCLDRVRKLADNCTGLQGFLVFNAVGGGTGSGLGSLLLERLSVDYGKKSKLGFTIYPSPQVSTAVVEPYNSVLSTHSLLEHTDVAVLLDNEAIYDICRRSLDIERPTYTNLNRLISQIISSLTTSLRFDGAINVDVTEFQTNLVPYPRIHFMLSSYAPVISAEKAYHEQLSVPEITNAVFEPSSMMAKCDPRHGKYMACCLMYRGDVVPKDVNAAVATIKTKRTVQFVDWCPTGFKCGINYQPPSVVPGGDLAKVQRAVCMISNNTAVAEVFSRIDHKFDLMYAKRAFVHWYVGEGMEEGEFSEAREDLAALEKDYEEVGAEGADDEGDEGDDY

SEQ ID NO: 18520 - protein, 180 aa, Rhizobium etli bv. phaseoli
EFDVFPTLEQLPLWGFDGSSTMQAEGRSSDCVLKPVAIYPDPARTNGALVMCEVMMPDGVTPHPSNARATILDDEDAWFGFEQEYFFYQNGRPLGFPEQGYPAPQGPYYTGVGYSNVGDVAREIVEEHLDLCLAAGINHEGINAEVAKGQWEFQIFGKGSKKAADQIWMARYLLQRLTEK

SEQ ID NO: 18521 - protein, 449 aa, Streptococcus agalactiae NEM316
MTSGKTYVASVLEKVKKQNEHEEEFLQAVEEVFESLVPVFDKYPQYIEENLLERLVEPERVISFRVPWVDDKGQVQVNRGYRVQFSSAIGPYKGGLRFHPTVTQSIVKFLGFEQIFKNSLTGLPIGGGKGGSNFDPKGKSDNEVMRFTQSFMTELQKYIGPDLDVPAGDIGVGGREIGYLYGQYKRLNGYQNGVLTGKGLTYGGSLVRTEATGYGAVYFAKEMLAARGQDLTGKVALVSGSGNVAIYATEKLQELGATVVAVSDSSGYVYDPDGIDLETLKQIKEVERARIVKYTEKHPKANFTPADQGSIWSIKADLAFPCATQNELDEEDAKLLVENGVLAVTEGANMPSTLGAIKVFQKAGVAFGPAKAANAGGVAVSALEMAQNSSRRAWTFEEVDQELQRIMKTIFVNASEATDEFGDSGNLVLGANIAGFLKVAQAMSAQGIV

SEQ ID NO: 18522 - protein, 180 aa, Rhizobium etli bv. phaseoli
EFDVFPTLEQLPLWGFDGSSTMQAEGRSSDCVLKPVAIYPDPARTNGALVMCEVMMPDGVTPHPSNARATILDDEDAWFGFEQEYFFYQNGRPLGFPEQGYPAPQGPYYTGVGYSNVGDVAREIVEEHLDLCLAAGINHEGINAEVAKGQWEFQIFGKGSKKAADQIWMARYLLQRLNEK

SEQ ID NO: 18523 - protein, 1519 aa, Azoarcus sp. EbN1
MPFRILRSPRSVRCVPRAGSGRQTGSDSFDSALMTAIADIPAEQTASASTVGPVALSSRIVVLAAMYIAVGLFARALTQSSGYSSPVWPAAGFALAALLVWGARCWPGVWLGAFVIVLLPDRTTSGALVAALGASGMTLQALLGVCLARRCLRSSSFPARNRDIARLVLLTGPLASLVASSIAVAALLAFERIAPAAGPSEWLTWWAGDTLGVLLFAPLVLLAWPGPLRGWIRRSGGGRISILLVLAAALFSAGSFTVDRLWKERERTEIAQRMDEVFEIGFLLLPEVIASLEGVERFVSASSAVTRDEFETFTVWITRHPAVVSIDWAPRVLAEERESFERAVRAEGGRDFRIFEPGDDGNTRPATGRPEYFPVLYSAPREAGRSILGLDHGYDPHRRVAMEQARQSREAHTVRGVPLLRTKRLSLLVFQPVHDVARASWDAAARAGPRDLLGHVVGVFDVEKLFIPLAEAAHTRSIGFRVSDVTSGEPAQILLDEMPAGVAPTLRKEIGFGGRTWSLELAAKAPTGYVDTHGEEEIYLAFSVLAAVLVAYIALSNAGHTAAIQREVAEQTAELTRALDARLAAEDERDRIFEQSVDLLGIVGIDGYFKRVNPAFARTLGWSNEEFLSRPYLDFVHPDDVEGTRADAARVAAGHTTVGFENRYRCKDGNWRWLEWKAVPRTGGLMFVTAIDTTQRRENARHLRTLNAELVHRVDEREAALEALGAKKDEIRAVLDNLIECVVTINAQGIVQGANAAVEAVFGYPLGEVIGRNVSLLMPSPERERHDDYLARYLDTGARHVIGSTREVEGQHKLGHRIPMELSVAEYRVRDEQFFVGTLRDISERKAFIAALTRAREDAEQASRAKSAFLAAMSHEIRTPMNGVMGLIEVLARTSLSEHQADLVATICGSSSTLLRIIDDILDFSKIEAGRLKLDVRPVSIGDLVESLAGSLLPLAARLDVDLSVFVSPEVPERVEADEVRLRQVLYNLVGNAVKFSAGRQNVRGRVAVRVAVADVVPLQLAVSIVDNGIGIDPEKVEELFNPFTQAEASTTRRFGGTGLGLAICRRLVDLMEGGIKVRSEPGQGSTFTVTIPFVLSDEQPAPILPEVRGINCVVIDSPEINSEDLRVYLEDAGASVFRVDDEAAAGVKAASLAAPVVLIDFAREGKNTETDGTVPASGAARVRITRGRRRRPRIKDRQVVMLNGNALRRQSLLRAVAVAAGRASPEIIHAGTAERAVLPSTTAPTIDEAREHGRLILVAEDDPINKKVILEQLALLGHAAEIAGDGAEALEMWRRGTYALILTDLHMPKMDGYRLTEAIRQAEGEAARIPIVALTANALQSESRRAREAGMDEYLTKPVRLEVLGAHLDRWLPRQETALAETAQVPPDAAPDAVACTLPILDVSVLNGLIGDDPQVIREFLGDYLASTRSLAAETRTAFSDGDRGAVAASSHKLKSSSRAVGALALGDLCNRIESAVITGDRVAFEQEMSRYDDVVRTTETHVIKLLNEPISAAGGTQ

SEQ ID NO: 18524 - protein, 397 aa, Clostridium acetobutylicum ATCC 824
MCGIAGFVNFKKNLIDKKSIIEDMTNTLIKRGPNEKGYYISKNALLGHRRLIVVDPKGGSQPMIKIHNGKKYIIVYNGELYNTEDIRKELLEAGYEFSSYSDTEVLLTSYIHWKEDCVNHINGIFAFAIYSETDKKIFLARDPLGVKPLFYTIKNNNLIFGSEIKTLLANPLVEPILTKEGLTEIFALGPARNLGSGVLKDIHEIPPANFIEFTEHKFKLHEYWRLSCKPHTENASETAEHIKFLLTDAIKRQLYADVPVCTFLSGGLDSSIISAVAASEFKKHGKTLNTYSIDYKDNNLYFKNDNFVITPDSVWAEKMRKFIGSNHHKIINNNLDLASALYDAVKANDIPGMADIDSSLFLFCKGVAEKNVVSLSGERAIQMITNLVKQFINIGEL

SEQ ID NO: 18525 - protein, 475 aa, Zea mays; identical to SEQ ID NO: 1000

SEQ ID NO: 18526 - protein, 279 aa, Bacillus cereus E33L
MKNLQSKAVLNNGVEMPWFGLGVFKVEEGPELVEAVKAAIKAGYRSIDTAAIYGNEKAVGEGIRAGIEATGIAREDLFITSKVWNADQGYETTIAAYEESLKKLGLDYLDLYLVHWPSEGKYKDTWRALETLYKEKRVRAIGVSNFQIHHLQDVMKDAEIKPMINQVEYHPRLTQKELQAFCKEQGIQMEAWSPLMQGQLLDNETLQEIAEKHGKTTAQVILRWDLQNGVITIPKSTKEHRIIANADVFNFELTKEDMEKIDALNQNHRVGPDPDNFDF

SEQ ID NO: 18527 - protein, 174 aa, Zea mays
  misc_feature (140)..(140): Xaa can be any naturally occurring amino acid
  unsure (1)..(174): unsure at all Xaa locations
MAKQGAKKMKDENKKRLDLLLRIILISNAIYIVVRMAIMHSSFTWKHWIGLMVTSAAYFLPYKQLASMAKPVYSDNGELLDGGFDLSTGGVCEYLYDVIYITVFVQLMSIISEKFWWTYLVIPAFAGYKISGLLRGVFFXGGSEGEVEDEKTRKKREKMEKKASRGKMIKTRTR

SEQ ID NO: 18528 - protein, 432 aa, Zea mays
MPTPTPPSPSPSPSSGTCPLLRIGAGRRFAMAFPSWATLFFAGMMVVLAAVEAEAEAGGGSVCFDRMFGFGDSLTDTGNFLLSVPDDFPDPARNLPYGQTFFGRPSGRYSDGRNLLDFFAEAFGLPYVPPYLGSGDFQNGANFAVGGATALNGSFFRERGVEPTWTPHSLDEQMQWFKKLLPFIAPSETELNEIMSKSLLFVGEIGGNDYNHLIVREKSVDELHEIVPNVVGAISSGITDLINLGAKKLVVPGNFPIGCVPLYLAIFQSQKEGYYEEQTGCIKWLNEFAEYHNRMLQEELEKLRNLHPDVTIIYADYYGAALNIFRAPLKFGFTVPLNACCGSDAPYNCSPSILCGRPGSTVCPDPSKYISWDGLHFTEASYKVVIQGVLGGYAKPPLSEACKGAEFKVSQLHQCTDNPTNTVSYDALSSFI

SEQ ID NO: 18529 - protein, 431 aa, Triticum aestivum
  misc_feature (292)..(292): Xaa can be any naturally occurring amino acid
  unsure (1)..(431): unsure at all Xaa locations
MHPTRWELSHMVDLQAAGLVISVVAAEVAEALAGQRDEAYFAANAAALASRRSSPRVTNEEVQKAATALKGSDHRRATTVSARLDAQQKKLNLPVLPTTTIGSFPQTVELRRVRREYKAKKISEEEYTNAIKEEISKVVKIQEELDIDVLVHGEPERNDMVEYFGEQLSGFTFTANGWVQSYGSRCVKPPIIYGDVSRPNPMTVFWSKMAQSMTARPMKGMLTGPVTILNWSFVRNDQPRFETCYQNCSCNQEGGPRTLEAGGIQVIQIDEAALREGLPLRKSEHAFYLDWXAVHSFRITNCGVQDTTQIHTHMCYSNFNDIIQSIINMDADVITIENSRSDEKLLSVFREGVVYGAGIGPGVYDIHSPKDPSKEEIADRVNKMLAVLDTNILWVNPDCGLKTRKYAEVKPALTNMVEAAKQIRAELAKAQ

SEQ ID NO: 18530 - protein, 557 aa, Exiguobacterium sp. 255-15
MERKWWHDSVVYQIYPRSFNDSNGDGIGDLVGIIEKLDYLKELGIDVIWLSPVYDSPNDDNGYDIRDYEAIMSEFGTMADFDRLLDQAHERGIKIVMDLVINHSSDEHAWFAESRKSKDNPYRDYYIWRSANEDGTLPNNWGSIFSGPAWELDEATNEYYLHLFSKKQPDLNWENEKLRQEVYQMITRWLDRGIDGFRMDVINLISKTPGLPDATVPPGALYGDGGQHYINGPRIHEFLKEMNDASFGNYDVLTVGEMPGATTDDAILYTDPERKEVNMVFTFEHMDLDSGPGGKWDVKPFDLQKLKENFTKWQVALHEKGWNSLYWNNHDQPRVVSRFGNDTTYRVESAKMLATLLHLLKGTPYIYQGEEIGMTNVAFESIEDYEDIEIRNMWKERTEQGASPAELLRAVHVKGRDNARTPIQWDATEHAGFTTGTPWLKVNPNYPTINVEQALEDPDSIFYYYKQLIALRHQHDVIVYGEYALILEEETDIYAYTRTYENETWYIYCSFSQEEVTVPLSHDTSDPVIGNYSESPAGSKEELVLRPYEAIVYRTTR

SEQ ID NO: 18531 - protein, 597 aa, Nocardia farcinica IFM 10152
MPDLSLFGHDPFWLVVAKSVFLFVYIILIPLVAVLAERKVVARMQMRVGPNRVGPFGSLQSIADGVKMAFKEDLVPAIVDKPIYLLAPVVSVIPAFMAFAVIPLGGEVSVAGNTTALQLTDMPVGVLYILAITSIGVYGIVLAGWASGSTYPLLGGLRSTAQVISYEIAMALCFAAVFLHAGTMATSGIVGAQHPTWFVFLLLPSFLIYCVSMVGETNRAPFDLPEAEGELVGGFHTEYSSLKFAMFMLAEYVNMGTVSALATTLFLGGWSAPWPFNLIPGADAGWWGLLWFTAKVWTFMFVFVWLRGTLPRLRYDQFMRLGWQLLIPVSLLWVMLVATARLLRADGHAWATGAQVVVGVALTAAMIGLFLRAGRRPAAPPEPEPEPSGEAVFLGFPTPPVPADAHRVDNPKGGLLEPLAGFAVTAATMFKKPNTEFYPEQKVPTAPRYHGRHQLNRHPDGLEKCIGCELCAWACPADAIYVEGADNTEDERYSPGERYGRVYQINYLRCIGCGLCIEACPTRALTMTNDYELTDDNRADLIYEKDRLLAPLAPGMVAPPPAMAPGTTEADYYLGAVTGGAPAAEQPAPAGAKGGAR

SEQ ID NO: 18532 - protein, 112 aa, Vigna radiata
MASKQANREELHERAKQGETVVPGGTGGKSLEAQEHLAEGRSRGGQTRKQQLGSEGYHEMGTKGGQTRKEQMGTEGYKEMGRKGGLSTMDKSGAERAEEKGIEIDESKFKKN

SEQ ID NO: 18533 - protein, 519 aa, Arabidopsis thaliana
MAETDVGSVKGKEKGSGKRWILLIGAIAAVLLAVVVAVFLNTQNSSISEFTGKICNCRQAEQQKYIGIVEDCCCDYETVNRLNTEVLNPLLQDLVKTPFYRYFKVKLWCDCPFWPDDGMCRLRDCSVCECPESEFPEVFKKPLSQYNPVCQEGKPQATVDRTLDTRAFRGWTVTDNPWTSDDETDNDEMTYVNLRLNPERYTGYIGPSARRIWEAIYSENCPKHTSEGSCQEEKILYKLVSGLHSSISVHIASDYLLDEATNLWGQNLTLLYDRVLRYPDRVQNLYFTFLFVLRAVTKAEDYLGEAEYETGNVIEDLKTKSLVKQVVSDPKTKAACPVPFDEAKLWKGQRGPELKQQLEKQFRNISAIMDCVGCEKCRLWGKLQILGLGTALKILFTVNGEDNLRHNLELQRNEVIALMNLLHRLSESVKYVHDMSPAAERIAGGHASSGNSFWQRIVTSIAQSKAVTRKRSQEVETYFLWSPLAEMQLYLGREARCSMRSGGCGIKRSDGGRVYFVVK

SEQ ID NO: 18534 - protein, 160 aa, Arabidopsis thaliana
QKHSVRIADEKVTLAMQAYDLVDMHVQQLDQYMKKSGEVIRKEKEAAAATLELENNGKAGNAGEGGRGGRKKTRLATAASTAAASTGMTSSNMDLDLPVDPNEPTYCICNQVSFGEMVACDNNACKIEWFHFGCVGLKEQPKGKWYCPECATVKKSRKGR

SEQ ID NO: 18535 - protein, 81 aa, Triticum aestivum
GTRVEPAKVLQRVKATGKNAEMWPYVPYALTTYPYVGGAYDKKAPAGFVRSAPQAMAEPSAPELKYMNMFSDENVNACTVM

SEQ ID NO: 18536 - protein, 469 aa, Oryza sativa
MQLPEDILYHIHTLMPMQDAARAACASRCFLRSWRFYPRLNLNVNTLRIDKRAPSNDKLTIDFISRVDPIMLNHAGTGVKMFKLTTHPCFSLHPSYVDRWLQIAFAPGIKEFELEMTRVSKMDYDFPCSLLSRVASSIQSFLLGGCSFHPGIQIGQMSTLTSLRLRSVKITEEELCGFLSKSCALQRLLLSDCHNIVVLKIPHLLELNYLEVLHFRKLEVIDSSAPKLSTFIYAGPPIQISLGEALLQVKKMQMFCDGSPDALHYGSKKLPSIAPNIQKLYLSTRNETVNTPKVLGKFLQLKCLEILLLTPDLSPGYDFCSLVSFIDASPALETFILRIERPAKRHDSILEALSGDSMHPMRASEYRHDNLKNMMITGFSSAKSMIDLANHILEKASSLEYLTLDTTRGYDRRNDKIDPCQCLQMSKEALLEAEKALLAIRIYVEGRVPSSVSLKVIEPCSNCHTETRS

SEQ ID NO: 18537 - protein, 607 aa, Bifidobacterium longum DJO10A
MMTTFNRAIIPDAIRTNGATPNPWWSNAVVYQIYPRSFQDTNGDGFGDLKGITSRLDYLADLGVDVLWLSPVYKSPQDDNGYDISDYQDIDPLFGTLDDMDELLAEAHKRGLKIVMDLVVNHTSDEHAWFEASKNKDDEHADWYWWRPARPGTTPGEPGAEPNQWGSYFGGSAWEYCPERGEYFLHQFSKKQPDLNWENPAVRRAVYDMMNWWLDRGVDGFRMDVITLISKRTDSNGKLPGEYGSELEDLPVGEEGYSNPNPFCADGPRQDEFLAEMRREVFEGREGFLTVGEAPGVTAQRNEHITDPGNGELDMLFLFEHVDFDCEGTKWKPLPLDLPKFKSIMAGYQTAVQNAGWASLFTGNHDQPRVVSRWGDDSAEESRVRSAKALGLMLHMHRGTPYIYQGEELGMTDAHFTRLDQYRDLESLNAYRQRVEEAKVQSSESMMAGLAARSRDNARTPMQWDGSGYAGFTAPDAATEPWISVNPNHAEINAAGEFDDPDSVYSFYKQLVALRHNSPVVAAGDWRLIDAADPHVYAFTRELDAEKLLVVVNMSSRTVDLPREAAELTAVGIAEPNVVISTYDAPHTVASLANRELDPWEAAVIQL

SEQ ID NO: 18538 - protein, 556 aa, Bifidobacterium longum DJO10A
MTFTNNDWWRDAVIYQIYPRSFSDANGDGNGDLQGVIDRLDYLQALGVDALWLSPFYPSPLADGGYDVADYCDVDPRLGTLDQFDELVAKAHERGIGIIVDIVPNHTSDQHRWFQEALAQGPESEAAQRYVFRQGKGEHGELPPTNWLSNFGGSAWESCGDGWYYLHLFAKEQPDLNWDNPEVRHEFLRVLTFWCDRGVDGFRIDVSHGLAKDLREPLRDRIDPTLMSPQATDGSDPLWDRDAVHDIYREWRDLFNQYTPAKYAVGESWSPFTTRIFQYAKPDELGAVFDFSMSKAAWNREEYRTTIERTHRYALAAETAPTWVLGNHDVPRIASRLGLPSGANIEQWVTSNGTNPPIDPALAARRARAAALVMLGLPGTAFVYQGEELGLPEDFDLTEDEIQDPNWERSGHYFKGRDGCRVPLPWQSDGPAFGFNATGASWLPQPAWFAQYATNRQIGDGASVLHLYCAAVALRKQWVANGTDFQFSWLTNEECPAPLLGWRLPSGMVVMANFSDSQPVALPQPMTVLLVSDATVQANTQVESVPPAATVWALPA

SEQ ID NO: 18539 - protein, 371 aa, Bradyrhizobium japonicum
MSKNSSVIKDRRFAAVLLLCASIAWSPVLAQVPDIRGGQIPTLAPVVRETTPSVVNISVHARVKEDNPLYRDPVFREFFDLPKQLEKEVQATGSGVIVDAERGYVLTANHVVAQISKAQVTTKDGRKFDAKLVGRDPATDVAVLQLQGLRGNLKAIPLGDSDRIEVGDFVIAIGNPFGLGQTVTSGIVSALGRTGLGKQGYEDFIQTDASINPGNSGGALINLRGQLVGINTAIISPGGGNVGIGFAVPINMARRVMEQLVQYGEVRRGQIGISIRDLGVDLAAKESYQGALIAEIASGSPAEQAGLQKGDIVKAVDGTPIRSASQLRNLIGLTPVGSRVELRFERNGAARSASVEVGPAKAVPVRRTADQ

SEQ ID NO: 18540 - protein, 356 aa, Oryza sativa
  misc_feature (299)..(299): Xaa can be any naturally occurring amino acid
  unsure (1)..(356): unsure at all Xaa locations
DFPSRDVEVDGDVRKSVRSAFLACAPSPSRFSVYIVAGRARSPIIAMACAKEGNGAPTKRTTLHDLYDLQGQPPWYDACCGTGDDFIMAGGSGVRGVTSNPSIFQKAISTSNAYDDQFKQLILAGKDAESAYWELVIKDIQDACKLFEPIYDQTDGADGYVSVEVSPRLANDTQGTVEAAKWLHKVVDRPNVYIKIPATAECVPSIKEVIAKGISVNVTLIFSIARYEAVIDAYIDGLEAPGLSDLSRVTSVASFFVSRLDTPIDKMLDKIGPPEATAPHATRPAPPATPPHQTSHKKXSAPRWTPRHQGARTREARASHVATASQHPEDPPHTTTAPNSGNERKRNKTHARHRRP

SEQ ID NO: 18541 - protein, 335 aa, Zea mays
MGRAPCCEKVELKRGRWTAEEDQLLANYIAEHGEGSWRSLPKNAGLLRCGKSCRLRWINYLRADVKRGNISKEEEDIIIKLHATLGNRWSLIASHLPGRTDNEIKNYWNSHLSRQIHTYRRKYTAGPDDTAIAIDMSKLQSADRRRGGRTPGRPPKTSASRTKHSDADQPGGEAKGAAASSPRHSDAVNPGPNQPNSSSGSTGTAEEEGPSSEDASGPWVLEPIELGDLWGEADSEMDALMPIGPGGHDSAALQGLGAVGGEAQVDDLFDMDWDGFAAHLWGGPEQDDHSAQLRQAAEPMEAAAVAAAAAAATAACTPDDRELEAFETWLLSDSF

SEQ ID NO: 18542 - protein, 290 aa, Oryza sativa
MGKDEVMESGGAAGEFAAKDYTDPPPAPLIDAAELGSWSLYRAVIAEFIATLLFLYITVATVIGYKHQTDASASGADAACGGVGVLGIAWAFGGMIFILVYCTAGISGGHINPAVTFGLFLARKVSLVRAILYIVAQCLGAICGVGLVKAFQSAYFNRYGGGANTLAAGYSKGTGLAAEIIGTFVLVYTVFSATDPKRNARDSHVPVLAPLPIGFAVFMVHLATIPITGTGINPARSIGAAVIFNNEKAWHNHWIFWVGPFVGAAIAAFYHQYILRAGAIKALGSFRSNA

SEQ ID NO: 18543 - protein, 509 aa, GIBBERELLA ZEAE PH-1
MANTHALDNDPAMSRDQGSTKDIAVDGGPEDGKTHQFNEQTNYVPQRAIITTMLATSLYIIGNALGSTSQASWIASGYFITSTVGQLMYGRLSDIWSRKIILLMGLAIFFIGSIASSLADSVLQLTIFRAFTGIGGGGLMTVAQLIVSDVVPLRERGKYQGILDATAFDASDDTMEIGNWLTWGGKEYAWNSTQVISTLSIGTAVSIAFMLWQWKGPKYPLIPLHMFKSKIVNGACLTMAINGWNFVMQVYYIPSFYQLVYGYSATKAGAMLLPITLLQTASSTLSGLVVHWIGRYRECILFGWLCWAVGLGLMSTLDENTGVDKQIGYSVLIGIGVGNTLQPALIATQAGVDRCDMAVVTSFRNFVRNLGATLGLTVCGTVLNNVLAGSLSSLNLNSRDSNTLLENPQSFLGNVAPDEAERIRSVLIPAYREGFRIIFLIGAGAASLAFVLAFVLMPQVNLTRPDDLRLKEEGRTVYEEKRSKGNELWALEYPVSLQARVQMQTIGRQ

SEQ ID NO: 18544 - protein, 377 aa, GIBBERELLA ZEAE PH-1
MPVGTVLVTGGTGYIGSFTSLTLLEHGYDVVIVDSLYNSSEVALDRIELICGRRPAFYKLDITDEKAIDEVFAKHPAIDSVIHFAALKASRISAVGESGEIPLEYYRVNVGGSISLLRSMERNNVNNIVFSSSATVYGDATRFPNMIPIPEHCPIGPTNTYGRTKSMIEDVITDFVNAQRNNLEKAGKEYKQWNGALLRYFNPCGAHPTGIMGEDPQGIPFNLLPLLGQVATGEREKLLVFGDDYSSRDGTAIRDYIHVVDLARGHLMALNYLRENQPGVKAWNLGSGRGSTVFEIINAFSKVVGRDLAYEVRPRRQGDVLDLTANPTLANKELNWKTELTMEEACNDLWRWVENNPKGYRQDPPAKLLEAVKSSKA

SEQ ID NO: 18545 - protein, 492 aa, Lycopersicon esculentum
MDPYKYRPSSAFNSPFCTTNSGAPVFNNNSSLTVGARGPVLLEDYHLVEKLANFDRERIAERVVHARGASAKGFFEVTHDIAHLTCADFLRAPGVQTPVIVRFSTVIHERGSPETLRDPRGFAVKFYTREGNFDLVGNNFPVFFIRDGMKFPDMVHALKPNPKSHIQENWRVLDFFSHHPESLHMFTFLFDDIGIPQDYRHMDGSGVHTFTLINRAGKSTYVKFHWKPTCGVKSLLEEKAIRVGGANHSHATQDLYDSIAAGNYPEWKPSIQIMGPEHEDKFDFDPLDVTKTWPEDILPLQPVGRLVLNKNIDNFLYMNEQLAFCPSIVVPGVYYSDDKMLQTRIFSYSDTQRYRLGPNYLQLPANAPKCAHHNNHYDGSMNFMHRDEEIDYFPSRYDQVRHAEVYPIPSTVCSGKREKCIIQKENNFKQPGERYRSFTPDRQERFIRRWVEALSDPRITYEIRSIWITYWSQADKSLGQKLASRLNVRPSI

SEQ ID NO: 18546 - protein, 329 aa, GIBBERELLA ZEAE PH-1
MAPVPSTMKAVQINKNGGVEVLEHNDVPVPKVGEGQILVRNQIAGLNFIDTYFRSGLYKAPQFPLTLGREAAGTIVDIHSSVKGFENGSRVVFMGTVGAYAQYSVVNASDAVKIPDDVPTEQAVAAYLQGLTAWTFIREAGQVKEGQWVLVHAASGGVGTLLVQLLRTVGAKIIGTASTDEKLELAKKNGAEWVISSHDDVVAKVKEITGGHGADVIFDGVGKVTFDADLELIAPKGTLISFGNASGAVDPVSLFRLTPKNVRLMRPVVNGYVAQRADLEKYTSELFDLIKSKKLELTIHKVYPLADVAKAHEDIESRKTIGKLLIKVD

SEQ ID NO: 18547 - protein, 238 aa, Brucella melitensis 16M
MINAIRVHRTGGPDVLHYEQVEIGEPGPGEARVRHEAVGLNFIDVYFRTGLYKAAKMPFTPGNEGAGIVVAVGAGVENVRVGERVAYAATPGSYADERILPADRLVKVPDTIDLKTAASMMLKGMTAQYLLRRTFRVEPGQTILFHAAAGGVGLIAGQWAKHLGATVIGTAGSEEKIALARKHGYDHVINYRSENFVERVRELTNGEGVDVVYDSVGRDTYMGSLDVLKPLGMFACFG

SEQ ID NO: 18548 - protein, 576 aa, GIBBERELLA ZEAE PH-1
MAPSADTSFSAHVASQFQSYEEDRQSASKESTYATSNGVPVAHAYEAQRCGENGPLLLQDFHLIDLLSHFDRERIPERVVHAKGSGAHGFFECTDPLDDLCLADIFSAKGKKCPVSMRFSTVGGESGSHDMARDPRGFSVKMRTEEGNLDWVFNNTPVFFLRDPAKFPHFIHTQKRDPSTHLTHADDSFAFWDYLSQNPESIHQVMILMGDRGIPKGYRKMHGYSGHTFKLVNKAGDWVYTQIHLKSMQGTDFVTQEDSADYSPDFSQKDLYEAIQNGDYPKWTLEVQTMTPKEAEELWEKEKINVFDLTHVWPQKQFPRRKVGEFTLNENAINYFAEVEQIAFNPAHLPPGIEPSADPVLQSRLFSYPDTHRHRIGVNYQQLPVNATRTGYKFGNFQRDGQMAFYNQGARPNYLSSIDPIKFRTRTVDLDKTHGHFTGEAITFLTAIRPEDFNAPRALWRNVFDEPARERFINNVTGKMKLCKQEEPLKRQIAIFREVDPEIADRLEKSTGIKGYDGIADMKFNGSHNCMNGEMKLANDIIANKGKSATARNGAPAKGCHSRLETNGHLNGTNGK

SEQ ID NO: 18549 - protein, 162 aa, Lactobacillus acidophilus
RIPVHMVETINKLIRIQRQLLQDLGREPTPEEIGAEMNMPTNKVRDILRIAQERVSLETPIGEEDDSHLGDFIEDKDATSPEQHASYEMLKEQLEQVLETLTDREENVLRLRFGLEYGRTRTLEEVGKVFGVTRERIRQIEAKALRKLRHPSRSNQLRDFMD

SEQ ID NO: 18550 - protein, 180 aa, Rhizobium leguminosarum bv. phaseoli
EFDEFPTLEQLPLWGFDGSSTMQAEGRSSDCVLKPVAIYPDPARTNGALVMCEVMMPDGVTPHASNARATILDDEDAWFGFEQEYFFYQNGRPLGFPEQGYPAPQGPYYTGVGYSNVGDVAREIVEEHLDLCLAAGINHEGINAEVAKGQWEFQIFGKGSKKAADQIWMARYLLQRLTEK

SEQ ID NO: 18551 - protein, 933 aa, GIBBERELLA ZEAE PH-1
MTVFVCSLFLPKTIHFTLPGTPPPGVDPSRTSLSGSSNINLRGDTRASLSGSAVPKDGAALPPKTAAPVGGRPAPLNRQPSLFQKEDITPPRTPTEEVDVNLFANEDGIRIPFPKRPGSNAGSGKPWGSRANQPKSRASSPPPPALSENSRTMQKARELGRQGVIQPKPLVRSDSHDRVFASAGWMVVNADQGNGGLRNAADAAARDGKIDEITWVGTLGMPTDALEGTEQKQDIENTLANEHNMLTVFCSDKDFDGHYAHFCKHILWPVFHYQIPDNPKSKAYEDHSWKYYVNVNQAFADQIVKNWKRGDVVWIHDYHLLLVPEMVRKKIPEAKIGFFLHVAFPSSEVFRCLAVRKELLEGMLGANLVGFQIHEYGRHFLQTCSRILNAEATPDGLQLEDRFVDVIHLAIGIDPVSLREHLDAPEVAKWLQIMQERYKGKRLIVARDKLDHVRGVRQKLLSYELFLNKNPQWRENTVLIQVALSSSEKSDLEATVSDIVTRVNSSWANLAYQPVVYLKQDIDYAQYLALLTIADALMITSQREGMNLTSHEYLFCQDGKLLPEKKHGSLILSEFTGTSSLFAKNELAVNPWDYRACADAIKQALEMGQDEKDQRWNNLYGRVVKHTGSHWFTEFLGRLDIVYEEQHKRDQTSVPRLSVPALSSKYTKAERRLFIIDYEGTLVAWGPVNQIIPISPQRTLDVLNDLLLDERNTVYVMSGRRPEELDRVFRRVPNLGLIAENGCFLKSHGDDSWTEMADLDHVKDWKESVRPIMTYFLERTPGAEIEERRCSLIFHYKSAEDYETASRQASDCASHVNDACESQRVHAIALDGCIAVEPIDWTKRTAARKVFETLKEEIHPTTEKKAPVDFLMVIGDGREDEKVFKWANRLQDDGSVENVVTVSLGNRNTEATATLTQGVSGVLSCLQRLASLE

SEQ ID NO: 18552 - protein, 94 aa, Lactobacillus acidophilus
MLQPIGDRVIVKVKEEEEKTVGGIVLASNAKQKPTEGEVVAVGEGAYTSNGDKLPMVVKKGDVVLYDKYSGTNVEYEGEKYLVLHEKDILAIEK

SEQ ID NO: 18553 - protein, 225 aa, Elaeis guineensis
WTAEENRHGDLLNKYLYLSGRVDMKQIEKTIQYLIGSGMDPRTENSPYLGFIYTSFQERATFISHGNTARHAKEHGDVKLAQICGTIASDEKRHETAYTKIVEKLFEIDPDGTVLSFADMMKKKISMPAHLMYDGQDDNLFEHFSAVAQRLGVDTAKDYADILEFLINRWKVGELTGFSGEGKRAQDFVCTLAPRIRRIEERAQERAKQAPRIPCSWIYGREVQL

SEQ ID NO: 18554 - protein, 546 aa, Lactobacillus acidophilus
MAKDIKFAENARRSLLKGVDKLADTVKTTIGPKGRNVVLEQSYGNPDITNDGVTIAKSIELKDHYENMGAKLVAEAAQKTNDIAGDGTTTATVLTQAIAREGMKNVTAGANPVGIRRGIEKATKAAVDELHKISHKVESKEQIANVAAVSSASKEVGELIADAMEKVGHEGVITTEDSRGINTELSVVEGMQFDRGYLSQYMVTDNDKMEADLDNPYILITDKKISNIQDILPLLQEIVQQGKSLLIIADDVTGEALPTLVLNKIRGTFNVVAVKAPGFGDRRKAQLEDIAALTGGTVITDDLGFELKDTKIDQLGQARRVTVTKDSTTIVDGAGSKEAIKEREDSIRKQIEESTSDFDKKKLQERLAELTGGVAVIHVGAATETELKERRYRIEDALNSTRAAVDEGYVAGGGTALVDVEKAIKDLKGETSDEQTGINIVLRALSAPVRQIAENAGKDGAVVLNKLESQENEIGYNAATDKWENMVEAGIIDPTKVTGKVTRTALQNAASIAALLLTTEAVVADIPEDKPEAPQAGAAGAPGMGM

SEQ ID NO: 18555 - protein, 180 aa, Rhizobium leguminosarum bv. viciae
EFDVFPTLEQLPLWGFDGSSTQQAEGRSSDCVLKPVAIYPDPARTNGALVMCEVMMPDGVTPHASNARATILDDEDAWFGFEQEYFFYQNGRPLGFPEQGYPAPQGPYYTGVGYSNVGDVAREIVEEHLDLCLAAGINHEGINAEVAKGQWEFQIFGKGSKKAADQIWMARYLLQRLTEK

SEQ ID NO: 18556 - protein, 180 aa, Rhizobium sp. USDA 1920
EFDNFPTLEQLPLWGFDGSSTMQAEGRSSDCVLKPVAIYPDPARTNGVLVMCEVMMPDGVTPHASNARATILDDEDAWFGFEQEYFFYENGRPLGFPESGYPAPQGPYYTGVGYSNVGSVAREIVEEHLDLCLAAGINHEGINAEVAKGQWEFQIFGKGSKKAADQIWMARYLLQRLTEK

SEQ ID NO: 18557 - protein, 246 aa, Clostridium acetobutylicum ATCC 824
MIVITSFALSGECADEIFGGYPWFMRKEMIYANTFPWSRFVNERISLLSDDLKSINLQEYVDARYKENLNNVPVSDEDSPYAKRMRELFYLNIKWFMITLLTRKDRMSMANSLEVRVPFADYRLVEYAFNIPPEIKFLNGREKGILRKAFEGVLPQDVIERKKSPYPKTFDPRYTALVQKWLKKVVEDKTSPILDIIDLKTVNELIETGGSSYKTPWFGQLMKGPQLIAYLLQVNFWLKEYKIKMI

SEQ ID NO: 18558 - protein, 460 aa, Arabidopsis thaliana
MLSSKVVGDSHGQDSSYFLGWQEYEKNPFHESFNTSGIVQMGLAENQLSFDLIEKWLEEHPEVLGLKKNDESVFRQLALFQDYHGLPAFKDAMAKFMGKIRENKVKFDTNKMVLTAGSTSANETLMFCLANPGDAFLIPAPYYPGFDRDLKWRTGVEIVPIHCVSSNGYKITEDALEDAYERALKHNLNVKGVLITNPSNPLGTSTTREELDLLLTFTSTKKIHMVSDEIYSGTVFDSPEFTSVLEVAKDKNMGLDGKIHVVYSLSKDLGLPGFRVGLIYSNNEKVVSAATKMSSFGLISSQTQHLLANLLSDERFTTNYLEENKKRLRERKDRLVSGLKEAGISCLKSNAGLFCWVDLRHLLKSNTFEAEHSLWTKIVCEVGLNISPGSSCHCDEPGWFRVCFANMSDQTMEVAMDRVKGFVDNNNGGKQKRTMWDTRRRSLINKWVSKLSSVTCESER

SEQ ID NO: 18559 - protein, 180 aa, Agrobacterium rhizogenes
EFDAFPTLEQLPLWGFDGSSTMQAEGRSSDCVLKPVAIYPDPARTNGALVMCEVMMPDGVTPHESNSRATILDDEDAWFGFEQEYFFYKDGRPLGFPESGYPAPQGPYYTGVGYKNVGDVAREIVEEHLDLCLEAGINHEGINAEVAKGQWEFQIFGKGSKKAADQIWMARYLLLRLCEK

SEQ ID NO: 18560 - protein, 635 aa, Propionibacterium acnes KPA171202
MSGTSDDESHAVQRKLLAASAKNFAAMLDRQADAHPNRIAFLTPSGPDDEPNTWLPMTFAEFRRQAHEVAAGLMEFGLPREGRVALLSGTRTEWIIADMAISCAGGATTTIYPNSGPEEASFILVDSHSSILFVDSTAQVAKIQGRPEVDAVVRHIISFVDDSEQTGVSDDRLTTMADVIAHGRRRLAAEPELVRRMIDSIEPDDLCTLIYTSGTTGTPKGVELTHQAWTYMGQAWKSLDMFRGGDIHLLWLPLSHAFGKCLIAICVEIGITQAIEPRIPRLARSLGEVKPRVMCGVPRIFEKIRAGVMTAYPQGRLASRVSRWAFATGRDVQQYRRAGDRLPVTVAAKLKIADALVFSTLRRKLGGIEFMICGGAKLSEQVQQWFFSAGIPIVEGYGATEIGAVAFFSGPTAIRSGTVGPVAPGCLARIAEDGEVLVSGPIVARGYHNLPEKTAKAFTDGWFHTGDIGEFDEKNYLRITDRKRDLFKTSGGKYVAPQKVEATLMANCPYLSNAVVLGEGHKYAVALLTLDRDALMTWGKRHGKADASYAELTADPRVRRSIQWYVDRANSRLERWETVKKFAILDHDLTEDSHSVTTSLKVRRGVVAEKYAYLLDEMFADENDQPGAAKGSDAS

SEQ ID NO: 18561 - protein, 319 aa, Exiguobacterium sp. 255-15
MSERIQTTLVTGFLGAGKTTLLNRIVSNPIEKVALLVNEVGAVNIDEALIERSDEEVIELTNGCICCSIRGDLREALLRIAKKRRHGEMIFDRLIVETTGIADPGPILQTFYFEPAVEQQYQISSVITVVDAYQLERQLTFEENVRQIGFADTLLLNKTDLISVNDVTVAIKRLSELNPTALILPTVESDTPIEQLFETFHFPKQEEERLAQQTDGLQKAADSFTALTITEPVPLHRQRFGAVLREILEAYAEDLYRYKGILHFSDTDRKTILQGTGMIYGTATRGEFEGPKQTTLVFIGKNLDEQAIRKGVKAAREHG

SEQ ID NO: 18562 - protein, 547 aa, Listeria innocua Clip11262
MTLKSGFDYMNNPLLNKGTAFTSEERLNYKLDGLLPPIIETIEQQALRIENQLENLESPLHKHQFLTNLYNENRTLYYYVVTKNVSEYLPIIYTPTIGDAVIHYHTDYTAPDEALFIDAFTPEKLRASVENYAQNNPNIDMIVITDGEGVLGIGDWGVNGVKIAVGKLAVYTVAAGLSPDRVLPVVIDAGTNNKTLLEDSRYLGNKRPRLSESDYDTFIAQFVEVMSDVFPSAILHWEDFGRANASRILHNYRDKICTFNDDIQGTGAMVVAAALATINVSNIPLNKQKIIIFGAGTAGIGIADQLSGQLMRETGLPFESAKKHFYLLDRSGLVLDNMTDLTDGQKKYAHQASDWASVPTDTLEHLVEAIHPTMLIGCSGVTGAFKESIVKKMTEHTERPAILPLSNPTKLAEATAADLIKWTDGKALIVTGSPSKPVTYQNITYEIGQANNALLYPGLGLGALVTRSKFITDGMLAAASSAVSDQISTNELGAALLPHVRTLRETSRAVAIAVANQAIKENIHQVELASVTKAVEREMWQPTYKGV

SEQ ID NO: 18563 - protein, 300 aa, Thermobifida fusca YX
MGHHHHHTAAGAHRGRLLLVLALTLSVMAFQVVGGLAAGSLALLGDAGHMAVDAFGILVALFAIWIANQPSTDERTFGLKRAEILAAALNALLLFALCGFIGYEAVRRLLDPQPVSASTMVVFSTVGLLANLIALGLLRRGQAESLNLRGAYLEVLGDLLSSAGVVVTALIIWLTGWHWADSVVSIAIALFIAPRAWHLLNEALRILLEATPRGLDLSEVRRHLQTHPNVVDVHDLHAWTITSGMPVLSAHVVVEDSALADSGRLLARLHDCLSTHFSIDHSTIQVEPVGHAHHENACRA

SEQ ID NO: 18564 - protein, 398 aa, Arabidopsis thaliana
MMSDLPRDLLEERLSRVPVKSLREARFTCKNWKTLSKKRSFTKKHLAQEATSRESEFKVVMVLHCKVYLTSINLRGIHNGFDPSINRQAKLVSLNGTDQIDISEVYHCDGLLLCISKDYTRVVVWNPYRSQTLWLKPSSPDHRMDWYICAIGYEKRKSSLRYKVLRFVDFAEEEFVEYEIYELKSNSWRVLDVTSDWEVEFYARGVSLKGNTYWFATDKFPEISSNLIHSVYFLLCFNFTSERFGPRLHLPCYPMDVDTVSLSSVREEQLAVLFQRKDNLHMEIWVTTKIEPEEVMWSKLFLAVDMQPLTDFKFGIADASFIIDEEKKVVVVFAKDKDVMYPTHNTAYIIGEDGYYKEVDLGKTTDKIRDPLVCSYVPSSAQIKQGGKRKKKGKLITD

SEQ ID NO: 18565 - protein, 808 aa, Oryza sativa
MAAKLARLHSLRERLGATFSSHPNELIALFSRYVNQGKGMLQRHQLLAEFDALIEADKEKYAPFEDILRAAQEAIVLPPWVALAIRPRPGVWDYIRVNVSELAVEELSVSEYLAFKEQLVDGHTNSNFVLELDFEPFNASFPRPSMSKSIGNGVQFLNRHLSSKLFQDKESLYPLLNFLKAHNHKGTTMMPNDRIQSLRGLQSSLRKAEEYLMGIPQDTPYSEFNHRFQELGLEKGWGDCAKRVLDTIHLLLDLLEAPDPANLEKFLGTIPMMFNVVILSPHGYFAQSNVLGYPDTGGQVVYILDQVRALENEMLLRIKQQGLDITPKILIVTRLLPDAVGTTCGQRVEKVIGTEHTDILRVPFRSENGILRKWISRFDVWPFLETYTEDVANEIMREMQAKPDLIIGNYSDGNLVATLLAHKLGVTQCTIAHALEKTKYPNSDIYLDKFDSQYHFSCQFTADLIAMNHTDFIITSTFQEIAGSKDTVGQYESHIAFTLPGLYRVVHGIDVFDPKFNIVSPGADMSVYFPYTEADKRLTAFHPEIEELLYSEVENDEHKFVLKDKNKPIIFSMARLDRVKNMTGLVEMYGKNAHLRDLANLVIVCGDHGNQSKDREEQAEFKKMYGLIDQYKLKGHIRWISAQMNRVRNGELYRYICDTKGVFVQPAFYEAFGLTVIEAMTCGLPTIATCHGGPAEIIVDGVSGLHIDPYHSDKAADILVNFFEKCKQDSTYWDNISQGGLQRIYEKYTWKLYSERLMTLTGVYGFWKYVSNLERRETRRYIEMFYALKYRSLASAVPLAVDGESTSK

SEQ ID NO: 18566 - protein, 176 aa, Triticum aestivum
MAPTVMSSAATAVAPFQGLKSTAGLPVSRRSSSAAGLGSVSNGGRIRCMQVWPIEGIKKFETLSYLPPLSTEALLKQVDYLIRSKWVPCLEFSKVGFIFREHNASPRYYDGRYWTMWKLPMFGCTDATQVINEVEEVKKEYPDAYVRIIGFDNMRQVQCVSFIAFKPPGCEESGKA

SEQ ID NO: 18567 - protein, 278 aa, Glycine max
MAPCAAAAEFPVGLRVLVVDDDATTLKIIEQMSIRCRYRVTTCTEATVALNLLRERKGCFDVVLSDVHMPDMDGYKLLEHVGLEMDLPVIMMSGDSTTSAVMKGIRHGACDYLIKPVREEELRNIWQHVVRKFWNDSKEQDNSGSMEDSDQNKRGNDDAEYTSVADAAVVKAPKKRSSLKEEDIELESDDPAASKKPRVVWSVELHQQFVSAVNQLGLDKAVPKRILELMNVPGLTRENVASHLQKFRLYLKRLTGVAQHQNGMLYTVPGPIRIQSGN

SEQ ID NO: 18568 - protein, 319 aa, Triticum aestivum
MAFALNASCYPSSFQSSLLPRRMAAAVMIPRRRNVLPVIRAVAVAPPAPAPAKPAAVRSRPVSVTMAKLMAKGKTALIPYITAGDPDLATTAEALHLLDACGADVIELGVPCSDPYVDGPIIQASSARALAGGATMDGVLAMLKEVTPELSCPVVLFSYYRPILCRGLAEIKEAGVHGLIVPDLPYVAAHALWSEAKKNNLELVLLTTPAIPEERMKGITKASEGFIYLVSVNGVTGPRENVNLRVESLIQEIKKVTDKPVAVGFGISKPEHVKQIAGWGADGVIIGSAMVRQLGEAASPREGLKRLEAYARSMKNALP

SEQ ID NO: 18569 - protein, 233 aa, Arabidopsis thaliana
SKPSLSQLAPLEAILFDVDGTLCDSDPIHLIAFQELLQEIGFNNGVPIDEKFFVENIAGKHNSEIALLLFPDDVSRGLKFCDEKEALYRKIVAEKIKPLDGLIKLTKWIEDRGLKRAAVTNAPKENAELMISKLGLTDFFQAVILGSECEFPKPHPGPYLKALEVLNVSKEHTLVFEDSISGIKAGVAAGMPVIGLTTGNPASLLMQAKPAFLIENYADPKLWAVLEELDNKS

SEQ ID NO: 18570 - protein, 317 aa, Mesorhizobium loti MAFF303099
MKKLVCAGEILVEIMAERIGQSFLAPGPLVGPFPSGAPAIFIDQAARLGQPAGLIAAVGDDDFGHLNIERLRADGADISAIKVHRGAATGTAFVTYETDGSRHFVYNIKHSAAGLIEIGAEARALLAGADHFHVMGTSLFSPEVIEVARKGIETVKARGGTVSFDPNIRKEMLDLPGLRDALHFVLSKTDVFLPSGPELFIFARATDEESAVREMLDRGISAVVIKKGAQGAVHYDKTGRTASPGFVVEEIDPTGAGDCFAAAFVSFWLRGAAPEKALRIANGCGALAVTRKGPMEGIASLAAVEAYVATARTGAPA

SEQ ID NO: 18571 - protein, 218 aa, Ipomoea batatas
MGRGKVEIRRIEKSTNRRVTFWKRRNGLLKKAMEMGILCDAEVGLMIFSSTGKLHEFATTSIRSVIERYNKTQGDGLQSPLDPTLELKFWQIKVAILRKQLHNMQEDHRKAMGEVYGLSVKDLLNLENQLEMSMSSIIMKKEQLLIDQILELTHQQRSIVLQENFELFNKFQAYGTSDPNAVNGDTISPYDFTISEESQGHIHFQLPQNFSDLARALY

SEQ ID NO: 18572 - protein, 477 aa, Lycopersicon esculentum
MGLISKIATNDGHGENSAYFDGWKAYENDPFHPTQNPNGVIQMGLAENQLCFDLIQEWIVNNPKASICTYEGVQDFQDTAIFQDYHGLPEFRKAVARFMEKVRGDRVRFDPERIVMSGGATGAHESLAFCLADPGDAFLVPTPYYPGFDRDLRWRTGVQLFPVVCESSNNFKVTKEALEEAYSKAQESNIKVKGLLINNPSNPLGTILDKETLKDILRFINDKNIHLVCDEIYAATAFSQPSFISISEVKSEVVGCNDDLVHIVYSLSKDLGFPGFRVGIIYSYNDAVVNIARKMSSFGLVSTQTQRLIASMLLDTIFVEDFIAKSSMRLLQRHGLFTKGLGQVGITTLKSNAGLFIWMDLRRFLENSTFDDELKLWHIIIDKVKLNVSPGCSFHCSEPGWFRVCFANMDDATMKIALRRIRHFVYLQPNKGVEVATKKQYCRTRSKLEISLSFRRLDDFMNSPHSPMSSPMVQARN

SEQ ID NO: 18573 - protein, 587 aa, Oryza sativa
MESNGGGGGSPKEAAVVVPSSGDATLGGHLARRLVQVGVSDVFAVPGDFNLTLLDHLIAEPGLRVVGCCNELNAGYAADGYARARGVGACAVTFTVGGLSVLNAIGGAYSENLPLICIVGGPNSNDYGTNRILHHTIGLPDFSQELRCFQPLTCYQAVVNNLDDAHDQIDRAISTAIRESKPVYISVSCNLPAVPHPTFSRDPVPYFLSPRLSNQASLHAALDATLAFLDKAVKPVLVAGPKLRVAKAGGAFVDLADASGHAVAAMPSAKGLVPETLPRFIGTYWGAVSTAFCAEIVESADAYLFAGPIFNDYSSVGYSCLLKKEKAVVVQPDRVTVGNGPAFGCVMMRDFLSELAKRVRKNTTAFDNYKRIFVPEGQLPECEAGEALRVNVLFKHIQRMIGGTEIGAVMAETGDSWFNCQKLRLPEGCGYEFQMQYGSIGWSVGALLGYAQAVQKRVVACIGDGSFQVTAQDVSTMLRCGQRSIIFLINNGGYTIEVEIHDGPYNVIKNWDYVGLVNAIHNGEGRCWATRVRCEEELEAAIATATGDKADSLCFIEVVAHKDDTSKELLEWGSRVSAANSRPPNPQ

SEQ ID NO: 18574 - protein, 475 aa, Propionibacterium acnes KPA171202
MLPMTVKNQHSAAEEQHLRRSLSNRHIQLIAISGAIGTGLFMGSGKSISTAGPSIVVAYLVIGAMLFFVMRAMGELLLHNLQWKSFQDFAADLLGPWAGFFLGWTYWLCWVVTGMADVIAITSYWSFWTHDRAWAFILTATTLLLLLALNLLTVKLFGELEFWFALIKIVAILTLIAVAIVLIVMGFTSASGYKASVSNLWSYGGFAPRGWSGFFGGFQIAVFAYVGIELVGTTSAETANPPKTMPKAINAVPVRVLVFYVAALLAMMCVTPWNLIQTDSSPFVQMFGLIGFTAAAGIMNFVVLTSAASSANSGVYSTSRMLYGLAHKGMAPRAFGKLSRHGVPGWGLFCTIILIGSALILAAKDSVMGAFTLVTTVSAVLFVFVWSMILISHIVHVRRNPQAHAKSIYPMPGASFMPWVVLAFFVFVIVLLTGADDTLQALLAAPIWFVVLGIVWAIVRRRSHHDDLETDLPAD

SEQ ID NO: 18575 - protein, 552 aa, Xylella fastidiosa Ann-1
MKALFRACRIGKVMLRYRLDTLLDGTAAERWLRLAKPFVPRISAEIVEQSRGRRLRLALQELGPIFVKFGQILSTRRDLVPQDIGDELVMLQDRVEPFEGQTARIIIETALGKSVESAFAHFDTVPLASASISQVHAATLHDRREVVVKVLRPDIEHQISDDIALLKSLATLVEHTHPNADKIRPREIVAEIETTLAAELDLQREGANASVLRRFWEASDDIYVPEVIWSHTAERVLTLERMYGIPSDDIALLDASGIDRKALSSKGIRVFYTQVFRDNFFHADAHSGNIWVDSDPARKSNPRFIALDFGIMGQLSQKDQYYLAENFMAIFHKDYRRIAELHVEAGWIPQHVRIEELEAAARSVCEPYFTRPLSQISLAEVLMKLFHVARRYQLTLQPQLILLQKTLLNIEGVGRQLDPELDIWVVARPVLERILRARYSPRHALKELNKRLPEIMTHAPDTPRLIHTWLVQQVESRKQNDVYLQQIRALAMTLQGLQRRVVNAIVGSGLLVAAAVLYGLHPDGLYLGTIPVWSLISGCVGALALFSAWWRS

SEQ ID NO: 18576 - protein, 352 aa, Zea mays
MAESSEPPVVLLHRPPSLTFMDEILTREFRTLITDTSSSESLPSFLPRHASSARAFVITGRLPVTEELLSHLPSLQILVCTSVGIDHIDLAACKRRGIVITNAGNAFSDDVADCAVGLLISVLRRIPAADRYVRAGNWAKFGDFQLGSKVSGKRVGIVGLGSIGSFVAKRLESFGCVISYNSRSQKQSSPYRFYSDILSLAENNDVLVLCCSLTDETHHIVNREVMELLGKDGVVINVGRGKLIDEKEMVKCLVDGVIGGAGLDVFENEPAVPQELFGLDNVVLSPHFAVATPGSLDNVAQIALANLKAFFSNRPLLSPVQLDLERTSLEGGPGTQFALKGGEYKYTPANKF

SEQ ID NO: 18577 - protein, 281 aa, Zea mays
  misc_feature (60)..(60): Xaa can be any naturally occurring amino acid
  unsure (1)..(281): unsure at all Xaa locations
MEFEDRCHKVQEPKFDCLLFDLDDTLYPLSAGMGSLLPPFISDYMVEKLGIDETKIENLXGNLLYKNYGTTMAGLRAIGYSFDYDEYHAFVHGRLPYDNIKPDPILKHILKNLRIRKLIFTNGDMVHAVRALKRLGLEDCFEGIICLETLNPPCPPQGDQEPEIFDIADHFARSGTADELPKTPVLCKPNVDAMEEALRIANVNPHKAIFFDDSVRNIQAGKQIGLHTVLVGKSQRVKGADHALESIHNIREALPELWEEAEKAEDVLYPERVAMETSVTA

SEQ ID NO: 18578 - protein, 487 aa, Legionella pneumophila subsp. pneumophila str. Philadelphia 1
MKTNIPTLSKPIKDSGYRRGLKDRHVQLIALGGIIGSGYFLGTGEVINLVGPSVFIAYLLGGLIIYLTMLCMGELAVAIPISGSFVTYTSDFISPTVACGVGWSYWITWVAYIPAECVAGGIIMELFTGVSGYIWVVCFGLIITYINLAKVDTFGEIEFWLALIKIISLLAFVFLAILIFFGLIHGSEPPGIIGFKYLLGDGGLLPNGAMSLLTAMVLLLVNYQGSEIIGLAAGESENPARMIPHAIRNVTFRILFLYIIPVFCLVLIFPWQKAGLSNSVFADALNFYGLKWAGAVTSFVTLSATLSCANSGFYGAVRSLNALARDGMAPHVLAKFNQNSVPQNAVIATLIGVWILLGVGYFFGQTKLYIALLLVSGFTGTLAWLSLCIAQISFRNRLYKAGYSIKDLRYVTPYSPYTGILAVILMVGSLFFLLLNKDPIYKLSFIIGVVSFIIPVIIYKVFDLSKVRKKALHVKSRVKFQDLFPPQ

SEQ ID NO: 18579 - protein, 585 aa, Elaeagnus umbellata
MCGILALLGCSDDSQAKRVRVLELSRRLKHRGPDWSGLFQFGDCYLAHQRLAIIDPASGDQPLFNEDKTVVVTVNGEIYNHEELRKKLSHHKFRTGSDCDVIAHLYEEYGEDFVDMLDGIFAFVLLDTRDNSFIVARDAIGVTSLYIGWGLDGSIWISSELKGLNNDCEHFETFPPGHLYSSKAGGMRRWYNPVWFSETIPSAPYDPLALRRAFENAVIKRLMTDVPFGVLLSGGLDSSLVASITARHLSGTKAAKQWGTKLHSFCVGLEGSPDLKAAKEVAAYLGTVHHEFHFTVQDGIDAIEDVIYHVETYDVTTIRASTPMFLMSRKIKSLGVKMVMSGEGSDEIFGGYLYFHKAPNKEEFHEETCRKIKALYLYDCLRANKSTTAWGLEARVPFLDKEFINVAMNIDPEYKKIKRDEGRIEKWVLRKAFDDEERPYLPKHILYRQKEQFSDGVGYSWIDGLKAHAAKHVTDKMIRNAAHIFPHNTPNTKEGYYYRMIFERFYPQNSARLTVPGGASVACSTAKAVEWDESWSKNLDPSGRAALGVHLSAYDNQVPSGVVQPEIISNVPQITVNTLGLEIQS

SEQ ID NO: 18580 - protein, 176 aa, Oryza sativa
MAKQKIVVKMPMDTERKKRKAFKAAVGMTGVTSASLDGDKLIVIGDGVDPIALTTILRRSLGHAELLSVSSGDDKKMGGGGGHGGMGMGFGGGHGGMGFGGGHGGKEGKEGGGKVVVDGVHHHHQQQLQQQHAMAPPMQPYPAAPAYYNAAAPSYPVYPSYAGYPQQEQDPGCSIM

SEQ ID NO: 18581 - protein, 559 aa, Prunus dulcis
  misc_feature (46)..(46): Xaa can be any naturally occurring amino acid
  unsure (1)..(559): unsure at all Xaa locations
MGSLEEERSLLEDGLIQDETNGLYTGDGSVDITGKPVLKQSTGNWXACPFILGTECCERLAFYGISTNLVTYLTHKLHEGNVSAARNVTTWSGTCYLTPLIGAVLADAYWGRYWTIAIFSTIYFIGMCTLTISASVPALKPPQCVDSVCPSASPAQYGVFFFGLYLIALRTGGIKPCVSSFGADQFDDTDSRERVKKGSFFNWFYFSINIGALVSSTLIVWVQDNAGWGLGFGIPALFMGIAIVSFFSGTPLYRFQKPGGSPLTRMCQVLVASFRKWNLDVPRDSSLLYETQDKGSAIKGSRKLEHSDELNCLDKAAVISETETKTGDFSNPWRICTVTQVEELKILIRMFPIWATGIVFSAVYAQMATMFVEQGMMMDTSVGSFTIPPASLSSFDVISVIFWVPIYDRFIVPIARKFTGKERGFSELQRMGIGLFLSVLCMSAAAVVEMKRLQLATELGLVDKEVAVPLSIFWQIPQYFLLGAAEIFTFIGQLEFFYDQSSDAMRSLCSALSASDDFIGKLSELFDSDIVTYFTTQGGKAGWIPDNLNDGHLDYFSGS

SEQ ID NO: 18582 - protein, 620 aa, Burkholderia sp. 383
MTRKTSRLGGQAFQAVFGFTFRYWRKQPARTATVASLALLAALADVLTPLFAGRLVDALSTGLTDRAAAWHAALVAFGTLAALGLGATILRQGVYLNIITLTLKMMSEIAAASFHRVQRFSTDWHANSFAGSTVRKITRGIWALDLLNDTVLIALLPSVTMLVGATVLLGTHWPVMGLVVGAGSLLYITVTVAVSLGIVAPAARLGNLWDTRMGGALADAVSCNAVVKAFGAETREEARLARVIGKWRQRTRRTWVRGTFNGGLQGAMLVAMQAAMIGVALRLWANDEASVGDIAFALTMFFMLQGYLRDVGMHIRNLQRSVNDMEELVALERQPLGIDDRPGAPAIRIGQGEIRFEHVTFRYDNHPVPLYDDFSMRIAPGERVGLVGHSGSGKTSFIKLIQRLYDVSGGRITIDGQDIAQVRQDSLRSQIAIVQQEPVLFHRTLAENIAYARPDASRADIERAARLASAHDFIATLPDGYDTLVGERGIKLSGGERQRVAIARAFLADAPILILDEATSSLDSESELLIQQAMERLMVGRTTLVVAHRLSTVRALDRLLVLDRGKVIEEGSHDALIRIDGGIYRRLFERQALELAKGLADSPRRTADDAAGPLGEPAEV

SEQ ID NO: 18583 - protein, 759 aa, Lactococcus lactis subsp. lactis Il1403
MTMKKSIIAFPRIGSNRELKFALEKYFRKEITEEELQTVAKEIRLENWKSQKEAGIDSPISNDFSFYDQTLDLSIALGAIPGSYKNLELSELDTLFALARGFQDEQNDVKARPMKKWFNTNYHYLVPEINKDTIIKANFSKLLNEYKEAKSAGFETRPTIIGPYTFLVLADYKSGATKDTVLSDVIVAFQTLLKELNQLGVEWLQIEEPALVLDQTEEEKKLFVSIYEELLKSKNNLNILLQTYFGDVRDSYKEIIKLDFDGIGLDFIEGRDSLALIQKYGFPKKKILFAGLVNGKNIWRNNYQKTLELLTALDEVADIVINTSCSLQHVPVTIKNETKLSKEILKHFSFATEKLNEIDEISDIYFNKNTSFLKKNVELFENERVRENSKLKQKLDKLTEKDFTRQPSLVERRASQSQSLNLPVLPTTTIGSFPQTAEVRKVRLQNKRGELRQADYDTFLEEKIKECLKLQEDIGLDVLVHGEFERNDMVEYFGEKLEGYVFTQKAWVQSYGTRCVKPPIVWTDVTRPEAMTVRWSAYAQSQTSKPVKGMLTGPVTILNWSFPREDISLKASTLQLALAVQEEVLDLEKAGIKIIQIDEAALREKLPLRKSDWYKEYLDWAIPAFRLVHSKVKPETQIHTHMCYSEFEDIIPSIDAMDADVISFEASRSELSIIDALKAHHFKTLVGPGVYDIHSPRIPSVKEIQNQLEKILDKLPIEQVWVNPDCGLKTRGNAETIPSLRHLVEATRVLRKEKVVYDK

SEQ ID NO: 18584 - protein, 132 aa, Prosthecochloris aestuarii DSM 271
MLVKLSQDPLQLFDDIWQGSNAPSSPAFKVDISEDNHAFYIDAELPGLAKENITLGIEDDVLTFKAERKKESEEKEKNYHRIERTYGSFSRSFNLGELIDKENIGASYDNGMLHVTLPKAQEVKRTRAISIT

SEQ ID NO: 18585 - protein, 441 aa, Glycine max
MLEGPTFLVSRDLPSSCEQETRWIYNSFCVMELASNKRQLELEEEAVLTKSCKLSDAPEEGETKMNFQNLSLSVNQANDQNHSSDQSDSSSLIFQLGRDISINCLLRCSRSDYGSIASLNQSFRSLVRTGELYRLRRQMGIIEHWVYFSCNLPEWEAFDPNTRRWMRLPRMPSNECFICSDKESLAVGTELLVFGKEIMSPVIYRYSILMNAWSSGMIMNVPRCLFGSASLGEIAILAGGCDPRGNILSSAELYNSETGTWELLPNMNKARKMCSGVFIDGKFYVIGGIGVGNSKQLTCGEEFDLQTRKWQKIPNMFPGRNGGTEATEVSAAAEAPPLVAVVNNVLYSADYAQQEVRRYDKDNNLWFTIGRLPDRIVSMNGWGLAFRACGNRLIVIGGPRALDGRVIEINACVPGEGVPEWNLLASRQSGSFVYNCAVMGC

SEQ ID NO: 18586 - protein, 306 aa, Brassica napus
  misc_feature (20)..(20): Xaa can be any naturally occurring amino acid
  misc_feature (50)..(50): Xaa can be any naturally occurring amino acid
  unsure (1)..(306): unsure at all Xaa locations
MQIFVKTLTGKTITLEVESXSDTIDNVKAKIQDKEGIPPDQQRLIFAGKXLEDGRTLADYNIQKESTLHLVLRLRGGMQIFVKTLTGKTITLEVESSDTIDNVKAKIQDKEGIPPDQQRLIFAGKQLEDGRTLADYNIQKEATLHLVLRLRGGMQIFVKTLTGKTITLEVESSDTIDNVKAKIQDKEGIPPDQQRLIFAGKQLEDGRTLADYNIQKESTLHLVLRLRGGMQIFVKTLTGKTITLEVESSDTIDNVKAKIQDKEGIPPDQQRLIFAGKQLEDGRTLADYNIQKESTLHLVLRLRGGI

SEQ ID NO: 18587 - protein, 309 aa, Glycine max; identical to SEQ ID NO: 1432

SEQ ID NO: 18588 - protein, 462 aa, Magnetospirillum magnetotacticum MS-1
MAENSFDIIVIGGGPGGYVAAIRAAQLGMNTALVEREHLGGICLNWGCIPTKALLRSAEIYRNMQHAESYGLSAPGASFDLAKIVARSRGVSAQLQGGIKHLLKKNKVTVIEGTAKLAGGGKVAIEGKPTISAPHIILATGARARILPGFEPDGKFIWTYKEALVPDTMPKRLLVIGSGAIGIEFASFFNALGAQVTVAEAMDRVLPVEDAEISAMAQKSFEKQGMKILTSANIKGLKKNAADVTVTIEAGGKTQDITVDRIITAIGIVGNVENIGLEGTKIRVERTHVITDPYCRTDEPGIYAIGDIAGAPWLAHKASHEAMICVEKIKGLADVHPLDMRKIPGCTYCHPQVASVGLSEAKAKDKGYTVKVGRFPFMANGKAIALGETEGMIKTVFDAKTGELLGAHMIGAEVTEMIQGYVVAKTLETTEAELMHTVFAHPTLSEMMHESVLDAYGRAVHF

SEQ ID NO: 18589 - protein, 130 aa, Arabidopsis thaliana
MIHWLTYLKPIVLCLYLQHPYVYGVLVFEAMATFIGQVSVLSLIALFGAATTALITTARKGVTLLLSYLIFTKPLTEQHGSGLLLIAMGIVLKMVPMDSKAPAKIPARPAVRIAGGDGDREEDEERKSLV

SEQ ID NO: 18590 - protein, 358 aa, Nocardia farcinica IFM 10152
MNTRVLVTGATGFVAGHVIAELLAHGHPVRATVRDLADTGKRAHLVELARRLDGDLEFAAADLGADTGWAAAVAGCAAVLHVASPFPATPPKDERELIEPAVQGTLRVLRAAADADVRRVVLTSSVAAVAYGHGDDAVRTEADWSVVDRVPAYQKSKTLAERAAWDFVAALPDERGLELVALNPGMILGPLLTAATSTSHEPVRKLLAREVPGSVRTGWTPVDVRDLAVAHRLALETPAAAGNRYICAAPPLWMGELARMLADEYNPRGYRVPTRVLPNWLIRALALVDGTVRLTVPVLGRTENVSAAKAEAELGWRMRPVRDTVLDTAESLIAHGLVPTPAAAPASPRRTRPAPASA

SEQ ID NO: 18591 - protein, 152 aa, Zea mays
MSLVRRSNVFDPFSMNLWDPFDTMFRSIVPSAASTDSETAAFASARIDWKETPEAHVFKADLPGVKKEEVKVEVEDGNVLVISGQRSKEKEDKDDKWHRVERSSGQFVRRFRLPENAKVDQVKAGLENGVLTITVPKAEEKKPEVKAIEISG

SEQ ID NO: 18592 - protein, 553 aa, Bacteroides thetaiotaomicron VPI-5482
MVKDLLTPDYIFESSWEVCNKVGGIYTVLSTRANTLQEKFRDRIFFIGPDVWQGKENPLFIESDNLCADWKKHAFKNDHLSVRVGRWNIPGEPIVILVDFQPFFEQKNEIYTEMWNRFQVDSLHAYGDYDEASMFSYAAGKVVESFYRYNLTETDKVVYQAHEWMTGMGALYVQEAVPEVATIFTTHATSIGRSIAGNHKPLYDYLFAYNGDQMAQELNMQSKHSIEKQTAHYVDCFTTVSEITNNECKELLDKPADVVLMNGFEDDFVPKGSTFTGKRKRARSLMLNVANKLLGTNLDDDTLIIGTSGRYEFKNKGIDVFLESLNRLNRDKKLHKNVLAFINVPGWVGDPREDLQERLKSKEKFDTPLEVPFITHWLHNMTHDQVLDMLKYLGMGNRPDDKVKVIFVPCYLDGRDGILNKEYYDILLGQDLSVYASYYEPWGYTPLESVAFRVPTITTDLAGFGLWVNSLKNQHGINDGVEVLHRSDYNDSEVADGIKDTITLFADKSEKEVKEIRKHAADVAEQALWKHFIQYYYEAYDIALRNAMKRQLG

SEQ ID NO: 18593 - protein, 391 aa, Silicibacter pomeroyi DSS-3
MKQAVIVSTARTGLAKSFRGSFNVTHGATMGGHAVQAAVARAGLDGSEIEDCIIGCGFPEGETGSNIGRQIAIRAGLPVTASGMTVNRFCSSGLQTVALAAQAITEGGSGPMVAGGVESISMVQPKARPAPEAWIQEHKPAIYMAMIETADIVAQRYGLSRAYQDEYSLRSQQRIAAAQAEGKFADEIVPMQTKMAVKDKESGEVSMHEVTVDRDECNRPSTTLEGLAGLEPVRGAGNFVTAGNASQLSDGAAALVLMEAAEAERRGLEPLGAFKGFCVAGCEPDEMGIGPVFAVPRLLERHGLKVDDIDLWELNEAFASQCLYSRDRLGIDPEKYNVNGGSIAIGHPFGMTGARMTGHLMLEGKRRGAKLGVVSMCIGGGMGAAGLFEIF

SEQ ID NO: 18594 - protein, 417 aa, Oryza sativa
MPALGTLSGGAAGVAGLLRLRRATPSPAVATPFPAAAAARCAAAAAAVVPDGGQLVWGRQLRPALLLPAAGGLLQPPTSPSSSQAGRRQALRPPAAATSGEAKPAGFLEKYPALITGFFFFMWYFLNVIFNILNKKIYNYFPYPYFVSVIHLLVGVVYCLLSWAVGLPKRAPINATLLKLLFPVALCHALGHATSNVSFATVAVSFAHTIKALEPLFNAAATQFVLGQTVPLSLWLSLAPVVLGVSMASLTELSFSWKGFINAMIPNISFTYRSIYSKKAMTDMDSTNVYAYISIIALVVCIPPALIIEGPQLVQYGLNDAIAKVGMTKFVSDLFLVGLFYHLYNQIATNTLERVAPLTHAVGNVLKRVFVIGFSIIIFGNKITTQTGIGTCIAIAGVALYSYIKAKIEEEKRAKAA

SEQ ID NO: 18595 - protein, 565 aa, Burkholderia pseudomallei K96243
MVTPRHRPLHVENPFYRRLLNAPAWVALVAAAGIGCTSATLARADSSPAHASTAAAVASAASAPGAASIPPPPSQLYGDLFVAVQTAQIFADQKTFVDSTPNADPATIVQLYQQQKGQPGFSLKAFVAQYFTPPSDESVTPPPNQMLREHIDWLWPKLTRTTTTAPPYSSLIALPKPYVVPGGRFREGYYWDTYFTMLGLQEAGREDLVDNMLDNFAYLIDTVGHVPNGNRSYYVSRSQPPFFAYMVTLAAKAEGNRVYQKYLPALRKEYAYWMQGERTTPRGQATRNVVAMPDGSVLNRYWDASDTPRDESYLEDVKTAQQASGRPAAEVWRDLRAAAESGWDFSSRWFGDNRTLATIRTTAIVPVDLNSLMFNLETTIVKGCAVTRDFACVAEFAGRAGKRAVAINRYLWNRNGYYGDYDWKLGKPRDNLSAAALYPLFAGVAWPERAKQTAKNVQKALLKPGGLATTTYDTAQQWDAPNGWAPLHWIALVGLRHYGEKSLADDIGTRFLADVKGVYAAQGKLVEKYIVEGVGTGGGGGEYPLQDGFGWTNGVTLKLLDLYGG

SEQ ID NO: 18596 - protein, 351 aa, Geobacter metallireducens GS-15
MITRLPAEWEEQDGVLLAWPHAESDWLPWLPMVELVFAQIVKEIAHFEAVLLVAAEGERTSAILSAAGASMERVRIVEIPTNDTWARDFGPLTVERDGNPVLLDFGFNGWGLKFAADRDNLITGRLHRTGAFGNAALETVGLILEGGSIESDGNGTILTTAECLLNPNRNPHLSQEQIEISLKEQFGADRILWLENGWLAGDDTDSHIDTLARLAPDDTIVYVRCDDAADEHYPALFLMEKELKAMRTSEGSPYRLIPLPWPRPCHDEDGERLPATYANYLVINGAVLVPTYGDPGDDAALAAIGQAFPGREIIGIDCRPLILQHGSLHCVTMQLPKGTLAPEPRNVTREV

SEQ ID NO: 18597 - protein, 659 aa, Skeletonema costatum
MASYESDLLSTWDEDPSLQKGFDWEIEKLRRYFAGLRQTPDGRWVRKSTLFEFLVTNSPSKVVGVGPDGERYESPPKPVNIFDVGVLVGKNTLTWLGFGPNLGMAAVPDAVIQKYEGSFFTFIKGALGGDLQTLAGGPLFLLLAKYYTDHGPIFNLSFGPKSFLVISDPVMARHILRDSSPEQYCKGMLAEILEPIMGDGLIPADPKIWKVRRRAVVPGFHKKWLNSMIGLFGDCGDRLVDDLEKRSTSDKPVIDMEERFCSVTLDIIGKAVFNYDFGSVTKESPIVKAVYRVLREAEHRSSSFIPYWNLPYAEKWMVGQVEFRKDMGMLDDILAKLINRAVETRQEATVEELEERETSDDPSLLRFLVDMRGEDLTSKVLRDDLMTMLIAGHETTAAMLTWTMFGLVSNDPGMMKEIQAEVRTVMGNKSRPDYDDVVAMKKLRYALIEALRLYPEPPVLIRRARQEDTLPPGGTGLSGGVKVLRGTDIFISTWNLHRAPEYWENADKYDPTRWERPFKNPGVKGWNGYDPEKQSSQSLYPNEITSDYAFLPFGAGKRKCIGDQFAMLEASVTLSMIMNKFDFTLVGTPEDVGMKTGATIHTMNGLNMMVSPRSETNPIPGTNEWWTKQHLMRGLSSTGRPYTSDEDAAWTTSANGMRP

SEQ ID NO: 18598 - protein, 191 aa, Zea mays
MGFSEAQEELVLRSWKAMKSDSESTALKFFLRIFEIAPGAKQMFSFLRDAGDAPLEKHPKLKAHAVTVFVMACESATQLRSTGDVKVREATLKRLGATHARAGVADAHFEVVKTALLDTIRDAVPDMWTPEMKAAWEEAYDQLAAVIKEEMKNAAAAEEQTKNAATAEEEIKNAAAAEEETTNAAAAVDAS

SEQ ID NO: 18599 - protein, 656 aa, Burkholderia pseudomallei K96243
MCGITGFVGPVACAPQTARATLARMTDSLAHRGPDDTGLWIDHDAGVALGHRRLSIVDLSEHGHQPMLSACGRYAMTFNGEIYNFRALRSELEREHRAPEWRGHSDSEVLLAAFCAWGVDRALQKAVGMFALALWNRESRVLTLARDRIGEKPLYYGRIGGSFVFGSELKALRRFPGFDAHPIDRDALCLYLRHASVPAPYTIYEGIRKLPPGTYAQFEDLAEAPAPRRYWSLERAIAAGRANPFDGDANAAVAQLDHVLRDAIAEQSVADVPLGAFLSGGVDSSVIVALMQTQTAQPVQTFTIGFHEAGYDEAGYAKAVARHLGTSHTELYVKPADVLATVPRMPCVYDEPFADSSQIPTLLVSELTRRHVKVSLSGDGGDELFGGYTRYFLTPRLWGRLRRVPAAVRMRIAAALHALRPDHADQIASLVQGAWSASAQRDASPRVGDRLHKLANVMTADSRASLYRLLMSSVHHPERFTLAGHEPQTLIDTPGAWPPGLSFAEQAMAVDTLTYLPTDILTKVDRAAMAVSLETRMPFLDYRVVEFAWRLPEALRIPDGQDKWLLRKLLYRYVPRPLIDRPKQGFCAPVGAWLRGELSDWAAELLRPARLRDEGYLDAARVERLWRQHQSGRMNWQHPLWTVLMFQAWLERQRAE

SEQ ID NO: 18600 - protein, 609 aa, GIBBERELLA ZEAE PH-1
MSALTKIREGLAREDNTHVAGTLAPHEKEIHETPEVVSEVGPDHDKEATAGAINPDDKGNDSDVPSEDVQNGVKEIQAITLTWGKGSLAALLCLIWTLFLISGFRGSFYLVLVPYVTSEWSAHSLMTTIPIVSDAMTAACYIPMAKALDVWGRAEGFLLMSGFATLGLILMAVSQNLATFCAAQVFYSVGWGGMIYAVGVLAADASNLRNRGLAFAFTSSPYMITAFAGSKAAAAFVIDVKNWRWGFGWIALVLPCVTIPLFLVLKVNLRKAFKNGTVTKTTRNRGFFGSIWWAFNEFDVIGIFLFGGGLVVFLLPFNLAGHAPNGWSTGYIIAMIIVGFCTLIFFGVWEYWLAPVPFLQGRFLLDRSVVAACMIDLTYQVSYYTWNYFFTSFLQVVVNLGPAEAGYVNSTFQVVSGVLLFIVGFLIRKTGFYKWTFYFAVPIYIFALGLMIHFRAPNQYVGYIIMCEIFISIGGAVFILVMQLAVLAAVAHQYVAAALATLYVAGGVGGAVGGAISGAIWTNSFIPQLIKRLPESEVANATLIAGSIVNQLAYPVDSPARLAIQESYGFAQIRMLAAGVGIASLFFIWVPMLRNIDVKKLKQTKGLVL

SEQ ID NO: 18601 - protein, 599 aa, Prosthecochloris aestuarii DSM 271
MKSSVSVRLGLVFGIVIFFTVAISYVYLGGQLRTLFYDGIKNEIYKELELNRQLLDVFPEKWSDINSSDSWADDVGAALEVRVTLIALDGSVIGDSYISPDRLSFVENHLARPEVQGALQEGFGESTRFSETVGEDMLYAAVLLGKESPYAVLRFAKPLHDIRLLEAELRKGIEGALFWSLLLSLMFGALTAFLLSTPLRRIAAAAENFVHGDFTFRLDGKRNDEIGQLSRAFNFMSDEMKRMGQQEEWFKAVFSSIREAIIVTDPRGSIILANPAACKLFKLQCGDMLRSRPGRKVTNAQLLDLFERVRLSSKPIVKEEMLVMTERGERVLQTSAMPVIKDSYSDGTVFVLNDITRLRNLERIRRDFVSSVSHELRTPLTSIKGYTETLLEGALDDREDAMNFLRIILQESEQLTALINDVLDLSKIESGRIEYKFTPVSIEDVVLKTVALFRRSLEKKSIDLQIQIPGDLPPVFADKDYLEIVVRNLLDNAIKYVADDSGRIRIIAFPANDMVRLEVEDNGAGIPQKDLGRIFERFYRVDKARSRQIGGTGLGLSIVKHIVLSHKGNVEVRSRQNLGSVFSITIPVASPQQQELSSS

SEQ ID NO: 18602 - protein, 240 aa, Triticum aestivum
  misc_feature (162)..(162): Xaa can be any naturally occurring amino acid
  unsure (1)..(240): unsure at all Xaa locations
MERRGGAAAPSLELPGFRFHPTEEELLEFYLKHHVTSNSNKNQQQHLRAAPFDIIPTVHLYRHDPWDLPGLAAIASEREWYFLVPRDGARKHAASGGAGGGRPSRTTERGFWKATGSDRAVRCAADPKRLVGLKKTLVYYQGRAPRGTKTDWVMNEYRLPDXAGAGAGEQQDVVLCKVYRKPVSLKELEQRGPLEDLRRARFFLTHKDFQFHFNSQLEGWFARRLVRVRAPPRRPPLTRP

SEQ ID NO: 18603 - protein, 456 aa, Securigera parviflora
MCGILAVLGCSDDSQAKRVRVLELSRRLKHRGPDWSGLHQHGDCFLAHQRLAIVDPASGDQPLFNEDQSIIVTVNGEIYNHEELRKQMPNHKFRTGSDCDVIAHLYEEHGENFVDMLDGIFSFGLLDTRDNSFIVARDAIGVTSLYIGWGLDGSVWIASELKGLNDDCEHFETFPPGHLYSSKEREFRRWYNPPWFSESIPSAPYDPLALRQAFEKAVVKRLMTDVPFGVLLSGGLDSSLVASITARHLADTKAAKQWGAKLHSFCVGLEGSPDLKAGKEVADYLGTVHHEFQYTVQDGIDALEDVIYHIETYDVTTIRASTPMFLMSRKIKSLGVKWVISGEGSDEIFGGYLYFHKAPNKEELHKETCRKIKALHKYDCLRANKSTFAWGLEARVPFLDKEFINVAMNIDPENKMIKLDEGRIEKWILRKAFDDEENPYLPKHILYRQKEQFSDG

SEQ ID NO: 18604 - protein, 162 aa, Parasponia andersonii
MSSSEVNKVFTEEQEALVVKAWAVMKKNSAELGLQFFLKIFEIAPSAKNLFSYLKDSPVPLEQNPKLKPHATTVFVMTCESAVQLRKAGKVTVKESDLKRIGAIHFKTGVVNEHFEVTRFALLETIKEAVPEMWSPEMKNAWGVAYDQLVAAIKFEMKPSST

SEQ ID NO: 18605 - protein, 176 aa, Halobacterium sp. NRC-1
MSEKPASMYRKIDKPSYTRRDYVTGIPGSKIAQHKMGDLQADADDYPVQISLVPQEECQLRHGSLEAARLSANRHLIKELGEGNYKMQLRKFPHQIIRENKQATGAGADRVSDGMRQAFGVPVGTAARIQPGDQLFTAYCEVEQAAAVKEAFRRAYNKITPPCKINVERGETLLVR

SEQ ID NO: 18606 - protein, 156 aa, Arabidopsis thaliana
MDLEFGRFPIFSILEDMLEAPEEQTEKTRNNPSRAYMRDAKAMAATPADVIEHPDAYVFAVDMPGIKGDEIQVQIENENVLVVSGKRQRDNKENEGVKFVRMERRMGKFMRKFQLPDNADLEKISAACNDGVLKVTIPKLPPPEPKKPKTIQVQVA

SEQ ID NO: 18607 - protein, 588 aa, Enterococcus faecalis V583
MNTAAIYHRPESEFAYLYTEETMHIRLRTAKGDIASVQLVQGDPYLLGKEKWYQQSLTMEKLVSTELYDYWFIALSAKFKRLSYAFTLVGADGLRAFYGEHGIYPLEEKYLEMANNYFRMPYFHEIDRFKAPEWVKETVWYQIFPERFANGDLANDPEGTLPWGSKRPDRQDFFGGDLQGVLDHLDYIEDLGVNGLYFCPIFEAFSNHKYDTIDYLKIDPAFGDGATFKRLVEECHRRGIKIMLDAVFNHMGDTSPQWQDVLKNGQDSIYADWFHVNEFPASYEESADFEEASNITYDTFAFTPHMPKLNTANPEVQAYLLEIARYWIEEYDIDAWRLDVANEVDHAFWKKFRQTCDDAKEDFYILGEIWHSSQSWLQGDEFHAVMNYAYTDAIMGYFVKQELSLEKMLSEMNNQLMLYRQQTNQMQFNVLDSHDTPRLLHETKEDKELMRQVLAFTYIQPGVPCLYYGDEIGMTGDMDPDCRRCMVWEENQQDLDLKEFVKSLIALRKKYAAVFSGGTIDWTGTSFETGLIRLACRLEEQTIYGIFNTGQETQFVDRTDREVLLSSSIEIASEQIMVLPKGFLLYQA

SEQ ID NO: 18608 - protein, 541 aa, Enterococcus faecalis V583
MEKHWWQEVVVYQIYPRSFKDSNGDGIGDLPGIIEKLDYLETLGIGAIWLSPVYQSPNDDNGYDISDYEAIMTEFGTMADMDRLIEEAKKRKIEIIMDLVVNHTSDEHRWFIEAKKSKENPYRDYYVWADPASDGGAPNRLKSAFSGSAWTFDEASGQYYLHLFSKKQPDLNWGNQQMRQSVYEMMNFWIDKGIGGFRLDVIDLVGKIPGEEITANGPHLHRYLQEMNAATFGGKELLTVGETWGATPEIAKMYSSPERHELSMIFQFEHMSLDQQPGKEKWDLQPMEVAKLKQVFAKWQTELGNDGWNSLFWNNHDLPRMISRWGNDQEYWLESSKLFAILLHMMKGTPYIYQGEEIGMTNTPITDIREARDIETINMYHEYLEKGYSKEEILLKINTKGRDNARRPMQWTAEKNAGFTTGTPWIDVNPNYQTINVAAALADKNSLFYTYQEMIRLRKEHPLIVWGNFELLETVEEVISFYRTYGEERWLVVTNFSDKVQPFSADVSVEQVMIENMPTDVTALADYSLAPWQAFVVKVSQ

SEQ ID NO: 18609 - protein, 537 aa, Enterococcus faecalis V583
MDQWWKNAVGYQIYPRSFKDSNGDGIGDLQGIIEKLPYLKELGVDFLWLNPIYTSPNVDNGYDIADYQGIQPEFGTMEDFQELLDQAHQLGLKIILDLVVNHTSDQHPWFVEAKKSLDNPYREYYLWADATPDRMPNEWQSFFGGSTWTYDEGTKQAYFHVFAKEQPDLNWKNPKVREEIYAMIRWWLDLGIDGFRLDAISHIQKEPWDFKITTNPWAPFMNVKGIEDYMLDLKVIFAEYDIMTVGEASGVSSKKAVEWTNDAGYLNMIFELEHNVREGKPGEERLNILGYKKVMARWQKHLGTEGWNALYVENHDNPRINSILGNETSHSAKAIGTIALLLRGTPFIYQGQEIGMVNYPFQQIDELDAKDSHNHYRLLIESGYDAKQALKEVAHWTRDHSRTPMQWTSQEASSFTSGHPWLAIHPNFKEINVADQETDAQSVLNYYKKLIALRKDNPVFTDGQFELLAPNHPSVFAFLRKTTEATALVIVNLSGEKCQFDLPNKLLGRKWQQLLGNQDFTVKKRMQLAPYQAGVFQ

SEQ ID NO: 18610 - protein, 461 aa, Thermosynechococcus elongatus BP-1
MTYDYDLFVIGAGSGGLAASKRAASYGARVAIAEGDKVGGTCVIRGCVPKKLMVYGSKFSHLFEDAVGYGWHPVKAKLNWERLIRAVDQEVNRLSQLHISYLEKAGVELLPFFARFADPHTLELVDRQGQVQGRVTAAKILIAVGGEAIKPNVPGIEHSITSREMFLLPKQPKRLAILGGGYISVEFAGIMQGLGTEVIHFLRGDRPLRGFDQDIQDGVYGGMIRHGIDVRPQCHITGLKLTKKGNIRIRYEQQGQTRETKVDTVLCAVGRAPNLQGLGLDRAGVHLRTNRQGIVAIAVDEYYRTNQEHIFAVGDCTNRVNLTPVAIAEGRAFADTQFGNLPRTLSYENIPSAVFSQPEAASVGLSEAQAKAKLGEENVKIYRAAFRPMYHSLTGRPEQVIVKLVVENNTERVLGAHMVGDNAAEVIQGIAIALKMGATKKDFDATLGIHPSTAEEFVTLR

SEQ ID NO: 18611 - protein, 449 aa, Streptococcus agalactiae NEM316
MSKQYDYIVIGGGSAGSGTANRAAMYGAKVLLIEGGQVGGTCVNLGCVPKKIMWYGAQVSETLHKYSSGYGFEVNNLNFDFTTLKANRDAYVQRSRQSYAANFERNGVEKIDGFARFIDNHTIEVNGQQYKAPHITIATGGHPLYPDIIGSELGETSDDFFGWETLPDSILIVGAGYIAAELAGVVNELGVETHLAFRKDHILRGFDDMVTSEVMAEMEKSGISLHANHVPKSLKRDEGGKLIFEAENGKTLVVDRVIWAIGRGPNVDMGLENTDIVLNDKGYIKTDEFENTSVDGVYAIGDVNGKIALTPVAIAAGRRLSERLFNHKDNEKLDYHNVPSVIFTHPVIGTVGLSEAAAIEQFGEDNIKVYTSTFTSMYTAVTTNRQAVKMKLITLGKEEKVIGLHGVGYGIDEMIQGFSVAIKMGATKADFDDTVAIHPTGSEEFVTMR

SEQ ID NO: 18612 - protein, 229 aa, Bacillus cereus E33L
MADKILVVDDEPDILTFIEDSLVMEGYEVRSALNGEEALKQLDSSVDLIILDVMLPDMNGFKVCEKMRESYPCPILFLSADGSERSRIEGLLIGGDDYISKPFSLKELKARIIANLRRTTELQMMGQKNLLRYGDLVIDLQSYEILLGKEKIHFTKKEYEVVKMLALHAGQVLTKEQLFEKIWGYDSESDVSTVVEHIKKIRTKLSVYDREYTYIQTVWGIGYKWSVQN

SEQ ID NO: 18613 - protein, 426 aa, Caulobacter crescentus CB15
MRRVVVTGIGLLTPLGQGVDITWKNILAGKSGANRISAFDPTDYSCQVACEVPRVDGRGGGGPDVEGSFDPDQTMSPRDQKRVDDFILYGVAAADEAIKDSGWVPETDEDKWRTGVILGSGIGGLSTIADTALELEAKGPRRVSPFFISSALINLISGQVSIKYGFKGPNHAVVTACATGAHAIGDAARLIKYGDADVMVAGGAEAAVCKVGIAGFQACRAVATAFNDTPEKASRPYDKDRDGFVMGEGAGVLVLEEYEHAKARGAKIYAEVAGYGLSGDAYHITAPSEDGEGGARALAAAVRDAGLKPSDINYVNAHGTSTMADGIEAKAVERFLGDHAKNVVMSSTKSMTGHLLGAAGAIEAAFSILAIRDQIAPPTINLDNPDVEVAMNLAPHKAVPMKIDVAVSNSFGFGGTNASVVFKKVS

SEQ ID NO: 18614 - protein, 129 aa, Glycine max
  misc_feature (36)..(36): Xaa can be any naturally occurring amino acid
  misc_feature (68)..(68): Xaa can be any naturally occurring amino acid
  unsure (1)..(129): unsure at all Xaa locations
MALNNGVPATGSGLIVSFGEMLIDFDPTVSGVFLAXEASGSLKDPGGAPVNVGIVVSRLGGKAAFCGXLVYNKLGHMLAGILKENGVRADGIHSDQGARTVLVFVTLLAGGERVFMFYRNHSVYMLLKP

SEQ ID NO: 18615 - protein, 234 aa, Oryza sativa (japonica cultivar-group)
MLVIYQKSANHVPLKILSIEDGTPLKTFTQLLHRSRKVDFIEQFNEKLLVKQDKENLQIIDVRNSNLIEVNKTEFMTPSAFIFLYENNLFLTFCNRTVAAWNFRGELVTSFDDHELWHSNCNTNNIYITADQDLIISYCKASKEVRDSGGCEGIAPPTGSINMSNIFTGKCVAKISPLDPTLTIAPRKRGDSSRSTIRSTVSDALEDITALFYDEDRNEIYTGNSKGLVHVWSN

SEQ ID NO: 18616 - protein, 320 aa, Photobacterium profundum SS9
MGKLVKGVWHDVWYDTDTSDGKFVREDAGFRHWLTANGENGPDGQQGFKAESGRYHLYVSLACPWAHRTLIFRQLKGLAPHIDVTFVSADMLEKGWVFDEPEPLYGFNFMHQVYTQAKPDYSGRVTVPVLWDKQTQTIVSNESSEIIRMFNTAFNDLTGNHDDYYPQALHPVIEQWNDYIYPAINNGVYRCGFATTQEAYEDAFSELFSALDTVDTHLATNRYLAGEQLTEADWRLFTTLIRFDAVYVGHFKCNLKRIVDYPHIQGYMKELYQFSGIAETVDFYHIKRHYYFSHTMINPTGIVPMGPALDLITLHGRDTI

SEQ ID NO: 18617 - protein, 748 aa, Triticum aestivum
  misc_feature (660)..(660): Xaa can be any naturally occurring amino acid
  misc_feature (679)..(679): Xaa can be any naturally occurring amino acid
  unsure (1)..(748): unsure at all Xaa locations
MAAHSVAAAHATIAARAGAAPSSPAAAPAERLGFRLSSLAGRALRSPLPARRAAAAAAASSSRRSGTQRVRASAAVETVEAAATGELLDKSVNAIRFLAIDAVEKAVSGHPGLPMGCAPMGHILYDEVMRYNPKNPYWFNRDRFVLPAGHGCMLQYALLHLAGYDAVKEEDLKQFRQWGSSTPGRPENFETPGVEVTTGPLGQGIANAVGLALAEKHLAARFNKPDSEIVDHYTYCIVGDGCNMEGILTEACSLAGHWGLGKLIVFYDDNHISIDGDTEIAFTEDVSGRFEALGWHTLWVKNGNDGYDEIRKAIQEAKSVTDKPTMIKVTTTIGFGSPNKANSYAVHGAALGTSEVEATRANLGWPYEPFFVREDVKSHWSRHIPQGAALEADWDAKFAQYEQKYPEDAATLKSIITGELPAGWADALPQYTTESPADATRNLSQQCLNALAKVVPGLIGGSADLASSNMTLLKMFGDFQKDTPEERNVRFGVREHGMGAICNGIALHTPGLIPYCATFFVFTDYMRGAMRISALSEAGVIYVMTHDSIGLGGDGPTHQPIEHLVSFRAMPNMLMFRPADGKETAGAYKVAVLNRKRPSILALSRQKLPHLPGTSIEGVAKGGYTISDNSTDNKPDFIIMSTGSEVEIAVKAAEELTKEXGKTVRVVSFVCWELFDEQXDEYKESVLPEAVTARISIEAGSTLGWQKYVGSKGKTIGIDKFGASAPAPKIYKEYGITAESVIAAAKSL

SEQ ID NO: 18618 - protein, 358 aa, Medicago sativa subsp. X varia
MENGKVHVVKPQSEARLAILELAHIMSVPTSLVAVLKMKVPEAIWQGGKNTPLSASQILSIVRPNGGGDAENLQRILRLLTTYAIFAEDLSSNGKRKYSLTDIGKALVPDDDGLSYATYVLQHYQDQYLRAWPLVGDAVEDASVEPFEKLHGEGAYAYCMKRPDEMSLFYASMSGLSMPHMNEMLEKYDGFKGVETLVDVGGNSGVILNMIMNKYPNILKGINFDLPDMISSAPQLPGITHVGGDALESVPAGDAIFTKWTMLTWTDEECKKVLQNCYKALPVNGKLIVCEPVSPELTDESQRTRALLSGDIFIMTMYRTKGKHRTEEQFKQLGISTGFLRFRAFHIDPYFPVLEFQK

SEQ ID NO: 18619 - protein, 563 aa, Arabidopsis thaliana
MADLSLPPDSLFLGFDSSTQSMKATVLDSNLNIIKTELVHFDSDLPQYKTKDGVYRDTTVNGRIVSPTLMWVEAFDLILQKLSNANFDFAKVIAVSGSGQQHGSVYWSKGSSEVLRSLDSKRSLKEQLENAFSVKESPIWMDSSTTLQCKEIENAVGGAMELSKITGSRAYERFTGPQIRKLFMTQGEVYKSTERISLVSSFMASLLVGDYACIDETDAAGMNLMDIEKRCWSKAALEATATGLEEKLGKLAPAYATAGSISQYFVQRFGFEKNCVVVQWSGDNPNSLAGLTLSTPGDLAISLGTSDTARLLILVELAKELQPSLEGHVLPNPVDPESYMVMLVYKNASLTREEIRDRCAEGSWDVFNKYLQQTQPLNNGKLGFYYTENEILPPLPVGSHRYILENFSGESLEGVKEQEVGEFDPPSEVRALIEGQFLSKRAHTERFGMPSPPLRIIATGGASANENILSLISAIFGCDVYTVQRPDSASLGAALRAAHGWLCNKKGSFVPISNLYEGKLETTSLNCKLKVKAGDANIASTYGLLMKKRMEIENKLVEKLGHF

SEQ ID NO: 18620 - protein, 136 aa, Nicotiana tabacum
GGHGIVGAQVPLGVGLAFAQKYSKEEHVTFAMYGDGAANQGQLFEALNMAALWDLPAILVCENNHYGMGTAEWRAAKSPAYYKRGDYVPGLKVDGMDALAVKQACKFAKEHALKNGPIILEMDTYRYHGHSMSDPA

SEQ ID NO: 18621 - protein, 523 aa, Candida albicans SC5314
MSDPTHLISKRAAGRTSVHFTNAPSDKPPANFKPHEKPLALSYGMPNHGFFPIDSIDVNLVDYPFQKITTPSTTSSTAEEEPPSSSLNGSENGHQTKTPPSSIHTPQSTVHISRHTTDPKLIDLARGLQYAAVEGHAPLLQFARDFIIRTHKPNYDDWNVFITTGASDGLNKAADVFLDDGDVILVEEFTFSPFLRFSDNAGAKAVPVKINFDNDSDGIDLTQFVDLLENWEKHYPNLPKPKALYTIATGQNPTGFTQSLEFRKKIYDLAVKYDFAIIEDDPYGYLTLPKYEKPNIGGSGSGNNELKNDLEIDDYLKNHLTPSYLELDTTGRVLRVETFSKLFAPGLRLGFIVGHKEVIDAVKNYSDVVNRGASGLTQTIVNNVIQENFKGVDGWLEWILKMRLNYSYRKDLLLYSIFESQAYKKGYVDVIDPKAGMFVTFKINLPKDVDVLQKMKLLLWKLISYGILVVPGYNMTVDLEFSKDRSNFFRLCYALANNDEEILESGKRLTDAVYEFFSNGLEF

SEQ ID NO: 18622 - protein, 334 aa, Methanocaldococcus jannaschii
MVIEMVKIFYDKDVTFDAVKDKTIAVIGYGSQGRAQALNMKDSGLNVIVGLRPNGASWNKAIKDGHKVMTIEEAAEKADIIHILIPDEVQPAVYKKQIEPYLTEGKTISFSHGYNIHYGFIRPPENVNITMVAPKSPGAMVRKTYEEGFGVPGLVAVERDYTGDALQIALGMAKGIGLTKVGVIQTTFREETETDLFGEQVVLCGGVTELIKAAFETLVEAGYAPEMAYFETCHELKLIVDLIYQKGLQGMWENVSNTAEYGGLTRRARVINEESRKAMKEILKEIQDGRFAKEWSLEREAGFPHLNALRRLEKEHLIEKVGKELRKMCGLEKE

SEQ ID NO: 18623 - protein, 286 aa, Bacteroides thetaiotaomicron VPI-5482
MRQLKITKSITNRESASLDKYLQEIGREDLITVEEEVELAQRIRKGDRVALEKLTRANLRFVVSVAKQYQNQGLSLPDLINEGNLGLIKAAEKFDETRGFKFISYAVWWIRQSILQALAEQSRIVRLPLNQVGSLNKISKAFSKFEQENERRPSPEELADELEIPVDKISDTLKVSGRHISVDAPFVEGEDNSLLDVLVNDDSPMADRSLVNESLAREIDRALSTLTDREKEIIQMFFGIGQQEMTLEEIGDKFGLTRERVRQIKEKAIRRLRQSNRSKLLKSYLG

SEQ ID NO: 18624 - protein, 511 aa, Bacteroides thetaiotaomicron VPI-5482
MKQTTKNILGVGAIILLSSGVAGLTTYKLLQSNEAAKETSFNEMFKQNPNVKLAAFDAVNAQPVDLTQAAENSLHAVVHIRSTQESKTKTIQQAPDIFDFFFGDGRGQQRQVQTQPRVGFGSGVIISKDGYIVTNNHVIEGADEISVKLNDNREFKGRVIGTDPSTDLALVKIEGDDLPTIPVGDSDALKVGEWVLAVGNPFNLNSTVTAGIVSAKARSLGVYNGGIESFIQTDAAINQGNSGGALVNAKGELVGINSVLSSPTGAYAGYGFAIPTSIMTKVIADLKQYGTVQRALLGIRGGSIGSSLMDDRQPIDKSGTTLADKAKALGVVEGVWVSEIVEGGSAAGADIKVDDVIIGLDNKKVSNMADLQEALAKHRPGDKVKVKLMRDKKEKTVEVTLKNEQGTTKIVKDAGMDILGAAFKELPDDLKKQLNLGYGLQVTGVSSGKMSDAGVRKGFIILKANDQPMRKVSDLEEAMKAAVKSPNQVLFLTGVFPSGKRGYFAVDLTQE

SEQ ID NO: 18625 - protein, 578 aa, Arabidopsis thaliana
MCGILAVLGCVDNSQAKRSRIIELSRRLRHRGPDWSGLHCYEDCYLAHERLAIVDPTSGDQPLYNEDKTIAVTVNGEIYNHKDLRENLKSHQFRTGSDCEVIAHLYEEHGEEFVDMLDGMFAFVLLDTRDKSFIAARDAIGITPLYIGWGLDGSVWFASEMKALSDDCEQFMCFPPGHIYSSKQGGLRRWYNPPWFSEVVPSTPYDPLVVRNTFEKAVIKRLMTDVPLGVLLSGGLDSSLVASVALRHLEKSEAACQWGSKLHTFCIGLKGSPDLKAGREVADYLGTRHHELHFTVQDGIDAIEEVIYHVETYDVTTIRASTPMFLMSRKIKSLGVKMVLSGEGSDEIFGGYLYFHKAPNKKEFHEETCRKIKALHQYDCLRANKSTSAWGVEARVPFLDKEFINVAMSIDPEWKMIRPDLGRIEKWVLRNAFDDEKNPYLPKHILYRQKEQFSDGVGYSWIDGLKDHANKHVSDTMLMNASFVFPDNTPLTKEAYYYRTIFEKFFPKSAARATVPGGPSVACSTAKAVEWDAAWSQNLDPSGRAALGVHVSAYGEDKTEDSRPEKLQKLAEKTPAIV

SEQ ID NO: 18626 - protein, 185 aa, Arabidopsis thaliana
MSDLAKDAWRKYLIQLQAHPLRTKAITAGVLAGCSDAIAQKISGVKRIQFRRLLLLMLYGFAYGGPFGHFFHKLMDTIFKGKKGNSTVAKKVLLEQLTSSPWNNFLFMSYYGLVVEGRPWKLVKHKLGKDYPTIQLTAWKFWPIVGWVNYQYVPLQFRVLFSSFVASCWSIFLNLKARSPVIKNA

SEQ ID NO: 18627 - protein, 578 aa, Arabidopsis thaliana
MCGILAVLGCIDNSQAKRSRIIELSRRLRHRGPDWSGLHCYEDCYLAHERLAIIDPTSGDQPLYNEDKTVAVTVNGEIYNHKILREKLKSHQFRTGSDCEVIAHLYEEHGEEFIDMLDGMFAFVLLDTRDKSFIAARDAIGITPLYIGWGLDGSVWFASEMKALSDDCEQFMSFPPGHIYSSKQGGLRRWYNPPWYNEQVPSTPYDPLVLRNAFEKAVIKRLMTDVPFGVLLSGGLDSSLVAAVALRHLEKSEAARQWGSQLHTFCIGLQGSPDLKAGREVADYLGTRHHEFQFTVQDGIDAIEEVIYHIETYDVTTIRASTPMFLMSRKIKSLGVKMVLSGEGSDEILGGYLYFHKAPNKKEFHEETCRKIKALHQFDCLRANKSTSAWGVEARVPFLDKEFLNVAMSIDPEWKLIKPDLGRIEKWVLRNAFDDEERPYLPKHILYRQKEQFSDGVGYSWIDGLKDHANKHVSDTMLSNASFFFPDNTPLTKEAYYYRTIFEKFFPKSAARATVPGGPSIACSTAKAVEWDATWSKNLDPSGRAALGVHVAAYEEDKAAAAAKAGSDLVDPLPKNGT

SEQ ID NO: 18628 - protein, 1116 aa, Magnaporthe grisea 70-15
MSHNHNPRANNRRGSIREKLKMGTAKNPPKAVPEQDDDEDVKLVPIPQPSRAPFVGNLPDLDVKFPLDSMVNLANKYGSIFKLDLPGLEFVTVSDWDLVHEVCDDSRFKKSIKGDLEELRNAVHDGLFTSSGEDEENWGIAHRVLMTAFGPLSIRNMFDEMHEVASQLALKWARQGPHEPLDVSGDTTRLALDTVALCSMGFRFNSYYRQDLHPFIKAMNEVLDEAGRRANRFMPSVFYHSHNKKFRENIKLLRTTAREVLDARKTQKGPEKRRDLLTAMLDGVDPKTGKKMTDESIIDNLITFLVAGHETTAATLSFALYNLAKFPEVSRKAQKEVDDVVGKGAVKLEHVPKLKYISALIRETLRLNAPITAFGREAIGDQVLGGKYLLKDKTQIVCFLTKSQSDPVIWGPDADEFKPERMLDDSFDRMQKKHPHCWAPFGTGVRGCIGRPFAWQEMVLCLAVLLQNYNFVMYNPAYALRLAQSLTIRPKDLYLRAISREGLTPAQLEARLAGGYTNGVHAEAPAEAAAPGGPVDGSKGAGRMAIYYGSNSGTCEFMAQRLAADAGSHGYTASVDTLDAAKEAMPTGIPVVIITASYEGQPTQNACHFVNWIQNLEEGKLKGVKYAVWGGGHSDWADTYQKVPGQIDTTLHKLGATRILPIGTTNAKDRDMFSDFETWEDQTLWPAMRDQFGGSEAAEAAPSVEVTFSTPRASDLRQDVRESLVVDARSLSKPGGEAGAREKRHLEIRLPTGCSYAAGDYLAVLPHNPRESVARIMRRFNLAWDTYMTVGAARATTLPTGVSLPVSEVLSSYVEIGQTATRRNITDLGQFANDDDTKYEILKLSKDSFDDEVRAKSLSVIGILERFPSLLVPFETFLFMLPPMRVRQYSISSSPLVDKGKLTLTYSVLNAPAHSGMGRHVGVASSYLSSLMPGDKLQASVRPAAGGFRLPPDPIRTPMICIAAGTGLAPFRAFIQERAALLRTSAQTPPAAPALLFYGCRDPDQDDLYRDELDAWEAAGAVVVYRAFSRRADASGGCRYVQDRLWREREAVGELWRRDARVYICGAGRMAGGVKEVLVRIMQSEGERMGTPISVEEGMAWFDKHRNERFATDVFD

SEQ ID NO: 18629 - protein, 339 aa, Bradyrhizobium japonicum USDA 110
MLDFTSDIAGDAASSRTTAAAPVDDRALLDAYSNAVIDVTERVGPAVVRVETGPKVPNGRERAGLGSGIVISPDGLVLTNSHVVGASKEIRLRDVEGHVGDAQVLGADPDTDLALLRANGVRHLPYAALGNSKTLRRGQLVIAIGNPLGFESTVTAGVVSALGRSIRSVSGRTIEDVIQTDAALNPGNSGGPLVSSNAEVIGINTAIINGAQGICFAVASNTAQFVLAEIIRHGYVRRAYIGVAGQTAPVPRRHAVLAGVENKMGALLMQIEPDGPAAKAGLLPGDVVIRLDGVEINGVDDLIRVLDRDRIGRRLAMDVLRLGRLRAIDIDPIERKPAR

SEQ ID NO: 18630 - protein, 325 aa, Oryza sativa
LAPPPSPAATSTMAAAAAGGGGGGAPRALSQREQDIQMMLAADVHLGTKNCDFQMERYVYKRRSDGIFIINLGKTWEKLQLAARVIVAIENPQDIIVQSARPYGQRAVLKFAQYTGAHAIAGRHTPGTFTNQLQTSFSEPRLLILTDPRTDHQPIKESALGNIPTIAFCDTDSPMRYVDIGIPANNKGKQSIGCLFWLLARMVLQMRGTILPGHKWDVMVDLFFYRDPEEAKEQEEEEAAVGPEYAAVAEYGAAPTDNWGDQQWGGEVQPPALPAAPTGEWGAAPAPVAAEGWDAVAVPPAAAAAVAPPAAPGWEEGSAPAPTGW

SEQ ID NO: 18631 - protein, 380 aa, Saccharomyces cerevisiae
MEFVAERAQPVGQTIQQQNVNTYGQGVLQPHHDLQQRQQQQQQRQHQQLLTSQLPQKSLVSKGKYTLHDFQIMRTLGTGSFGRVHLVRSVHNGRYYAIKVLKKQQVVKMKQVEHTNDERRMLKLVEHPFLIRMWGTFQDARNIFMVMDYIEGGELFSLLRKSQRFPNPVAKFYAAEVILALEYLHAHNIIYRDLKPENILLDRNGHIKITDFGLRQRGTNVTWTLCGTPDYIAPEVITTKPYNKSVDWWSLGVLIYEMLVGYTPFYDTTPMKTYEKILQGKVVYPPYFHPDVVDLLSKLITADLTRRIGNLQSGSRDIKAHPWFSEVVWERLLAKDIETPYEPPITSGIGDTSLFDQYPEEQLDYGIQGDDPYAEYFQDF

SEQ ID NO: 18632 - protein, 351 aa, ASPERGILLUS NIDULANS FGSC A4
MSFNPNSVDLDTADPRDVICYMNAGENDYDGRLGARISAIFVIFVVSTAVTFFPMLAKRNPRLHIPHYVYLFARYFGAGVIVATAFIHLLDPAYDEIGPASCVGMTGHWADYSWCPAIVLASVMGIFLLDFGAERYVEIKYGVCREDPEQFMTSTANNEEAVSRQATSTGKKAGDTLEAQSIDSGYIERSFRQQIAAFLILEFGIIFHSVIIGLNLGTTGEEFPTLYPVLVFHQSFEGLGIGARMSAIPFRKGSWLPWALCLLYGLTTPIAIAIGLGVRTTYNAGSFTANVVSGIFDAISAGVLIYTGLVELLARDFLFDPHRTQDSKRLTFMVISLLWGAGIMALIGKWA

SEQ ID NO: 18633 - protein, 495 aa, Saccharomyces cerevisiae
MTTDNAKAQLTSSSGGNIIVVSNRLPVTITKNSSTGQYEYAMSSGGLVTALEGLKKTYTFKWFGWPGLEIPDDEMDQVRKDLLEKFNAVPIFLSDEIADLLYNWFSNSILWPLFHYHPGEINFDENAWLAYNEANQTFTNEIAKTMNHNDLIWVHDYHLMLVPEMLRVKIHEKQLQNVKVGWFLHTPFPSSEIYRILPVRQEILKGVLSCDLVGFHSYDYARHFLSSVQRVLNVNTLPNGVEYQGRFVNVGAFPIGIDVDKFTDGLKKESVQKRIQQLKETFKGCKILVGVDRLDYIKGVPQKLHAMEVFLNEHPEWRGKVVLVQVAVPSRGDVEEYQYLRSVVNELVGRINGQFGTVEFVPIHFMHKSIPFEELISLYAVSDVCLVSSTRDGMNLVSYEYIACQEEKKGSLILSEFTGAAQSLNGAIIVNPWNTDDLSDAINEALTLPDVKKEVNWEKLYKYISKYTSAFWGENFVHELYSTSSSSTSSSATKN

SEQ ID NO: 18634 - protein, 371 aa, Enterococcus faecalis V583
MAKAKKQKPIDFKELMAKVDADFPTFQILDQDGKIVNEDLVPDLSDEELVELMTRMVWSRVLDQRSTALNRQGRLGFFAPTAGQEASQLASQFAMEKEDYLLPGYRDVPQLVQHGLPLREAFLWSRGHVAGNYYAEDLNALPPQIIIGAQYIQAAGVALGLKKRGKENVVFTYTGDGGSSQGDFYEAINFAGAYQANGVFIIQNNGFAISTPREKQTAAKTLAQKAVAAGIPGIQVDGMDPLAVYAIAKEARDWSAAGNGPVLIETLTYRYGPHTLSGDDPTRYRSKEMDDEWVQKDPLTRFRKYLTDKGLWSEAKEEEIIEKTKEEIKVAIAEADKAPKQKVSDFLKNMFEVQPQTIKEQIAFYEAKESK

SEQ ID NO: 18635 - protein, 422 aa, Spinacia oleracea
MGSSDDVKSPKSEKTSPPATEHNGVHMYPDWAAMQAYYGPRVALPPYFNSAVAPGHPPPPYMWGPPQPMVPPYGAPYAAIYAPGGVYAHPAIPLASQAHGQEVAPPAVSEPLVATPLSMDTPAKSPKNADKGFIKKLKGFNGLAMSIGNGNTEKTEGDVENRLSQSAESEGSSNGSDGNYTEDADDNKRKRSREGTPISVEAEKTEIKAVLPPPADKVLGIPVTSANAVAGQVMGTVVSPGVATTLELRNPGVTVKGNSSPVSSPNGVVSSEAWLQTQRELKRERRKQSNRESARRSRLRKQAETEELARRVESLSAENMALKSEVNLLVENSQKLRLENAALTGKLKNLQSGQGDENGLANVDTKRNPSDSTENLLSRVNNSSSVGRNSDEGAEMFGKSAKSGAKFHQLLDNRRGDAVAAR

SEQ ID NO: 18636 - protein, 509 aa, Zea mays
MMIARRLLRPNAPAQASSLLKHVTGTASLQGYADSLLDATVRHFGSAPSAQPEENGFKGHGMLAPFTAGWQSNDLHPLIIERSEGSYVYDINGNKYLDSLAGLWCTALGGSEPRLVKAATEQLNKLPFYHSFWNRTTKPSLDLAQEILSMFTAREMGKVFFTNSGSEANDSQVKLVWYYNNALGRPNKKKFIARSKAYHGSTLVSASLTGLPALHQKFDLPAPFVLHTDCPHYWRYHLPGETEEDFATRLATNLENLILKEGPETIAAFIAEPVMGAGGVIPPPKTYFDKVQAVVKKYDILFIADEVITAFGRLGTMFGCDYYNIKPDLVSLAKALSNAYVPIGATLVSPEISDVIHSQSNKLGSFAHGFTYSGHPVACAVAIEALKLYRERDIPGHVKQIAPKFQDGIRALADSPIIGEIRGLGMIMGTEFTNNKSPTDLFPAEWGVGAIFGEECQKRGMLVRVAGDAIMMSPTLIMTPGEVDELVRIYGEALKATEERVAALQSKKN

SEQ ID NO: 18637 - protein, 302 aa, Zea mays; identical to SEQ ID NO: 1139

SEQ ID NO: 18638 - protein, 468 aa, Enterococcus faecalis V583
MVVGDFAIELDTVVIGAGPGGYVAAIRAAEMGQKVAIIEREYIGGVCLNVGCIPSKALIAAGHHYQEAQDSSTFGVTAKGVELDFAKTQDWKDNTVVKSLTGGVGMLLKKHKVEIIEGEAFFVDENTLRVIHPDSAQTYSFNNAIVATGSRPIEIPGFKFGGRVLDSTGGLNLKEVPKKFVIIGGGVIGAELGGAYANLGSEVTILEGSPSILPTYEKDMVKVVTDHFKKKNVTIVTSAMAKEAVDNGDSVTVKYEVNGKEESVEADYVMVTVGRRPNTDDLGLEQAGVEIGERGLIPVDNQGRTNVKNIFAIGDIVPGAALAHKASYEAKIAAEAISGKKVAVDYKAMPAVAFTDPELASVGMTVAEAKEAGIEAKGYKFPFAGNGRAISLDKTEGFMRLVTTVEDNVIIGAQIAGVGASDMISELALAIESGMNAEDIALTIHPHPSLGEITMDTAELALGLPIHI

SEQ ID NO: 18639 - protein, 412 aa, Medicago sativa subsp. X varia
MTELDPSKKVADRYLKREVLGEGTYGVVYKAIDTQTGQTVAIKKIRIGKQKEGVNFTALREIKLLKELKDPNIIELIDCFPHKGNLHLVFEFMETDLEAVIRDRNIFLAPGDIKSYLQMTLKGLAHCHKKWILHRDMKPNNLLIGPNGQLKLADFGLARIFGSPDRRFTHQVFARWYRAPELLFGTKQYGPGVDVWAAACIFAELLLRRPFLQGSSDIDQLGKIFAAFGTPSPSQWPDMVYLPDYVEYQFVPAPPLRSLFPMATDDALDLLSKMFTYDPKDRISVQQALEHRYFTCPPQPTDPVKLPRPAPKKEIKPSDLNPPEGPTVLSPPRKTRRVMPGRDGLEGNSLQGDRVDDNHGNLKQTGGDNTGKNEPAPMSLDFSVFGLKPPNRPTINSADRSHLKRKLDLEFQ

SEQ ID NO: 18640 - protein, 549 aa, Nicotiana benthamiana
MLPPRQQPRPGGLQTSLSLVSPDACGSPNPQERGSTSDQARDSPSESASSRETWPTSDALMLKKLEKEKENGYTEHSVVRNISNSDKMSLRDIARERVDVIAERMRNLPDEYLEKFKHELRVILEGLGGAQHREEFLFLQRLVNSRGDLTDGTLIITHRTQLEILVAIKTGIQAFLHPSVSLSQASLIDIFLYKRCRNIACGSMLPAEECSCEICAKKNGFCNLCMCVICYKFDFEVNSCRWIGCDLCSHWTHTDCAISNGQIGTGPSVKNGASSAETLFRCHACSRTSELLGWVKDVFQHCAPSWDAEAFVRELDYVRRIFQRSEDARGRKLFWKCEELIEKLKNGVADPMACKVILSFFQELDVDPSKSQDNDEGGRLIAPEEAFNKIADVVQEAIRKMEAVAEEKMRMVKKARLALDACDQELKDKAREVTSLKMERQRKKQQIDELESIVRLKQAEADMFDLKAGEARREAERLQRIALAKTEKSEEDYASRYLKQRLSEAEAEKQYLFEKIKLQESSRASQSSAGGNDPSQMMYSKIQDLIKNM

SEQ ID NO: 18641 - protein, 513 aa, Pisum sativum
  misc_feature (159)..(159): Xaa can be any naturally occurring amino acid
  misc_feature (195)..(195): Xaa can be any naturally occurring amino acid
  misc_feature (234)..(234): Xaa can be any naturally occurring amino acid
  misc_feature (237)..(237): Xaa can be any naturally occurring amino acid
  unsure (1)..(513): unsure at all Xaa locations
PTADAIAAKKMENGKAAIDFPDQSVIRRVSSADRISLQDIARERVDVICDRMHRLPDEFLDELKNGLRAILEGGNGSQHRDEFFILQKLVQSRSDLTAKTLIRAHRVQLEILVSINTGIQGFLHPSISLSQTSLIEIFLYKRCRNIACQNQLPADECSXDTCTNNNGFCNLCMCVICSKFDFEVNTCRWIGCDLXSHWTHTDCAIREQLICMGPSVKSGSGPSEMVFRCQACSXTSXLLGWVKDVFQHCAPSWDGDALIRELDFVSRIFHGSKDQRGMNLFWKCDDLKEKLKSRKMDSKAACRAILMVFQELDLDNSKSLENAESGRLIAPQEACNRIAEVVQEAIRKMEFVADEKMRMFKKARIAVEACDRELADKAREAGDLKVERQKKKSQIEELERIVRLKNAEADMFQLKANEAKREAERLQRIALAKSDKSEEEYTSNYLKQKLSEAEAEKQYLYEKIKLQESSRLSQSSGDPSSMLMYSKIHDLLYNGPPKADSQSNDCHPFRTNP

SEQ ID NO: 18642 - protein, 95 aa, Oxalis tuberosa
LYAGINISGTNGEVMPGQWEYQVGPSVGIEAGDHIWASRYILERITEQAGVVLTLDPKPIDGDWNGAGCHTNYSTKSMRDEGGFEVTKKAILNLS

SEQ ID NO: 18643 - protein, 495 aa, Arabidopsis thaliana
MVSETTKSSPLHFVLFPFMAQGHMIPMVDIARLLAQRGVIITIVTTPHNAARFKNVLNRAIESGLPINLVQVKFPYLEAGLQEGQENIDSLDTMERMIPFFKAVNFLEEPVQKLIEEMNPRPSCLISDFCLPYTSKIAKKFNIPKILFHGMGCFCLLCMHVLRKNREILDNLKSDKELFTVPDFPDRVEFTRTQVPVETYVPAGDWKDIFDGMVEANETSYGVIVNSFQELEPAYAKDYKEVRSGKAWTIGPVSLCNKVGADKAERGNKSDIDQDECLKWLDSKKHGSVLYVCLGSICNLPLSQLKELGLGLEESQRPFIWVIRGWEKYKELVEWFSESGFEDRIQDRGLLIKGWSPQMLILSHPSVGGFLTHCGWNSTLEGITAGLPLLTWPLFADQFCNEKLVVEVLKAGVRSGVEQPMKWGEEEKIGVLVDKEGVKKAVEELMGESDDAKERRRRAKELGDSAHKAVEEGGSSHSNISFLLQDIMELAEPNN

SEQ ID NO: 18644 - protein, 533 aa, Oryza sativa
MKGSRLAVKESCLPMTMPMPETFAQYSNPLRSTRAYGQLCRVPGRRRHACVDGWGQDRARTRGDDGQRRYAQCRGGWGDIWRWGGYITCGSPRETGMVNGAPSPPPPSPMVMSFGPLDSPWVKQPDTTVYPGQICAAAGGGGGMADQTAAAVVVGGGAAATMGEPSPPPPAPAAEAAGVGVGQQQRTVPTPFLTKTYQLVDDPAVDDVISWNDDGSTFVVWRPAEFARDLLPKYFKHNNFSSFVRQLNTYGFRKIVPDRWEFANDCFRRGERRLLCEIHRRKVTPPAPAATTAAVAAAIPMALPVTTTRDGSPVLSGEEQVISSSSSPEPPLVLPQAPSGSGSGGVASGDVGDENERLRRENAQLARELSQMRKLCNNILLLMSKYASTQQLDAANASSAAGNNNNNNCSGESAEGATPLPLPAVLDLMPSCPGAASAAAPVSDNEEGMMSAKLFGVSIGRKRMRHDGGGDDDHAATVKAEPMDGRPHGKDEQSAETQAWPIYRPRPVYQPIRACNGYEYDRAGSDQDGSNST

SEQ ID NO: 18645 - protein, 719 aa, Nocardia farcinica IFM 10152
MTGHTPDTPDNAADADHAAGGADRKQRQLDAHRVDREQGHLTTQQGVRVRHTDDALSAGARGPTLLDDFHAREKITHFDHERIPERVVHARGAGAYGYFQPYDDRLAEYTVAKFLTDPAERTPVFVRFSTVAGSRGSADTVRDVRGFATKFYTSQGNYDLVGNNFPVFFIQDGIKFPDFVHAVKPEPHNEIPQAASAHDTLWDFVSLQPETLHAIMWLMSDRALPRSYRMMQGFGVHTFRFLDAAGTPTFVKFHWTPKLGVHSLVWDECQQIAGRDPDYNRRDLWDCIEAGHYPEWELGVQLIPVEKEFDFDFDLLDATKLVPEEQVPVLPVGRMVLDRNPDNFFAETEQVAFHTANLVPGIDFTDDPLLQLRNFSYLDTQLIRLGGPNFAQIPINRPVADVRNHQQDGYGQHAIPRGQASYTVNSIGGGCPVVGGDGSYEHYPRQVDGRAQRRRAESFREYYRQPRMFWRSMSAPEAEHIVEAFAFELGKVQRVEIRERTLGQLVRIDPDLAVRVAGRLGLPAPPPDPEAGTDAFVSPALSQAHTAKDSIATRQVAVLAADGVDAAGVRALRSALTERGAIVEVIASHGGMVHADGGDGDTLPVDRTLMTVASVLYDGVVVAGGQTGVETLTRNGEAVHFVLEAFKHAKPVAAFGAGVSLLRIAGILDAARAHDADPATGVITTEARGDGLDEEFVTDLARALANHRTWQRATSAIPA

SEQ ID NO: 18646 - protein, 224 aa, Helianthus annuus
NDFFDYVLEELKQNDTMLTEATALDLMFALLFANFETTSQAITVAIKFLTHNPRALKELTEEHQKILRKRENPKLDLHGKNIVDEIYLQVINETLRLASIVPVLFRKAKKDIKFKGYTIPSGWAVMVCPPAVHLDPVNYKDPLDFNPWRWEDMDLKSASKTFMAFGGGQRFCVGADFAKLQIAIFLHCLVTKYQWQPIKGGDIVRTPGLQFPNGFHVRIFEKET

SEQ ID NO: 18647 - protein, 175 aa, Bdellovibrio bacteriovorus HD100
MKHWIFVMVFVFSAAISAKEKEYVKPSDAELKKTLTPMQYQCTQQSATEKPFDNAYWNNKREGIYVDIVSGEPLFSSTDKYDSGTGWPSFTKPIDDSSLVTKPDYEMSVERTELRSKKADSHLGHLFDDGPKDKGGKRYCINSAALKFIPVEEMQAKGYGQYLSLFPKYKKEKKK

SEQ ID NO: 18648 - protein, 591 aa, Vibrio vulnificus YJ016
MKKKNHSFMSINTDESTWRTFKRLWTFIRLYKSGLAVAVVALIINAVSDTYMVSLLKPLLDEGFGSAESDFLRTLPLLVFGLMFIRGISSFVSTYCLSWVSGNVVMQVRRMVFNHYMQMPVSYFDKEKSGSLLSRITYDSEQVSAATSQALVSIVREGTSIIGLLVLMFYNSWQLSLVLILVAPVVAWAIGFVSKRFRKISKNMQTTMGIVTSSAEQMLKGHKVVLSYGGQEVEKSRFDVVSNQMRQQSMKLITAQAAANPIIQMIASIAIVVVLYLASVDTIKDQLTPGTFTVVFSAMFGLMRPLKALTNVTSQFQRGMAAAQTLFALVDLEPEKNTGTYSVERAKGEVNVKDISFTYEGAEKPALSHVSFDIPRGKTVALVGRSGSGKSTIANLFTRFYDVDSGEIQLDGVDVRDYELKNLRTQFALVSQNVHLFNDTIANNIAYAAGDKYSREDIERAAELAHAMEFISKMENGLDTVVGENGASLSGGQRQRVAIARALLRDAPVLILDEATSALDTESERAIQSALDELQKNKTVLVIAHRLSTIEKADQILVIDDGAVVERGSHSELIEKDGAYAQLHRIQFGEG

SEQ ID NO: 18649 - protein, 216 aa, Triticum aestivum
SDRIPVPRTTLSQCVADDLDLPEQLLPDDKPWFGVAPNTSRSPNFFATPSIFPSDAKSTMVTVRERLTQALAYIEEMQRDKHVLLQVWVPTMSYGQLVLTTRGMPFTLNKSSERLVQFRDVSTRYQLSADVASKGSPVGLPGRVFIGKLPEWSPDVRYFTSYEYPMVAHAQYLDVHGTMGLPVFEKGNPSCLGVIELIMTRQKLNFTSEINNICSA

SEQ ID NO: 18650 - protein, 373 aa, Glycine max
HKASCPTAARVLLRRNARSRFLHFPNPTQPCTSRRRRRRRRAAVSGKMRPILMKGHERPLTFLKYNRDGDLLFSCAKDHTPTVWYADNGDRLGTYRGHNGAVWSCDVSRHSARLITGSADQTAKLWDVKTGKELFTFRFDAPARSVDLAIGDHLAVITTDSFMGNMPTAQVKRIAEDLQDQTEESALVISGITGKDNRAVWGPGNRTIITAGEDATIRIWDSETGKLLKESDKEVGHQKAISSLSKSLDWSHFLTGSLDKSAKLWDARTLTLIKTYVTERPVNAVDISPTLDHVVIGGGQDAMNVTMTDRRAGKFEAKFFHKILEEEIGGVKGHFGPINALAFNPDGRSFSSGGEDGYVRLHHFDPEYFNIKM

SEQ ID NO: 18651 - protein, 205 aa, Eucalyptus globulus subsp. globulus
MVRGKTQMKRIENDTSRQVTFSKRRNGLLKKAFELSVLCDAEVALIIFSPRGKLYEFSSSSLCKTIEKYQTRAKDMEAKTAEISMQPSKGNTLDMEKKIEHFEISRRRLLGEGLDSCSVEELQQTENQLERSLTKIRARKNHLIREHIERLKAEERKLLEEKRKLLQEIECGKGLTPVSSERPREEIRAESMDVETELFIGPPKR

SEQ ID NO: 18652 - protein, 152 aa, Asparagus officinalis
KKPAEKKPAAEKPDEEPKAEKKAEKAPAGKKPKAEKRLPSKEGGGDKSGVGKAKKKKKAKSVETYKIYIFKVLKQVHPDIGISSKAMGIMNSFINDIFEKLAQEASRLARYNKKPTITSREIQTSVRLVLPGELAKHAVSEGTKAVTKFTSS

SEQ ID NO: 18653 - protein, 398 aa, Triticum aestivum
  misc_feature (217)..(217): Xaa can be any naturally occurring amino acid
  misc_feature (274)..(274): Xaa can be any naturally occurring amino acid
  misc_feature (284)..(284): Xaa can be any naturally occurring amino acid
  misc_feature (317)..(317): Xaa can be any naturally occurring amino acid
  unsure (1)..(398): unsure at all Xaa locations
LAWSRPRYTIDNVKAKIQDKEGIPPDQQRLIFAGKQLEDGRTLADYNIQKESTLHLVLRLRGGMQIFVKTLTGKTITLEVESSDTIDNVKAKIQDKEGIPPDQQRLIFAGKQLEDGRTLADYNIQKESTLHLVLRLRGGMQIFVKTLTGKTITLEVESSDTIDNVKAKIQDKEGIPPDQQRLIFAGKQLEDGRTLADYNIQKESTLHLVLRLRGGQXAPGHGAAFVSGFTSLVFGVLKESGLCLSLPELSLFLYRTMMQCYRLYLQTSAGVQQXLMNLILSEPXIQSIKKKAMPDRARLQVDHIGELPARWMHSRLXLLASIDSVASCIDSKTITLEVESSDTIDNVKAKIQDKEGIPPDQQRLIFAGKQLEDGRTLADYNIQKESTLHLVLRLRGGQ

SEQ ID NO: 18654 - protein, 395 aa, Streptomyces coelicolor A3(2)
MIPNQWYPIVEAQEVGNDKPLGVRRMGQDLVLWRDIDGNLVCQGARCPHKGANLGDGRMKGNTIECPYHGFRYGADGACRVIPAMGSEARIPGSLRVPTYPVREQFGLVWMWWGDERPTADLPPVAAPAEVTDNRKLYATKRWTRPVHYTRYIESLLEFYHVTYVHRDHWFNYIDYLLLYGTPSKFGLDGRERYLAATRITNHRVETEAEGQTIRYSFDHCQEDDPTNTTHYVITFTFPCMVHVQTEQFETTSWLVPIDDQNTEHILRWYEYEQVKPVLRFEPLRRLLPWASLYMEKWVQDPQDVRIMEHQEPKISAGGVNKFIPVDEMNAKYISMRAKLIADASAAPSSPARAAEPEPEAAGRGGSAARATGNGRGAAGGRRGTKPKEDAAARP

SEQ ID NO: 18655 - protein, 642 aa, Halobacterium sp. NRC-1
MSTAPDNEGDDDPFEEQRADVDNAMVQLFDEYGRDHSFQAVVAVLASVFARVLDLAPPVLLGLAIDSVIQGNKAFLPFLPQSVVPSSKPDRLLFMGGLIAGSFLLGAAFHWIRNWGFNSFSQHIQHRVRTDTYDKMQRLNMDFFATKQTGEMMSILSNDVNRLERFLNDGLNSAFRLSVMVLAIGVYLFVVNWQLAVLTMLPVPIIALFTYRFVNAIQPKYADVRSSVGHLNSRLENNLGGIQVIKTSNTERYESDRVDDVSQGYFDANWGAITIRIKFFPALRIISGVGFVLTFVIGGIWVATGPPMFFSGTLDPGEFVTFILLSQQFIWPMAQFGQIINMYQRARASSERIFGLMNEPSRIEENPDADELVVDDGGVVYDDVRFGYDDDDAIVEHIDFQVDGGDTLALVGPTGAGKSTVLKLLLRMYDVDAGAVRVDGQDISGVTLPSLRRHVGYVSQDTFLFYGTVEENITYGTFDADREAVVDAAKAAEAHEFIQNLPDGYDTEVGERGVKLSGGQRQRIDIARAILKDPEILVLDEATSDVDTETEMLIQRSLDRLTEDRTTFSIAHRLSTIKDADQIVVLEDGEIVERGTHADLLGDEGLYANLWGVQAGEIDELPDEFIERAAKRQATVDDQDDD

SEQ ID NO: 18656 - protein, 380 aa, GIBBERELLA ZEAE PH-1
MPTTELISYDEAQNSAFDNVLHGKSKESRGGMRAMMNKDNKAHAAAVDEYFQFFDNKKAEDEVEAVRQERTDNYASLTRQYYNLATDLYEYGWSQSFHFCRFAYGESFDRAIARHEHYLAHNIGIKPGMKVLDVGCGVGGPAREIVKFTGAHVTGLNINEYQVGRAGIYAEKEGLSDKLKFVQGDFMKMPFPDNSFDAVYAIEATVHAPSLEGVYSEIRRVLKPGGIFGVYEWLMTDIYDNDDLEQRRIRLDIELGDGIAQMFKIDHGLSAIKAAGFELLHHEDLAATDDGTAPWYWPLDSDMRYAQNLSDLLTVFRMNKWGRLVMHNLIGVLEACSIAPKGTRKTADGLAKGADALVEGGKRKLFTPMYLMVGKKPEKI

SEQ ID NO: 18657 - protein, 1015 aa, Bacteroides fragilis NCTC 9343
MDIKDYILIINTYTESFPWSNRLISTATNFVKDDPKLAVYTEHMNMIMIDNDSILDQFKDSLFDRYGSHRPRMLLLLGNSSLILKDDLRKMWGDIPMVLCAGKDYTGPEHYYLTKQPIPLSERVPLAELSQSCNLTYLYANLYIHENVEMMFRTLPRMKRFIYVGDERFVNQVNSQEIQEILRTKHPDVHYTFLSSRDIKKTNQLIDSLNFVDPRTTGILFSSWFHKRQFAGNMMLTMILPEIVSTVSPPIFALNMIELNDKESGMVGGYTYDQNHFNEKLSNMFSEILSGKSPRDLPHYLPTDGTPLINYQVLVRKGLSPDEWPAHTRFLNKPITFWDKYKYFLPGTTVCIALLVWFFLYRIRTLTHLRQIQLKEIEAMANYKNLIDNMPLLYMQEKLIVNEQGVADDLIYLNVNPHFEKHFFRREDVVGKRASELFPESLPEFLHFIQISLKENRAITFPYYFKKIDRFYDIVLKGAHQENVIDIFCVDSTELHRAQQKLNATNHKLSMALEVADIIPWKWDLLSKTILCDINKPIELSAQGNNVSEEQLAVPDSQYFSKIYKEDRIRVEQAYKDLIEGRLEKVKEEYRVINIRNHTHKIEWVEAQAAVETRDENGIPVTLVGSSQVITGRKKMEMELTSAKDRAEESNRLKSAFLANMSHEIRTPLNAIVGFSGILASTEEEEEKQEYVSIIENNNALLLQLISDILDLSKIEAGTLEFQYSDIELNTELKKLESTLKLKLKSDDVQLEFVPGLPVCPVCTEKNRLSQLIINLVTNAIKFTSRGSIRFGYEHRGKELYFYVTDTGCGIPKDKQESIFGRFVKLNSFAQGTGLGLSICRTLVEHMGGHIGVDSEEGKGSTFWFSLPYKAASTSAGTMQKTEIQPISVEKDKLTILIAEDNESNYRLFESILGHDYHLIHAWDGREAVERFKRENPQIILMDINMPVMDGYEATQEIRKYSAKVPIIAVTAFAYASDEQRVMENGFDGYMPKPINARQLKAQITEIMQKRIILL

SEQ ID NO: 18658 - protein, 364 aa, Trametes versicolor
MFSKALLSIVALAASFTAAVPSANKRATCSGGQTTANDACCVWFDVLDDIQSNLFHGGECGENAHESLRLIFHDAIGISPALTAAGQFGGGGADGSIMAHTDVEIQYAANNGLDEIIEEQRPFALKHNVSFGDFIQFAGAVGVANCNGGPQIGFFAGRSNDSQPAPDKLVPLPSDSVTDILARVADAGFAPVELVWMLISHTVAAQDKVDDSIPGTPFDSTPSDFDAQFFVESMLNGTLTPGSALHDGEVQSPLPGEFRLQSDFLIGRDSRTSCEWQKMIADRANMLQKFEQTVLKLSLLGFSQSALTDCSDVIPIATGTVADPFLPAGKTMADIEAACAATPFPTLSAAPGPETTIPAVPLDS

SEQ ID NO: 18659 - protein, 236 aa, Gossypium hirsutum
MLGVFSSAIVSPPDELVAAGCRTPSPKITADALVKRFLETNSSGVSMHIGDHVQFAYSHHKESPLQPRSFAVKDEIFCLFEGALDNLGSLKQQYGLAKSANEVILVIEAYKALRDRAPYPPNHVVGHLIGSFAFIVFDKSTSTLFVASDQFGKVPLYWGITADGYVAFADNAELLKGACGKSLASFPQGCFYSTAVGGLRSYENPKNKITAVPAEEEEIWGAKFKVEGPAVVAATE

SEQ ID NO: 18660 - protein, 309 aa, Streptococcus pyogenes MGAS8232
MIYLAGGCFWGVEEYFSQVDGVLDAVSGYANGRGDTTNYQLIHQTGHAETVEVAYDTNRISLKELLLHFFRIIDPTSLNKQGNDRGSQYRTGIYYTDKADLAIIDEVFKEKAKDYKKKIVVEKAPLKHFIKAEDYHQDYLKKNPNGYCHIDINQATYPVIDESKYPKPSATEIKEKLSADEYRVTQKNETEKAFSNRYWDSFDAGIYVDVVTGEPLFSSKDKFESGCGWPSFSRPISPDVVRYKEDKSFNMTRTEVRSRSGNSHLGHVFTDGPKDQGGLRYCINSLSITFIPKADMEAKGYGYLLSSVE

SEQ ID NO: 18661 - protein, 589 aa, Zea mays
  misc_feature (559)..(559): Xaa can be any naturally occurring amino acid
  misc_feature (572)..(572): Xaa can be any naturally occurring amino acid
  unsure (1)..(589): unsure at all Xaa locations
MCGILAVLGCSDWSQAKRARILACSRRLKHRGPDWSGLYQHEGNFLAQQRLAVVSPLSGDQPLFNEDRTVVVVANGEIYNHKNVRKQFTGTHNFSTGSDCEVIMPLYEKYGENFVDMLDGVFAFVLYDTRDRTYVAARDAIGVNPLYIGWGSDGSVWIASEMKALNEDCVRFEIFPPGHLYSSAGGGFRRWYTPHWFQEQVPRTPYQPLVLREAFEKAVIKRLMTDVPFGVLLSGGLDSSLVASVTKRHLVETEAAEKFGTELHSFVVGLEGSPDLKAAREVADYLGTIHHEFHFTVQDGIDAIEEVIYHDETYDVTTIRASTPMFLMARKIKSLGVKMVLSGEGSDELLGGYLYFHFAPNKEEFHRETCRKVKALHQYDCLRANKATSAWGLEVRVPFLDKEFINVAMGMDPEWKMYDKNLGRIEKWVMRKAFDDDEHPYLPKHILYRQKEQFSDGVGYNWIDGLKSFTEQQVTDEMMNNAAQMFPYNTPVNKEAYYYRMIFERLFPQDSARETVPWGPSIACSTPAAIEWVEQWKASNDPSGRFISSHDSAATDHTXAVSRRWPTAAATXAANGTVNGKDVAVAIAV

SEQ ID NO: 18662 - protein, 92 aa, Oxalis tuberosa
GINISGTNGEVMPGQWEYQVGPSVGTEAGDHIWASRYILERITEQAGVVLTLDPKPIDGDWNGAGCHTNYSTKSMRDEGGFEVIKKAILNLS

SEQ ID NO: 18663 - protein, 274 aa, Brassica napus
  misc_feature (120)..(120): Xaa can be any naturally occurring amino acid
  misc_feature (153)..(153): Xaa can be any naturally occurring amino acid
  unsure (1)..(274): unsure at all Xaa locations
MIAAGAKSMLGLSIASPKGVSDSNSRSVGVLRACVSMEGSQTMSHNKNGSIPELKAVNGHTGQKQGPLSTVGNSTNIKWHECPVEKVDRQRLLDQKGCVIWVTGLSGSGKSTLACALNQXLYQKGKLCYILDGDNVRHGLNRDLSFKAEDRAXENIRRVGEGAKLFADAGIICIASLISPYRRDRDAWRTLLPEGDFVEVFMNVPLEVCEARDPKGLYKLARAGKIKGFTGIDDPYEPPLNCEISLGEEGTGTSPIEMAETVVAYLEHKGYLKA

SEQ ID NO: 18664 - protein, 140 aa, Brassica napus
MATEDVNEALAAAEVTAIESTEKQQPPHKLERKWSFWFDNQLKPKQGAAWGASLRKACTFDTVEDFWGLHETIFVPSRLTPNADIHMFKAGVEPKWEDPECANGGKWTYVVTNNRKQAFDKAWLETLMALVGEQFDEADE

SEQ ID NO: 18665 - protein, 161 aa, Pyrococcus furiosus DSM 3638
MNEVERTLVIIKPDAVVRGLIGEIISRFEKKGLKIVGMKMIWIDRELAEKHYEEHKGKPFFEALIDYITKAPVVVMVVEGRYAVEVVRKMAGATDPKDAAPGTIRGDYGLDIGDAIYNVIHASDSKESAEREISLYFKPEEIYEYCKAADWFYREKKQAKC

SEQ ID NO: 18666 - protein, 220 aa, Synechocystis sp. PCC 6803
MGKGITGFDPSLYSYLQSISADDSFYLAQLRRETAHLPGAPMQISPEQAQFLGLLISLTGAKQVLEIGVFRGYSALAMALQLPPDGQIIACDQDPNATAIAKKYWQKAGVAEKISLRLGPALATLEQLTQGKPLPEFDLIFIDADKRNYPRYYEIGLNLLRRGGLMVIDNVLWHGKVTEVDPQEAQTQVLQQFNRDLAQDERVRISVIPLGDGMTLALKK

SEQ ID NO: 18667 - protein, 95 aa, Oxalis tuberosa
  misc_feature (81)..(81): Xaa can be any naturally occurring amino acid
  misc_feature (89)..(89): Xaa can be any naturally occurring amino acid
  unsure (1)..(95): unsure at all Xaa locations
LYAGINISGTNGEVMPGQWEYQVGPSVGIEAGDHIWASRYILERITEQAGVVLTLDPKPIDGDWNGAGCHTNYSTKSMRDXGGFEVIKXAILNLS

SEQ ID NO: 18668 - protein, 390 aa, Bacillus cereus E33L
MREAVIVAGARTPIGKAKRGSLKTVRPDDLGALVVKETLKRANYEGPIDDLIFGCAMPEAEQGLNMARNIGGLAGLSYDVPAITINRYCSSGLQSIAYGAERIMLGHSEAVLSGGAESMSLVPMMGHVVRPNSRLVEAAPEYYMGMGHTAEQVAVKYGISREEQDAFAVRSHQRAAKALAAGNFADETVSVDVTLRTVGANNKLQEETITFAQDEGVRAETTLDILGKLRPAFNVRGSVTAGNSSQMSDGAASVLLMDREKAVSDGMRPLAKFRSFAVAGVPPEVMGIGPIAAIPKALKLAGLELSDIGLFELNEAFASQSIQVIRELGLDEEKVNVNGGAIALGHPLGCTGAKLTLSLIHEMKRRNEQFGIVTMCIGGGMGAAGVFELL

SEQ ID NO: 18669 - protein, 332 aa, Pyrococcus furiosus DSM 3638
MVRVVKVWYDNEVSMDILKDKTVAVIGYGSQGEAQAKNMRDSGVHVILGLRPEGNSWKRAQKDGFEVYTIEEATKRADIVHILIPDLVQPKVYKEKIAPYLREGQALGFSHGFNIHYKQIVPPEYVDVIMVAPKSPGRRVREVFLEGFGVPALIAVYQDYTGHAKELALAMAKAIGATRAGVIETTFKDETESDLIGEQLVLVGGLIELIKKGFEVLVELGYPPELAYFEACNEAKLIMDLIYERGFTGMLKAVSDTAKYGGLTVGPKVIDEHVKENMRKYAERVRSGEFAKEWISKADKADEVLKELMKEIEEHEIEKVGRFIRRMSGLEK

SEQ ID NO: 18670 - protein, 436 aa, Nocardia farcinica IFM 10152
MITAETNVFESLESNVRGYCRNWPTVFTTAKGAWLQDEDGKDYLDFFAGAGALNYGHNNPVLKQPLIDYIASDGITHGLDMSTAAKRKLLETLRDTVFAPRGLDYKVQFPGPTGANAVEAALKLARKVTGRETVLSFTNAFHGMTLGALSVTGNAAKRAGAGVPLVHAAHMPYDGYFDNTTADFQWMERVLDDTSSGFDRPAAVIVETVQGEGGINVARVEWLQHLAQLCAEREILLIVDDVQMGCGRTGPFFSFEVAGITPDIVTLSKSIGGYGLPLALVLFKPELDQWAPGEHNGTFRGNNPAFVTAQVALETFWSDGALEAATKAKGEKVATELATVAGHFPGLSTRGRGLVHGIAFEDPSQAGKVCQVAFERGLLVETSGSSDEVVKLLPPLTITDDELDQGLQILTGAIDTVCTGWGRLHHRAPAEGGERR

SEQ ID NO: 18671 - protein, 313 aa, Solibacter usitatus Ellin6076
MPDPRAFDAIVAGELYTDLILSGFDFWPRPGQEAFAKEYHREIGGGAVNTACALARLGSRAAVLGVVGHDGDWLLRQLENSAVDTSHISRDPAEPTAFTVAISTPEDRSFLTYPGANRSFPKAIAEAAAGKRLAQAAHVHLAFPPDLSTASDLLAAIRANGCTVSLDVGWHESWLQDERLREVLPLLDVFFPNEIEAHCITGEKDPETTLRWLSAAGLRCVALKLGARGAALLCDGEIWFDDPLPVTPIDTTGAGDCFNGGFLRSWLKGCSPETCLRSANICGALSTGSYGGVAGLPDSARLNELLRARECEK

SEQ ID NO: 18672 - protein, 405 aa, Pseudomonas aeruginosa
MRRVVITGLGIVSCLGNDKDTVSANLRAGRPGIRFNPSYAEMGLRSHVSGSVDLNLEELIDRKVFRFMGDAAAYAYLAMEQAIKDSGLTPEQISNPRTGLIAGSGGASTLNQMEAIDTLREKGVKRIGPYRVTRTMGSTVSACLATPFQIKGVNYSISSACATSAHCIGQAMEQIQLGKQDVVFAGGGEEEHWSQSCLFDAMGALSTQYNETAEKASRAYDAKRDGFVIAGGGGIVVVEGLEHALKRGAKIYAEIVGYGATSDGYDMVAPSGEGAIPCMQQALATVDAPIDYLNTHGTSTPVGDVGEIRGVREVFGDKAPAISSTKSLSGHSLGAAGVHEAIYCLLMMEGGFIAGSANIDELDPEVADLPILRETRENAKLDTVMSNSFGFGGTNATLVLKRWQG

SEQ ID NO: 18673 - protein, 112 aa, Harpophora maydis
STGGKAPRKQLASKAARKSAPSTGGVKKPHRYKPGTVALREIRRYQKSTELLIRKLPFQRLVREIAQDFKSDLRFQSSAIGALQESVESYLVSLFEDTNLCAIHAKRVTIQS

SEQ ID NO: 18674 - protein, 499 aa, Nicotiana tabacum
MANKVVCPKLLKNLGFHVRRLNSAPSPLSAVPPLSFTGDFNATTVTTPNLVDTVPQINTVPDKNNIINFDDVKELFYGVPTSKLIRSTLTLQMAAIDPMVDMGMWVMNSKLMEMPIFREVMLGFVKNTFYEHFCAGKDLTEVRRTVSKLSDGGLKAMLDYGVEHATNNESCEQSMKAFIQTIESTKSLPQSSTSFVVVKITAICTPRLLKRMSDLLRWEHKDPSFNLPWKQKTLPLFAESSPLYHTSKKPEPLTVEEERDLQLARERLTKICEKCLEHDVPLLIDAEDTTIQPGIDYMAYSAAIKYHKDDDPLIFGTIQAYLKDAKERMAIAKKAAEKMGVPMGFKLVRGAYMCSERELASRLGFQSPIHDSIEQTHACFNSCAEFMIEEIANGSGAVVLATHNIESGKLAATKAIDMGIKDSQKLQFAQLYGMAEGLTFGLRNAGFQVSKYLPFGPVDQIMHYLMRRAEENRGMLSTSAFDRQLMRKELSRRLKVATS

SEQ ID NO: 18675 - protein, 343 aa, Streptomyces sp. A21
MKRYICRPLADGERAPPENSSTSGGMTSARAGRCRSIHRIQGRVTMTAMSVRTTEAIGTAAQRRDEADAGSHEAVLPWIEDAGKVAPQDARAMSKLFFDRLRTLEEGTHDYQYARNTLIEMNLSLVRFAASRFRNRGGDDTEDIIQVGTIGLIKAIDRFDLSREVEFATFAVPYIVGEIKRFFRDTTWSVHVPRRLQELRVELAKAKEALSADLDRDPTVAELAARLDLSEEEIIEGLVAANGYSAGSLDTPSADSESGNEQRAYADLLGEDDPGMESVENLHALAPLLRQLDDRERAIVRMRFGQEMTQAQIGAELGVSQMHVSRLLSRIVRRLRTGMCVEA

SEQ ID NO: 18676 - protein, 112 aa, Cephalosporium gramineum
STGGKAPRKQLASKAARKSAPSTGGVKKPHRYKPGTVALREIRRYQKSTELLIRKLPFQRLVREIAQDFKSDLRFQSSAIGALQESVEAYLVSLFEDTNLCAIHAKRVTIQS

SEQ ID NO: 18677 - protein, 499 aa, Nicotiana tabacum
MANKVVCPKLLKNLGFHVRRLNSAPSPLSVVPPLSFTGDFNATTVTTPNLVDTVPQINTVPDKNNIINFDDVKELFYGVPTSKLIRSSLTLQMAAIEPMVDMGMWVMNSKLMEMPIFREVMLGFVKNTFYEHFCAGKDLTEVRRTVSKLSDGGLKAMLDYGVEHATHNESCEQSMKAFIQTIESTKSLPQSSTSFVVVKITAICTPRLLKRMSDLLRWEHKDPSFNLPWKQKTLPLFAESSPLYHTSKKPEPLTVEEERDLQLAHKRLTKICEKCLEHDVPLLIDAEDTTIQPGIDYMAYSAAIKYHKDDGPLIFGTIQAYLKDAKERMAIAKKAAEKMGVPMGFKLVRGAYMCSERELASRLGFQSPIHDSIEQTHACFNSCAEFMIEEIANGSGAVVLATHNIESGKLAATKAIDLGIKDSQKLQFAQLYGMAEGLSFGLRNAGFQVSKYLPFGPVDQIMHYLMRRAEENRGMLSTSAFDRQLMRKELSRRLKVATS

SEQ ID NO: 18678 - protein, 275 aa, Xylella fastidiosa Ann-1
MNRKMFGELISEAIAMFIIIALGESAAAMYILYDPSPYQNAYWGLCICWGLAVTIAIYVTASVSGTHANPAVTLALALYRGFPWKKVLPYWAAQVIGAFIGAMIVYQLYSPVIDYYNHIHQLTRDAGGAAGVFFTSTGMAITPIHALGDEIILTAFLIFGIFAITERFNEAAPTANSGALVIGLLVATIGACMGYLEGWAINPARDLGPRLFAFLAGWGESAFPGKDHYWWIPIIGPLIGGVMGATAFQCLIYPFLPARVQAKQQAAILLHRKHP

SEQ ID NO: 18679 - protein, 109 aa, Nalanthamala diospyri
STGGKAPRKQLASKAARKSAPSTGGVKKPHRYKPGTVALREIRRYQKSTELLIRKLPFQRLVREIAQDFKSDLRFQSSAIGALQESVESYLVSLFEDTNLCAIHAKRVT

SEQ ID NO: 18680 - protein, 602 aa, Zea mays
RKPSVSSVPDSVTREDPSTKYELLHELGKGSYGAVYKARDLRTQELVAVKIISLTEGEEGYEDIRGEIEMLQQCSHPNVVRYFGSYQGERVRWIIMEYCGGGSVADLIGITEEPLDESQIAYICREALKGLAYLHSIFKVHRDIKGGNILLTEQGEVKLGDFGVAAQLTRTMSKRNTFIGTPHWMAPEVIQESRYDGKVDVWALGVSAIEMAEGMPPRSTVHPMRVIFMISSEPAPMLEDKEKWSLLFHDFIAKCLTKDPRLRPAAIEMLKHKFIEKCNSGASKMLAKIKVAKKIRATLAVQNELSDPDNTTQDVPFRINEDYGETVPTSSQQHMKHGTYNDCQAGDFGTMIVHTEDGDEVTESPIFPRTEFIPGLGSINSFTHDPKRAELISSFWAENIGDSDANKDRDTDYGPDMQESKVISPLTGTVKKNIGAEGTIRCHDNQINLSPGLANTTTKLNNSPSRKAFSVQDKLWSIYAAGNTVPIPFLKAIDISPLALVSENESGNGLAGSSTNDALEAVRELFSGDGQAKKGRKGQNEVPLPPGVHHRLTTSPTLMNLAQALAYHKTCYEDMPLQDSQATQEQQTIQNLCDTLRTILRL

SEQ ID NO: 18681 - protein, 457 aa, Shigella flexneri 2a str. 301
MMEGQQHGEQLKRGLKNRHIQLIALGGAIGTGLFLGSASVIQSAGPGIILGYAIAGFIAFLIMRQLGEMVVEEPVAGSFSHFAYKYWGSFAGFASGWNYWVLYVLVAMAELTAVGKYIQFWYPEIPTWVSAAVFFVVINAINLTNVKVFGEMEFWFAIIKVIAVVAMIIFGGWLLFSGNGGPQASVSNLWDQGGFLPHGFTGLVMMMAIIMFSFGGLELVGITAAEADNPEQSIPKATNQVIYRILIFYIGSLAVLLSLMPWTRVTADTSPFVLIFHELGDTFVANALNIVVLTAALSVYNSCVYCNSRMLFGLAQQGNAPKALASVDKRGVPVNTILVSALVTALCVLINYLAPESAFGLLMALVVSALVINWAMISLAHMKFRRAKQEQGVVTRFPALLYPLGNWICLLFMAAVLVIMLMTPGMAISVYLIPVWLIVLGIGYLFKEKTAKAVKAH

SEQ ID NO: 18682 - protein, 332 aa, Frankia sp. EAN1pec
MTTEQAAEPALDVRRRLYELMTLMKAADDRLSKGIASGELQCVYWPSRGQEAIAAAVGVVLRLDDQLVTTYRGLHDLIGKGVPLVEIYGEMLGRQVGSGRGKGGTMHIAHPDSGLMMSTGIVGAGPPVAVGLAMAARRKGLDRVTVASFGDGATNTGSFHEAANMAALWDLPLVLVCQNNQYAEMTPTGHTMKIAQVADRAAGYGMPGVRVDGNDPLAVVAALEEAVERARAGAGPTLLECVTFRFRGHYFGDPMKYIPTEQMDAAIAADPLPRFRSRLLDDGICGARELDEIETAAVSAVDEALAAVLAAPAAALDELDRDVYADPRNCPA

SEQ ID NO: 18683 - protein, 445 aa, Bradyrhizobium japonicum USDA 110
MRRGDIGSCDRVDPSGKTLAGCDAGGDRGLGHGAFSSRAMWASDRTAARLLRPTLRQINTRLAGPPDPSISASMERAADMQTLLREIRNTPLLWMLVFVPIVLLAEAAAPHSHTLLFVLAVLAIVPLAALLSHATEAVAAKTGDAVGGLLNATLGNLTELIIAITALRAGQYMLVKASIAGAIVTNAVFMLGACLLLGGLRYHVQEYNRAGARLSSGLLLMATVALLAPSAVADLEHLPQGGGILNKLSVGISVLLIIAYALGLLFSLGTHKELFASADHGDDKEAHWPIGIAVGTLLVVTVLVALVSEIFVESVQKAAETFGMSPAFVGFIIVSLVGAAAEFAVAFGAARKDRLDMVVSIALGSASQIALFVAPALVLLSYVVGPTPMNLQFWPGAVTMVMIATVTSAFITASGRSAWFVGALMIFIYAVFALTLYVVPPAGEG

SEQ ID NO: 18684 - protein, 502 aa, Medicago sativa
MDGASGGSGGGEGSTTQIPAPTPMLNANAPPPFLSKTYDMVDDPSTDAIVSWSATNNSFVVWDPPEFARDLLPKFFKHNNFSSFVRQLNTYGFRKVDPDRWEFANEGFLRGQKQLLKSISRRKPAHGHTQQQAQQPHGQSSSVGACVEVGKFGLEEEVERLKRDKNVLMQELVRLRQQQQTTDGQLQTMVQRLQGMEQRQQQMMSFLAKAVQSPGFFAQFVQQQNDSNRRITEVNKKRRLKQDGIAETTEQATPPDGQIVKYQPMMNETAKAMLRKIMKWDTPRVESFNKNPDNYLIGDGTSPSSAMDSSSSTSWNSGVTLQEVPPSSVQSTQIPMSTGTQGHIPSAEKPEILSVPQAAASANVMKDGTHAASTIPTSQADVIMPDIPSVPEIVPKSILDIPEDNYMAPETDDGFMDPSSLGSLPIDLDCLSPGADIDDLLSNSIWDDLLQTPIPEDFEANIDEISRGNEVQPTENGWDNNTQPLDQLTEQMGLLSSDAKRI

SEQ ID NO: 18685 - protein, 377 aa, Glycine max
MMLRIKRVPTVVSNYQKDDAADSPRPVGGCGRNCLKACCLPDAKLPLYAFKKANGKDLALHACAGEPPLTFLDSLLLGEWEDRMQRGLFRYDVTACETKVIPGEYGFVAQLNEGRHLKKRPTEFRVDKVLQPFDENKFNFTKVGQEEVLFQFEASEDGQVQFFPNAPVDVDNSPSFVAINVSPIEYGHVLLIPRIFECLPQRIDRESFLLALHMAVEADNPYFRLGYNSLGAFATINHLHFQAYYLALPFPIEKAPTKKIASLNGGVKISELLKYPVRGLVFEGGDTLEDLSNVVSDACICLQNNNIPFNVLISDCGKQVYLLPQCYAEKQALGEVDAELLDTQVNPAVWEISGHMVLKRKKDYDEASEGNAWRLLA

SEQ ID NO: 18686 - protein, 338 aa, Halobacterium sp. NRC-1
MRFGFSEACLEHDPGVRHPESPDRLRAIKRGLQKRHGVTYEDAPDADLSDITAVHDPDYATEVRSFCERGGGSWDPDTAATESTWPAIRASAGLAMDAIDAALDGADGRDTPFSLGRPPGHHAITDDAMGFCFVNNAAVAAQHALDAHGLDRVAIFDWDVHHGNGTQDIFYDRGDVFYTSIHEDGLYPGTGSVAQTGDCDGAGTTLNLPFPTGAGDADYAAAVDDFIAPAIRAFDPDLFVVSAGFDAHHHDPISRLHLSTEGYAMLTDRVRRISARTDAPLAFVLEGGYSLDTLADGVSTVHETFDGRDPTEPEDDVSDSVRDLFERVRDTHQAFGST

SEQ ID NO: 18687 - protein, 410 aa, Campylobacter jejuni subsp. jejuni NCTC 11168 [sequence omitted]

SEQ ID NO: 18688 - protein, 410 aa, Rickettsia sp. AT1
DSEFAELKIRGKIFKLPIFKASIGEDVIDISRVSAEADCFTYDPGFMSTASCQSTITYIDGDKGILRHRGYDIKDLAEKSDFLEVAYLLIYGELPNSEQYNNFTKQVAHHSLVNERLHYLFQTFCSSSHPMAIMLAAVGSLSAFYPDLLNFKEADYELTAIRMIAKIPTIAAMSYRYSIGQPFIYPDNSLDFTENFLHMMFATHCTKYKVNPIIKNALNKIFILHADHEQNASTSTVRIAGSSGANPFACISTGIASLWGPAHGGANEAVINMLKEIGSSENIPKYIAKAKDKNDPFRLMGFGHRVYKNYDPRAAVLKETCKEVLKELGQLENNPLLQIAIELEAIALKDEYFIERKLYPNVDFYSGIIYKAMGIPSQMFTVLFAIARTVGWMAQWKEMHEDPEQKISRP

SEQ ID NO: 18689 - protein, 263 aa, Zea mays
  misc_feature (164)..(164): Xaa can be any naturally occurring amino acid
  unsure (1)..(263): unsure at all Xaa locations
MGRSPCCEKAHTNKGAWTKEEDQRLIAYIRAHGEGSWRSLPKAAGLLRCGKSCRLRWMNYLRPDLKRGNFTGDDDELIIKLHALLGNKWSLIAGQLPGRTDNEIKNYWNTHIKRKLLSRGIDPQTHRPLSGGAGSALTTTSSTAGFPSPAPAFRPTPTPPPAVXVVPPNAIFARPAPVVDGHSSSGASTDAPRCPDLNLDLDLSVGPPPKTPAATPASQQRRRTTICLCYHLGVRGGEACSCETASSLAGFRFLRPLEEGQYI

SEQ ID NO: 18690 - protein, 380 aa, Saccharomyces cerevisiae
MEFVAERAQPVGQTIQQQNVNTYGQGVLQPHHDLQQRQQQQQQRQHQQLLTSQLPQKSLVSKGKYTLHDFQIMRTLGTGSFGRVHLVRSVHNGRYYAIKVLKKQQVVKMKQVEHTNDERRMLKLVEHPFLIRMWGTFQDARNIFMVMDYIEGGELFSLLRKSQRFPNPVAKFYAAEVILALEYLHAHNIIYRDLKPENILLDRNGHIKITDFGFAKEVQTVTWTLCGTPDYIAPEVITTKPYNKSVDWWSLGVLIYEMLAGYTPFYDTTPMKTYEKILQGKVVYPPYFHPDVVDLLSKLITADLTRRIGNLQSGSRDIKAHPWFSEVVWERLLAKDIETPYEPPITSGIGDTSLFDQYPEEQLDYGIQGDDPYAEYFQDF

SEQ ID NO: 18691 - protein, 411 aa, Rickettsia sp. DT1
DSEFAELKIRGKIFKLPILKASIGEDVIDISRVSAEADCFTYDPGFMSTASCQSTVTYIDGDKGILRHRGYDIKDLAEKSDFLEVAYLLIYGELPSGEQYNNFTKQVAHHSLVNDRLHYLFQTFCSSSHPMAIMLAAVGSLSAFYPDLLNFKEADYELTAIRMIAKIPTIAAMSYKYSIGQPFIYPDNSLDFTENFLHMMFATPYTKYTVNPIIKNALNKIFILHADHEQNASTSTVRIAGSSGANPFACISTGIASLWGPAHGGANEAVINMLKEIGSSEYIPKYIAKAKDKNDPFRLMGFGHRVYKNYDPRAAVLKETCKEVLKELGQLDNNPLLQIAIELEAIALKDEYFIERKLYPNVDFYSGIIYKAMGIPSLMFTVLFAIARTVGWMAQWKEMHEDPEQKISRPR

SEQ ID NO: 18692 - protein, 273 aa, GIBBERELLA ZEAE PH-1
MFSKALTALALVAPLVSAQTFTSCNPLTTTCPPDPAFGKDTVHCDFTKGACPDFKEDAGTSITHNANGAVFTIGGPNQAPTIATGKYIMFGRVDIEVQASTGVGIVTSAVLQSDCLDEIDWEWLGGDNAQVQSNYFSKGDVSTYDRGAFHPVANPVGQFHVYSIEWTPALINWIIDDVVVRTLTYEDAKGGSAFPQTPMQIKLGTWCAGSPDAAEGTIQWAGGLTDFSQAPFKAYYKSISIVDYAGGDAPTTKSVREYIYGDHSGSHGSIRTA

SEQ ID NO: 18693 - protein, 216 aa, Xylella fastidiosa Ann-1
MVLTIEALKHLWRVDESRVGRTEPLPLDNRHYVNGHPLCDAFTGLAQIQFGLGCFWGAERLFWQLPGVFSTAAGYAGGGVPYPTYREVCSGETGHAEVVLVVYDHTVISFEQLLQTFWESHDPTQGMRQGNDIGTQYRSVIHCTTSEQYAAASASREVYQQQLNTAGYTAITTEILHPAPPFYYAENEHQQYLAKHPNGYCGLGGTGVTCAIRLQV

SEQ ID NO: 18694 - protein, 553 aa, Bacteroides fragilis NCTC 9343
MVKDLLTPDYIFEASWEVCNKVGGIYTVLSTRANTLQTNFRDKLFFIGPDVWQGKDNPLFIESDNLCAAWKEHALKKDDLSVRVGRWNIPGEPIVILVDFQPFFEKKNEIYTEMWNHFQVDSLHAYGDYDEASMFSYAAGKVVESFYRYNLTENDKVIYQAHEWMTGLGALYLQLAVPEIGTIFTTHATSIGRSIAGNDKPLYDYLFAYNGDQMAQELNMQSKHSIEKQTAHHVDCFTTVSEITNNECKELLDKAADVVLMNGFEDDFVPQGSAFTGKRKRARALMLNVANKLLGTHMDDDTLIIGTSGRYEFKNKGIDVFLESLNRLNRDKDLQKNVLAFVNVPGWVGEPREDLQTRLKSKEKFDTPLEVPFITHWLHNMTHDQVLDMLKYLGMGNRPEDKVKVIFVPCYLDGKDGILNKEYYDLILGEDLSVYPSYYEPWGYTPLESVAFRVPTITTDLAGFGLWVNSLKNQHGIDNGVEVLHRSDYNYSEVADGIKDTIALFSGKTDNEVKEIRKQAAAVAEQALWKHFIKYYYEAYDIALRNAMKRQLN

SEQ ID NO: 18695 - protein, 95 aa, Oxalis tuberosa
  misc_feature (13)..(13): Xaa can be any naturally occurring amino acid
  misc_feature (28)..(28): Xaa can be any naturally occurring amino acid
  unsure (1)..(95): unsure at all Xaa locations
LYAGINISGTNGXVMPGQWEYQVGPSVXIEAGDHIWASRYILERITEQAGVVLTLDPKPIDGDWNGAGCHTNYSTKSMRDEGGFEVIKKAILNLS

SEQ ID NO: 18696 - protein, 712 aa, Solibacter usitatus Ellin6076
MGSPSAVFNGLRIARPQAIPRTDYLLRQAVLKLLAIKDSDVRILTLQQCRDAVDKGLHAGGAFSAVIPLTALYYGGFIDIDIADPTRRGQDLFTLSKGHAVAAMAAIYADLGYFGLEVLRNSRSYSSILNGHPGPILPGVHIATGPMGQGFGVAQGLAIAGRVSPRFDSYCMCGDGELQEGPIWEAVMFAGSKKLDNLCLMVDRNHGQLDIYSKTIFPMPDLAPVFRSFGWQAFDVDATQYDGIYTALEEFRYGARNGKPTAIICSTTKGHGSLSDFFNRHKVAAADSLLEQELTLQGEQRHDRVAEFARFYLDLESAEGGPSLQDTLSKLARGMHLNLEAGPDDVRLSPSMGPVALTRVPPRNKKIRYDASLLPRIDRSKEPAASEIVSAAMKVFARDPAVVSIDSDLASTSGLEAGVAAVDQRRALNVGVAEANMMLIGEAFAALGSNVWISTFCPFYDWKVLRRVAVGYQERLEAMEAADGWLSEGHGLDITMLATASNFETRTNGATHMANDDNLVFDAIAHLKIIDVSCPQQMLAIMKWIMEGNRGLVYVRVMRTGSPVIYGPDYSFEFGKGHVIRESAGYSAILVSSGRGVHEAITAAALCSKNSVGVTVVDMPSIDDGLLLQLYDSGKLLLFAEQNNGYIWQNFLKVLYRHRKASADLGRVAAINTLDAQGRARFIHSGTYEELVEAFGLSAAQIAEFIEKQVNP

SEQ ID NO: 18697 - protein, 802 aa, Xylella fastidiosa Ann-1
MHPHSVHSNRSASGAESQYPGIDNKQDAPLFRSSSPLQVLRTPTMTIVTNLGFPRIGARRELKRALESHWRGETDATQLQHTARELRARHWRLQRDAGVDLPPSNDFSLYDHVLDTAFLFDAIPQRYHGLVDADPLAGYFAMARGRQADNIDLHALEMTKWFDTNYHYLVPELHRDQHFALRGNKPIAEFEEALALGITTRPVLLGPVSFLLLSKTVDGSNRLDLLERLLPVYTQLLRQLQESGAEWVQIDEPTLVLDLDAQTQQAFRKAYATLNQGPRPKLLLTSYFGPLGDNLELALQLPADGLHIDLVRGTEQLDAVLNTLPAGRVLSAGLVNGRNIWRTALDNALTLARYAQGRVDKDHLWLAPSCSLLHVPVDLEQEKNLDADVRNWLAFAKQKLSELRVLADALDNKPEAETALTQTRQALEARRQSPKVHRPDVAQRLAALTPDTTRRNTAYPQRSQAQQHTLNLPAYPTTTIGSFPQTLEVREARAQFKSGKLSESDYEAFLKAETERCVRTQEEIGLDVLVHGEFERNDMVEYFGEQLDGFIFTKLGWVQSYGSRCVKPPIIYGDVVRPAPMTVTWSAYAQSLTDKPMKGMLTGPVTMLQWSFVRDDQERAQTCRQIALALRDEVQDLEKAGIKVIQIDEPAIREGLPLRRGEWADYLNWAVESFRIASSNVHDTTQIHTHMCYSEFNDIIEAVAALDADVISIETSRSRMELLDAFVKFRYPNAIGPGVYDIHSPRVPQEEEMVLLLKKARAVLPPEQLWVNPDCGLKTRGWKETRAALQTMVHAAQRLRAE

SEQ ID NO: 18698 - protein, 436 aa, Zea mays
DCSPSAALSSSSAAAAAAAASSPAPAPARPHRAGDAAWAAIRAASASAAAPLGPRDFRLLRRVGGGDVGTVYLCRLRAPPAPAPVCCLYAMKVVDRRVAAAKKKLEHAAAERRILRALDHPFLPTLFADFDAAPHFSCVVTEFCPGGDLHSLRHRMPNRRFPLPSARFYAAEVLLALEYLHMMGIVYRDLKPENVLIRADGHIMLTDFDLSLQCTSTPSLEPCAAPEAAAASCFPDHLFRRRRARLRRAASARRPPTTLVAEPVEARSCSFVGTHEYVAPEVARGGPHGAAVDWWALGVFLYELLHGRTPFAGADNEATLRNIARRPLSFPAAGAGDADARDLIARLLAKDPRHRLGSRRGAADVKAHPFFRGLNFALLRSSRPPVVPAASRSPLHRSQFLQRGAHESVEAEAAAGHPVRPVLTRPLPASRTCVLT

SEQ ID NO: 18699 - protein, 263 aa, Silicibacter pomeroyi DSS-3
MTRIDAKFAELKAQGKKAFVSYVMAGDPDFDTSLELVKGLPGAGVDIIELGLPFTDPMADGPTIQLAGQRALDGGMTLQRTLDLATEFRKTDNTTPIVMMGYYNPIYSRGVDRFLADAKAAGIDGLIVVDLPPEEDSELCLPAQAAGLNFIRLATPTTDDKRLPRVLQNTSGFVYYVSITGITGSAEAEATDVGPEVARIKAATDLPVIVGFGINTPEKSRAIASVADGAVVGSAIVGQIGAGKPVAEVLAFVKTLSDGAHSA

SEQ ID NO: 18700 - protein, 163 aa, Glycine max
  misc_feature (49)..(49): Xaa can be any naturally occurring amino acid
  misc_feature (94)..(94): Xaa can be any naturally occurring amino acid
  misc_feature (123)..(123): Xaa can be any naturally occurring amino acid
  unsure (1)..(163): unsure at all Xaa locations
MATLGARMGAAAPTGTPTASLDFETSAGKRGKSNLAGHDQHIGKGGRDXIPLVQGASKGIKQIGAMGWGAQGPAQAQNLRDSLAEAKPDIGGKXGLRKGARSFNEARAAGPSEEKGTEGDIWXETTPGSHPARLWRGEAAQAGAHEHTGCPQETKEETGGGAQ

SEQ ID NO: 18701 - protein, 566 aa, GIBBERELLA ZEAE PH-1
MRFYNLLSAGLFGLAQANAHRHAMLHRRASCDGNTASTRSTWCDYSIDTDYSTEVVDTGVTKEYWLELTDVTVAPDGYSRSAMAVNGTIPGPTLFADWGDTVVVHVTNSLTTSLNGTSMHWHGIRQNYTNQYDGVSSITECPLAVGETVTYTWKATQYGSTWYHSHWALQAWQGIFGGIIINGPATADYDEDLGMVFLNDWDHQTVDELYYSAETNGPPTLDNGLINGTNVYGDDDDSSQTGSRFNVSFESGTSYRMRLVNAAVDTHWKFSIDNHTMTVIAADLVPIEPYETTVLDMGMGQRYDIIVTADQADVADNFWMRAIPQSACSDNDSTDNIKGIVYYGDSPDTPSTTAYDYTDGCDDETDNLVPYISKTVDDANWSDLETATVGKNTAGLFKWQLNSTSMLMDWANPTLAQIMNGTTEFETDDAVIELSEASQWVYFVIETSLAVPHPIHLHGHDFSILAQGTGTYSSSVTLNTSNPPRRDTAMLPGNGYLVMAWETDNPGVWLCHCHIGWHTSEGFALQFIERASEIPDITTSSYVSDVCDSWTTFQSENSIEQEDSGV

SEQ ID NO: 18702 - protein, 582 aa, Triticum aestivum
MDTHIGSVDGPSPAAVNGAVGCPASAPGCPIMSSHPVVFAVPGDFNLTLLDHLVDEPGLRLVGCCNELNAGYAADGYARARGVGACAVTFTVGGLSVLNAIAGAYSENLPVICIAGGPNSNDYGTNRILHHTIGIPDFSQELRCFQTVTCHQAVVTNLDDAHEQIDTAIATALRESKPVYLSISCNLPGLPHPTFTRDPVPFFLAPRMSNKMGLEAAVEATVEFLNKAVKPVLVAGPKLRVAKAGKAFVDLVDASGYAYAIMPSAKGFVPETHPHFLGTYWGAVSTAFCAEIVESADAYLFAGPIFNDYSSVGYSFLLKKDKAIIVQPERVIVGNGPAFGCVMMKEYLSALAKRVQKNNTAYENYKRIFVPEGHPLKGEANEPLRVNVLFKHIQDMLTGDSAVLAETGDSWFNCQKLKLPEGCGYEFQMQYGSIGWSVGALLGYAQGASDKRVIACIGDGSFQVTAQDVSTMLRCEQNSIIFLINNGGYTIEVEIHDGPYNVIKNWNYTALVEAIHNGEGKCWTAKVKCEEELTAAIETALGEKKDSLCFIEVIAHKDDTSKELLEWGSRVSAANSRPPNPQ

SEQ ID NO: 18703 - protein, 218 aa, Bacteroides fragilis YCH46
MKFFIDTANLDQIREAHDLGVLDGVTTNPSLMAKEGIKGVENQRRHYVEICNIVQGDVSAEVIATDYEGMVREGKELAALNPHIVVKVPCIADGIKAIKHFSGKGIRTNCTLVFSTGQALLAAKAGATYVSPFVGRLDDICEDGVGLVADIVRMYRFYNYPTQVLAASIRSSKHIMECVEAGADVATCPLSAIKGLMNHPLTDAGLKKFLEDYKKVNE

SEQ ID NO: 18704 - protein, 816 aa, Zea mays
MGEGAGDRVLSRLHSVRERIGDSLSAHPNELVAVFTRLKNLGKGMLQPHQIIAEYNNAIPEAEREKLKDGAFEDVLRAAQEAIVIPPWVALAIRPRPGVWEYVRVNVSELAVEELRVPEYLQFKEQLVEEGPNNNFVLELDFEPFNASFPRPSLSKSIGNGVQFLNRHLSSKLFHDKESMYPLLNFLRAHNYKGMTMMLNDRIRSLSALQGALRKAEEHLSTLQADTPYSEFHHRFQELGLEKGWGDCAKRAQETIHLLLDLLEAPDPSTLEKFLGTIPMVFNVVILSPHGYFAQANVLGYPDTGGQVVYILDQVRAMENEMLLRIKQCGLDITPKILIVTRLLPDATGTTCGQRLEKVLGTEHCHILRVPFRTENGIVRKWISRFEVWPYLETYTDDVAHEIAGELQANPDLIIGNYSDGNLVACLLAHKMGVTHCTIAHALEKTKYPNSDLYWKKFEDHYHFSCQFTTDLIAMNHADFIITSTFQEIAGNKDTVGQYESHMAFTMPGLYRVVHGIDVFDPKFNIVSPGADLSIYFPYTESHKRLTSLHPEIEELLYSQTENTEHKFVLNDRNKPIIFSMARLDRVKNLTGLVELYGRNKRLQELVNLVVVCGDHGNPSKDKEEQAEFKKMFDLIEQYNLNGHIRWISAQMNRVRNGELYRYICDTKGAFVQPAFYEAFGLTVVEAMTCGLPTFATAYGGPAEIIVHGVSGYHIDPYQGDKASALLVDFFDKCQAEPSHWSKISQGGLQRIEEKYTWKLYSERLMTLTGVYGFWKYVSNLERRETRRYLEMLYALKYRTMASTVPVAVEGEPSSK

SEQ ID NO: 18705 - protein, 142 aa, Mycoplasma hyopneumoniae 232
MKKEKKLDHLTELQYKVTQQNFTEPAFDNLYNNNYQEGVYVDIVDGTPLFLSIYKYDSGSGWPSFSKPIDENLIVEVLDFSASLTRIEVRSKNADSHLGHVFSDGPKQFGGRRYCINSASLKFIPKSELKSHNLGHLLEFFK

SEQ ID NO: 18706 - protein, 331 aa, GIBBERELLA ZEAE PH-1
MGIVDQPQSKGQESTPGDFAAVQKSIIDLLNQPDYDDGSAGPVLVRLAWHSSGTYDKVTDTGGSNGAGMRYEAEGGDPANAGLQNARVFLEPVKRLHPWITYSDLWTLAGVTAIHAMGGPEIDWLPGRTDFVDDSKLPPRGRLPDAAQGAEHIRHIFYRMGFNDREIVALSGAHNLGRCHTANSGFEGKWVNNPTRFSNQYFRLLLSETWTEKTIPESGLLQFSSVDQDTEEELMMLPTDIALTTDSEFSKYVQLYAKDKDVFFQDFKKAFAKLLELGIARNSEGKVINTDNQKGGYRSAPKKSDSTPATSGQPGASKTGGCPVMHHKAKL

SEQ ID NO: 18707 - protein, 328 aa, Erwinia carotovora subsp. atroseptica SCRI1043
MAKRVQFRAYGGPEVLQYGDFTPAEPAAGEVQVENHAIGINFIDTYIRSGLYPVPDLPSGLGTEAAGVVTKVGAGVSVLKVGDRVVYAQSGLGAYSEVHNVVAEKVALLPDAISFEQAAASFLKGLTVYYLLRQTYEIKPNQVFLFHAAAGGVGLIACQWAKALGAKLIGTVGSDEKAERAKQAGAWATINYRTENIAQRVAELTDGQKVEVVYDSVGKDTWEASLDSLRRRGLMVSFGNASGPVTGINLGILNQKGSLYVTRPSLFGYVTNRAELEQASNELFSLIASGAITVDVPQNQKFALADAQAAHRALESRSTQGSCLLIPG

SEQ ID NO: 18708 - protein, 397 aa, Erwinia carotovora subsp. atroseptica SCRI1043
MFQNVDTYAGDPILSLMEKFKQDPRADKINLSIGLYYNEQNIIPQLRSVSTAESSLRQPAQSANSYLPMEGLQPYRTAIQHLLFGESHAALEAGRIATIQTLGGSGALKVGADFLKRYFPASEVWVSDPTWENHIAIFEGAGFNVHTYPYFDSESLGVKFDAMLSTLQTLPTRSIVLLHPCCHNPTGSDLTTEQWDRVIEVIIQRELIPFMDIAYQGFGLGIEQDAYAIRAVASAGVPALIANSFSKIFSLYSERVGGLSVVCDDADSAQRVLGQLKATVRRNYSSPPNFGAQVVSKVLNDVQLNADWKAEVEEMRTRILSMRQELVSALKNALPNRNVDYLLTQRGMFSYTGFSPEQVDRLREEFGVYLIASGRMCMAGLNHSNVQRVAAAFAAIQ

SEQ ID NO: 18709 - protein, 411 aa, Rickettsia asiatica
DSKFAELKIRGKIFKLPILKASIGEDVIDISRVSAEADCFTYDPGFMSTASCQSTITYIDGDKGILRHRGYDIKDLAEKSDFLEVAYLLIYGELPSSEQYNNFTKQVAHHSLVNERLHYLFQTFCSSSHPMAIMLAAVGSLSAFYPDLLNCKEADYKLTAIRMIAKIPTIAAMSYKYSIGQPFIYPDNSLDFTENFLHMMFAMPCTKYKVNPIIKNALNKIFILHADHEQNASTSTVRIAGSSGANPFACISTGIASLWGPAHGGANEAVINMLKEIGSSENIPKYIAKAKDKNDPFRLIGFGHRVYKNYDPRAAVLKETCKEVLKELGQLENNPLLQIAIELEAIALKDEYFIERKLYPNVDFYSGIIYKAMGIPSQMFTVLFAIARTIGWMAQWKEMHGDPEQKISRPR

SEQ ID NO: 18710 - protein, 464 aa, Escherichia coli CFT073
MVRSQLSRADAPCLLTSLRRQLMAMFGFPHWQLKSTSTESGVVAPDERLPFAQTAVMGVQHAVAMFGATVLMPILMGLDPNLSIFMSGIGTLLFFFITGGRVPSYLGSSAAFVGVVIAATGFNGQGINPNISIALGGIIACGLVYTVIGLVVMKIGTRWIERLMPPVVTGAVVMAIGLNLAPIAVKNVSASAFDSWMAVMTVLCIGLVAVFTRGMIQRLLILVGLIVACLLYGVMTNVLGLGKAVDFTLVSHAAWFGLPHFSTPAFNGQAMMLIAPVAVILVAENLGHLKAVAGMTGRNMDPYMGRAFVGDGLATMLSGSVGGSGVTTYAENIGVMAVTKVYSTLVFVAAAVIAMLLGFSPKFGALIHTIPAAVIGGASIVVFGLIAVAGARIWVQNRVDLSQNGNLIMVAVTLVLGAGDFALTLGGFTLGGIGTATFGAILLNALLSRRLVDVPPPEVVHQEP

SEQ ID NO: 18711 - protein, 201 aa, Xylella fastidiosa Ann-1
MKCSSNNIHSTPCTVHRRIYPQKRDLIQNIKNRIDIFHRILSSDLTMNVTFDLTPPSPSQREALIATLNAEERRILLQHGTEAPFCNRLLENNQPGTYTCRLCGLPLFHSNAKFKSGTGWPSFFEPYTHTHIRKQHDTSHGMIRTEILCARCNSHLGHLFPDGPPPTYERYCLNSVSLTFIPTGTLLPDQLHRGDNTTYRT

SEQ ID NO: 18712 - protein, 95 aa, Oxalis tuberosa
  misc_feature (12)..(12): Xaa can be any naturally occurring amino acid
  unsure (1)..(95): unsure at all Xaa locations
LYAGINISGTNXEVMPGQWEYQVGPSVGIEAGDHIWASRYILERITEQAGVVLTLDPKPIDGDWNGAGCHTNYSTKSMRDEGGFEVIKKAIFNLS

SEQ ID NO: 18713 - protein, 490 aa, Leuconostoc mesenteroides
MEIQNKAMLITYADSLGKNLKDVHQVLKEDIGDAIGGVHLLPFFPSTGDRGFAPADYTRVDAAFGDWADVEALGEEYYLMFDFMINHISRESVMYQDFKKNHDDSKYKDFFIRWEKFWAKAGENRPTQADVDLIYKRKDKAPTQEITFDDGTTENLWNTFGEEQIDIDVNSAIAKEFIKTTLEDMVKHGANLIRLDAFAYAVKKVDTNDFFVEPEIWDTLNEVREILTPLKAEILPEIHEHYSIPKKINDHGYFTYDFALPMTTLYTLYSGKTNQLAKWLKMSPMKQFTTLDTHDGIGVVDARDILTDDEIDYASEQLYKVGANVKKTYSSASYNNLDIYQINSTYYSALGNDDAAYLLSRVFQVFAPGIPQIYYVGLLAGENDIALLESTKEGRNINRHYYTREEVKSEVKRPVVANLLKLLSWRNESPAFDLAGSITVDTPTDTTIVVTRQDENGQNKAVLTADAANKTFEIVENGQTVMSSDNLTQN

SEQ ID NO: 18714 - protein, 199 aa, Triticum aestivum
  misc_feature (141)..(141): Xaa can be any naturally occurring amino acid
  unsure (1)..(199): unsure at all Xaa locations
MAHDEAVAAQKTGKSGSPPKDQPAPSPYPDWSAMQAYYSSGVMPPAYFAPAMAAGHPPPPYMWGPQHMMPPPFGTPYAMYPHGGAYPHPLVPMMASPLSVEPAKSANSKDKSSNKKLKEIDGSAVSTGSGNSKKTSSSGDXYSGEGSSDVNDLKVSGTPRKRSLDGGFDTEATVAARNKDVVASSPIIRNGAILSNQCF

SEQ ID NO: 18715 - protein, 202 aa, Triticum aestivum
PRVREFRRQQSVFRDCIEADANAKFAAEPDRYHLYISWACPWAHRTAIVRQLKGLDKIIGMSVVDYLMLDKGWKFSTEQECPGAIPDTVNKSSYIRDLYFKVNPNYEGRFTVPVLWDKKLQTIVNNESSEIIRMFNTAFNSFLSKEQAELNYYPESLQKEIDETNEWIYDTVNNGVYKSGFATTQQAYENNVYNVFKSLDRI

SEQ ID NO: 18716 - protein, 583 aa, Securigera parviflora
MCGILAVLCAENSQAKRVRVLELSRRLKHRGPDWSGLHQHGDCYLAHQRLAIVDPASGDQPLFNEDKSLIVTVNGEIYNHEELRKQLPNHKFRTGSDCDVIAHLYEEHGENFVDMLDGIFSFVLLDTRDNTFIVARDAIGVTSLYIGWGLDGSVWISSEMKGLNDDCEHFECFPPGHLYSSKDRAFRRWYNPPWFSETIPSAPYDPLALRHAFEKAVIKRLMTDVPFGVLLSGGLDSSLVASITSRYLATTKAAEQWGSKLHSFCVGLEGSPDLKAAKEVADYLGTVHHEFTFTVQDGIDAIEDVIYHVETYDVTTIRASTPMFLMSRKIKSLGVKWVISGEGSDEIFGGYLYFHKAPNKEEFHRETCRKIKALYQYDCLRANKSTFAWGLEARVPFLDKEFINVAMNIDPENKMIKRDEGRMEKYILRRAFDDEEHPYLPKHILYRQKEQFSDGVGYSWIDGLKEHAAKHVTDKMIFNAANIFPHNTPTTKEAYYYRMIFERFFPQNSARLTVPGGASVACSTAKAVEWDAAWSNNLDPSGRAALGVHLSAYDNQNNLANKPVEFEKIIPMEAPSLGVAIQS

SEQ ID NO: 18717 - protein, 95 aa, Oxalis tuberosa
LYAGINISGTNGEVMPGQWEYQVGPSVGIEAGDHIWASRYILEGITEQAGVVLTLDPKPIDGDWNGAGCHTNYSTKSMRDEGGFEVIKKAIFNLS

SEQ ID NO: 18718 - protein, 269 aa, Brassica napus
  misc_feature (15)..(15): Xaa can be any naturally occurring amino acid
  unsure (1)..(269): unsure at all Xaa locations
PTRPCLLDEEAIKVXGGSNHSHATKDLYDSIAAGNYPEWHLFVQVDPRVRMDPAHEDKVDFDPLDVTKIWPEDVLPLQPVGRLVLNKNIDNFFNENEQIAFCPAIVVPGVHYSDDKLLQTRIFSYADSQRHRLGPNYLQLPVNAPKCAHHNNHHEGFMNFMHRDEEVNYFPSRLNPVRHADKYPTTPVFCSGNREKCMIEKENNFQQPGERYRSWDADRQERFVKRFVEALAEPRVTHEIRSIWISYWTQADKSLGQKLASRLNVRPKY

SEQ ID NO: 18719 - protein, 438 aa, Thermus aquaticus
MKKSKSKKKAAKAQEVEVKEPVKEPEPLPELEAAEDLQDLPEPDPELLASEPELEDLADPLDLEGPLEADLLPEEGLLEEEEEELSLPKVSTSDPVRQYLHEIGQVPLLTLEEEIDLARKVEEGMEAIKKLSEATGLDQELIREVVRAKILGTARIQKIPGLKEKPDPKTVEEVDGKLKSLPKELKRYLHIAREGEAARQHLIEANLRLVVSIAKKYTGRGLSFLDLIQEGNQGLIRAVEKFEYKRRFKFSTYATWWIRQAINRAIADQARTIRIPVHMVETINKLSRTARQLQQELGREPSYEEIAEAMGPGWDAKRVEETLKIAQEPVSLETPIGDEKDSFYGDFIPDENLPSPVEAAAQSLLSEELEKALSKLSEREAMVLKLRKGLIDGREHTLEEVGAYFGVTRERIRQIENKALRKLKYHESRTRKLRDFLE

SEQ ID NO: 18720 - protein, 338 aa, Anthoceros agrestis
SDSGKDAGRFTAAWELYKAQEDVVAVCKEYNIKITLFHGRGGSVGRGGGPMYLAIQSQPPGSVMGTLRVTEQGEMIQAKFGLNQTAIRQLEIYTTAVLLATVHPQCHHALLHGEVVMDEISDAGRKYYRQIVFETKEFLQYFHEATPEAELGNLNIGSRPTRRKSSGGITQLRAIPWIFAWTQTRSVLPAWLGVGKGLQAAMEKGHRDELRAMYKEWPFFQSTVDLIEMVLAKADMPITKHYEDVLVSQNVRELGKELRDEFHVTEKHVRDITGHHKLSENNKTLRRLIESRLPYLNPINMLQVEVLRRLRQDETNPKLRDALLITMKGIAAGMQNTG

SEQ ID NO: 18721 - protein, 317 aa, Cryptococcus neoformans var. neoformans B-3501A
MQVEYESSPAVEQPSFEEGMSFRPGSPQAGGAESEEEQDEEDVDAGEGTSLFSSAYDEASFHSSEKGGIRADDASFSGSGAKKPARKRIIKQRQSLAEKQPGTTMFPAARVKKIVKADRDIDIMSSEAVFMVSVAAEYFIKHFMEEGYTKARLEKRKLINYRDMANVVARSEEFDFLKDVIPTPMPLSEAIEKRKRKVVAEENLDEDAPASSHLNDEDLPPLVPSTNPAFPNAIVKKPSNTHAKGASAAKMKADAPTSEKEELRSVVSNAQGTRKSARRSTMGAEDEADKSYLNELREEGADEEAITSDGDEKMDEE

SEQ ID NO: 18722 - protein, 81 aa, Brassica napus
MSCCGGNCGCGSACTCVSGCCGGCKKNPELGFSGETTTTETYVFGVAPAMKNQYEAFGESNVENDGCKCGSDCKCDPCTCT

SEQ ID NO: 18723 - protein, 590 aa, Schizosaccharomyces pombe
MQTENQVNDLYPIAVLIDELKHDEITYRLNALERLSTIALALGPERTRDELIPFLDESIDDEDEVLSALADQLGNFVDYVGGPEYAHVLLSPLENLAATEETVVRDKAVDSLNKVCICLSQEQLEQYFVPLVQRLSTAEWFTSRASSAGLYCAAYSQSENPAVKVSLRQSFSHLCHDEAPMVRRPAATNCAKFVFLVTKQEAIDEFIPLFNSLSNDDQDSVRLLSFDIMVSLAEVLKSDSEIRHYLLQPLRSFVSDSSWRTRYMVAANFVKLAKVVGPSLIKDELIKPFVLLMKDTEQEVRRAIATQIPGFCELLDKRIVLEEIIPVIQELINDPAQHVRAALGMNIGALAPQLGKEKTTEYLLPMFLELLKDENPEVRLNIISKLEVVNKVVGIELLSQSLLPAIVTLAEDKQWRVRLAIIDYIPLLAQQLGVEFFNEKMGNLCMSWLEDHVYSIREAAIKNLRKLTEIFGLEWATETIIPKFLAMRSHPNYLYRMTTIFAISEIAPALNAEVIEKQILPTLEQLVNDPIPNIRFNVAKAFEVLKPVLAAGGDSTVYEQQIIPLLEQLTKDNDPDVQYFATQALEQTND

SEQ ID NO: 18724 - protein, 482 aa, Shewanella oneidensis MR-1
MLLNDPSLLRQQCYINGQWCDANSKETVAITNPATGAVIACVPVMGQAETQAAIAAAEAALPAWRALTAKERGAKLRRWFELLNENSDDLALLMTSEQGKPLTEAKGEVTYAASFIEWFAEEAKRIYGDTIPGHQGDKRIMVIKQPVGVTAAITPWNFPAAMITRKAAPALAAGCTMVVKPAPQTPFTALALAVLAERAGIPAGVFSVITGDAIAIGNEMCTNPIVRKLSFTGSTNVGIKLMAQCAPTLKKLSLELGGNAPFIVFDDANIDAAVEGAMIAKYRNAGQTCVCANRIYVQAGVYDEFAEKLSMAVAKLKVGEGIIAGVTTGPLINAAAVEKVQSHLEDAIKKGATVLAGGKVHELGGNFFEPTVLTNADKSMRVAREETFGPLAPLFKFNDVDDVIKQANDTEFGLAAYFYGRDISLVWKVAESLEYGMVGVNTGLISTEVAPFGGMKSSGLGREGSKYGIEEYLEIKYICMSV

SEQ ID NO: 18725 - protein, 520 aa, Trametes hirsuta
MSRFQSLLAFVVASLAAVAHAAIGPTADLTISNAEVSPDGFARQAVVVNNVTPGPLVAGNKGDRFQLNVIDNLTNHTMLKSTSIHWHGFFQKGTNWADGPAFVNQCPISSGHSFLYDFQVPDQAGTFWYHSHLSTQYCDGLRGPFVVYDPNDPHASLYDVDNDDTVITLADWYHTAAKLGPAFPLGADATLINGLGRSPSTTAADLAVINVTKGKRYRFRLVSLSCDPNHTFSIDGHDLTIIEVDSINSQPLVVDSIQIFAAQRYSFVLNADQDVGNYWIRANPNFGNVGFAGGINSAILRYDGADPVEPTTTQTTPTKPLNEVDLHPLATMAVPGSPVAGGVDTAINMAFNFNGTNFFINGASFVPPTVPVLLQIIRRAQNAQDLLPSGSVYSLPSNADIEISFPATAAPPGAPHPFHLHGHAFAVVRSAGSTVYNYDNPIFRDVVSTGTPAAGDNVTIRFRTDNPGPWFLHCHIDFHLEAGFAVVFAEDIPDVASANPVPQAWSDLCPIYDALDVNDQ

SEQ ID NO: 18726 - protein, 561 aa, Geobacter metallireducens GS-15
MLTFIQLNRNIRSLRRYRQIVRVLFKFGFDHALELMGLSQFVARGRKLFRRPASELALLSPAERMRLSLEELGPTFVKLGQILSTRPDVIPRSFILEFAKLQDQVPSFPFEAVEDQIRKHLGREPSECYSFIDSEPLAAASIAQVHRARLVSGEDVVIKVRRPGVVGLVETDVDAMMGLAMLAERHLPGSDLYDPVGLVKEFARTIRREMDFSREAHTIEKFAENFAGDPTLHFPTVYWGQTAGGVLTMEHVDGIKVSDTAALDAAGLDRKLLARRGADAFLKMVLIHGFFHGDPHPGNVLILPNNVICLLDYGMVGRLDTQLKGYLTDILLAIVQRDVDEVISLLLYSGDITDTLDTRALRRDLSGLIDSYYEVPLQQIEVGRMLLEFLEVITTYHIRFQPDLMLLAKALVAIEGMGRELDPDFDMVEHLRPFMKKALRDRFSPEHLVREMGSHITSYVTLFRNLPKDLKEFLNRINRNKFKIDLEHRGLDRALRDFDKSINRLSSSLIIAALIVGSSIIMQTDKGPKIFEFPIFAFMGYTIAGFIGLWWVFAIIRSGRL

SEQ ID NO: 18727 - protein, 220 aa, Shigella flexneri 2a str. 301
MKDIDTLISNNALWSKMLVEEDPGFFEKLAQAQKPRFLWIGCSDSRVPAERLTGLEPGELFVHRNVANLVIHTDLNCLSVVQYAVDVLEVEHIIICGHYGCGGVQAAVENPELGLINNWLLHIRDIWFKHSSLLGEMPQERRLDTLCELNVMEQVYNLGHSTIMQSAWKRGQKVTIHGWAYGIHDGLLRDLDVTATNRETLEQRYRHGISNLKLKHANHK

SEQ ID NO: 18728 - protein, 219 aa, Brassica napus
  misc_feature (127)..(127): Xaa can be any naturally occurring amino acid
  misc_feature (174)..(174): Xaa can be any naturally occurring amino acid
  misc_feature (177)..(177): Xaa can be any naturally occurring amino acid
  misc_feature (179)..(180): Xaa can be any naturally occurring amino acid
  misc_feature (202)..(202): Xaa can be any naturally occurring amino acid
  misc_feature (210)..(210): Xaa can be any naturally occurring amino acid
  misc_feature (212)..(212): Xaa can be any naturally occurring amino acid
  unsure (1)..(219): unsure at all Xaa locations
MERTTPVRKPHTSTANLLTWSEVPPSDSPSSAARSAVRSHQPSDGVSKVVFGGQVTDEEVESLNKRKPCPEHKMKEITGSGIFTRNQEDDASELSSAPSGRVYQQALSGISHISFGEEEDLSPKKPXTLPEVAKQRELSGTMESESASNLKKQLSDAKYKEISGQNIFAPPPEXKPXSXXTRALALKDNFNLGAESQTSGEXDSSVKTAXNXYDKKFAE

SEQ ID NO: 18729 - protein, 1024 aa, Legionella pneumophila subsp. pneumophila str. Philadelphia 1
MVQKDLRCLIRNYCFIFSFLLLGSSALFAQHEQHGASTQPLPHPKTTSSQSKPAQYKMKQPIPVKTVTPLTMTGGAKRTVNLVVAYKTVNFAGKPRRAIAVNGQIPAPTLHFKEGDDVTINVYNHLDEGTSIHWHGLLVPWQMDGVDEVSQKPIPPGGVFHYRFKLYQRGTYWYHAHAKVQEQEGLYGTFIIDPPKPPSYQYTKDYVVVLSDWSNTPAEQVLANLKKDGDYYGPRFPLQPSLMKFLHDYRKASPEERKKLIADYKMMQQMRMSIYDLSDVAYDAYLLNGHPKSHPWTAPVKVGDRVRLRFIGAGASTIYRVKIPDAKVEMVHIQGNDVRPYPIEDFWIAPGETYDVLVTIQKNKPYVIYAESIDTLGKAYGALVTYPNQVVNYQHVTPFPEPLPVTREMMANMMMSMNGGGMGGNQQHALMNKKTSSTAMKPSMTMPSHSQAMSSQSANHSMSSKTIQKKMDKASNHSAHTSSMKSKSSSTSMNKSMDMPGMNHGAMSQNKTSNSAQMKSDSSSTSMNKSMAMPGMNHGAMSQSKTSNSAQIKSDSSSTSMNKSMAMPDMNHSAMGQNKTSNSANDTSMNRNMKSDRPMEQGMSMNGSMNMKMPIEPTIIGDKIEPPDSAKATTLGTKYQELKGAVKTNNPNKPVDGIIKMELFGYMDRYIWFINGLPEYKAKPILIEPGKRYRIIFTNNSMMRHPMHIHGHWFILRNGHGAYDPLLHTIEVPPGATAVADFDTEASGQWFFHCHHLLHMTAGMARVFQYTTIIEIANGTRKPDNYAYQQAYINRPVVREDEVMPLDASLIKHPAGHHQGFYRSSYIELGEDPFHNAQEMTFRGLYGPDYNKLQLYTEDAEIYKGTVENADIDVFYWHLISQFWAVKGGVNYFYRPGGPYWQPGIGIEGLMPWYIDTNIRTYYRDGSVKFDIQLARANQLTNNFFFLTGIRSILATHTVVKNEIGNGLNQMRYILRPYYRLKPGLNIFSEYEHDVEYGALKRILRSQGEPTTQDTITLGVAVLF

SEQ ID NO: 18730 - protein, 196 aa, Oryza sativa
MFSGTQQKCKVCTKTVYPMDQLSTDGVVFHRSCFKCQHCKSTLSLGNYSSIEGVPYCKPHFEQLFKETGSYNKSFQSPAKPASEKLTPELTRSPSKAARMFSGTQEKCATCSKTAYPLEKVTVEGQAYHKSCFKCSHGGCAISPSNYAALEGILYCKHHFSQLFKEKGSYNHLIKCASVKRAEAQPAPPPAAADSS

SEQ ID NO: 18731 - protein, 124 aa, Triticum aestivum
  misc_feature (102)..(102): Xaa can be any naturally occurring amino acid
  misc_feature (110)..(110): Xaa can be any naturally occurring amino acid
  unsure (1)..(124): unsure at all Xaa locations
MSEPEFEQARKEGGSTLEASSLFSKNPEYKKALEVVSVPERIIQFRVVWENDKGECQVQKGYRVQFNSALGPYKGGLRFHPTVNLSILKFLDFEQIFKNAVXTALNMGRXGKGGMRTSDPKGKS

SEQ ID NO: 18732 - protein, 236 aa, Oryza sativa (japonica cultivar-group)
MAALAAASTAFAAKPRLARAPSSPAARFSVSCSASGNNGGAGEMAQSLAASAKTFSAALALSSVLLSSAATSPPPAAADIAGLTPCKESKAFAKREKQSIKKLQSSLKKYAPDSAPALAINATIEKTKRRFENYGKFGLLCGADGLPHLIVSGDQRHWGEFITPGLLFLYIAGWIGWVGRSYLIAISGEKKPAMREIIIDVELAVKLLPRGFIWPVAAYRELITGNLVVDDADIGY

SEQ ID NO: 18733 - protein, 318 aa, Halobacterium sp. NRC-1
MDVVTFGETMLRLSPPGHERVEAADRMDVRVAGAESNVAVTAGRLGAETAWLSKLPASPLGRKVAATLRAQGTTPEVTWTDRDDLRQGLYFLEQGGEPRGTTVHYDRQDAAVTTATADELAPAFVERAGYLHTSGITPALSETLAATTADLLELAQETGTTATLDVNYRRGLWSHEEARDTLEALFPDVDVLFVAERDARGVLDRTGDADAIARGLADEFAFGTVVLTRGEAGALAVRNATTVTQPVFETETHDPIGTGDAFVGGYLAARVDGGDVEDALAWGAATAALKRTIPGDVALVTRADVESVLADEHSGIDR

SEQ ID NO: 18734 - protein, 306 aa, Frankia sp. EAN1pec
MPRPGGLVRPPDWTARSAGRPSGSSAGTRTAPRNVRLSVRRARKYAIQVFRVGLRCGSDTMGKLDGKVAVITGAGSGIGRSAAFLFAREGARVVCADVSGREALTAKAVGDGAIAVHVDVTSTEDIERMITTAVDRFGKLDVLYNNAGFTGPIVPLAEAGEDYFDAVMAVNVKGVYLGMKAAIPVMLAGGGGSIINTASAAGLVGWKGLAVYAATKGAVVQLTRSAALDYAAKGIRVNAVCPGATWTRQADAEDDSLPPEGVVPPQPMRRWGMPDELAAAALFLASDDASFVTGVALPVDGGYVAR

SEQ ID NO: 18735 - protein, 429 aa, Halobacterium sp. NRC-1
MAQTPPPESAPSTDSEPETALETARRQLQAAAEHVDIADGVIERLTHPTRVVQVSVPVERDDGTVTVYDGYRAQHDDVRGPYKGGLRYHPGVSAEECVGLSMWMTWKCAVMDLPFGGAKGGVVVDPKTLSADEHERLTRRFAAELRDEVGPSQDIPAPDMGTDAQTMAWFMDAYSMQQGETVPGVVTGKPPVAGGSHGRAEAPGRSVAIATREAINYYDIPIDDATVAVQGYGSVGANAALLLDDWGARVVAVSDVNGGVLDTDGLDTHAIPSHGNQPAAVMRHDAPNTLTNEELLELDVDVVIPAAVGNVITAANADRIQADIVVEGANGPTTSAADRILEERAVPVIPDILANAGGVTVSYFEWLQDINRRTWSPERVRDELESEMLSAWNAVRSEVDDGDLSWRDAAYVVALQRIGRAKEARGLWP

SEQ ID NO: 18736 - protein, 328 aa, Kluyveromyces lactis NRRL Y-1140
MMYTRLLYALFLLVELAFGANFYDRDENIMELTPSNFDKVIHRTNYTTLVMFYAPWCGYCQELKGSMKSAGKILSGMVQVAGVNCDESVNKQLCAQNRVSGFPTLMVFRPPKINLDNPKKNSNGAASQHATEVYKGERKLKPIVDFALSRVKNYVKRLNRYSKFEELLKSSRTRYAVVLISKKEKIPTLYKSVALDWLGIYDFYSIWDEKLQGVSQLSFENDTKNWPNTVKYLQSLEKSETELQSPRIVVIDRETDTYDELDILKTTDKNDIATFLSKFESKPREGPLSKRQEYLKSILNKSKSKKSKTKKNKQKTKLTKDDIVQDEL

SEQ ID NO: 18737 - protein, 528 aa, Ustilago maydis
MVNITYGVLQAPDGSSATSSAIAKGTDIIVSYGPNGESVASYSPGDISWVLTCTALVWLMIPGLGYLYSGLARRKNAPHLLLLTLAALAVVSFQWFFWGYSLTFSQTSGAFLGNLRNFGYMGVLENPVPQAYNKVPEIVYAIYQCMFANLVPAIAIGAACERGRVWPFLVFTFVWTTLVYDVIACWVWNPTGWAFKWGVLDYAGGGPVEINSGITGLVISYYLGPRTGYGTERLLFKPHNVSYIFLGTAFLWFGWIGFNGGSVFAANLRAAMAISTTNLAASSAGLTWMFLDWRLERKWSVVGFCTGAIAGLVAITPAAGFVGMPAALLVGVVSSAVSNFATVLKGPMRVDDVMDIFSVHALAGIVGTLLTGIFAQASVANNDGNTVIAGGWLDSNWIQLAYQLAYCVAVTCWCGGVTFAIMFVIDHIPYIGPFRSSEMGEVVGMDEDQCGEWAYDYAFINRDLEGNYKPDHGQTLDINEKMPNVHQTDSLRSETHADSSQDNPNSQLAAAEHQSPSTAEPAVEMKQA

SEQ ID NO: 18738 - protein, 286 aa, Bacteroides fragilis NCTC 9343
MRQLKITKSITNRESASLDKYLQEIGREDLITVEEEVELAQRIRKGDRVALEKLTRANLRFVVSVAKQYQNQGLSLPDLINEGNLGLIKAAEKFDETRGFKFISYAVWWIRQSILQALAEQSRIVRLPLNQVGSLNKISKAFSKFEQENERRPSPEELAGELDIPVDKISDTLKVSGRHISVDAPFVEGEDNSLLDVLVNDDSPMADRSLVNESLAREIDRALSTLTDREKEIIQMFFGIGQQEMTLEEIGDKFGLTRERVRQIKEKAIRRLRQSNRSKLLKSYLG

SEQ ID NO: 18739 - protein, 95 aa, Oxalis tuberosa
LYAGINISGTNGEVMPGQWEYQVGPSVGIEAGDHIWASRYILERITEQAGVVLTLDPKPTDGDWNGAGCHTNYSTKSMRDEGGFEVIKKAIFNLS

SEQ ID NO: 18740 - protein, 1550 aa, Nostoc sp. PCC 7120
MKAQLPDNEVQRIAALLEYKILDTPPEAAFDDITRLASYICGTPIALISLIDQNRQWFKATFGLERRETPRDEAFCAHTILESEAFIVPDATADERFATNPLVISDPKIRFYAGVPLTNPEGYSLGTLCVIDYIPRNLSFEQIEALQILGRQVIKQLELRRNLANLVLVNNQHKQAQKIRHPFFKKIAGGFGLASVFLVLLGLASYQAEIELIHNGNQVQTTQESINNLEQLLSQMKDAETGQRGYILTGKDPYLQTYQTALANIDQKFDELRNATVDPVRQQRLVILKPLITAKITELNQTIKLRQNLGFQAALQVIQSDQGQTLMDDIRKVMREMETENKVRLQQQLQAVKASEQKVIFILAIAIVSGFIILAVVYYLIYCEVIARQSMENILNEERNFISAVLDTVSALVIVLDSQGRIVRFNQACEVITGYSFDEVRGRHFWNLFLLPEDVESSKEFFAKFPADPTVPSVQESENYWVTKDGSRRLIAWSRTILQNHEGSVEYIIGTGIDITERKRADKHLTIQYAITRVLAESTTITEATPQILQAICETLGWNVCEIWMVNQQANFLSFFDLWHHTSLEMQEFRTQSQPITFASGIGLPGRIWASGQPIWLTDIVNDGSFLRNQLAAQVGLRGAFGFPIRSGQKILGVITCFSHQVQPHDPDLAKIMDSIGEQVGQFIHRKQAEEELQRQNLRSQLFTEITLKIRQSLQIEEILQITVKEVQKILQTDRVLIYQLLPDGSGSLIIEAVVAGWAAIKGQNITDFYLQTEYQQQYCLQQYRLRHLEAIANLDLGEIQQSHLELLRKFGVKANLVIPILVKDELCGLLIVHQCATSRQWTSFETHLLRQIADQVGIAVAQAQLLEVETRQRQELEVARSQAELASHAKSAFLANMSHEIRTPMNAVLGMTGLMLETLLNQEQRDFMETIRISGDALLTLINEILDLSKLEAGEMALENLNFNLSTCVEEVLDLLAPQAHSKGLEIAALIYRHVPIQLQGDASRLRQILMNLIGNAIKFTSFGEVVMRVELRSETPTTAIIHFAVTDSGLGITLEDQHKLFTPFTQVDASTTRKYGGTGLGLAICKQLVTLMGGEIGVESQLGKGSKFWFEIPFAKQLQPVSFVEDCGLLNNRRLLVVDDHATNRKIIYHQVSRWGMQVDQADRAVAALSMIVEACQQNKPYDVILIDMQMPEMDGMALGKQIKANSAIPPTPLIMLTSTNQRDEVQQAIKIGFAAYLVKPVKSSRLLDTIMSVLKTPSQLEAEKLEVKSQELEKNNLDHSRNHNFTATQAQNSVSTKTRILLAEDNLVNQKVALKQLQSLGYTADVAANGKEVLQLLKQIPYDLILMDCQMPILDGLEATKEIHRWAESSFASCRRPVIIAMTANAMKEDKQMCLDAGMDDYLSKPVMKEQLATALEYWCQLILNSRQAVEFDLNSLPLDWEHLHQLSENDTEFELHLLQIFVEDVRARLELAKEAIANTDFQQMAQQVHQLKGASTNIGATAMYLAAEKLEQLAQNQERRGSMELITEIEEGVNQIQAFLTRSQIV

SEQ ID NO: 18741 - protein, 515 aa, Bacteroides fragilis NCTC 9343
MKQTTKNILGIGAVVLLSAGVAGVTTYTMLKPENRDSLSFNEQFRQNPGARLAAYDAINAQPVDLTQAAENSLHAVVHIKSTQQAKEQTVTVRDPFAEIFGDIFGNGGRQQRRVQTQPRVGFGSGVIISKDGYIVTNNHVIDGADEIIVKLNDNREFKGRMIGTDPNSDLALVKIEGDDFPTIPVGDSDALKVGEWVLAVGNPFNLTSTVTAGIVSAKARTLGVYGIGGVESFIQTDAAINQGNSGGALVNAKGELVGINAVLSSPTGAYAGYGFAIPTSVMTKVVSDLKQYGTVQRALLGIKGTSLAGDGDMMSDQPIDKSGATLSDKRKEFGVVDGVWVREIVDGGSAAGSDIKVDDVIIGIDGKKVQNFADLQEAIAQHRPGDKVTVKVMRDKKEKNINITLKNEQGTTKIVKDAGMEILGAAFKELPDDLKKQLNLGYGLQVTGVTSGKMADAGVRKGFIILKANDQPMRKVSDLEEVMKAAVKSPNQVLFLTGVFPSGKRGYYAVDLTQE

SEQ ID NO: 18742 - protein, 95 aa, Oxalis tuberosa
LYAGIDISGTNGEVMPGQWEYQVGPSVGIEAGDHIWASRYILERITEQAGVVLTLDPKPIDGDWNGAGCHTNYSTKSMRDEGGFEVIKKAIFNLS

SEQ ID NO: 18743 - protein, 594 aa, Hortaea acidophila
MAAHLLLGALMLGSALAISYHKPAWIPLGDSLSPRLGQDVTNGNGVLGTLDAPRLAKFLPDTHASRHRRKGYSPTDIGIGDVPVTGVTRYYNFTITEQNIAPDGVVRSGMVVNGGYPGPTIEANWGDYFEISVVNALPNEGTSIHWHGLIQHETPYMDGVPGIVQCPIAPGGNFTYRFRADLYGTSFYHSHYSAQYTGGIYGAMIIHGPTENAQYDEDIGPVLLNDWYHLPPPQSNNNLINGKMNVSRQRCTPNAGISKFTFQSGKTYRLRLINAGAEGMQKFSIDGHTMTVIANDFVPLKPYQTDVVTLGIGQRSDIIVTATGKAGQSYWMRSDLGLNALSNPAGCTNNDGVSPLALAAIYYEGADTNSVPTTNSTVPESSIQSCMNDPLNMTVPYYSLTPSTTPAMSQNIDITFASNGTNYLFYMNNSTFRADYNDPILLEAKLGQTVFPAEENVISTGNASSVRFVLYNYAFTGAHPMHMHGHNYWVLAEGYGTWDGTVTNAGNPQRRDVQLLPPAQVNADLVVTSPSYIVLQFNADNPGVWPLHCHIAWHVSAGLYVSILENPTAIKSMHIPKPAAWTGKDVPDQIDSGL

SEQ ID NO: 18744 - protein, 95 aa, Oxalis tuberosa
LYAGINISGTNGEVMPGQWEYQVGPSVGIEAGDYIWASRYILERITEQAGVVLTLDPKPIDGDWNGAGCHTNYSTKSMRDEGGFEVIKKAIFNLS

SEQ ID NO: 18745 - protein, 443 aa, Nostoc sp. PCC 7120
MEETLKILVVDDDEVDRMAVRRALVKAGVRMEMSEVSDGSTALSILRHRSFDCAFIDYRLPDQDGLNLIETIRGLNIKIPLVVLTSQGDEQIAVELMKAGATDYLSKFRVSSETLAQVLRNAIRLYRAEMQTTIAYQQLRESHEQLVRKNQELERQRQQIQIQNLKLLEASRLKSQFLATMSHELRTPMNAIIGFAQILSRPKFGNLTGQQADMVERILNNGKHLLMLLNEVLDFSKLEEGRLELKPELFDLTKVINAVVMEMRSLAEAKKLSLLVQIDLQNSLLVNDPVRIKQILINLLSNAIKFTDSGSIWIDVKDLPGSWVEIKVKDTGIGIAAKDFKYIFEAFRQVDQSITRKYPGTGLGLAIIDSLVQMMSGKIFLESQLGVGSIFTITLPRQLPLSNSSLSSSSVQDAKEMMQPDHKVHHPTAKSNPTARKYHNLKL

SEQ ID NO: 18746 - protein, 716 aa, Zea mays
MATADQSRIFMKDVKRVIIKVGTAVVTRHDGRVSTGNFGVLCEQVKEINALGYEVIIVSSGAVGVGKQRLNYRKLVNSSFADMQKPQTELDGKACAAVGQSGLMALYDMLFTQLDVSSSQLLVTDSDFENPNFRERLRETVESLLDLKVVPIFNENDAISTRKAPYEDSSGIFWDNDSLAGLLAIELKADLLVLLSDVDGLYSGPPSEPQSKMIHTYIKDKHYSEITFGDKSRVGRGGMTAKVKAAFVASNSGTPVVITSGFASQSIVRVLQGEKIGTLFHKDASLWEPSKDVSAREMAVAARECSRRLQNLSSDERKKILLDIADALEQNEDLIRTENEADVSAAQDAGYQKSLVDRLTLKPEKIASLAKSIRTLANMEDPINQILKRTEVAEDLVLEKTSCPLGVLLIVFESRPDALVQIASLAVRSGNGLLLKGGKEAMRSNTVLHKVITGAIPDNVGQKLIGLVTSRDEIADLLKLDDVIDLVIPRGSNKLVSQIKASTKIPVLGHADGICHVYIDKSADMNMAKRIVMDAKTDYPAACNAMETLLVHKDLIKAPGLDDILLSLKTEGVAIYGGPVAHEVLCIPKADSFHHEYSSMACTIEFVDDVQSAINHIHRYGSAHTDCIITTDDKVAETFLRQVDSAAVFHNASTRFSDGARFGLGAEVGISTGRIHARGPVGVEGLLTTRWIMRGSGQVVNGDNDIAYTHKNLPLP

SEQ ID NO: 18747 - protein, 123 aa, Glycine max
  misc_feature (55)..(55): Xaa can be any naturally occurring amino acid
  unsure (1)..(123): unsure at all Xaa locations
AHVSGGIRYHPEADPDEVNAVAQLMTWTAAVANLPYGGAEGGPGRDPWKVRVSAXEGVTRVYTHALQDVIGSHTNVPPPDTGAGPHNTVWFLDELYKVPGHSAAVYTGKPIDLDDTVKLYADT

SEQ ID NO: 18748 - protein, 127 aa, Brassica napus
MAETLKEDSIMIREVWNDNLLEEFALIREIVDKYTFIAMDTEFPGVVLKPVETFKYNNDLNYRTLKENVDLLKLIQLGLTFSDEDGNLPTCGTDKFCVWQFNFREFNIGEDIYASESIELLRQCGID

SEQ ID NO: 18749 - protein, 1169 aa, Arabidopsis thaliana
MSSTAASSTVGGGGSSEISGVKKTSKRPKYSRFTQQELPACKPILTPRWVILTFLVAGVVFIPLGVICLFASQGLRFCGFIEDMFHSYLKVVEIVDRYDTDCIPTSSRNNMVAYIQGEGDKICKRTITVTKAMKHPVYVYYQLENFYQNHRRYVKSRNDAQLRSPKEEHDVKTCAPEDNVGGEPIVPCGLVAWSLFNDTYSFSRNSQQLLVNKKGISWKSDRENKFGKNVFPKNFQKGAPIGGGTLNISKPLSEQEDLIVWMRTAALPTFRKLYGKIETDLHAGDTITVLLQNNYNTYSFNGQKKLVLSTTSWLGGRNDFLGIAYLTVGSICLFLAVTFAVLYLVKPRQLGDPSYLSWNRSAGGCYDAVSVASGFFMSINLRSSGCSSPISATLERRLDSEVQTRANNVSFEQTKEKIRKMLEKVELSVSAYDTSWVAMVPSPSSQNAPLFPQCVKWLLDNQHEDGSWGLDNHDHQSLKKDVLSSTLASILALKKWGIGERQINKGLQFIELNSALVTDETIQKPTGFDIIFPGMIKYARDLNLTIPLGSEVVDDMIRKRDLDLKCDSEKFSKGREAYLAYVLEGTRNLKDWDLIVKYQRKNGSLFDSPATTAAAFTQFGNDGCLRYLCSLLQKFEAAVPSVYPFDQYARLSIIVTLESLGIDRDFKTEIKSILDETYRYWLRGDEEICLDLATCALAFRLLLAHGYDVSYDPLKPFAEESGFSDTLEGYVKNTFSVLELFKAAQSYPHESALKKQCCWTKQYLEMELSSWVKTSVRDKYLKKEVEDALAFPSYASLERSDHRRKILNGSAVENTRVTKTSYRLHNICTSDILKLAVDDFNFCQSIHREEMERLDRWIVENRLQELKFARQKLAYCYFSGAATLFSPELSDARISWAKGGVLTTVVDDFFDVGGSKEELENLIHLVEKWDLNGVPEYSSEHVEIIFSVLRDTILETGDKAFTYQGRNPNNSSDHTSLVLYLTQWLDLLKSMLREAEWSSDKSTPSLEDYMENAYISFALGPIVLPATYLIGPPLPEKTVDSHQYNQLYKLVSTMGRLLNDIQGFKRESAEGKLNAVSLHMKHERDNRSKEVIIESMKGLAERKREELHKLVLEEKGSVVPRECKEAFLKMSKVLNLFYRKDDGFTSNDLMSLVKSVIYEPVSLQEESLT

SEQ ID NO: 18750 - protein, 167 aa, Haloarcula marismortui
KPGAMYRNSSKPAYTRREYISGIPGKKIAQFDMGNNGAGPTYPAQVELVVEKPVQIRHNALEAARVAANRYVQNSGAAANYKFRIRKFPFHVIRENKAAAAAAAAAAADGMRAPFGKPVGTAARVHGANHIFIAWVNPDPNVEEAWRRAKMKVTPTINIDSSPAGNA

SEQ ID NO: 18751 - protein, 459 aa, Propionibacterium acnes KPA171202
MTSMVIIGAGPGGYEAASVAAAGGVDVTVVEETGIGGAAVLTDCVPSKTLIATAEVTSTLRRAAELGLRHTETFEVDLDAVNSRVRQLAQAQSDDISRGLERKGVRLISGRARLATGAPGHLHRVVINDDETIDADIVLLATGTTPRELPAARCDGERILTWKQVYSMREVPEHLIVVGSGVTGAEFASAYDSLGCPVTLVSSRDQVLPGEDPDAAQVLQQVFESRGMEILSRSRAVSAIRDGDGVVVGLEDGRTVRGSHVFMAVGSTPNSADLGLEEVGVAVGPRGHITVDKVSRTNVPGIYAAGDCTGVFALASVAAMQGRIAVWHALGQALQPLDLSLVCSNVFTSPEIATVGVTQTDVDSGKVQARSTRLDLSTNPRAKMQGLHDGFVKLFCRPATGNIIGGVVVSPRASELIHPISVAVAERIPVDAFQHDFTVYPSLSGSVSEAARRLQTFVA

SEQ ID NO: 18752 - protein, 246 aa, Corynebacterium efficiens YS-314
MVSAIRTGYRLIDTAYNYENEGAVGVAIRESGVPREELIVTSKLPGRFHEFELARPRIEESLYRLGLDHIDLLLIHWPNPNRDLYVQAWQALIDARDRGLVRHIGVSNFLPEHIDRLEAETGELPVVNQIELHPYFPQVEQVEWHNARGIVTEAWSPLSNGRGLVDEPLLTDIGRRYGVGGGEVALAWHHARGIVPIPRSTNPERQKSNLEAVHLTLSDEEVSAITALGRPDGRIKDQDPAVYEEF

SEQ ID NO: 18753 - protein, 282 aa, Zymomonas mobilis subsp. mobilis ZM4
MMSPISIPSIRLNDGNDLPAVGFGTYKLNGSAGVSDIVSAIKVGYRLLDSAFNYENEGAVGEAVREAGIARDKLRIVSKLPGRHHHFEEAIATVEESLYRAQLDYYDLYLIHWPNPSKDLYVEAWQALIEARKKGLIRSIGVCNFLPEHLERLIKETGVTPVVNQVELHPYFPQEEQRAWDKAHGIVTESWSPLGRASKLLQDDTIKKIADRLGKSIPQVILRWHVQLGAIPIPKASSKERQIENLSLFDFELSPQDVEIIATLARPDGRLADQDPARYEEF

SEQ ID NO: 18754 - protein, 616 aa, Shewanella oneidensis MR-1
MDHTPQSQLKLLLAKGKEQGYLTYAEVNDHLPADMVDSDQIEDIIQMINDMGIRVFEEAPDADDMMMSEDNTDEDAAEEAAAALATVESELGRTTDPVRMYMREMGTVELLTREGEIVIAKRIEEGINTVQSSVAEYPQAIAMILEQYDQYEADELRLSDIISGFVNPDEEDLGPTATHIGSELSEEDLEDEDDEEDDEDEDGDGDGDDDGNKGPDPEEARERFSQLRTAYESALKIIDAKGREHPESIQALFEIGEIFKEFRLVPKQFDRLVKSMRSMMDRVRVQERLLMKLCVEQAKMPKKNFVKFFTGNETNLDWFEAEKTSNKPYAEGLRMVEEDVQRCRSKLAAIEEETGLVIAAIKDINRRMSIGEAKARRAKKEMVEANLRLVISIAKKYTNRGLQFLDLIQEGNIGLMKAVDKFEYRRGYKFSTYATWWIRQAITRSIADQARTIRIPVHMIETINKLNRISRQMLQEMGREPSPEELAERMMMPEDKIRKVLKIAKEPISMETPIGDDEDSHLGDFIEDTTLELPLDSATSESLKSATHEVLAGLTAREAKVLRMRFGIDMNTDHTLEEVGKQFDVTRERIRQIEAKALRKLRHPSRSEILKSFLDE

SEQ ID NO: 18755 - protein, 96 aa, Actinobacillus actinomycetemcomitans
MNIRPLHDKVILKREDVETKSAGGIVLTGSAATKSTRAKVLAVGPGRLLENGSVHPMHVKVGDTVIFSDGYGVKTEKIDGEEVLIISESDILAIVE

SEQ ID NO: 18756 - protein, 442 aa, Arabidopsis thaliana
MDFSGSFFVIFVTFFFLPPLSSAGSYDSGSGLESLARGMLHSAKDPEFFEWMRGIRRKIHENPETGFQEFKTSQLVRDELDSLGVKYKYPVAKTGVVAWIGSCSKPVFGLRADMDALPLQELVEWESKSKVDGKMHACGHDTHVAMLLGAAKLLQTTKHLIKGTVKLVFQPGEEGYAGAYEMLKDEILDDLDGILSVHVFPSIPSGGIGSRPGTVLAGAGLFTVTVHGQGSHAATPHFSKDPVLAASSAVVALQQIVSRELDPLEAGVVTVGYIEGGHAQNVIPQSAKFGGTFRSLSNDGLLFIQRRIKEISEAQASVYRCKAEVNFEEKKPSLHPVMNNDEGLYEHGKKVAEAMIGKNNFHDFPVTMGGEDFSFFTQKTKAAIFVLGVKNETLGAGKPLHSPYFFVDEEALPVGAALHAAMAVSYLDEHGHSHEEEVKSEL

SEQ ID NO: 18757 - protein, 547 aa, Actinobacillus actinomycetemcomitans
MAAKDVKFGNDARVKMLNGVNILADAVKVTLGPKGRNVVLDKSFGAPTITKDGVSVAREIELEDKFENMGAQMVKEVASKANDAAGDGTTTATVLAQAIVNEGLKAVAAGMNPMDLKRGIDKAVNSVVAELKNLSKPCETSKEIEQVGTISANSDSIVGQLIAQAMEKVGKEGVITVEDGTGLEDELDVVEGMQFDRGYLSPYFINKPETATVELDNPFILLVDKKISNIRELLPVLEGVAKAGKPLLIIAEDVEGEALATLVVNTMRGIVKVAAVKAPGFGDRRKAMLQDIAILTAGTVISEEIGMELEKATLEDLGQAKRIVINKDNTTIIDGIGDEAQIQGRVAQIRQQIEESTSDYDKEKLQERVAKLAGGVAVIKVGAATEVEMKEKKARVEDALHATRAAVEEGIVAGGGVALIRAAGRVVGLQGENEEQNVGIKLALRAMEAPLRQIVANAGEEASVIASAVKNGEGNFGYNAGTEQYGDMIAMGILDPTKVTRSALQFAASVAGLMITTECMVTELPKDDKADLGAAGMGGMGGMGGMM

SEQ ID NO: 18758 - protein, 435 aa, Coxiella burnetii RSA 493
MVDHSAALFNKAQNYMPGGVNSPVRAFGAVGGVPRFIKKASGPYLIDVDEKKYIDYVGSWGPMILGHAHPAVIQAAQEAVQNGLSFGAPCENEIKLAALIGEFMPSIEKVRMVNSGTEATMSALRLARGVTGRSKIIKFEGCYHGHADCLLVNAGSGALTFGMPSSPGVPLGTVQDTLTATFNDLDSVAALFEKYSKDIAAIIVEPIAGNMNLIPAAPDFLTGLRELCNQYGSLLIFDEVITGFRVAKGGAQSLYNIRPDLTALGKIIGGGMPVGAYGGRREIMNQLSPEGPVYQAGTLSGNPVAMAAGLATLKELTAENFYSNLKEKTERLVMGILSRAKAAKIPLTANFSCGIFGLIFTSEERVTRYAQAVNGNVEHFRSFFHKMLDNGVYLAPSAFESGFISAAHTNKEVDNTLDIIENIFSVSETYLRISV

SEQ ID NO: 18759 - protein, 346 aa, Glycine max
MRLGFASWRFILCTLVVFLILQDSVARKIATTSGNEVQLKEVSYDLQKLATEGLVLDSIIQLEGADIKRKNKHVHKDEARVKKGIGFDIEEEEDKNDHKKIVGKDVHGYKPSHEDHKHMDLELNVFFTPNDLKVGKIMPIYFSKKNSSTSPKFLTREEADQIPFSSKHLPSLLKFFSIPKHSPQAKAMKYTLKQCEFESMEGETKFCATSLESLFDFAHYLFGSNAQFKVLTTVHLTNSTALLQNYTISEVKVISVPNVIGCHPMPYPYAVFYCHSQHSDTNLYEVMVEGENGGRVQAAAICHMDTSKWDRDHVSFRVLKVQPGTSPVCHFFPPDNLVWVPLPLPP

SEQ ID NO: 18760 - protein, 437 aa, Ralstonia eutropha JMP134
MSTTNRSDTLSRVGPGSKVGALFRSVWLPALLSSQLQEPGGSPVRLKLLGEELVAFRTKKGEVGITQANCAHRLAPLYYGRVEDDGIRCNYHGWLYNSKGQCLEMQNEPDKAICSKVKIKAYPVAEKADIVWIYMGEGEAPELPKFPWIDLPKSQRNATVWIQESNWLQGMEGELDSSHVSILHTNPATLATSPVHRPYSAVDLTPKLYAKDTPIGILGVARRNADDQYYWRVSQFMVPAFSSIPSVDFPVGGRAFIPIDDYNTYTWDFNYYFKGDLPQDFLDYTGKGLAFPPESNYQSYRLNTGTIIDAFVPVRTAENNYLINRNGGSLSSPSGIHGLNDQDRAMQEGMLATEGSEGRIVDREKEFLVATDIAIVRARRRILSIVQSEDSLEQFRQTIKDGTAYSVEPLDVLSQIDDVDSFVREYKTQLGPQKAGA

SEQ ID NO: 18761 - protein, 323 aa, Anabaena variabilis ATCC 29413
MMADVITDSVPVTVLTGYLGAGKTTLLNHILTYEHGKKVAVIVNEFGEVGIDNQLVIDADEEIFEMNNGCICCTVRGDLIRIIGNLMKRRDKFDHLVIETTGLADPAPVIQTFFVDEDMQSQLSLDAVVTLVDAKHIWQHWDADEAQEQIAFADVILLNKTDLVTLSELDELEKRIRSMNAIAKIYRTRNSELAMDALLGVKAFDLDRALEIDPNFLGEDAHEHDDTVSSVALVQEGELDGEKLNAWISELLRTQGPDIFRMKGILNIAGEDNRFVFQGVHMIFDGRPDRLWKPNEKRKNELVFIGRNLDEAQLKQDFLACFA

SEQ ID NO: 18762 - protein, 438 aa, Zea mays
MLGDQCIIQALDSVSSSSSAPDSTLSGELPSVSRNCVIGNLQVARAQKGGHVEGLVNCCHSKKKKKNRTGSGLWDSATKSWASGMGGDDENSEANMSELIGGIGRELAISCLLRLPRSYYYDVACVNRSFYSLVRSGNLYRLRRAAGIAEQMIYCSCNVLEWEGFEPCRQRWFGIPSMPPIECFMLADKESLAVGTSILVFGKRVEAHVVLRYSLLTNSWTTGEMMNIPRCLFGSASFGKKAIVAGGIGQSGPLSSAELYDSEMQTWTTLPSMSRARQMCSGFFMDGKFYVIGGKAERHNEVLSCAEEFDLENGSWHLIPDMAQGLNGGSGAPPLVAVVNNELYAADYATKEVRKYDKENNAWITLGLLPGRYTSVHGWGIAFRSCGDMLIVIGAMSAGGSGVIEICSWVPNNEQPDWKIIGTRRSGSFVYNCAVMSC

SEQ ID NO: 18763 - protein, 1000 aa, Colwellia psychrerythraea 34H
MHFRRSIGNKLLFAFSFVAGLLLFVSIVAWNGLSLIASTGDIITQQTLPTLSSARELANLSLQITHKTTLLKNVTDEEQRQEISQTLTLLHLAVEDKFIALELLNLNKKNLPSLISLKKDINQGIEQLDLYAKNKITNQQQRDQAFTVVKASVHEISVLSQSQVANASTFALVRLSGLYDLIEQKSNLLQAKQDIDLIIDEDLNLLDKMAALERNALELEQIANLVITTQQYQPLNELTHNKNRLVLLISNLVDSITDPYRANLANIALIKLNLFDNLLDNQQRAIELDQKQSLLHQHISNQLTQLNQGILSLVEKQGELAKKTSQQHQKLVSWSQNVFLITTLLSLIVIVFVMWKVVYQGIVFKLQKHTDAIERLAAGDLEITVESSNDEELKHLAEALDVFREHAIKKQQLEYEQLQTEQELRLHKENLEQLINIRTQELRFTNEKLNSESKAHALAKQQADEANRAKSVFLASMSHEIRTPMNGMIGTLELLTDTKLTSEQQKYAQTILYSGESLLDILNDILDYSKIEAGHIALSYRAIDLGKLGEDVVHLMRARAQNKSLQLHFEKKGNIENWRVADLGKLRQILINLINNAIKFTQRGSIVLSIGVNDESSSGDSEVTFSVTDTGCGIAKDKQADVFQAFTQVDNLQSAVGTGLGLAICQRLVSAMQGTLSLESEENRGSCFAFTIPLARASAEAISAQQVLFLPPQALSQYYQVLIVEDNEINLDVACALVEKLGHKVTAAKDGASALKCMHNNRFDLALLDINLPDIDGVTLSQQLKVIAKEKQTPFKTIAVSAHVFNEDIAKFIKSGFDGFVAKPVQMKKLKPSIAKVMFNVRGFVNQEVEGGAEQETEPCLELKVEMPEAVVIASTNKDSLVESQELSEFLLFDADIPNQDIEYLGSDKVIQLTRLFCQQIDNEYSNFSSLSAIDQHAKLHKLKGAAIGLGLVRLYQLCHTLEINTEDNKLTSSQLLMIKDLAQLSKQSLNQYAQSLKNI

SEQ ID NO: 18764 - protein, 451 aa, Burkholderia pseudomallei K96243
MNAPTEPTAPDTTVRTDAEWLDAHWMPFTANRQFKRDPRIIVEGKGAYYTAADGRQIFDGLSGLWCCGLGHGRAEISDAVARQVARLDYSPAFQFGHPQSFELANRIKAMTPAGLDYVFFTGSGSEAADTSLKLARAYWRAKGKGTKTRLIGREKGYHGVNFGGISVGGIGPNRKLFGQGIDADFLPHTQLPENRFSRGLPERGAELAERLLDLIALHDASNIAAVIVEPFSGSAGVVVPPKGYLQRLREICTAHDILLIFDEVITGFGRTGAMTGAEAFGVVPDIMNVAKQVTNGAQPLGAVIASKDVYDAFMAAGGPDYMLEFPHGYTYSAHPVACAAGVAALDLLVKEDALGRVRELAPYFEAAVHGLKGVRHVADIRNCGLAAGLTIEHAPGEPARRPYEIAMHCWKNGFYVRYGGDTIQLAPPFIAEKREIDSLIGALNDALLATD

SEQ ID NO: 18765 - protein, 151 aa, Brassica napus
  misc_feature (129)..(129): Xaa can be any naturally occurring amino acid
  unsure (1)..(151): unsure at all Xaa locations
KHAEAAGASALLVINDKEDLDEMGCMGGDTSLNVSIPVLMISKSSGDALNKSMVDNKSVELLLYAPTRPAVDLTAGLLLLMAVGTVVVASLWSDLTDPDQANESYSILAKEFSGAGTRKDDPEKEILDXSVTGAVFFIVTAFIFLLLLFYF

SEQ ID NO: 18766 - protein, 506 aa, Cryptococcus neoformans var. neoformans JEC21
MPRQPPAKRARLSTRAISSTSEQPEVGPSRSVNDESPTKLDKGKGKAEATTTQTQEKQGKQSEGEMDATEELEAWQDFAADHYETVEQLPLELHRNFRLLRELDDGTLAQMDTLKKLIRTYVSGRIALEQPRSLSTPLEEAALKKSNREEDSIDAERAEETLSHHDSPQEGEEGVNPASEITAEPANSGEPSLNPSLTDEKQKEPGVPLADGAGGLIIPCSPESQTRVPARAKFPSLPSSPTARHNGAIENDDPNIDSLARAAAQQNRSSSIPLRASRPAGPHSLLPEISRLAREIVRTSDEKVAVAIGAYNAVDRHIRALDSALTAQEASILLGLRPSTLPSNAIDEALDLEGSTGKAGTGQLVDGRSRGQGTGDGVGEGDEREVTLGIGGGGSRKKGKKRKGKPKQREYQDGNEEGKVEENWNIPPDPNEPRYCYCNRVSFGEMIGCDNDECPLEWFHLQCLGFENPPTGKWLCDLCKPKTNGHGAGTSAGAARRSRVSGGRKR

SEQ ID NO: 18767 - protein, 173 aa, Saccharomyces cerevisiae
MSEQLRQTFANAKKENRNALVTFMTAGYPTVKDTVPILKGFQDGGVDIIELGMPFSDPIADGPTIQLSNTVALQNGVTLPQTLEMVSQARNEGVTVPIILMGYYNPILNYGEERFIQDAAKAGANGFIIVDLPPEEALKVRNYINDNGLSLIPLVAPSTTDERLELLSHIADS

SEQ ID NO: 18768 - protein, 210 aa, Haloferax volcanii
MADTIVDAVSRALDEAPGRNFRETVDLAVNLRDLDLNDPSKRVDESIVLPSGTGQDTQIVVFATGETAAEDAADEVLGPDELEDFGDDTDAAKDLADETDFFVAEAGLMQDIGRYLGTVLGPRGKMPTPLQPDDDVVETVNRMKNTVQLRSRDRRTFHTRVGADDMTPDEIAENIDVIVRRLEATLEKGPLNIDSVYVKTTMGPSVEVPA

SEQ ID NO: 18769 - protein, 923 aa, Vicia hirsuta
MELQALWITRLAVACVLCLCIFIRSGSSATGGFESIACCADSNYTDPKTNLNYTTDYKWFSDKSSCRQIPEILLSHRSNVNFRLFDIDEGKRCYSLPTIKDQVYLIRGTFPFDSVNSSFYVSIGATELGEVTSSRLEDLEIEGVFKATKDSVDFCLLKEDVNPFISQLELRPLPEEYLRDFSTDVLKLISRNNLCGIEDDIRFPVDQNDRIWKATSTPSYALPLSLNVSNVDLKGKVTPPLQVLQTALTHPERLEFVHDGLETDDYEYSVLLYFLELNNTLTAGQRVFDIYLNSEIKKENFDVLEGGSKYSYTALNITANGSLNMTLVKASGSKFGPLLNAYEILQARPWIDETSQPDVEVIQKMRKELLLQNQDNEALESWSGDPCMIFPWKGVACDGSNGSSVITKLDLSFNDLKGTIPSSVTEMTNLQILNLSHNHFDGYIPSFPSSSLLISVDLSYNDLTGQLPESIISLPHLKSLYFGCNQHMSDDDEAKLNSSLIITDYGRCKAKKNKFGQVFVIGAITSGSILITLAVGILCFCRYRHRTITLEGFGGKTYPMATNIIFSLPSKDDFFIKSVSVKPFTLEYIELATEKYKTLIGEGGFGSVYRGTLDDGQEVAVKVRSATSTQGTREFDNELNLLSAIQHENLVPLLGYCNEYDQQILVYPFMSNGSLLDRLYGEPAKRKILDWPTRLSIALGAARGLAYLHTFPGRSVIHRDVKSSNILLDNSMCAKVADFGFSKYAPQEGDSYVSLEVRGTAGYLDPEYYKTQQLSEKSDVFSFGVVLLEIVSGREPLNIKRPRVEWSLVEWAKPYIRASKVDEIVDPGIKGGYHAEALWRVVEVALQCLEPYSTYRPCMVDIVRELEDALIIENNASEYMKSIDSLGGSNRYSIVMDKRVLPSTTTMAESTITTQNVSHPQPR

SEQ ID NO: 18770 - protein, 923 aa, Melilotus alba
  misc_feature (64)..(64): Xaa can be any naturally occurring amino acid
  unsure (1)..(923): unsure at all Xaa locations
MELQIIWILRLVVACVLCLCIFIRSASSATKGFESIACCADSSYKDLKTTLNYTTDYIWFSDKXSCRQIPEILFSHRSNKNVRLFDIDEGKRCYDLPTIKDQVYLIRGTFPFDSLNSSFYVSIGATELGEVRSSRLDDFEIEGVFRATKDYIDFCLLKKDVNPFISQLELRPLPEEYLHGLATSVLKLISRNNLGGTEDDIRFPVDQNDRIWKATSTPSSALPLPSNVSNVDLKGSVTPPLQVLQTALTHPERLEFVHDGLETDDYEYSVFLYFLELNGTLKAGQRVFDIYLNNEIKKEKLDVLAGGSKNSYTVLNISANGSLNITLVKASGSEFGPLLNAYEILQARPWIEETNQIDLEVVQMMREKLLLHNQDNEALESWSGDPCMLFPWKGIACDDSNGSSIITKLDLSSNNLKGTIPSTVTEMTNLQILNLSHNHFDGYIPSFPPSSVLISVDLSYNDLTGQLPESIISLPHLKSLYFGCNQHMSDEDTAKLNSSLINTDYGRCKAKKPKFGQVFVIGAITSGSLLITLAVGILFFCRYRHKSISLEGFGGKTYPMATNIIFSLPSKDDFFIKSVSVKPFTLEYIEQATEQYKTLIGEGGFGSVYRGTLDDGQEVAVKVRSSTSTQGTREFDNELNLLSAIQHENLVPLLGYCNEYDQQILVYPFMSNGSLLDRLYGEAAKRKILDWPTRLSIALGAARGLAYLHTFPGRSVIHRDVKSSNILLDNSMCAKVADFGFSKYAPQEGDSYVSLEVRGTAGYLDPEYYKTQQLSEKSDVFSFGVVLLEIVSGREPLNIKRPRIEWSLVEWAKPYIRASKVDEIVDPGIKGGYHAEALWRVVEVALQCLEPYSTYRPCMVDIVRELEDALIIENNASEYMKSIDSLGGSNRYSIVMDKRALPSTTSTAESAITIQTLSHPQPR

SEQ ID NO: 18771 - protein, 729 aa, Candida glabrata CBS138
MMRGFKQRLIKKTTGSSSSKKKDKEKEKEKESKHATPTRKSSSSSIKSGSEKSNKATGNSGVSSSHGSKSHTSSGLTSRSPTVSATTSSSSISSKTGNSQGADDTQTETPNQHQKVSHETPSITISDDNTAKSTPKAHPTLLGAATAISPSSPQSPGSASFGHGVSSGINDDNNSPSYGGSSPGIDIPRSSHSFEKLPTPTKLNPDSDVDLIRTPQRHYSSRFEPSRYTQLTKLPNFDEVSPEERIPLFLAKVDQCNTLFDFNDPSFDIQGKEIKRITLQELIEFIVTNRFTYTHEMYAHIVNMFSINLFRPIPPPVNPIGDIYDPDEDEPVNELAWPHMQLVYEFFLRFVESPDFNHQIAKQYIDQEFILKLLELFDSEDIRERDCLKTTLHRIYGKFLSLRSFIRRSINNIFLQFVYETERFNGIAELLEILGSIINGFALPLKEEHKIFLVRILIPLHKVRCLSLYHPQLAYCIVQFLEKEPLLTEEVVMGLLRYWPKINSTKEIMFLNEIEDIFEVIEPLEFIKIEVPLFVQLAKCISSPHFQVAEKVLSYWNNEYFLNLCIENAEVILPIIFPALYELTSQLELDGTNGEESISDPYMLVEQAINSGSWNRAIHAMAFKALKIFLETNPILYENCNSLYLSSVKETQQRKVEREENWSKLEEYVKNLKISESASGQNLDSASNEGSTEQMTIDVEQKDTHMSSLQSDDDYHETNAVLANDAAEK

SEQ ID NO: 18772 - protein, 705 aa, ASPERGILLUS NIDULANS FGSC A4
MPVRARLRAAFQRRATDDSTAEVPVAATTADKPEVSPEAGRGAEDAVANPQDEIPTEDAQRGVHEVEAVTLTWSKASLIAVFINIWCLYFVNAFQSSIISNLLPYVTSDFESHSLLTTIYVVGDCFSAAVFIPLSKILDIWGRAEGFLFMTILATLGMVIMAACHNLATFCAAYVFYTIGFSGMTYCIDVITADSSKLKNRALAYAFTSSPYIITAFAGPKASEDFYALYGWRWGFGVFSIVFPITAAPLYVLFKLNLKKAKNRGVLARESSGRTFLQSVWHYIIEFDAFGMFVFSAGLVIFFLPFDIADSAPNGWGTGYIIAMIVVGVVMLGIFILHEVYIAPVPMLKFSFLWNRTVVGACLLDATYQISYYCWANYFTSFLQIVNNLTLAESGYVSNTFDVVSGVLLFGVGFLIRKTGRFKWLLYIAVPLYIFAQGLMIYFRRPNQTVGYLVMCQIFISIGGSIFIIIEQLAILAAVDHQHIATVLAILNVVGTIGGAMGNTISGSIWTNTFRKALIRYLPESAMPDLDMIYEDLATQKSYAVGTPTRLAIQKAYGYAQTRMLAAGVGIMSLCFVWTIMIRNINVGKIAQVKGQTAASKPILTTAAFVLRLHNDNTAALAVKRKLLFHTSQNLTMTIASCCADQHSTIAIPIFHINSVPIKEQRSNCSITSSTASICVSDSVSCHGFRNAERRRKMQACDFAR

SEQ ID NO: 18773 - protein, 271 aa, Dehalococcoides sp. CBDB1
MKKLFKNFFGLFISISLVLSMLLAQGCDILQDFSNSPEDNTQNQTNTQNLPDQSDEIGSVPSPVNFVNAVKAVKPSVVSINVELVTRDIFGRTIVEQAAGSGWIIDSNGIIVTNNHVVEDATSITVTLDDGRTFNSVAVRTYPANDLAVIKINATNLPAVKLGDASKLAVGEPVAAIGNALGMGISMTGGWVSRLNTTVEFSDTESLTGLIETDAAINPGNSGGPLVNYQGEVIGITSAKIQEVGVEGIGYAISLYIALPIINNLISQLPA

SEQ ID NO: 18774 - protein, 383 aa, Glycine max
MAGDKQKLFNRLKPFIGVVFLQFGYAGMDILSKAALNKGMSNYVFVVYRHVFAFVVMAPFALILEKKVRPKMTFSIFMKIMILSLLEPVIDQNLYFLGMKYTTATFAVSMYNVLPAITFVMAWILRLEKVKLKSIRSQAKVVGTLATVVGAMVMTLIKGPILDLFGTHASSTHNQQNGGVNLQHAIKGSVMITIGCFSCACFMILQAITIEAYPAELSLTAWICLLGTVEGGVVALVMERKNLSAWSLQWDTKLLAAVYSGIVCSGMAYYIQGAVMKDRGPVFVTTFNPLCMVIVAIMGSFFLAEIMYLGRVVGAIVIILGLYLVVWGKSNDYESSNSITKKHTLPSKQTVEENNGKEEDHSNHGVITLSNLGAGNIARDEQV

SEQ ID NO: 18775 - protein, 377 aa, Dehalococcoides sp. CBDB1
MKKKLHLFSLFLCILIATAAFSAGGCDYLSQPINTDNSDNTPSTSTPLDENWKFPSPQQNLPELANYAMVVARVKPAVVAVDVEYITQDIFGRQTVAIASGSGFIIDPSGYIITNNHVVEGGSTVTVTLSDNRTFTASRVVTDSRTDLAVIKVDTLGEELPFVYIGDSSALEVGEPVAAIGNALGLGITMKGGWISRLDAQITVDQSVTLYGLIGTDAAINEGNSGGPLVNMAGEVIGITSAKIVEVGVEGVGYAININSARTFIEELVNKGYITRPFMGVIGILTVDAAIQSYFKLGIDKGVLLRGIAENGPAEKAGLKANDVILSINGQAVLTDEELILAIHGKKVGDKIEVSYFRDGVTSTVTLILAETPPPES

SEQ ID NO: 18776 - protein, 687 aa, Photobacterium profundum SS9
MVKWNMGLKQNVKTCLALAIAASLSACSSSGSSTSPDPSFGNVTPYACNVSTSAETDDLRMYQVMVESFVNGDDSIGHGTGYGTSHHKGDLQGIIDSLDYIQSLGMNAVWLTPVFDSVPVEGQNHWADRLDATGYFASNYFAIDPRFGSMEKAKELVEEAHKRGLYVFFDGVFGHHKDNVVASPQGNLPQGESNPVSYPESMAFYKEVATYWITELKIDGWRLDQAYQVPTDAWTELRKSVDEASKSVTYVNSDGKTVNPLGYMVAEIWNNENYINETGYGSAENPALCSAFDFPVRYRVVETFAVNENGNGGKGGEWLNEGMSLHSLYPADAKPNLMLGNHDLVRFGDLLQRGNIADVNDDEYWQRHKAALSFQAAYTGPITLYYGDEIGDQVDDFADKAPIETCAINGLCDDHVARSTAKIEGVTTSSDSSLNVSQNDLKKYVTKLMNLRAAHPALSQGERVNVLANDSVYVDHKKSGDDVLLYMVSTQSQSNNIELIASKVGSEGDLVDLITGERFSVSSGKYQIPLNGFVARFLKVEVPSAVGATATKAAVMMTGEGFMAQCDNPTLDEAGPVSKTLYVVGDFADAGWKHKDNRVFEYKGNNTYQAVVDEKAGGYRMQYASKDWSSQYTAEGLELKLGVENILKAGGYGKDTAAMLPEAGKYVWSIQFTDNGLPENIMVSKCQ

SEQ ID NO: 18777 - protein, 158 aa, Zea mays
  misc_feature (26)..(26): Xaa can be any naturally occurring amino acid
  misc_feature (80)..(80): Xaa can be any naturally occurring amino acid
  unsure (1)..(158): unsure at all Xaa locations
REDDSLLAKLHRTSSSSSSSSDDQEXEVIVDTARLSRRSKTMVLKEMVTENLAAYTAHDDGYHYQTPVPAVVVYTHAHHXEGEHFPEPAPPPHVETHHPFCFHKIEDDDPKIQTLPQAPEEEKKGLLDNIKEKLPVGHNMPEDAVVAAAAPAVHAPPP

SEQ ID NO: 18778 - protein, 92 aa, Oxalis tuberosa
GINISGTNGEVMPGQWEYQVGPSVGIEAGDHIWASRYILERITEQAGVVLTLDPKPIDGDWNGAGCHTNYSTKSMRDEGGFEVIKKAILNLS

SEQ ID NO: 18779 - protein, 148 aa, Haloarcula marismortui
TDLSAQKRLAADVLDVGKNRVWFNPERQGDIADAITREDVRELVDEGAIQAKDKKGNSRGRARERQKKRAKGHQKGAGSRKGKAGARQNSKEDWESRIRAQRTKLRELRDEGTLSSSQYRDLYDKAGGGEFDSVADLERYIDANHGDA

SEQ ID NO: 18780 - protein, 450 aa, Rhynchosporium secalis
MREVISINVGQAGCQIANSCWELYCLEHGIQPDGYLTEERKAAEPDQGFSTFFSETGQGKYVPRTIYCDLEPNVVDEVRTGTYRSLFHPEQMITGKEDASNNYARGHYTVGKELIDQVLDKVRHVADNCSGLQGFLVFHSFGGGTGSGFGALLMERLSVDFGKKVKLEFCVYPAPQTATSVVEPYNSILTTHTTLEHSDCSFMVDNEAIYDICRRNLGLERPNYENLNRLIAQVVSSITASLRFDGSLNVDLNEFQTNLVPYPRIHFPLVAYAPVVSAAKASHEANSVQEISMSCFEPNNQMVKCDPRNGKYMATCLLYRGDVVTKDVHGAVATLKTKRTIQFVDWCPTGFKIGICYQPPEMVPNGDLAKVNRAVCMLSNTTAIAEAWSALSHKFDLMYSKRAFVHWYVGEGMEEGEFSEAREDLAALERDYEEVATDSLEGDDGAEAEY

SEQ ID NO: 18781 - protein, 95 aa, Oxalis tuberosa
  misc_feature (75)..(75): Xaa can be any naturally occurring amino acid
  unsure (1)..(95): unsure at all Xaa locations
LYAGINISGTNGEVMPGQWEYQVGPSVGIEAGDHIWASRYILERITEQAGVVLTLDPKPIDGDWNGAGCHTNYSXKSMRDEGGFEVIKKAIFNLS

SEQ ID NO: 18782 - protein, 196 aa, Burkholderia vietnamiensis G4
MENQQVISGGETGKRTEIATLAGGCFWCTEAVFLDVDGVTAVQSGYAGGHTRNPGYRDVCDGDTGHAEVVNVTFDPARIGYREILEIFFATHDPTQLNRQGNDVGTQYRSVVFTHSDAQRDTALDVIAELEREQVFGQPIVTQVVPLDGNYWPAEDYHQNYYARNPEQGYCSVVIGPKLAKFRQKFAHRLKSQRGA

SEQ ID NO: 18783 - protein, 313 aa, Solanum demissum
MTCTNYEMAFFPTNFMLQTPHHEDEHQPSTSLNPILPSCSPQDFHGIASFLGKRSMSFSGMDGNNACEENHGEDDLSDDGSQAGEKKRRLNMEQVKTLEKNFELGNKLEPERKMQLARALGLQPRQIAIWFQNRRARWKTKQLEKDYEVLKRQFDAIKAENDALQTQNQKLHAEIMSLKNREQPTESINLNKETEGSCSNRSENSSEIKLDISRTPAIDSPLSNHHPNISSRPFFPPSMIRSNNNNNNNGVVVPHQLFHINSSSSRQDLKLMDQNTTTTNNNSSVKEESLSNMFCGIDDQTSFWPWLEQQHFN

SEQ ID NO: 18784 - protein, 67 aa, Puccinellia tenuiflora
ARLTKCKYLAGDYLSLADLNHVSTTLCLGATPHASLFDAYPHVKAWWTDLLAKPSVQKVAALMKPSS

SEQ ID NO: 18785 - protein, 361 aa, Glycine max
MAPSFDFASSLLCTEDSTVFDESHNNGGTIMTAMGVYEDTRSPRRPHFDEEPDDLPLLSDESLVMMVEKECQHWSGLRYLNKFQTGDLDFGARMEAIDWIHKVRSHFGFGPLCGYLSINYLDRFLFAYELPKGRVWTMQLLAVACVSLAAKLDETEVPLSLDLQVGESKFLFEAKTIQRMELLVLSTLKWRMQAITPFTFLDYFLCKINDDQSPLRSSIMRSIQLISSTARGIDFLEFKPSEIAAAVKPSEIAAAVAMYVMGETQTVDTGKAISVLIQHVEKERLLKCVQMIQELSCNSGSAKDSSASVTCLPQSPIGVLDALCFNYKSDDTNASSCVNSSHNSPVAKRRKLNKTCGAEQL

SEQ ID NO: 18786 - protein, 591 aa, Helianthus annuus
MCGILAVLGCSDDSQAKRVRVLELSRRLKHRGPDWSGLYQHGDNYLSHQRLAIIDPASGDQPLFNEDQTIVVTVNGEIYNHEELRKRLTAAGHKFRTGSDCDVIAHLYEEHGEDFVDMLDGMFSFVLLDTRNNTYIAARDAIGITSLYIGWGLDGSVWISSELKGLNDDCEHFEVFPPGHLYSSKTGGFKRWYNPLWFAETIPSTPYDPLVLRCAFENAVIKRLMTDVPFGVLLSGGLDSSLVASITARYLAGTKAAKQWGAQLHSFCVGLEGSPDLKAAREVADYLGTVHHEFHFTVQDGIDAIEDVIYHIETYDVTTIRASTPMFLMSRKIKSLGVKMVISGEGSDEIFGGYLYFHKALNREEFHQETCRKIKALHQYDCLRANKSTSAWGLEARVPFLDKEFINVAMSIDPEAKMINMDQKRIEKWVLRRAFEDEEHPYLPKHILYRQKEQFSDGVGYSWIDGLKAHAELHVTDKMMLHAEHIFPHNTPVTKEAYYYRMIFERLFPQNSAKLTVPGGASIACSTAKAIEWDASWSNNLDPSGRAALGAHNAAYKKNMGPVGQVKLGPNIIDNVPRMMDISASELVIQG

SEQ ID NO: 18787 - protein, 524 aa, Catharanthus roseus
MEMDMDTIRKAIAATIFALVMAWAWRVLDWAWFTPKRIEKRLRQQGFRGNPYRFLVGDVKESGKMHQEALSKPMEFNNDIVPRLMPHINHTINTYGRNSFTWMGRIPRIHVMEPELIKEVLTHSSKYQKNFDVHNPLVKFLLTGVGSFEGAKWSKHRRIISPAFTLEKLKSMLPAFAICYHDMLTKWEKIAEKQGSHEVDIFPTFDVLTSDVISKVAFGSTYEEGGKIFRLLKELMDLTIDCMRDVYIPGWSYLPTKRNKRMKEINKEITDMLRFIINKRMKALKAGEPGEDDLLGVLLESNIQEIQKQGNKKDGGMSINDVIEECKLFYFAGQETTGVLLTWTTILLSKHPEWQERAREEVLQAFGKNKPEFERLNHLKYVSMILYEVLRLYPPVIDLTKIVHKDTKLGSYTIPAGTQVMLPTVMLHREKSIWGEDAMEFNPMRFVDGVANATKNNVTYLPFSWGPRVCLGQNFALLQAKLGLAMILQRFKFDVAPSYVHAPFTILTVQPQFGSHVIYKKLES

SEQ ID NO: 18788 - protein, 412 aa, Staphylococcus epidermidis RP62A
MSEQEKNQHHYRNSSQKRHTFPWIKTIIVAIIAGIIGALLVLGIGKLLNKNGFNNESATVHQVSNSHGGNQLDGKSNQYKSVHDMIKDVSPAIVGVINMQKSTNLDDLFNGKASKSKEAGIGSGVIYQISEGSAYIVTNNHVVDGASEIKVQLHNSKQVDAKLIGKDALTDIAVLKIKDTKGIKAIQFANSSKVQTGDSVFAMGNPLGLEFANSVTSGIISASERTIDANTSAGNTKVNVLQTDAAINPGNSGGALVDINGNLVGINSMKIAAAQVEGIGFAIPSNEVRVTIEQLVKHGKIERPSIGIGLINLSDIPENYRKELHTHKDKGVYVAKVDSENAIKKGDIITGIDGKQIKDDTDLRTYLYESKKPGETVTLKVIRDGKTQDINVKLKKQASASESSQSQSQFAQ

SEQ ID NO: 18789 - protein, 430 aa, Shewanella oneidensis MR-1
MTRSEALFEQAKKTIPGGVNSPVRAFNGVGGSPLFIEKADGAYIYDADGKAYIDYVGSWGPMILGHNHPKIREAVLAAVHNGLSFGAPTELEVQMAEKVIAMVPSIEQVRMVSSGTEATMSAIRLARGFTNRDKILKFEGCYHGHADCLLVKAGSGALTLGQPSSPGIPEDFAKHTLTAVYNDLDSVRSLFEQYPTEISCIIIEPVAGNMNCIPPIPGFLEGLRSLCDEFGALLIIDEVMTGFRVSKSGAQGHYGVTPDLTTLGKVIGGGMPVGAFGGRKDVMQFIAPTGPVYQAGTLSGNPIAMSAGLAQMEALCEEGLYEALSAKTKRIAEGFKAAADKHGIPMAINYVGGMFGFFFTEQEHITRFDQVTKCNIEHFRTFYHGMLDEGVYLAPSAYEAGFLSMAHGEEELRLTLEAADRVLARMKAAN

SEQ ID NO: 18790 - protein, 558 aa, Helianthus annuus
MCGILAVFGCVDCSQAKRARILELSSRLRHRGPDWSGLHSEEDCYLAHQRLAIVDPASGDQPLYNEDKSIIVTVNGEIYNHKEFREQLKSHKFNTGSDCEVIAHLYEEHGEDFVHMLDGMFSFVLLDTRNKSYIAARDAIGITPLYIGWGLDGSVWFASEMKALSDDCEQFMSFLPGHIYSSKNGGLRRWYNPPWWSELVPSTPYDPLVLRNAFEKAVIKRLMTDVPFGVLLSGGLDSSLVAAVASRHLVDSEAYCQWGSQLHTFCIGLKGSPDLVAAREVADYLGTRHHEFYFTVQEGIDALEEVIYHIETYDVTTIRASTPMFLMSRKIKSLGVKMVLSGEGSDEIFGGYLYFHKAPNKEEFHEETCRKIKALHLYDCLRANKSTSAWGLEARVPFLDKEFINVAMSIDPKWKMIDRDNGRIEKWVLRNAFDDDEKPYLPKHILYRQKEQFSDGVGYSWIDGLRDHANKQVTDSMLANANFVYPENTPATKEAYYYRKIFEKFFPKNAARLTVPGGPSVACSTAKAVEWDASWSKNLDPSGRAALGVHAAAYEDAK

SEQ ID NO: 18791 - protein, 253 aa, Glycine max
MEVGLKKENMGFEETELRLGLPGNGGTEEVLIRKRGFSETETGHEDESATTVDLMLNLSSKEAATTAAAAADPTDKHKTLPKEKTLLPADPAKPPAKTQVVGWPPVRSFRKNMLAVQKSVGEENEKNSSSPNASFVKVSMDGAPYLRKVDLKMYKSYRELSDSLGKMFSSFTIGNCESQGMKDFMNESKLNDLLNSSDYVPTYEDKDGDWMLVGDVPWEMFVESCKRLRIMKGKEAIGLGLAPRAMAKSKNRS

SEQ ID NO: 18792 - protein, 449 aa, Oryza sativa (japonica cultivar-group)
MATRSQNVAAAPQPPQNRGNVAALGKQKAVVAGRPDAKNRRALGEIGNVMNVRLPEGKPLQQAPAGRTANFGAQLLKNAQANAAANKQNAVAPAAVARPAQRQARKAPVKPAPPPPEHVIEISSDSDQSMRQQSEGSASSVRKCSRKKVINTLTSVLTARSKVACGITDKPREVIEDIDKLDGDNELAVVDYIEDIYKFYKVAENECRPCDYIDTQVEINSKMRAILADWIIEVHHKFELMPETLYLSMYVIDRYLSMQQVQRRELQLVGVSAMLIACKYEEIWAPEVNDFILISDSAYTREQILAMEKGILNKLQWNLTVPTAYVFIMRYLKAGASADNKSDKEMEHMAFFFAELALMQYGLVASLPSKVAASAVYAARLTLKKSPLWTDTLKHHTGFTESQLLDSAKLLVTSHSTAPESKLRVVYKKYSSEQLGGVALRSPAVELCK

SEQ ID NO: 18793 - protein, 134 aa, Cryptococcus neoformans var. neoformans B-3501A
MGRTYRIYLAGESVLMCRHCGNHLAVSEGIISKQFTGQHGRAILVHTVVNAYSGEAEDREMRTGRHTVRDIYCRVCHTTLGWKYDFAFEHDQKYKEGKYILEREMITEKPERRDIISGKPRIEEIPIREILTRV

SEQ ID NO: 18794 - protein, 395 aa, Bacteroides thetaiotaomicron VPI-5482
MYGKMKEHLSQTLAEIKEAGLYKEERLIESAQQAAITVKGKEVLNFCANNYLGLSNHPRLIKASQEMMERRGFGMSSVRFICGTQDIHKELEAAISDYFQTEDTILYAACFDANGGVFEPLFSEEDAIISDSLNHASIIDGVRLCKAKRYRYANADMKDLERCLQEAQAQRFRIVVTDGVFSMDGNVAPMDQICDLAEKYDALVMVDESHSAGVVGATGHGVSELYKTYGRVDIYTGTLGKAFGGALGGFTTGRKEIIDLLRQRSRPYLFSNSLAPGIIGASLEVFKMLKESNALHDKLVENVNYFRDQMTAAGFDIKPTQSAICAVMLHDAKLSQIYAARMQEEGIYVTGFYYPVVPKEQARIRVQISAGHEKAHLDKCIAAFIKVGKELGTLK

SEQ ID NO: 18795 - protein, 461 aa, Thermoanaerobacter tengcongensis MB4
MPVKVTMDKIVALAKNRGFVFPGSEIYGGLANTWDYGPLGVEMKNNIKRIWWKKFIQESPYNVGIDSAILMNREVWVASGHVASFSDPLMDCKECKSRFRADQLIEDYIKEKGLDISIEGWTNEQMMEFIKEHKVPCPKCGAHNFTEIRKFNLMFKTYVGVTEDSKSEVFLRPETAQGIFVNFKNVQRTSRKKIPFGIGQIGKSFRNEITPGNFIFRTREFEQMELEFFCKPGEDMEWFNYWRQFCMDWLVEFGLKRENLRFRDHKKEELSHYSTATTDIEYNFPFGWGELWGIANRTDYDLRQHMEHSGEDMTYTDPVTGEKYIPYCIEPSVGVDRLMLAFLVDAYDEEEVEGETRVVLRLHPAIAPVKVAVFPLSKKLNEAAYKIYLDLKKKFPAEYDESGSIGRRYRRQDEIGTPFCVTYDFDSENDHKVTIRDRDTMEQIRIDIDQVDKYLEEKLKF

SEQ ID NO: 18796 - protein, 446 aa, Lycopersicon esculentum
MKKVKRKLGKYEVGRTIGEGTFAKVKFARNTETGENVAIKVLAKSTILKHRMVEQIKREISIMKIVRHPCIVRLHEVLASQTKIYIVQEFVTGGELFDKIVHLGRLSEDEARRYFQELIDAIAHCHSKGVYHRDLKPENLLLDFQGNLKISDFGLSALPQQGVELLYTTCGTPNYVAPEVLGNRGYDGAAADVWSCGIILYVLMAGYLPFDETDLPTLYTKIKAAEFSCPFWFSPGATSLIQKIIDPNPQTRIKIDGIKRDPWFRKNYRAVKAKADEVVNLDDIHAVFDDIEDAFVSEKSEDSESGPLVMNAFEMITLSQGLNLSALFDRRQDYVKRQTRFISRQPAKVVIETIEAAAESLGLKVHTRDYKTRIEGVTANRAGQFAVVLEVFQVAPSLFMVDVRKAAGDTLEYHKFYKTFCTKIDDVIWKPKEGMSNAVLLRTRTR

SEQ ID NO: 18797 - protein, 140 aa, Glycine max
MGRSPCCSKEGLNRGAWTAHEDKILREYIRVHGEGRWRNLPKRAGLKRCGKSCRLRWLNYLRPDIKRGNISPDEEELIIRLHKLLGNRWSLIAGRLPGRTDNEIKNYWNTNLGKKVKDGHQTTTGNNQNMPNPSPSLSPP

SEQ ID NO: 18798 - protein, 440 aa, Neurospora crassa
MVSSEVRDLLAQVPNWSQADRPAAFRTIITTITSSPDPSHFAADLKAVTDAIFLESLGVVATRALVIDLIDALKSLASGGPSADSINSTTSSIWLDVGKAIQQHIQSNPTLATSLVDQTATIYEELLAAAHESQNSFTDAAKTLAAIPLDSSQRRVTDKYKADLWIRIIRNYLEDDDATSAETYLNKLKNIIHNVADDNPVLNLHFKLSAARIQDSNRQFLAASQSYYEISLSPAIAEEERLHTLSMAIKCAVLAPAGPPRSRVLARLYKDERSASLEEFGILEKMFLDRLLARAEVEKFAQGLAPHQLATTSDGSTVLAKAMVEHNLLAVSRLYRNIGFDALGSWLGLDSGNKAEEITARMIEQGRLAGSIDQIDRIIYFESGLEASGEKGSGRAEVPVGKEMRRQDGMVQALAEDLERITDDLLVEFPQLVPAGVPGN

SEQ ID NO: 18799 - protein, 445 aa, Taxus cuspidata
MKKTGSFAEFHVNMIERVMVRPCLPSPKTILPLSAIDNMARAFSNVLLVYAANMDRVSADPAKVIREALSKVLVYYYPFAGRLRNKENGELEVECTGQGVLFLEAMADSDLSVLTDLDNYNPSFQQLIFSLPQDTDIEDLHLLIVQVTRFTCGGFVVGANVYGSACDAKGFGQFLQSMAEMARGEVKPSIEPIWNRELVKLEHCMPFRMSHLQIIHAPVIEEKFVQTSLVINFEIINHIRRRIMEERKESLSSFEIVAALVWLAKIKAFQIPHSENVKLLFAMDLRRSFNPPLPHGYYGNAFGIACAMDNVHDLLSGSLLRTIMIIKKSKFSLHKELNSKTVMSSSVVDVNTKFEDVVSISDWRHSIYYEVDFGWGDAMNVSTMLQQQEHEKSLPTYFSFLQSTKNMPDGIKMLMFMPPSKLKKFKIEIEAMIKKYVTKVCPSKL

SEQ ID NO: 18800 - protein, 426 aa, Shigella flexneri 2a str. 301
MSKSENLYSAARELIPGGVNSPVRAFTGVGGTPLFIEKADGAYLYDVDGKAYIDYVGSWGPMVLGHNHPAIRNAVIEAAERGLSFGAPTEMEVKMAQLVTELVPTMDMVRMVNSGTEATMSAIRLARGFTGRDKIIKFEGCYHGHADCLLVKAGSGALTLGQPNSPGVPADFAKHTLTCTYNDLASVRAAFEQYPQEIACIIVEPVAGNMNCVPPLPEFLPGLRALCDEFGALLIIDEVMTGFRVALAGAQDYFAVVPDLTCLGKIIGGGMPVGAFGGRRDVMDALAPTGPVYQAGTLSGNPIAMAAGFACLNEVAQPGIHETLDELTTRLAEGLLEAAEEAGIPLVVNHVGGMFGIFFTDAESVTCYQDVMACDVERFKRFFHMMLDEGVYLAPSAFEAGFMSVAHSMEDINNTIDAARRVFAKL

SEQ ID NO: 18801 - protein, 445 aa, Schizophyllum commune
MREIVHLQTGQCGNQIGAKFWEVVSDEHGIEADGLYKGTNDQQLERISVYYNEIGANKYVPRAILVDLEPGTMDSVRSGPLGGLFRPDNFVFGQSGAGNNWAKGHYTEGAELVDAVLDVVRKEAEGTDCLQGFQITHSLGGGTGAGMGTLLISKIREEYPDRMMCTFSVVPSPKVSDTVVEPYNATLSVHQLVENSDETFCIDNEALYDICFRTLKLSTPTYGDLNHLVSFVMSGITTSLRFPGQLNSDLRKLAVNLVPFPRLHFFMTGFAPLTARGSQQYRAVTVPELTQQMFDAKNMMAASDPRHGRYLTVAAMFRGKVSMKEVEEQMQNVQNKNSAYFVEWIPNNVLASQCDIAPRGLRMSVTFLGNSTAIQELFKRVSDQFTAMFKRKAFLHWYTQEGMDEMEFTEAESNMQDLVAEYQQYQDATVEEEGEYEEEVIEDQE

SEQ ID NO: 18802 - protein, 245 aa, Frankia sp. EAN1pec
MGRLENKVAVVTGAGSGIGRTSALLFAAEGAKVVCADLNGSEKETAAEIGTNAVSVCVDVAVGVQVENMVATAVREFGKLDVLYNNAGISGSFGPVHELDEETLDRLLAVNIKGVFFGIKYAVPIMLANGGGSIINTASNAGMVGWKHKAGYSAAKGGVVLLTKSAALDYAKQNIRVNAICPGMTWTGLAAAQAPAPPEDLKVPNPMARFAQPSELAAAALFLASDESSYMTGVAMPVDGGYVAR

SEQ ID NO: 18803 - protein, 440 aa, Ashbya gossypii ATCC 10895
MSSSVQSGVLTLLHTACGAGVLAMPYAFRAFGLLAGGAILACCGASAMVGLVLQSHVAQYVPPRQASFFSLAQISNPELSVVFDCAIAVKCFGVGVSYLVVLGDLMPQLAGTVTAAPWLLDRNVQITFWTAAVIAPLCCMRHLHSLKYASMVAVAAVAYLGALVAARAAWPSPELERLRGPVSLGLPPGTSGGAMLSSFPIFVFAYTCHHNMFSIVNELRDNSLGACLRVVVAAIALAVALYATIGGAGYLTFGDHITGNIIAQYPPAPATTLGRAAIAVLVMLAFPLQCHPARASINHIWHYCIPSHTVAPSEASALIRGGSPPADAAEGPGNEPAAVPLGPPRFAAITAALLIASYAVAVSVTSLARVLAVVGATGSTAISFILPGLFGYQLIGSESRADQLPPRTRFLRLLSLLLAAWGLVVMCAGLSAALLFDPTH

SEQ ID NO: 18804 - protein, 195 aa, Triticum aestivum
  misc_feature (110)..(110): Xaa can be any naturally occurring amino acid
  misc_feature (118)..(118): Xaa can be any naturally occurring amino acid
  misc_feature (125)..(125): Xaa can be any naturally occurring amino acid
  misc_feature (144)..(145): Xaa can be any naturally occurring amino acid
  misc_feature (160)..(160): Xaa can be any naturally occurring amino acid
  misc_feature (163)..(163): Xaa can be any naturally occurring amino acid
  unsure (1)..(195): unsure at all Xaa locations
MSLSWWWTRSVGAVRERKDELAGVPEHSFQSVALVVGSTGIVGASLVDILPRSDTPGGPWKVYALSRRPPPPWSLPSSSSLTHIHVDLTDFAAVAEALTPLTDITHVFYXAWSPRATXAENKEAXSAMLRKSSPSSPKLPRLAXXSLKTAQAYWDVQLIXKSXPDRPNEDCALTANLIDKGVSPGIPGRLNTPTS

SEQ ID NO: 18805 - protein, 435 aa, Yarrowia lipolytica CLIB122
MKTSHITVALLAAVATAATIRVDSGNAVTLDIVKRHGDHSVPHSHGDDEDEHDHDHDHDHEGHDHGEELTAEEKAAAKAAKLAERCKTPDRDLNIKYRIGALFAMMGMSALGVLPPVLMNSFFKVSIKSLPLTFLKQFGTGVVISTAIIHLMFGAVLQFMDNPCLGELSYEPTGPAFVLAGLFLAFVIEYTFTKLLEKRSDHLTAPHAHGHSHSDSNSDLEKTGPDVTENTLHISPSAAAAAPGTTHAHGDGNTHGHNHSGEISGGHGGHCLIDPTDKVSVMIMESGIIFHSILIGVTLVLAPNSNFTTLFIAILFHQMFEGVGLGSRIAGLVNTKLLLKLLMCLFFILITPIGMAIGLGVIDVYNGSGSKTTIWVLGVLNGLSAGVLLWAGVVEMLAFDWLFGDLVHTTKRRTIVAFAGLVAGLILMSLIGKWA

SEQ ID NO: 18806 - protein, 606 aa, Ehrlichia ruminantium str. Welgevonden
MFCNIFFVMSSSTYSIIDHEYDVVIIGAGGAGLRATFGMTSVGLSVACISKVFPTRSHTVAAQGGISAALGNVTEDDWRWHMFDTVKGSDWLGDQDAIEYMCKNAAEAVIELERYGVPFSRTSDGKIYQRPFGGMTTEFGKGKPAIRTCAASDKTGHAILHTLYQQSLKHNAEFFVEYFAIDLIMNEVGQCQGVIAWSLCDGTLHRFRSHAVVLATGGYGRIYFSATSAHTCTGDGGGMVSRINLPLEDMEFVQFHPTGIYGSGCLMTEGCRGEGGYLINSEGERFMERYAPKAKDLASRDVVSRAMTLEIREGRGVGPNKDHVYLSISHLGAEVIHDKLPGISETARTFAGVDVTKEPIPVLPTVHYNMGGIPTNYYGQVITLTDSEEKIVPGLFAIGEAACVSVHGANRLGSNSLLDLVVFGRAAAIKAKELIKPGMLHAPINKASEEKIIARFDGIRFSKGSLRVAEVRGKMQHVMQNHAAVFRTAEVLDEGKVKIKDVAKLMPEIVVQDKSMIWNSDLVEALELTNMMPQAVVTMECAANRQESRGAHAREDFPERDDENWMKHTLAWYDAANCSVEIKYKDVAKTTLTNDVQYFPPQRRVY

SEQ ID NO: 18807 - protein, 216 aa, Lycopersicon esculentum
MAAPPARARADYDYLIKLLLIGDTGVGKSCLLLRFSDGSFTTSFITTIGIDFKIRTIELDGKRIKLQIWDTAGQERFRTITTAYYRGAMGILLVYDVTDESSFNNIRNWIRNIEQHASDNVNKILVGNKADMDESKRAVPTSKGQALADEYGIKFFETSAKTNLNVEEVFFSIGKDIKQRLSESDSKTEPQSIRINQSDQAGTAGQGAQKSSCCGS

SEQ ID NO: 18808 - protein, 404 aa, Campylobacter upsaliensis RM3195
MKRVVVTGIGMINALGLDKESSFKAICEGKSGVDKITLFDASEFPVQIAAEVKNFDPLDVVDGKEVKKIDRFIQLGLKAAREAMEDANFDETLDKEEFGVVSAAGIGGLPNIEKNSIICEEKGPRKISPFFIPSALVNMLGGLVSIEHALKGPNISCVTACAAGTHAIGEAYKSIVLGTADKMLVVGAEAAICPVGIGGFASMKALSTRNDDPKRASRPFDKERDGFVMGEGAGALVFEEYEAAKKRGAKIYAELVGFGESADAHHITAPTLDGPLRAMQKALKMASGVKVDYINAHGTSTPVNDKNETAAIRAIFNENLPFVSSTKGQIGHCLGAAGAIEAVISLMAMEKGLVPPTINQIEKDEDCNLDYVPNVAKKAKLDVVMSNSFGFGGTNGCVIFKRVN

SEQ ID NO: 18809 - protein, 448 aa, Enterococcus faecalis V583
MDAKQYVKNIQEKIHQLDQGQTEYLQAVDEFLPTVEGFLEKNPQYIEANVLGVLIEPERIFQFRVPWQDDQGNWHVNRGYRVQYNSAIGPYKGGLRFHPSVNLSVMKFLAFEQIFKNSLTGLPIGGGKGGSDFDPKGKSDAEVMRFCQSFMTELQKHIGPSTDVPAGDIGVGAREIGYLFGMYKRLRNYDAGVLTGKPLGYWGSQARTEATGYGTVYFVKHLLADKNDTFEGKKVAVSGSGNVAIYAMEKATELGATVITCSDSSGFVYDPEGIDVALVKELKEKNRERISKYVETRKGATYYDKESVWNFETAYDIALPCATQNEINEKQAAILVKNGVKVVAEGANMPCTLEAVAVFAKSAVIYCPGKAANAGGVAVSALEMSQNAERLAWSFEKVDGMLDQIMQNIYETCRDTANEYQARDNFVLGANIAGFEKVAAAMLSQGLV

SEQ ID NO: 18810 - protein, 178 aa, Zea mays
MAYQMELGGESSPQRKAGRGKIEIKRIENTTNRQVTFCKRRNGLLKKAYELSVLCDAEVALIVFSSRGRLYEYSNNSVKGTIERYKKAISDNSNTGSVAEINAQYYQQESAKLRQQIISIQNSNRQLMGETIGSMSPKELRNLEGRLDRSVNRIRSKKNELLFAEIDYMQKRSVQEVD

SEQ ID NO: 18811 - protein, 99 aa, Glycine max
NFLYQWAFAIAAAGITSGSIAERTQFVAYLIYSSFLTGFVYPVVSHWFWSADGWASAISPGDRLFSTGVIDFAGSGVVHMVGGVAGFWGALIEGPRIGR

SEQ ID NO: 18812 - protein, 217 aa, Triticum aestivum
  misc_feature (152)..(152): Xaa can be any naturally occurring amino acid
  misc_feature (157)..(157): Xaa can be any naturally occurring amino acid
  misc_feature (209)..(209): Xaa can be any naturally occurring amino acid
  unsure (1)..(217): unsure at all Xaa locations
MANTTMGSTTRSCDAYLLFNGETLLPNGVRAFLCTVALAYCFIGLSAITARFFKSMESITNHSREVVTIDTETNTPIVKHEKVWNYTIADIALLAFGTSFPQISLATIDAIRNLGQLTAGGLGPGTLVGSAAFDLFPIHAVCVVMPRAGSMXKISIXVWVVELFWSFWAYIWLYIILEVWTPNVITLWEALLTGLQYGLLLGHAYAQEXGGPYVSNP

SEQ ID NO: 18813 - protein, 95 aa, Oxalis cf. tuberosa EE259
LYAGINISGTNGEVMPGQWEYQVGPSVGIEAGDHIWASRYILERITEQAGVVLTLDPKPIDGDWNGAGCHTNYSTKSMRDEGGFEVIKKAIFNLS

SEQ ID NO: 18814 - protein, 440 aa, Glycine max
  misc_feature (53)..(53): Xaa can be any naturally occurring amino acid
  misc_feature (200)..(200): Xaa can be any naturally occurring amino acid
  unsure (1)..(440): unsure at all Xaa locations
MEQKGGVLMQRYELGRLLGQGTFAKVYHARNIITGMSVAIKITDKDKILKVGXVMRLIRHPHVVELYEVMASKTKIYFVMEYVKGGELFNKVSKGKLKQDDARRYFQQLISAVDYCHSRGVCHRDLKPENLLLDENGNLKVTDFGLSTLAETKHQDGLLHTTCGTPAYVAPEVINRRGYDGAKADIWSCGVILYVLLAGXEFKFPNWIAPDLRRLLSKILDPNPKTRISMAKIMESSWFKRGLEKPTITRNEDQELAPLDADGVFGACENGDPIEPAKDSKRCNNLNAFDIISYSSGFDLSGLFEETNRKKEARFTSDKPASIIISKLEEICIRLGLKVKKKDGGLFKLEGSKEGRKGSLGIDAEIFEITPVFHLVELKKSSGDTLEYQKLLKQEVRPALKDIVWNWQGEQPQQLQHGVVQKEEQPSYPGISDVAPPQTA

SEQ ID NO: 18815 - protein, 512 aa, Zea mays
PRVRLRNALHTEGVVIHWHGIRQIGTPWADGTAAISQCAINPEETFTYRFVVDKPGTYFYHGHYGMQRAAGLYGSLVVDVAEGEEEPFQYDGELNLLLSDWYHESIHTQMVALSSRPFRWIGEPQSLLINGRGQFNCSLAAAHTQGATNQCAATAANTQCAPVVLPVQPNKTYRLRVASTTSLASLNLAIGNHKLTVVEADGNYVDPFVVDDIDLYSGDSYSVLLTTDQDTSSNYWVSVGVRGRLPKTAPALAVLNYRPNRASDLPALAPPVTPAWDDYGHSKAFTYRIRARAGTPPPPPTAARRIELLNTQNRMDGRIRWSINNVSMVLPATPYLGSLKMGLKSTLAAARPAETFSREYDVTLPPPNPNTTVGDNVYVLAHNTTVDVLLQNANALSRNVSEVHPWHLHGHDFWVLGYGDGAYRGDAADEARLNLRDPPLRNSAVIFPYGWTMLRFVADNPGVWAFHCHIEPHLHMGMGVIFAEAVDLVAKVPNEAVSCGATATALMAGGHL

SEQ ID NO: 18816 - protein, 1798 aa, Streptomyces coelicolor A3(2)
MPATRRTARVRRVAAVTVTALAAALLPPLAARADTPPAPPSDAKLAKTAARHDLTREQFYFVLPDRFANGDAGNDRGGLTGTRLTTGYDPTDKGFYQGGDLKGLTERLDYIKGLGTTSIWMAPIFKNQPVQGTGKDASAGYHGYWITDFTQVDPHFGTNKDLKNLISKAHAKGMKVFFDVITNHTADVVDYEEKSYDYLSKGAFPYLTKDGQPFDDADYADGERRFPRVDSGSFPRTPTVPAAKKNLKVPSWLNDPAMYHNRGDSTWAGESATYGDFNGLDDLWTERPEVVGGMEKIYQRWVEDFAIDGFRIDTVKHVDMEFWTQWATALDAYAAKKGRDDFFMFGEVYSADTSVTAPYVTQGRLDSTLDFPFQDAARAYASQGGSARKLAAVFGDDYKYTTDKANAYEQVTFLGNHDMGRIGTFLKQDAPEAGDAELLKKDRLANELMFLSRGNPVIYYGDEQGFTGAGGDKDARQPMFASRTADYLDDDQLGTDRTHAEAAYDTSAPLYRQISALAELRKANPALADGVQTERYAADGAGIYAFSRTDAKTGTEYVVAFNNAGTEKSAAFATGSAGMTFRGLYGTDATVKSGADSKVTVTVPARSAVVLKAAGRLAAPAAEPTISLHAPDPGATGTVELSADVAGGQLNRVVFAAQTGDGKWRTLGTADHAPYKVTHTVDADTPAGTALRYKAVVVDSAGRTASATAASTTGTPPAEEVPTAASRDYAVVHYKRADGNYDDWGLYAWGDLADGEATTWPGTHPFTGRDAYGAFAYVKLKPGASTVGFLVIDKDGNKDVAADRTIDVTETGEVWIEQGEEQLVTERPEYPAQDTTKAVLHYKRADGNYDGWGLHVWGDAANPTDWAKPLQPVRTDPYGAVFEVPLTDGASSLSYIVHKGDEKDLPTDQALDLKADGHEVWLLSGQEDHLLPQPAGSAAAVDLTTSKAVWIDRNTVAWNGSDGAASTQLLASRTGSITAEGGRLTGDDQQWLRLTKSALTDAQKAKFPHLKESTAWSVDPRDRDRVREALRGQVVAAQRTATGALLAATGVQTAGALDDLYADRATRADLGPVFRHGRPTLSVWAPTAQDVKLEIGDRTVRMRRDDATGVWSVTGPKSWKGKAYRYAVKVWAPTAGEVVTNKVTDPYSLALTTDSERSLVVDLDDRSLAPRGWEHYRKPEAVPLQDAQIQELHIRDFSVADRTADADHRGTYLAFTDKKSDGSRHLRELAEAGTSYVHLLPAFDIATIPERKSEQTTPDCDLAALPAGSEKQQECVTKAAAKDAFNWGYDPYHYTVPEGSYATDPDGTERTVEFRKMVKALNEDGLRVVMDVVYNHTAASGQAKTSVLDRIVPGYYQRLLADGSVANSTCCSNTATENAMMGKLVVDSVVTWAKEYKVDGFRFDLMGHHPKANILAVRKALDELTLRKDGVDGKKIVLYGEGWNFGEVADDARFVQATQKNMAGTGIATFSDRARDAVRGGGPFDEDPGVQGFASGLYTDPNSSTANGTEAEQKARLLHYQDLIKVGLTGNLADYSFTDTHGKEVKGSEVDYNGAPAGYAAAPGDALAYADAHDNESLFDALTFKLPKDTSADDRARMQVLAMATATLSQGPALSQAGTDLLRSKSLDRNSYDSGDWFNALHWNCADGNGFGRGLPPAADNQDKWPYAKPLLGAVEVGCPQITGASAAYRDLLRIRSGEQDFSLATAARVQSRLSFPLSGEDETPGVITMRLGDLVVVFNATPERQEQRVGAAAGTGYRLHPVQAAGADAVVKESAYAAKTGTFTVPARTVAVFQRAG

SEQ ID NO: 18817 - protein, 95 aa, Oxalis cf. tuberosa EE259
LYAGINISGTNGEVMPGQWEYQVGPSVGIEAGDHIWASRYILEGITEQAGVVLTLDPKPIDGDWNGAGCHTNYSTKSMRDEGGFEVIKKAILNLS

SEQ ID NO: 18818 - protein, 577 aa, Streptomyces coelicolor A3(2)
MSQQPSAAPAPTSAVATVSERHDWWRDAVIYQVYPRSFADSNGDGMGDLEGVRTRLPYLRDLGVDAVWLSPFYASPQADAGYDVADYRAVDPMFGTLLDADALIRDAHALGLRIIVDLVPNHSSDQYEWFKRALAEGPGSPSRDRYHFRPGKGKNGELPPNDWESIFGGPAWTRVTEPDGTPGEWYLHLFAPEQPDFNWEHPAVGDEFRSILRFWLDMGVDGFRIDVAHGMVKAEGLPDLGSHEQLKLLGNDVMPFFDQDGVHEIYRQWRRILDEYSDAMGPEGPSAEGRGRVTGGRIFVAEAWTPTVERTANYVRPDELHQAFNFQYLGTHWDAEELRTVIDRTLDAMRPVGAPATWVLSNHDVTRHATRFANPAGLGTQIRLAGDRALGLRRARAATLLMLALPGSAYVYQGEELGLPDVVDLPDEVRQDPAYFRGAGQDGFRDGCRVPIPWTREGSSYGFGDGGSWLPQPAGWGELSVEAQTGEPGSTLELYREALAVRRSTADLGAGDAVEWLRAPEGVVAFRRGDFVCVANTTGESVAVPAHGRVLLASGEITEAAGEAKVPADTTVWWTRA

SEQ ID NO: 18819 - protein, 591 aa, Cyanidium caldarium
MDVDYQPRSAYMIAAGSRRTQTHKCGTFEKLQEPGDPDSVLTGIILRSSEGAHQERSDASGLDIIIGTWSPSHRTSALVDPRGLAAYADELLAAADIDIASLTEEGGLAPQNSANQPSRISFPGSLGAYVRGLEQQYRSERMIDRAPSATEIESRKSKKAALKSQNKMTSSRKETRSSSSQARARQQKGRKSEQAPGVPVHMRAGPRTKNTVTVRDPFADNQSANDGSTVPVEEVYSNSETEEAESQIESDELLDFIVEEVDPADVDLSTVEAKDDTIRSYLREIGRYQLLHPGEEIELSKQVCILMDLEQFQRSFREEHGKSPTESEWAQGCGYGDDVEKLREHIRDGRKAKERMVTANLRLVVSIAKRYSNRGVALQDLIQEGSIGLIRGVEKFDAERGFRFSTYATWWIRQSITRAISDSSRSIRLPVHVHDTISLIRKQTKALQVELGRPPSEEEICESVGIDRAKYRLVMECSRNIVSLETPLRSGDDVHFLGESLIAPEERAEENCSRDTLRESIEKVLHCLSTREREVIRMRFGLTDGRPRTLEEVGSRFNVTRERIRQIESKALKKLRTPAENNFLDEYLGEV

SEQ ID NO: 18820 - protein, 530 aa, Zea mays
MAAAPPPKADELQPFPPKEQLPGVAFCITSPPPWPEAILLGFQHFVVMLGTTVIIPSALVPQMGGGNEEKARVVQTILFVAGINTLFQTLFGTRLPVVMGGSYVFVGPTISIVLAGRYSNEADPHEKFLRTMRGTQGALLVASTIQIILGFSGLWRNVVKLLSPLAAVPLVSLVGFGLYELGFPGVAKCVEVGLPELLLLVVFSQYLPQVLDFGKSVFSRFSVLFTVAIVWLYAYILTIGGAYKNSPPKTQVHCRVDRSGLISGAPWISVPYPFQWGAPTFDAGEAFAMMMTSFIALVESTGAFIGASRYASATMIPPSIISRGVGWQGIGLLLDSFFGTANGTSVSVENIGLLALTRIGSRRVVQISAGFMIFFSVLGKFGALFASIPLPVFAGMYCLFFAYVGGVGLSLLQFCNLNSFRTKFIMGFAFFMGLSVPQYFNEYTAVASYGPVHTGARWFNDMINVPFTSKPFVAGLVAYILDNTLQVKESAVRKDRGNHWWEKFRSFKKDARSQEFYSLPFNLNKFFPSV

SEQ ID NO: 18821 - protein, 278 aa, Staphylococcus epidermidis RP62A
METVQFYNGRTMPKIGLGTYRVKDGDECRESVKYAIEQGYRSIDTAMIYGNEETVGQGIKEGLESTGLSREDLFITSKLWLTDFGRQNVEDAYRQSVAKLGLDYLDLYLMHWPGTNEAVMIDTWRGMEDLYKQNQVKNIGVSNFTPEHFEALLAQVSIKPVINQVEFHPYLTQNELRKYLEAQNIIMESWSPLMNSQILHDEVINEVANEVGKTPAQVVIRWNIQHDVVVIPKSVTPHRIEENLDVWNFELSDNQMERIDQLNQDKRIGPNPLEFNGK

SEQ ID NO: 18822 - protein, 152 aa, Zea mays
PTRPRTRGLKSWAVMKKDAANLGLRFFLKVFEIAPSAKQMFSFLRDSDVPLEKNPKLKTHAMSVFVMTCEAAAQLRKAGKVTVRETTLKRLGATHLRYGVADGHFEVTGFALLETIKEALPADMWSLEMKKAWAEAYSQLVAAIKREMKPDA

SEQ ID NO: 18823 - protein, 382 aa, Arabidopsis thaliana
MSYSTIISNTSFLSLASKFTTRGSRLQCTVSMARSAVDETSDSGAFQRTASTFRNFVSKDSNSQFPAESGRYHLYISYACPWASRCLSYLKIKGLDDAISFSSVKPIWGRTKETDEHMGWVFPGSDTEVPGADPDHLNGAKSVRELYEIASPNYTGKYTVPVLWDKKLKTVVNNESAEIIRMFNTEFNHIAGNPDLDLYPSHLQAKIDETNEWIYNGINNGVYRCGFAKKQGPYEEAVEQVYEALDRCEEILGKHRYICGNTLTETDIRLFVTLIRFDEVSSYFQSKKKKYTICERISNVETLIQVYAVHFKCNKKLIREYPNLFNYTKDIFQIPGMSSTVNMNHIKQHYYGSHPSINPFGIIPHGPNIDYTSPHDRHRFSK

SEQ ID NO: 18824 - protein, 394 aa, Oenococcus oeni PSU-1
DDLKKGKSKDNSKSGEKSSSAATAFDEKAYAKSLKAFIKKNKKSGQVVYDDLENKMAKPFALNADQIDKLIEKVEDAGISIVDEDGNPSEKSLKTKSNNPSQEELSQASSAPKGVKINDPVRMYLKEIGRVSLLNADQEVAIAKRIEKGGSDGERARQELAEANLRLVVSIAKRYVGRGMHFLDLIQEGNMGLMKAVEKFDYTKGFKFSTYATWWIRQAITRAIADQARTIRIPVHMVETINKLIRIQRTLIQDLGRDPMPEEIGAEMELTADKVREIQKIAQEPVSLETPIGEENDSHLGDFIEDNEGESPIESTSDQMLKDQLEEVLGTLTEREENVLRLRFGLEDGKTRTLEEVGRVFGVTRERIRQIEAKALRKLRHPSRSKQLKDFMEE

SEQ ID NO: 18825 - protein, 277 aa, Lactobacillus sakei subsp. sakei 23K
MQIITDELARQVIVARPAISHKGDFGRILIIGGSQQYGGAAIMSASAAVYAGAGLVSVASDLSILASLHTSLPEAMFIDYRQPFVQWAPTVQAADVIVIGPGLGLSAFALLLLKQVLQAAQPEQTLLIDGSALTLIAREKLALPDAQLILTPHQMEWARLSGLSIAQQTVANNQAALADYPKATLVLKKHHTEIYHQTQVSQLMIGGPAMATGGSGDTLTGIIAAFCGQFGTNYQTISAAVYTHSAISDQLAQKQYVTLPTQMIQALPQFMAQMAHQ

SEQ ID NO: 18826 - protein, 360 aa, Fusobacterium nucleatum subsp. vincentii ATCC 49256
MDKKMINFTVGPVQMSKKIRDIGQREIPYFRTEEFSKIMKENEKMICCLAEADDKSKALFLTGSGTSGMEATILNCFSKEDKILIINGGSFGQRFVDICRILDIPFYEIKLNYGEILTEQELEKYSDKGISGLLVNAHETSTGILYDMKMISKFCKKNKIFFVVDSISSFIADELSFSDLGIDVMIIGSQKALALPPGLAILILSEKAITRIKNNKVNSLYFDLKIALKDNQNGQTPFTPAVSILLQLHERLKDILEEGIKGERAKIKELKLDFMNRIKNLPLKIFSKNASNAMTAIETKNISAYSIFLILKDEYNIWVCPNGGELKEKIFRVGHIGHLSISDNDKLIEALNDINKRGLL

SEQ ID NO: 18827 - protein, 313 aa, Arabidopsis thaliana
MSYSTIISNTSFLSLASKFTTRGSRLQCTVSMARSAVDETSDSGAFQRTASTFRNFVSKDSNSQFPAESGRYHLYISYACPWASRCLSYLKIKGLDDAISFSSVKPIWGRTKETDEHMGWVFPGSDTEVPGADPDHLNGAKSVRELYEIASPNYTGKYTVPVLWDKKLKTVVNNESAEIIRMFNTEFNHIAGNPDLDLYPSHLQAKIDETNEWIYNGINNGVYRCGFAKKQGPYEEAVEQVYEALDRCEEILGKHRYICGNTLTETDIRLFVTLIRFDEVSLCSPLQMQQETHKGVSEFVQLHERHFPDPRYE

SEQ ID NO: 18828 - protein, 220 aa, Pseudomonas aeruginosa PAO1
MSLTLYGAPLSPFVRKVRLLLAEKGLDYQLEAIAPFGQPAWYREISPLGRIPALRDGDLALADSSVICQYLEERYPEPPNLQGDAPASRAAVRWLEKYADYEIAPLATLTIFRNRILKPAMGQACEENDVRRALEEKLPAHFDYLENHLDGRAFFVGERLTLADLAIASQLVNLRHAGENLDEQRWPALAAHFARMLERPAMQALLPGERRTLDKLAAKA

SEQ ID NO: 18829 - protein, 473 aa, Cryptococcus neoformans var. neoformans JEC21
MSTSLETPSGASAGPSIVASGLPPLADLVRAGSKRTRVVYGAETSAVEDDGLARANKIKLATKLAIEYKDVQTLPPILQAQQTGPAGPKRPTQPSIAASATAGPNVKLIGGPEAEKASSSTPQAVAEPRSLVKFRHQEGFAAEGGQATSRLSQALMRKKEAREVKPEYHPEWKLTRVISGHMGWVRAVAMDPGNQWFATGAGDRVIKIWDLASGELKLSLTGHISTIRGLAVSDRHPYLFSCAEDKMVKCWDLETNKVIRHYHGHFSGVYSLSVHPTLDVLVTGGRDASVRVWDMRTRANIFTLTGHTSTVGDVKTQDSDPQIISGSMDSTVRLWDLAAGKCMNTLTHHKKSVRALAIHPTEYSFASASSGGNNIKKWKCPEGIFVNNFVGHEAIINTLSINSENVLFSGADNGTLTLWDYKTGLPFQHLKDIPQPGSLDAEAGVFCSTFDKTGTRLITGGADKTIKVYSEQA

SEQ ID NO: 18830 - protein, 474 aa, Shigella flexneri 2a str. 301
MKKNTLALSALALSLGLALSPLSATAAETSSATTAQQMPSLAPMLEKVMPSVVSINVEGSTTVNTPRMPRNFQQFFGDDSPFCQEGSPFQSSPFCQGGQGGNGGGQQQKFMALGSGVIIDADKGYVVTNNHVVDNATVIKVQLSDGRKFDAKMVGKDPRSDIALIQIQNPKKLTAIKMADSDALRVGDYTVAIGNPFGLGETVTSGIVSALGRSGLNAENYENFIQTDAAINRGNSGGALVNLNGELIGINTAILAPDGGNIGIGFAIPSNMVKNLTSQMVEYGQVKRGELGIMGTELNSELAKAMKVDAQRGAFVSQVLPNSSAAKAGIKAGDVITSLNGKPISSFAALRAQVGTMPVGSKLTLGLLRDGKQVNVNLELQQSSQNQVDSSSIFNGIEGAEMSNKGKDQGVVVNNVKTGTPAAQIGLKKGDVIIGANQQAVKNIAELRKVLDSKPSVLALNIQRGDSTIYLLMQ

SEQ ID NO: 18831 - protein, 477 aa, Oenococcus oeni PSU-1
MKKTKIVSTLGPASNDLKIISALINNGINVARFNFSHGDHDEHAARMALVHDAEKKTGKLIGFMLDTKGAEIRTTVQDTPNGKIEFKKGDRLRISMNEKIKGTKEKIAVTYKGLYDDVKVGGKVLFDDGIIEMTVISKDSEKKELLVQVDNDGVLGGRKGVNAPGVAINLPGITKKDKSDIEFGLEQGIDFIAASFVRKAQDVLDIRKLLKKHHQENHVMIFPKIESQEGIDNFESIIAVSDGLMVPRGDMGVEIPYEEVPVIQKMMIRYMNRLGKPVITATQMLDSMIENPRATRAEINDVENAVWDGTDATMLSGESANGSWPVEAVKTMSTSDEYAENHVHDDGNRIDLRNEPKSSDTEVLAQAAVDAAREAGAKAIVASTASGYTARLISKYRPDMPILAITYDEKVARSLTVNYAVYPVVKDAPETTDDLIELAKKTVHDEKLAKRDDTIVVTAGLPIKKPGTTNLIHVVKL

SEQ ID NO: 18832 - protein, 137 aa, Brassica napus
MQGHHQNHHQQLSSASATSSNGNFMNKDGYDLGEIDPSLFLYLDGQGHHDQPSTAPLPHHHTTQNLAMRPPTSTLNIFPSKPMHIEPPPSSSTPNAVAPSGSTRPSSEPSMDLTNHSQFQLPQPSKSIKKEGNRKGL

SEQ ID NO: 18833 - protein, 428 aa, Cryptococcus neoformans var. neoformans JEC21
MSSCLPVTLTRTRTRTRTLTLTLHPAMPSTKGVILVGGPSKGTRMRPLTLDCPKPLLPVAGKPMIWHPLQALSKVPDLTEVIIIGFYDDSQMAAFVKEAKREFPNIAISYLREYKALGTAGGLYHFRDSILRPPVPQHIFICNIDICCSFPFAEMLELHTSHGGTGTIMGVNVKKETATQYGCIVTDPETNQMVHYVEKPEGWISNIVNGGVYLFDKSLFDVIKVAMDEKTARAAEDPLVKPDEILRLEQDVIVPLAAARKMYVYQTHDFWRQIKTAASAVTATALYLSNYKLTNPSLLAPAAPNIIAPTFIDPSATIDPSAKIGPNVAIGPNVTVGPGVRIKDAIVLEGSTLEKHSCALNSIVGTNSHIGAWSRVDGEQEFEREVKGKISVTILASEVSLAPETMVRSCIVLPNKTLTKNATNQVLL

SEQ ID NO: 18834 - protein, 600 aa, Clostridium thermocellum ATCC 27405
MILKRLQFLTSLQWRLVTIFILLALVLAVSASVSLNYFVELFFYDTFKAGIENGFEYWGIDDEDQPTKEEIVSFLTANNKANAMSLFFINNFRTFTIIDKNTNEIIYTDVKSPYRETLREDIIQSRNYLAALAGGKGDKGKLIRIGDKSFFDYARRIGNTDYILYFRYDREEWAGAIEAFNDIIKLSFLIAVILSLIFGYALSKTITVPIVNLMHKAREMAAGHFGQVMEVKSDDEIGKLTKAFNFMSRELRKTLNQISREKSKIETILNYMTDGVIAFNINGEVIHINPVAKAILGIEKCDFDFNEFSKRYNLDVSIEEVKYLEIYNAKEVSTNIGEKYVKIYFALFTDEENNADGVIAVLHDITEQQKLENMRKEFVANVSHELRTPLTSIKSYAETLLDGALEDRELAGKFLSVINSEADRMTRLVKDLLQLSRLDNNQMKWDMQKISFEDLVRNCVEKVKFESEEKNQTLECFTIGEELEIVADKDRMEQVVLNILTNAIKYTPEGGKITVYIGRMYSEVYVKVVDSGIGIPREDLGRIFERFYRTDKARSREMGGTGLGLAIAKEIVEAHKGSISVASEPGKGTEVTVKLPAACN

SEQ ID NO: 18835 - protein, 450 aa, Lactobacillus sakei subsp. sakei 23K
MKRNLNARQMQMIALGGTIGVGLFMGANTTIKWTGPSVLIAYGIAGLLLYLIMRALGEMLYVDPDTGSFAKFATEYMHPIFGYLTAWSNVFQFVVVGMSEMIAIGGYLEFWWPNLPGWVPGLVAITFLCAANLISVSMFGELEFWFALIKVVTIVLMIVAGLGLIIFGIGNHMHPVGISNLWAHGFFTGGFKGFVFALAIVLASYQGIELIGITAGEAENPQETLVKAIQSTVARILIFYIGAIFVILSIYPWNELNQVGSPFVQTFAKIGITAAASIINFVVITAALSGANSGIYSASRMTFTLANNGQLPKRFLKLNRHGVPFYAVGAISLGILIGVILNAILPLVYPKAGNIFVLVYSSSVLPGMVPWFVILISQIAFRKQHAEKMATHPFKMPWSPYSNYITLAMLCLTLVFMFINPETRISLIVGLIFLVLMIVIYFVKFGRQKE

SEQ ID NO: 18836 - protein, 451 aa, Streptomyces avermitilis MA-4680
MSDLPRKAVTRTAKLAALPLGFAGRATWGLGKRIGGKSAEIVGRELQQRTAEQLFKVLGELKGGAMKFGQALSVFESALPEEVAGPYRAALTKLQEAAPPMPTRTVHAVLQERLGEDWQELFLEFEDKPSAAASIGQVHRGVWHDGREVAVKVQYPGAGEALLSDLNQLSRFARLLGPLIPGMDIKPLITELRDRVSEELDYALEAQAQLAHAEEFADDPDVVVPAVVHQSEQILVTEWIDGIPLSEVIADGTQEQRDRAGQLLARFLFSGPARTGLLHADPHPGNFRLLPDGFDEKAGWRLGVLDFGTVDRLPGGLPTPIGDSLRMTLDGDAESVYELLREEGFVKESIELDPDAVLDYLLPIIEPAQADEFTFTRGWMRSQAARIADPRSPAHQLGKQLNLPPAYLLIHRVTLSTIGVLCQLGATVRLRDELEEWLPGFLLEEESAAEA

SEQ ID NO: 18837 - protein, 57 aa, Pisum sativum
MASMISSSAVTTVSRASRGQSAAVAPFGGLKSMTGFPVKKVNTDITSITSNGGRVKC

SEQ ID NO: 18838 - protein, 658 aa, Pseudomonas syringae pv. syringae B728a
MCGITGFFGVKNKNLDETTVIKNMLSMIEHRGPDQAGYYVNNSMGLGTMRLSIIDLAAGIQPLSDGTGQYWISYNGELYNYIELRRRLQVLGHHFSTESDTEVVLRSWMEWGDEALEKFNGAFAFAIYDTVKDEVFIARDRFGKRPLFYTQTDGGYLFASEMKCFFGFPGFEFKFDEMSLSSILAHWTPLPSQTPFQGIRQLPPGSIMTLRGAQCEIRPYYALDFRAVDFDGTENEAKEEIRNTLEQAVKLRLRSDVPMGLYLSGGVDSSVLTSIAARIIKQKPLRTFSVEFEDKNLDESSDQQLVSALFSTKHERLIINHKDIVDNFSATVFHAEMPLFRTAPVPMYMLSKHVRSTGIKAILSGEGADEVFLGYNIFKETLLRSQWDTTDHDEKKRLLAKLYPYMKSFSEDNDSNLMGFYNAYAKEKIPGLFSHEIRFQNGRFASRLLKTKNDPFAGIQAWVAKDPVYSALSPTQKAQWLEFNTLLSGYLLSSQGERMGLAHGIENRCPFLDINVQKLASSINLRFDDGFTEKYMLRMAYDGILPGRIIHKAKTPYRAPDSGPFVEHALDYLNHLCESNALDAIELINPVFAKALIKKVVERTLAGGEDITVRDNQAFVYLMSLIELDKWFVKRQGAAYINPCRVDKLLVQAVDARH

SEQ ID NO: 18839 - protein, 97 aa, Campylobacter upsaliensis RM3195
MLKINILRMDKMNFQPLGKRVLVKRVEETKTTASGIIIPDNAKEKPLIGEVVAVSKEVSDIASGDKIVFAKYGGTEVKLNDGEYLVLNLDDVLGILK

SEQ ID NO: 18840 - protein, 258 aa, Bacillus anthracis str. A2012
MGVERIKAAFENGKKAFIPYVMGGDGGLEILKERIRFLDEAGASIVEIGIPFSDPVADGPTIQRAGKRALDSGVTVKGIFQALIEVRKEVQIPFVLMTYLNPVLAFGKERFIENCMEAGVDGIIVPDLPYEEQDIIAPLLREANIALIPLVTVTSPIERIKKITSESEGFVYAVTVAGVTGVRQNFKDEIHSYLEKVKSHTHLPVVAGFGISTKEHVEEMVTICDGVVVGSKVIELLENEKREEICEFIQATKQKEEA

SEQ ID NO: 18841 - protein, 545 aa, Campylobacter upsaliensis RM3195
MAKEIIFSDEARNKLYEGVKKLNDAVKVTMGPRGRNVLIQKSFGAPSITKDGVSVAKEVELKENLENMGASLVREVASKTADQAGDGTTTATVLAHAIFKEGLRNITAGANPIEVKRGMDKACEAIVDELKKLSREVKDKKEIAQVATISANSDEKIGALIADAMERVGKDGVITVEEAKSINDELSVVEGMQFDRGYLSPYFITNADKMIVELSNPYILLFDKKITSLKDLLPILEQIQKTGKPLLIIAEDIEGEALATLVVNKLRGVLNISAVKAPGFGDRRKAMLEDIAILTGGEVIAEELGRTLESATLEDLGQASSVIIDKDNTTIVNGAGDKANIDARVNQIKAQIAETTSDYDREKLQERLAKLSGGVALIKVGAATETEMKEKKDRVDDALSATKAAVEEGIVIGGGAALIKAKSKIKLKLEGDEAIGAAIVERALRAPLRQIAENAGFDAGVVVNSVENSSEENAGFDAAKGEYVDMFKAGIIDPVKVERIALLNAVSVASMLLTTEATISEIKEDKPAMPDMSAMGGMGGMGGMM

SEQ ID NO: 18842 - protein, 416 aa, Shewanella sp. ANA-3
MKTTSSTEKPMQSTGLGHSVAQWQHSHGFSNQNTAGEKNTRYVLYLTVITMVAEIVAGTIYGSMALLADGWHMGTHAAAFMITLFAYSYARKHANDPAFAFGTGKVSVLGGYTSAIALGLVALVMLIESGMRLINPEDIHFNEAIFVALIGLSVNVLSVFLLKDHHSHDHGHSHGHSHGHSHSHSHGHDHDDEDDDHKDHQDNHCCHGNDHHAADHDHDHDHDHDHDHDHDHDHDHDHDHDHDHDHDDHSHSQAQGHSHGHSHGHSGHDHNLRAAYFHVLADALTSVLAIAALLFGKYMGLTWLDPIMGIVGAIIISRWSWGLIQQTSPILLDGGVKASLQCKVRETIEAVPDHQVADLHIWRVSADHHAMMVSIVSHSPKEASYFNQLLTKFPELSHITIELHTCRQRECVAKEA

SEQ ID NO: 18843 - protein, 273 aa, Colwellia psychrerythraea 34H
MVKLSAIQLSSAANVETNLAKIAELLSKITASQEDVQHLVVLPECCLYFGSKDSEQLDLAIASATGNDLCLALGELAKKFKVYLVAGTIPILSTSSTKFTNSSCVFNPEGELIGQYDKIHLFDVNVSDSTKSYCESRYTQAGKEISMVNTEFANIGLSVCFDLRFPNLFQQLSIAGADIITVPSAFTRVTGKAHWQTLLQARAIENQVYIVAAGQEGVHENGRETWGHSMIINPWGEIEQSIETGEGYISIDYHSEELTRIRQSMPLNSPLNK

SEQ ID NO: 18844 - protein, 433 aa, Ralstonia eutropha JMP134
MTPSEVKATLSFSDGSPSVDLPIYQGTVGPDVIDIRKLYGQTGKFTYDPGFMSTASCNSKITYIDGDKGELLYRGYPIEHLAQKCDHLETCYLLLKGELPDATQKEEFVGRVMKHTMVHEQLQFFLRGFRRDAHPMAVLTGLVGAMSAFYHDAMDIDDPHQREISAIRLIAKMPTLVAMAYKYNIGQPYIYPQNDLSYSGNFLRMMFATPCAPYTVNPVLERALDRIFILHADHEQNASTSTVRLAGSSGTNPFAAIAAGVACLWGPAHGGANEAALKMLEEIGSVDNIGEFIKQVKDKNSGVRLMGFGHRVYKNYDPRAKLMRETCHEVLNELGLHNDPLFKLAMELEKIALEDEYFVSRKLYPNVDFYSGIVQRALGIPTSLFTCIFALARTPGWISQWEEMITDPEYKIGRPRQLFNGAASRDQSEAAAS

SEQ ID NO: 18845 - protein, 540 aa, Yarrowia lipolytica CLIB122
MSLDKNRQITTSESSSGSSADEGTHIMRGLTSTSTQDETTGSISEGNLEAEKISPFVFVLVALASISGFLFGYDTGYVSGALVVIKEDLGRALSNGDKELITASTSLGALLGGVIAGAMCDFFGRKWVITFANILFLVGAAIQCGAHAVWTMIGGRFVMGWGVGIASLCAPLYISELAPTRIRGRLVVLNVLAITGGQLVAYGIGAGMAHVHQGWRILVGLSMVPAFVQMVIFVFMPETPRYLVRKNKIAEAKKVLAKTYATDDDNLLDRKLHELMLHNAYKESGLSTMARARNTMKELYCVPSNLRALIIACGLQGIQQFCGFNSLMYFSATIFEVVGFDNATAVSIIVAGTNFVFTIVAFMVIDRIGRRRILLGTIWGMSLGLVVNAIAFHFLDKQKEKNPNHELDKEHISGWAYVVLVAQLVYVAFYATGIGNVPWQQSELFPISVRGVGTGMATATNWAGSLIVSSTFLTMLENITPTGTFSFYAGLCALGEVFVFFLYPETSGMDLEQIQQLLTGGFNIKESMRLSDEAKRGYKK

SEQ ID NO: 18846 - protein, 328 aa, Glycine max
MALEAVVFPQSQDPFGGSGYGSVNNKDFYNCTLLAATSPNSWGDYEQHININKEEEQGGASISTFQPESNYPYGNWTSSSSSMLPHFNNELQETTTTDPSNTLDSLNTRPKRRRAKSRKNKEEIENQRMTHIAVERNRRKQMNEYLSVLRSLMPDSYIQRGDQASIIGGAINFVKELEQRMHFLGAQKEGEGKSEAGGATNMPFSEFFTFPQYSTSGGGGCSDNSAAVGEDVGEVKCGIADIEVTMVESHANLKIRSKKRPKQLLKLVSGLHTMRLTILHLNVTTTGEVVLYSLSVKVEDDCKLGSVDDIAAAVYQMLDKIQQEAMLN

SEQ ID NO: 18847 - protein, 266 aa, Triticum aestivum
  misc_feature (174)..(174): Xaa can be any naturally occurring amino acid
  misc_feature (188)..(191): Xaa can be any naturally occurring amino acid
  misc_feature (246)..(247): Xaa can be any naturally occurring amino acid
  misc_feature (250)..(250): Xaa can be any naturally occurring amino acid
  misc_feature (254)..(254): Xaa can be any naturally occurring amino acid
  misc_feature (259)..(259): Xaa can be any naturally occurring amino acid
  unsure (1)..(266): unsure at all Xaa locations
QVCTKKQAGTGPEFPGYRRPTRPARYFFQQLICGVSYCHFMQICHRDLKLENTLLDGSPAPRLKICDFGYSKSSLLHSKPKSTVGTPAYIAPEVLSRREYDGKTADVWSCGVTLYVMLVGGYPFEDPDDPKNFRKTIGRIMSIQYKIPEYVHVSQDCKHSLPVFCRNPARDKMXGVRNIMNHPWFLKXXXXELTEAAQAMYYKRDNSAPTYSVQSVEEIMKIVEEAQKPPPSTTPVAGFGWAEEDXXEDXAEAXEEAEXEDEEDEY

SEQ ID NO: 18848 - protein, 409 aa, Escherichia coli CFT073
MTRRVVITGMGGVTAFGENWQDVSARLLAYENAVRKMPEWQVYDGLHTLLGAPVDDFTLPEHYTRKRIRAMGRVSQMSTRASELALEQAGLIGDPILTSGETGIAYGSSTGSTGPVSEFATMLTEKHTNNITGTTYVQMMPHTTAVNTGLFFGLRGRVIPTSSACTSGSQAIGYAWEAIRHGYQTVMVAGGAEELCPSEAAVFDTLFATSQHNDAPKTTPSPFDENRDGLVIGEGAGTLILEELEHAKARGATIYGEIVGFATNCDAAHITQPQRETMQYCMEQSLKIAGLSAQDIGYISAHGTATDRGDMAESLATATIYGDNVPVSSLKSYFGHTLGACGALEAWMSLQMMREGWFAPTLNLNKPDPNCGALDYIMHEARKVDCEFLQSNNFAFGGINTSIIIKRWP

SEQ ID NO: 18849 - protein, 450 aa, Ashbya gossypii ATCC 10895
MCCSFFRNCSIMLISQCYWCAVLCTSLVLGPCNPLRPCSRAGYQPARVAQKGGLRNVARAIRTAASPQLPEVPGALGRLRYSGWARAKGALRGYARTERGLRTTQWNCLARSIKLAARRKDAQQTHIYMGAGGSRQQAGRTSKMSELPQDVEPQVLHTQYVAPREAQTQYVAQEAHPHVQDSYYTNSVTTKTHSTRTHDTHDELDGSEDFGRNLLTAALGEFFGTIFFLWPAFVIAQIANHDETTAGPGSHPGQLIMISLGFGLSVMVAVFIFYRVCGGNLNPAVTLTLILAGAVPLVRGLVMMVAQVLGGMVAAGLVKAMTPGPVLFSNALGGGCSRSRGVFLEAFGTAILCTTVLFLAVEKHRATYMAPFGIGMALLVAHLVCVFYTGAGLNPARSFGPAIAHLSFPNYHWIYWIGPFLGSLIAWGVWKLFKVLHYETCNPGQDSDRE

SEQ ID NO: 18850 - protein, 397 aa, Listeria monocytogenes str. 4b F2365
MMRTKLMNMLQERKDEITQIRRHLHEHPELSFHEAETAKFIQDFYKGKDVEVATEVGNGHAVVVTIKGGKPGKTIALRADFDALPIEEQTELPFKSKKPGVMHACGHDGHTAYLLVLADCLIQLKENIPGTIKIVHQHAEETPPGGAKSVVESGILDDVDQIFGIHVFPFGESGQVYYHSGFAMAGRTYFKLKIQGVGGHGSSPHMANDAIVAGAYFVTAIQTVVSRRLNPFDTGVITIGSFDGKGSFNVIKDAVELEGDVRYMNTENCDKMDAEIHRIVTGMEAMFGVTVELTYTNDYPPLYNDPAVTEQVVASLQKGVGEYLTGISEYDMLSGSEDFAYYLQKIPGVFFYIGAKPKNTSNAYFNHHPKFDIDEDALLVAAKSVADVVLDYYKLNG

SEQ ID NO: 18851 - protein, 542 aa, Pseudomonas putida KT2440
MTRYIFVTGGVVSSLGKGIASASLAAILEARGLKVTMLKLDPYINVDPGTMSPFQHGEVFVTHDGAETDLDLGHYERFIRTTMTQNNNFTTGRIYEHVLRKERRGDYLGATIQVIPHITDEIKRRIIKGAGDADVALVEIGGTVGDIESQPFLEAIRQLRVEVGSKRAMLMHLTLVPYIATAGETKTKPTQHSVKELRSIGLQPDVLICRSDHPVDASSRRKIALFTNVEERAVISLEDVDTIYKIPGVLHAQGLDDFVVERFGLQCNGADLSEWDKVVDAKLNPEHEVTIAMVGKYMELLDAYKSLIEAMSHAGITNRTKVNLRYIDSEDIENQGTSLLEGADAILVPGGFGLRGVEGKITAVQYARENKVPYLGICLGMQVAVIEFARNVMGWKDANSTEFDRNSGHPVVGLITEWADATGAVETRDEASDLGGTMRLGAQDCQLAAGSKVHDCYGKDVITERHRHRYEVNNNLLPQLVEAGLVVSGRSEDGALVEVVESKDHPWFVACQFHPEFTSTPRDGHPLFSGFVKAALAQKNKA

SEQ ID NO: 18852 - protein, 395 aa, Listeria monocytogenes str. 4b F2365
MKEKLFQKLDEKRDRMIEIRRYLHEHPELSFQEENTAKYIADFYKEMDCDVRTHVGGNGVVVTIDTGKPGKTLAIRADFDALPIQEETGLAFASKNPGVMHACGHDGHTAYMLILGETLIEMKQELTGKIVILHQHAEETPPGGAIQMIQDGALDGVDNVLGIHVMSTMKTGEVFYREGAIQTGRSYFKLKVQGQGGHGSSPHLANDAIVAASEFVVAVQTVISRRLNPFDVGSITIGSFDGKGSFNVIKDAVELEGDVRSMSEEARNIIQKEITRIVSGIEAMFGVTCELDYKNDYPVLNNDEALTDFVVKSIKGAKIPEITDVVRCEPQPPSEDFAYYAKERPSSFFYVGAMPADGHFYPHHHPKFDINEDSLLIASKAMGACVVDYLKGENN

SEQ ID NO: 18853 - protein, 325 aa, Kineococcus radiotolerans SRS30216
MSTTAALDVVTMGRVGVDLYPLQDDVGLEDVETFGKYLGGSATNVAVAAARHGRATAVVTRTGNDAFGRFVHRALAGFGVSDRFVSGVEGLNTPLAFCEIYPPDHFPLLFYRQPTAPDLQIRAEELDLDAIRDAGVFWTTVTGLSEEPSRGAHHAAWAARARKPLTVLDLDYRPMFWASPQEATEQVRRALPHVTVAVGNREECEVAVGETEPRRAAEALLAAGVEVAIVKQGPKGVLGATRNPDGGTAFVEVPPTPVAVVNGLGAGDGFGGALCHGLLAGWDLERTLRFANAAGAIVATRRECSTAMPFTSEVEALLEEVAARA

SEQ ID NO: 18854 - protein, 348 aa, Pyrococcus furiosus DSM 3638
MSEKMVAIMKTKPEYGAELVEVDVPKPGPGEVLIKILATSICGTDLHIYEWNEWAQTRIRPPQIMGHEVAGEVVEVGPGVEGIEVGDYVSVETHIVCGKCYACKRGQYHVCQNTKIFGVDTDGVFAEYAVVPAQNVWKNPKNIPPEYATLQEPLGNAVDTVLAGPIAGKSVLITGAGPLGLLGIAVAKASGAYPVIVSEPSEFRRNLAKKVGADYVINPFEEDVVKEVMDITDGNGVDVFLEFSGAPKALEQGLQAVTPAGRVSLLGLFPGKVSIDFNNLIIFKALTVYGITGRHLWETWYTVSRLLQSGKLNIDPIITHKYKGFDKYEEAFELMRAGKTGKVVFMLK

SEQ ID NO: 18855 - protein, 485 aa, Candida glabrata CBS138
MIDNPTATVGSSITNLVKTIVGAGLFAIPFAFKNDGVAVGLLLIFLAAVTSSFGLILLAKCSKTLINPRNSSFFTICMLTYPSLAPLFDLAMVVQCFGVGLSYLVLVGDFFPDLFGGERKYWILLSAILVVPLCCLKKLDNLKYSSIVGVIALLYLSLLIGFRYLTDVAFAPEISFERGEISWFKVYDYKGLLSTFSIIIFAYVGAMNIFTIVNELQDNSMTNVRKVVDSSILISTILFLFVGLFGYLTFGSLTMGNILLNYDSDSLAIGIGKFCLAMMLILTFPLLFHPLRTAINNIVVWFIIKFEKSSLTPEISARDSEASNYVTAETHTSRPINLIINDDEVNDCEELNEDLLDSNNVIYQEHGHEEEPPKGGLNGVEHDVPFPETRFYIITALLLVSMYAMALNVKSFALVLSLVGATGSTSISFILPGLFGYKLIGTDALAIGHTMTKEDRLYRRLSLLLIYFGFAVMFLSLYVTLKYQQ

SEQ ID NO: 18856 - protein, 168 aa, Setaria italica
  misc_feature (159)..(159): Xaa can be any naturally occurring amino acid
  unsure (1)..(168): unsure at all Xaa locations
MAAASSTTSVHDFTVKDASGKDVDLSTYKGKVLLIVNVASQCGLTNSNYTELAQLYEKYKDQGFEILAFPCNQFGGQEPGTNEEIVQFACTRFKAEYPIFDKVDVNGNNAAPIYKFLKSSKGGLFGDSIKWNFSKFLVDKEGRVVDRYAPTTSPLSIEXDIKKLLGSS

SEQ ID NO: 18857 - protein, 288 aa, Zea mays
MAKDIEASGPEAGEFSAKDYTDPPPAPLIDAEELTQWSLYRAVIAEFIATLLFLYITVATVIGYKHQTDASASGPDAACGGVGILGIAWAFGGMIFILVYCTAGISGGHINPAVTFGLFLARKVSLVRALLYIIAQCLGAICGVGLVKGFQSAYYVRYGGGANELSDGYSKGTGLAAEIIGTFVLVYTVFSATDPKRSARDSHVPVLAPLPIGFAVFMVHLATIPITGTGINPARSLGAAVIYNKDKAWDDQWIFWVGPLIGAAIAAAYHQYVLRASATKLGSYRSNA

SEQ ID NO: 18858 - protein, 422 aa, Arabidopsis thaliana
MEARPVHRSGSRDLTRTSSIPSTQKPSPVEDSFMRSDNNSQLMSRPLGQTYHLLSSSNGGAVGHICSSSSSGFATNLHYSTMVSHEKQQHYTGSSSNNAVQTPSNNDSAWCHDSLPGGFLDFHETNPAIQNNCQIEDGGIAAAFDDIQKRSDWHEWADHLITDDDPLMSTNWNDLLLETNSNSDSKDQKTLQIPQPQIVQQQPSPSVELRPVSTTSSNSNNGTGKARMRWTPELHEAFVEAVNSLGGSERATPKGVLKIMKVEGLTIYHVKSHLQKYRTARYRPEPSETEFNVKTKVSLITTGSPERKLTPLEHITSLDLKGGIGITEALRLQMEVQKQLHEQLEIQRNLQLRIEEQGKYLQMMFEKQNSGLTKGTASTSDSAAKSEQEDKKTADSKEVPEEETRKCEELESPQPKRPKIDN

SEQ ID NO: 18859 - protein, 173 aa, ASPERGILLUS NIDULANS FGSC A4
MSSPLPWSGPTMRKIRSSPNLGYGLKANLLKLIDHYSNPRNVGSLNRKSLDVGTGLVGAPACGDVIRLDIQVDEATGKITETRFKTFGCGSAIASSSYLTTLLKGKTLEEASKISNTQIASELCLPPVKLHCSLLAEDAVTAAIKNYRSKRAAPATDLSGTAKEIPKEAAATA

SEQ ID NO: 18860 - protein, 450 aa, Mycosphaerella graminicola
MREVISLNVGQAGCQIANSCWELYCLEHGIQPDGYLTEERKAAEDDDGFSTFFSETGNGKYVPRTIYADLEPNVVDEVRTGTYRSLFHPELMITGKEDASNNYARGHYTVGKELIDQVLDKVRHVADNCSGLQGFLVFHSFGGGTGSGFGALLMERLSVDYGKKCKLEFCVYPAPQVATSVVEPYNSILTTHTTLEHSDCSFMVDNEAIYDICRRNLGIERPNYENLNRLIAQVVSSITASLRFDGSLNVDLNEFQTNLVPYPRIHFPLVAYAPIVSAAKAAHEANSVQEISMSCFEPNSQMVKCDPRNGKYMATCLLYRGDVVPKDVHQAVATLKTKRTIQFVDWCPTGFKIGICYQPPQNVPNGDLAKVNRAVCMLSNTTAIAEAWSALSHKFDLMYSKRAFVHWYVGEGMEEGEFSEAREDLAALERDYEEVAADSAEGDEGGEAEY

SEQ ID NO: 18861 - protein, 95 aa, Oxalis cf. tuberosa EE259
LYAGINISGTNGEVMPGQWEYQVGPSVGIEAGDHIWASRYILERITEQAGVVLTLDPKPIDGDWNGAGCHTNYSTKSMRDEGGFEVIKKAILNLS

SEQ ID NO: 18862 - protein, 271 aa, Zea mays
MRNSTAAQPSTPSSAPAMSGSGPAYVAPASSTPVGGGYTYPAPASSGGSAGYARIPTYPAPPSAYPATNPPTPQVSTNAPVQDPTAPPSPLAKAGELVARLREQGQALIAARRPWAEVFRAAAFSRPPSLGEALARTRRNAAYFRANYALAVLAAVAASLLWHPGTLLALVLLCAAWFFLYFARGNQPLRVLGTEFDDGTVLAALCGVTVVALLFTSVGWNVVGSVMVGGALVGAHAALRTTDDLFLTEQEAAGDGLVAAGPILPTYVRIV

SEQ ID NO: 18863 - protein, 206 aa, Chlamydomonas reinhardtii
MSTKKRRLLKVIILGDSGVGKTSLMNQYVQKKFTKEYKATIGADFLTKEIEVDDKKVTMQIWDTAGQERFQSLGSAFYRGADCCVLVFDVNNAKSFDDLDNWRDEFIIQAGPPDPDNFPFMVLGNKIDENGGSSRQVSEKKAKAWCASKGSIPYFETSAKEDINVEAAFTCITRNALRNEKEEELFMPDAVDMNTTATQRKRAGCC

SEQ ID NO: 18864 - protein, 84 aa, Oxalis staffordiana
  misc_feature (56)..(68): Xaa can be any naturally occurring amino acid
  unsure (1)..(84): unsure at all Xaa locations
ISGTNGEVMPGQWEYQVGPSVGIEAGDHIWASRYILERITEQAGVVLTLDPKPIDXXXXXXXXXXXXXTKSMRDEGGFEVIKKA

SEQ ID NO: 18865 - protein, 453 aa, Rhynchosporium secalis
MREAISINVGQAGCQIANSCWELYCLEHGIQPDGYLTEERKAAEPDQGFSTFFSETGQGKYVPRTIYCDLEPNVVDEVRTGTYRSLFHPEQMITGKEDASNNYARGHYTVGKELIDQVLDKVRHVADNCSGLQGFLVFHSFGGGTGSGFGALLMERLSVDFGKKVKLEFCVYPAPQTATSVVEPYNSILTTHTTLEHSDCSFMVDNEAIYDICRRNLGLERPNYENLNRLIAQGMSVVSSITASLRFDGSLNVDLNEFQTNLVPYPRIHFPLVAYAPVVSAAKASHEANSVQEISMSCFEPNNQMVKCDPRNGKYMATCLLYRGDVVTKDVHGAVATLKTKRTIQFVDWCPTGFKIGICYQPPEMVPNGDLAKVNRAVCMLSNTTAIAEAWSALSHKFDLMYSKRAFVHWYVGEGMEEGEFSEARADLAALERDYEEVATDSLEGDDGAEAEY

SEQ ID NO: 18866 - protein, 278 aa, Bacteroides thetaiotaomicron VPI-5482
METVRLNNGVEMPILGYGVYQVTPEECERCVLDAISVGYRSIDTAQAYYNEEGVGNAVRKCGVPREELFITTKVWISNGGYEKAKASIDESLRKLQSDYVDLLLIHQPFNDYYGTYRAMEEAYKAGKARAIGVSNFYPDRFIDLAEFCEIKPAVNQVETHVFNQQVKPQEIMKKYDTKVMSWGPFAEGRNNFFSNEVLKAIGEQYGKSVAQVALRFLIQRDIIVIPKSTRKERMIENFDVFDFTLSVKDMEEIAGLDKKESLFFSHYDPEMVNFLINL

SEQ ID NO: 18867 - protein, 263 aa, Magnetospirillum magnetotacticum MS-1
  misc_feature (1)..(2): Xaa can be any naturally occurring amino acid
  unsure (1)..(263): unsure at all Xaa locations
XXGSAIAGLHREGRYRVFTDLERQAGRFPYATHHSPGGERDVTVWCSNDYLGMGQHPAVLRAMHEAIDRCGAGAGGTRNISGTNHYHVLLERELADLHGKEAALIFSSGYVSNWAALGTLGSKLPGCVVFSDEGNHASMIEGIRSSRAERQIFRHNDPEDLNRKLALVEPGRAKLVAFESVYSMDGDIAPIDEICDVAEAHGALTYLDEVHAVGLYGARGGGISERMGLSHRLDVIEGTLGKAFAVHGGYITGSAQLCDFMRS

SEQ ID NO: 18868 - protein, 484 aa, Nicotiana tabacum
MVFISGNVQKQQLLSKIATNDGHGENSAYFDGWKAYENDPFHLSNNPNGVIQMGLAENQLCFDLIQEWVVNNPKASICTTEGAEDFKDIAIFQDYHGLPEFRQAVARFMEKVRGDRVTFDPNRIVMSGGATGAHETLAFCLANPGDAFLVPTPYYPGFDRDLRWRTGVQLFPVVCDSSNDFKVTKKALEAAYEKAQESNINIKGLLINNPSNPLGTLLDSDTLRDIVTFINSKNIHLICDEIYAATVFDQPKFFSVSEIVEEHVGCNKDLIHIVYSLSKDLGFPGFRVGIVYSYNDTVVNIARKMSSFGLVSTQTQHLIASMLSDEIFIEKFIAESSERLGKRHGMFTKGLAQVGISTLKSNAGLFFWMDLRRLLKEPTLESELELWRIIINEVKLNVSPGCSFHCSEPGWFRVCFANMDDETMRTALRRIRNFVLQTKGLNNKAAVKKQCSRSKLQISLSFRRMDDFMNSPVHSPMNSPLVRT

SEQ ID NO: 18869 - protein, 118 aa, Alternaria alternata
IASQHTNITSRLASKAARKSAPSTGGVKKPHRYKPGTVALREIRRYQKSTELLIRKLPFQRLVREIAQDFKSDLRFQSSAIGALQESVEAYLVSLFEDTNLCAIHAKRVTIQSKDIQL

SEQ ID NO: 18870 - protein, 161 aa, Pseudomonas aeruginosa PAO1
MSDSLLSIPCTTIKGEQKTLADFGGKALLVVNTASKCGFTPQYQGLEALWEKYRERGLVVLGFPCNQFGKQEPGDEGEISQFCELNYGVSFPLFRKIEVNGAGAHPLFVSLKKRAPGLLGSQGIKWNFTKFLIGRDGQVVKRYAPTTKPEELSSAIEALLE

SEQ ID NO: 18871 - protein, 284 aa, Zea mays
  misc_feature (258)..(258): Xaa can be any naturally occurring amino acid
  unsure (1)..(284): unsure at all Xaa locations
LLTRSILLFLQTDLSCGPSSKAKGGQPAATTGSGGDRQGRGKIEIKRIENTTNRQVTFCKRRNGLLKKAYELSVLCDAEVALVVFSSRGRLYEYANNSVKSTIERYKKANSDTSNSGTVAEVNAQHYQQESSKLRQAIDSLQNANRTIVGDSIHTMGLRELKQMEGKLEKAINKIRARKNELLYAEVEYMQRRMDLQTDNMYLRSKIAENNNETGQPAMNMIGVPSTSEYDHMASFVDSRNFLQVNMQQQQPQHYSHXAATNDPPTRMMKLRIFGQQSMHASTQ

SEQ ID NO: 18872 - protein, 471 aa, Arabidopsis thaliana
MVSSQCSVANKNQTGKPFQKHLSLSISPPKSVLGDNLELQFSDVFGPMPEANSEEACDVAYDEPAVVYSRSHSLVGPSLVVSHSLKMNKLTLRETEDSVDLVECVEGESIKENDEFSGNDDTDSEKSPEEVSGVVGIEDFEVLKVVGQGAFGKVYQVRKKDTSEIYAMKVMRKDKIVEKNHAEYMKAERDILTKIDHPFIVQLKYSFQTKYRLYLVLDFINGGHLFFQLYHQGLFREDLARVYTAEIVSAVSHLHEKGIMHRDLKPENILMDVDGHVMLTDFGLAKEFEENTRSNSMCGTTEYMAPEIVRGKGHDKAADWWSVGILLYEMLTGKPPFLGSKGKIQQKIVKDKIKLPQFLSNEAHALLKGLLQKEPERRLGSGPSGAEEIKKHKWFKAINWKKLEAREVQPSFKPAVSGRQCIANFDKCWTDMSVLDSPASSPNSDAKANPFTNFTYVRPPHSFLHRTTSNL

SEQ ID NO: 18873 - protein, 868 aa, Cryptococcus neoformans var. neoformans JEC21
MSPAPVAPIRQPRGPSTNSFSQAASPPSSTSAGNSGTAAATGPPAPDTDSLRRANTVSNPRHQPSASISASSAASSAFHGVPPSAASTSASSSRGVRGVSRFRSGSLSNALPDPGLVRRASGREVAKEVVLENEGEGEGIEAASWGKGLGRQSSLPSRRGLSLAQAANQGAPEPVPPPRPPRRIAINTTTVSGPTPPVSAHSASHSLSSLSMLHRPTYSSQLSQDEPIPSATSGGVSRTQSLRAQAKHSDVGGLGRSISLKAVGEHTYRQSTSQQASSGQSSGVISSPSSVAFSPPAPPPVSSTAALPPFQLPLPDSSYVSTTTGGADVKRHQSLTQGYGSSSRVRDRLERSPAITLEPREPRDTSGVRVRIDTRFEDEPPTSPIGPSVWSNTLSRTDDGWGSAPLNQSARNASQQLQDAFEAMTLGRNMMAPDGNAMLANDFDPRERLSLETDIMRHPQPSSNNTLPSGGQGLQRINSGAEEPSWVNKLVGGDSTPMVGNVMPRSSSALGWSERARQNETQRFPYGAYNMPFGNGFNMGLKPQMGQMGMPQMGPVGMNGMPMGMPMGMGPMNMGFPMGMNMGFGQMGANGFGQFAPGHPGQAQNQHPGQGYPPPSSSAAPTGHGMGAQDREVIELARKKGLNPATFNCKPQNARFFVIKSYTEEDVQKSLKHEIWSSTVLGNKRLDAAYRETANKGPIYLFFSVNGSRHFCGVAEMTTPVDETKTSKVWAQDKWKGIFEVKWIFVRDVPSAALRHIRLTNTPECKPITNSRDTQELPYEAGTEVLQIFLDHQTKSKTSLLQDFAYYEQLSVNRQNQNSPQNGNSQNQQPSSYQQFQQKPGNAIAPPMSNSHSGPTIPPVPAIPDKFR

SEQ ID NO: 18874 - protein, 375 aa, Triticum aestivum
MDDFMQWAMNTLDQQQYHAAAVAAAPPVYGGAGSSSGGSSAGAAFPSLQALRESTAAGGGVRDLRVQVDHHQPSSWSTSSGDSPGAAMDHDAAAAGPGWSPHTARARTRTTNSSRPMSWNFSAAAASSQAAQLPADIDISPRPAPAPRGHSTPAAGRRSGGSAQGSTAGPSASPGPVQDHIIAERRRREKINQRFIELSTVIPNLKEMDKATILGDAVKYVRELQDKVKTMEDDDSAAATTTTTIRSAVLVSKKIKAAADDEEDEDAGESSHGGLPEIEVRVSDEKTVLVRIHCKNARGLLVRVLAEVEDLRLAITHTSVMPFPADTAIITITAKVEEGFNSTVEEIVRRLNLSLRQHYGANNSDDRNSVTKREC

SEQ ID NO: 18875 - protein, 507 aa, Ashbya gossypii ATCC 10895
MAGNNDKTNSAEVREDRVVTNSVGNPINEPFATQRVGQHGPLLLQDYNLLDLLAHFNRERVPERNPHAHGSGAFGYFEVTDDITDVCGSAMFGEVGKRTRALVRFSTVGGEKGSADTVRDPRGFAVKFYTEEGNLDWVYNNTPVFFIRDPSKFPHFIHTQKRNPRTNLKDANMFWDFLTTPENQVAIHQVMILFSDRGIPASYRHMNGYSGHTYKWSNKQGDWRYVQVHIKTDQGIKNLTAEEGAKLAGEDPDFCQQDLVQALERGEYPSWTVYIQTMTEEQAQKLPFSVFDLTKVWPHKDFPLRRVGRLVLNEVPTNFFAQIEQAAFSPATTVPYQEPSADPVLQARLFSYADAHRYRIGPNYHQVPVNCPYASKFFNPAIRDGPMNVDGNLGSEPNYLATNNNYRFLGADRPIQQHQETWQGPAQPVHWATTGDIDFAQATALYHVLGRTPGQQRNLAHNVAIHVASADPPIQERVFQMFSRVDKGLGEAIRSEATALSQKKPKL

SEQ ID NO: 18876 - protein, 91 aa, Oxalis teneriensis
  misc_feature (2)..(2): Xaa can be any naturally occurring amino acid
  misc_feature (58)..(70): Xaa can be any naturally occurring amino acid
  misc_feature (88)..(88): Xaa can be any naturally occurring amino acid
  unsure (1)..(91): unsure at all Xaa locations
IXISGTNGEVMPGQWEYQVGPSVGIEAGDHIWASRYILERITEQAGVVLTLDPKPIDXXXXXXXXXXXXXTKSMRDEGGFEVIKKAIXNLS

SEQ ID NO: 18877 - protein, 89 aa, Oxalis polyrhiza
LYAGINISGTNGEVMPGQWEYQVGPSVGIEAGDHIWASRYILERITEQAGVVLTLDPKPIDGDWNGAGCHTNYSTKSMRDEGGFEVIKK

SEQ ID NO: 18878 - protein, 613 aa, Nocardioides sp. JS614
MTAQASSAPNYDAGFVDNLTQNFALQFLDRVAASAEREAFRYPRGEAWESVTWKQAGDLVEKLAAGLLALGLESEQRVGIAAGTRYEWILADLAIMCAAGATTTVYPSTNAEDTAYILSDSECRVVFAEDDEQIAKLKEHRNELPHLGKIVTFDGTTDGDWVIGLDDLAKLGEAYLAEHPGVVEETVRSIAPDQLATLIYTSGTTGRPKGVRLLHRSWVYEGTAIQVQDILHEDDLQFLWLPMAHSFGKVLLSAQLACGFATAIDGRVDKIVDNLGVVKPTFMGAAPRIFEKAHGRIVTMQAAEGGAKEKIFKKAFEVGVKVDQLKREGRSVPLLLGVQHGLFDKLVFSKVRERFGGRVRFFISGSAALNAEIAEWFHAAGILILEGYGMTENAAGATVNHPADYKIGSVGPALPGSEVKIGENDEVLLRGPHVMAGYHNLPEETAATLTADGWLHTGDKGSLDADGFLTITGRIKDLFKTSGGKYVAPSAIESKFKAVCPYASQFLVFGNERNYVVALITLDPDAMAGWAEENGMGGASYTDIVNSDQVQKMVGEYVDELNSRLNRWETIKKWRLLDHDLTIESGELTPSMKVKRNIVEKNNQELIDSLYQG

SEQ ID NO: 18879 - protein, 695 aa, Ustilago maydis 521
MVTRTSQPHTSREKTASQSSSKSLASVEDGSQRSNLRAVHVPPTRRRSIAVIAAILALVCVTALALGLGLGLGLKHKHKSQSNVDSSTSNLVPGATASDLPFISREHLADPSQLTLDPTWNRFAPPQDRVYNWTLTQVLSNPAGVTKQMRLVNNLYPGPKIEANIGDRIIVHVENKMPVPTSIHWHGQYQRGSNEMDGSAGITECGIAPGTSFTYNWTVQQSGTYWWHSHYAPTYADGIFGPLILHGEDEKFRIINPDNATTTIPSNGTTVRANYDQDLIFVVNDAYQADSFSVAAFARSKSGPPGGDQGDEPVPDYGLINGLGFSNCALAPNGTSCISDDLTRKTAYNFTVPARKRVRMRFINAGSLASFRISIDGHSMTLIEADSTEVEPIVVQCFNIMVAQRYSVIVETDQPVGAYAVRAEVLDDMFAYDNPFLVMDQYAIMRYEGVSASTPPTSNAGNSTLVNVTESLSTSQLVPITRIDAPASNMTTKLVVNFGLDAFSQWHAFFNQTTFTSEMAPQASLMKAYTFEATRHALNTNSSVGAYYNDPDEMIVTNSEVVVMDVIVNNLDEGEHPFHLHGFTPFLIGAGAGNFQGPSNFSDTRINPMRRDVFSVPPFSWIAFRFVADNPGIWPFHCHLMPHMAIGLLMQFQILPDQIPLLAITDPFYSQCSAVNNWVQQNQKLLTSTGDPNDM

SEQ ID NO: 18880 - protein, 335 aa, Pseudomonas putida KT2440
MALSKEVPEFDIDDDVLLMETGIVLETDVVSDEPAVSSVRTRAKSGSSLKQHKYIDYSRALDATQLYLNEIGFSPLLSPEEEVHFARLSQKGDPAGRKRMIESNLRLVVKIARRYVNRGLSLLDLIEEGNLGLIRAVEKFDPERGFRFSTYATWWIRQTIERAIMNQTRTIRLPIHVVKELNVYLRAARELTQKLDHEPSPEEIATLLEKPVAEVKRMLGLNERVSSVDVSLGPDSDKTLLDTLTDDRPTDPCELLQDDDLSQSIDQWLGELTDKQREVVVRRFGLRGHESSTLEDVGLEIGLTRERVRQIQVEGLKRLREILEKNGLSSESLFQ

SEQ ID NO: 18881 - protein, 87 aa, Oxalis picchensis
  misc_feature (4)..(4): Xaa can be any naturally occurring amino acid
  misc_feature (9)..(9): Xaa can be any naturally occurring amino acid
  misc_feature (66)..(66): Xaa can be any naturally occurring amino acid
  misc_feature (68)..(68): Xaa can be any naturally occurring amino acid
  misc_feature (70)..(71): Xaa can be any naturally occurring amino acid
  misc_feature (73)..(73): Xaa can be any naturally occurring amino acid
  misc_feature (78)..(78): Xaa can be any naturally occurring amino acid
  misc_feature (80)..(80): Xaa can be any naturally occurring amino acid
  unsure (1)..(87): unsure at all Xaa locations
GTNXEVMPXQWEYQVGPSVGIEAGDHIWASRYILERITEQAGVVLTLDPKPIDGDWNGAGCHTNYXTXSXXDXGGFEXIXKAIFNLS

SEQ ID NO: 18882 - protein, 873 aa, Vibrio sp. Ex25
MTLRSKTILGIALIEALALGVLIISGLNWLESSNETSLEVGSQHLVSVFAQASRDAVIATDLAYLDSFARSVVSERELAYIRIVNQDGVELTLQGDYSGVDTGVRPFDVTDGVYDVAQEITLGEQTFGKVEMGVNVEHVHQVLSFATHASLVIAFIEMSLVAMFSYALGSYLMKRLDLLRTGVIKVSQQGPGSQISISGNDEVTRVGEAFNQMSRSLAQAQTKLQQEHQTQQQLSAKISQLAEVAEHARDTIIITHPDGTIAWVNPAFEQLTEYTLEEVIGKSPGELLQGPDTDPNTVALLSKSVRKHSPIRVEILNYTKSKHPYWVELELSPVFDEDGGLLRFIAVERDITDRRRMERRLSSALDKSKKAMQAKSEFLANMSHEIRTPMNAIMGISEILLENENRREPRELLLLLHKSANNLVTIINDILDYSKVEAGKLTLVEEEFDFRSLVESCTALCAYQADKKNLKLLVDMPLAMNTVVVGDKGRINQILLNLIGNAVKFTDEGHVLLKVRESEHGFDFSVSDTGIGIPEDRLAHIMDKFEQVDTSATRRHEGTGLGLAISKRLISMYNGELCVHSDFGKGSCFSFSLQLPKQSQLLAEPIELSANRLLLIDDYQPRVQHLIHLAQEIGIEVTHANDWSTAQSLGKKLDGFDRILASVNNVQDRDSLYELDATESAAKRVMFLAPCVMEEGQAWSCERDRLLPQPVTQHKLQALFSTKTQKRRELSSDENPDFSSLHLLVAEDSHINRILIEKMLQDTGVKLTLAEDGVEAVELYKQLSPDLVITDISMPNKDGFGVTKDIRELQESGAFPWCPIVAFSAHAMQEQQQKSIALGMDDYLTKPVQKSDLLNMIAKWGCHTLTEEKHASV

SEQ ID NO: 18883 - protein, 422 aa, Streptomyces aureofaciens
MTRRVVITGIGVLAPGGIGTTAFWNLLSSGRTATRGITLFDPAPFRSRVAAEVDFHPERHGLTSLEVRRMDRAAQFGVVATREALADSGLDLAAFDPYRIGIAMGTGVGAISGLDTAYRVASDEGRIAQVDHMYAPGHLYDHFVPSSFATEVAWAVGAEGPSTVVSTGCTSGIDSVAHAVDLIREGSADIMITGATDAPISPLTLACFDAIKATTALNEEPETASRPFDATRKGFVLGEGAAAFVLEELGAARRRGAHVYAEIAGYASRSSAFHMTGLRPDGREMAEAITVALDEARLDPGDLDYVNAHGSGTRQNDLHETAAYKLALGPHAHRTPVSSVKSMIGHSLGSVGSMEIAASVLAMEHHVVPPTANLRTPDPECDLDYVPLVARDHRTDAVLTVSSGFGGFQSAMVLARPDRRTA

SEQ ID NO: 18884 - protein, 293 aa, Helicosporidium sp. ex Simulium jonesii
AELIDAVLDVVRKEAEGCDCLQGFQMCHSLGGGTGSGMGTLLISKIREEYPDRMMATFSVVPSPKVSDTVVEPYNATLSVHQLVENADECMILDNEALYDICFRTLKLTTPSFGDLNHLISAVMSGITCCLRFPGQLNSDLRKLAVNLVPFPRLHFFMVGFAPLTSRGSQQYRALTVPELTQQMWDAKNMMCAADPRHGRYLTASALFRGRMSSKEVDEQMLNVQNKNSSYFVEWIPNNVKSSICDIPPRGLKMSGTFLGNSTAVQEMFKRVSEQFTAMFRRKAFLHWYTGEG

SEQ ID NO: 18885 - protein, 216 aa, Burkholderia sp. 383
MMKIERCGFSGVVSSLSVDGAHAGWGASPQRAGGVLWLTGLSGAGKTTLADAVAARLSDRCMHPVVLDGDRLRTGLNRDLGFTVQDRFENVRRIAEVAALLSESGALAIVAVISPLAAMRDEAKAIVGPAFREVYVSTALACCETRDPKGLYAKARRGALPEFTGVSAPYEPPVAADLEIDTGRASLATCVDTLMQFACAQFVRAADARAALMRHG

SEQ ID NO: 18886 - protein, 632 aa, Triticum aestivum
RATCSVSITPPRPLLRVRGEALRPHLTAVAAVPPHVFCRVVDVNLQADPATDEVYAQVSLLVDNEEAKRRMRQGESEEACDGDGEDTGAAKRRARMPHMFCKTLTASDTSTHGGFSVPRRAAEDCFPPLDYNLQRPSQELVAKDLHGTEWRFRHIYRGQPRRHLLTTGWSAFVNKKKLVSGDAVLFLRGEDGVLQLGVRRAAQLKNVSPFPALFNQDSSLRSLGNVAHAVAMKSIFHIYYNPRLCESEFIVPYWKFMRSFSQPFSVGMRFKMKYENEDASERRSTGMITGSRESDLKSHGSKWKCLVVRWDDDVECRRLNRVSPWEIELAGSVSGSHLSSPHSKRLKPCLPQVNPDMLLPSGSVSSDFAESARFHKVLQGQELLGSKAHDGTVNSASEASQASEARNFQYSDDRNCSINMCNIPGVPGLGARTPPENHGFSYHCSGFGESQRFQKVLQGQEVFGPYEGGTLSDAVIRGSSFCQPDGNYTSRATYKWLMSQGCDYRGPVTPAMPQASSPLSVLMFPQTSSKIHGFEYVCRSLDKDDNIRHVTINATQDMGRTSHTLPLWPRLVSGKAVASCAGTKKLPSIGSAEHEPNDKDVHTNGCKIFGISLTQKVRVCDEVECSSANCDF

SEQ ID NO: 18887 - protein, 132 aa, Glycine max
MGRLFVTHLEGQIYTCKHCRTHLALYEDIVSKAFHSRHGRAYLFSKVVNVTTGENEDRQMATGMHTVADIFCVGCGSIVGWKYETAHEKSQKYKEGKSVIERYKVSGPDGNNNNNYWVGNEAHVGGSDADDA

SEQ ID NO: 18888 - protein, 616 aa, Bacteroides fragilis YCH46
MKKLLLLLGSFLLSLTTYAAMNISKIDPPCWFTGMNNPELQLMVYGEGIGQASVSVNYPGVSLSSVVKLESNNYLLVYLHLDKEVKPGKMPITFTVGKKKLVKEYELKARSKAGVDHKGFDASDALYLLMPDRFANGNPDNDRIEGMAEYKVDRNDPNARHGGDLAGIEQNLDYFTDLGVTALWFTPVLENNMKGGSYHGYATTDYYKVDPRFGTNEEYRSLIAKAHNRGIKVVMDMIFNHCGVEHPWIKDMPSKDWFNHADFKNNFVQTSYKLTPHVDPYASEYDFDQMNNGWFVEAMPDLNQKNPHVYKYLLQNSLWWIEYADIDGIRMDTYPYADYDAMSNWMKELNEEYPNYNTVGETWVTEPAYTAWWQKDSKLSAPRNSHLKTVMDFSFFDKVNTAKNEQTDTWFKGLDRVYNNFVYDYLYPNPASVLAFIENHDTDRFLGEGENLDMLKQASTLLLTTRRIPQLYYGTEVMMNGVKSKSDGYVRKDFPGGWTDDKENALTPEGRTRLQNESYNFYRNLLNWRKGNDVIAKGSMKQFMVQHGVYAYARQYKGKTVFVLLNGTDKEVKLPLKYYAEVLKDKTQGKDVISGKVTALNEELTMAPRQSMVIEL

SEQ ID NO: 18889 - protein, 327 aa, Arabidopsis thaliana
MATSSSTEKLPRVLIVKRPDAMAVLGDGFVASTKFEILKAFESPLPLPEFLAYHSDSISAIIAPVAAPVTADLIRILPNLRLVVTTSAGVDHVDLVECRRRGISVANAGSSFSEDVADTAVGLLIDVFRRISAANRFVKQRFWPLKGDYPLGSKLGRKRIGIVGLGSIGSKVATRLDAFGCQISYSSRNRKPYDVPYHYYMDIEEMAANSDALIICCELNEKTLRLINKDVLSALGKRGVIVNVARGAIIDEEEMVRCLREGEIGGAGLDVFEDEPNVPKELFELDNVVFSPHSAFMTLEGLEELGKVVVGNIEAFFSNKPLLTPVL

SEQ ID NO: 18890 - protein, 132 aa, Cryptococcus neoformans var. neoformans JEC21
MGRTYRIYLAGESVLMCRHCGNHLAVSEGIISKQFTGQHGRAILVHTVVNTYSGETEDREMRTGKHTVRDVYCRVCHSTLGWKYDFASEHDQKYKEGKYILEREMITEKPERHDIINGKPHIEEIPVREILA

SEQ ID NO: 18891 - protein, 548 aa, Buchnera aphidicola (Pterocomma populeum)
MAAKDVKFGNEARIKMLRGVNVLADAVKVTLGPKGRNVVLDKSFGAPSITKDGVSVAREIELEDKFENMGAQMVKEVASKANDAAGDGTTTATLLAQSIVNEGLKAVAAGMNPMDLKRGIDKAVISAVEELKNLSVTCSDSKAITQVGTISANADEKVGSLIAEAMEKVGNDGVITVEEGTGLQDELEVVKGMQFDRGYLSPYFINKSETGIVELENPYILMADKKISNIREMLPILESVAKSGKPLLIISEDLEGEALATLVVNSMRGIVKVAAVKAPGFGDCRKAMLQDISILTNGTVISEELAMELEKSTLEDLGQAKRVVISKDTTTIIGGVGEKHAIQARINQIRQEIQDASSDYDKEKLNERLAKLAGGVAVLKVGAATEVEMKEKKARVEDALHATRAAVEEGVVAGGGVALVRVAGKLSNLRGQNEDQNVGIRVALRAMEAPLRQIVSNSGEEPSAVTNNVKDGKGNYGYNAATDEYGDMIDFGILDPTKVTRSALQYAGSVAGLMITTECMVTDLPKEDKSSDLGSAPAGGMGGMGGMM

SEQ ID NO: 18892 - protein, 444 aa, Glycine max
MECSDTKPVKPNSNNISEMVCKFAKVCKLKSIGVFSSEIPNLPHLQRSIYNETLLSEDSSEESRCYDQKVHPHPTEVPAKENACAGLEVMRKLFDAVSALKLAYLQLQQAHIPYDPQKIVAADDLVVAELEKLCKFKREYVQKHCKKTRFNAARSSLLMAEIVAKEALLGKLKSQNSAKDSDILQLWRELQDLEMGNRNLSEKIKQISSEKRRAGVLSVTKFQDVFNAASKSIHDFAKPLISLMKASGWDLDRAANSIENGAVYSKRCDKKYAFEAYIARRMFHGIALTSYDVSDIMKFDDPFDALMENPHSDFAKFCQAKYLLVVHPKIEESFFGNLDHRTFVMSGKHPRTKFYQLFAKMAKWVWVLLGSAVSIDPEATLFSVSRGSVFSSLYMESVEEEKESAILSDEERVTYKVQFMIMPGFQIGKMVVKSRVYVSKHSLS

SEQ ID NO: 18893 - protein, 844 aa, Bradyrhizobium japonicum
MSLKPARLREGRTAAMTSKPGDRPRQYIGPRAGCLGGAPSSRRTRDFSCLRPPWPLSPTGVNAMSPLSLPVATLGTPRIGPRRELKLALESYWAGKISEQQLHEDAFGLRAANWARQKSLGVTIIPSNDFSLYDQVLDTSVMVGAIPEIYAANGESVSLQTYFAMARGSQCGEQDASCAQSPRGSGVPAQEMTKWFDTNYHYMVPEFYRGQAFRLCSRKPVEEYEEARALGFQTRPVLIGPVTFLKLGKSTDSAFQPLSLLDDLIPVYIDLLHELAKRGASWVQFDEPCLVLDLDEAARNSLLHAYNRFAKEGPAIKIMLASYFGALGDNLDTALSLPISGLHVDLVRAPELLDQIVADGRSDLVMSLGVIDGRNVWRSNLPSLRQRLKPSIAKLGRHRVQLAPSCSLLHVPVDVELETGLASDVKSWLAFSVQKMRELAILARVLAGDQNVGLALAESECAATARRTSPKIHNANVAVRMRAIDQTMRQRATPFARRSEIQRERFGLPAFPTTTIGSFPQTTAVRNARAAHARGAMSEEQYDRFLKEEIARAVRWQEDIGLDVLVHGEFERNDMVQYFSEQLAGFAFTRNGWVQSYGSRCVRPPILFGDVVRPKPITVEWWRYAQSLTSKPMKAMLTGPVTILNWSFVRDDIPRSEVCRQLALAMRDEVRDLENAGAAMIQIDEAALREGLPLRRSDWKAYLDWAGDCFRICSSGVTDQTQIHTHMCYSEFNDIIGAIAAMDADVISIETSRSKMELLDAFRRYEYPNQIGPGVYDIHSPRVPETDEMKELIVLARTRLQDSQLWVNPDCGLKTRKWEEVRPALANMVAAARELRAASDPQIR

SEQ ID NO: 18894 - protein, 547 aa, Buchnera aphidicola (Tetraneura caerulescens)
MAAKDVKFGNEARVKMLRGVNVLADAVKVTLGPKGRNVVLDKSFGAPSITKDGVSVAREIELEDKFENMGAQMVKEVASKANDVAGDGTTTATLLAQAIVNEGLKAVAAGMNPMDLKRGIDKAVINAVSELKQLSVPCLDSKAITQVGTISANADETVGTLISEAMEKVGNDGVITVEEGTGLEDELEVVKGMQFDRGYLSPYFINKPETGIVELENPYILMVDKKISNIRELLPILEAVAKSSKPLLIISEDLEGEALATLVVKSMRGIVKVAAVKAPGFGDRRKAMLQDISILTAGTLISEELAMDLEKSTLEDLGQSKRVVITKDTTTIIDGSGSKKDIKNRISQIKQQIQESTSDYDKEKLNERLAKLSGGVAVLKVGAATEVEMKEKKARVEDALHATRAAVEEGVVPGGGVALVRVAQKISKILGQNEDQNVGIRVALRAMEAPLRQIVSNSGEEPSVVTNNVKDGIGNYGYNAATDEYGDMIKFGILDPTKVTRSALQYAGSVAGLMITTECMVTDLPKEEKSDLSVPPQGGMGGMGGMM

SEQ ID NO: 18895 - protein, 550 aa, Buchnera aphidicola (Thelaxes suberi)
MAAKDVKFGNDARVKMLRGVNVLADAVKVTLGPKGRNVVLDKSFGAPAITKDGVTVAREIELEDKFENMGAQMVKEVASKANDAAGDGTTTATVLAQSIVTEGLKAVAAGMNPMDLKRGVDKAVIAAVEELKCLSVPCSDFKAIAQVGTISANSDETVGKLIAEAMEKVGKEGVITVEEGTGLQDELDVVEGMQFDRGYLSPYFINKPDTGSIELDNPFILLADKKISNNREMLPPLESVAKAGNLLIIAEDVEGEALATLVVNTMRGIVKVAAVKAPGFGDRRKAMLQDIATLTGSTVISEEIGLELEKTTIEDLGHAKRVVINKDTTTIIDGIGNESAIKGRVVQIRQQIEEATSDYDREKLQERVAKLAGGVAVIKVGAATEVEMKEKKARVEDALHATRAAVEEGVVAGGGVALIRVAGKISSLTGENEDQNVGIKVAIRAMESPLRQIVINAGEEASVIANNVKAGKGNYGYNAYSEQYGDMIKMGILDPTKVTRSALQYAASVAGLMITTECMITDLPKSDSSDLSNAGNGGMGGGMGGMGGMM

SEQ ID NO: 18896 - protein, 340 aa, Campylobacter jejuni subsp. jejuni NCTC 11168
MAITVYYDKDCDLNLIKSKKVAIIGFGSQGHAHAMNLRDNGVNVTIGLREGSVSAVKAKNAGFEVVSVSEASKIADVIMILAPDEIQADIFNVEIKPNLSEGKAIAFAHGFNIHYGQIVVPKGVDVIMIAPKAPGHTVRNEFTLGGGTPCLIAIHQDESKNAKNLALSYASAIGGGRTGIIETTFKAETETDLFGEQAVLCGGLSALIQAGFETLVEAGYEPEMAYFECLHEMKLIVDLIYQGGIADMRYSISNTAEYGDYITGPKIITEETKKAMKGVLKDIQNGVFAKDFILERRAGFARMHAERKNMNDSLIEKTGRNLRAMMPWISAKKLVDKDKN

SEQ ID NO: 18897 - protein, 553 aa, Buchnera aphidicola (Tuberolachnus salignus)
MAAKEVKFGNDARAKMLRGVNVLADAVKVTLGPKGRNVVLDKSFGAPTITKDGVSVAREIELEDKFENMGTQMVKEVASKANDAAGDGTTTATVLAQSIITEGLKAVAAGMNPMDLKRGIDKAVIAAVEELRKLSVPCSDSKAIAQVGTISANSDLTVGKLIAEAMGKVGKEGVITVEEGTGLQDELDVVEGMQFDRGYLSPYFINKPESGAVELENPFILLADKKISNIRELLPILEAVAKAGKSLLIIAEDVEGEALATLIVNTMRGIVKVAAVKAPGFGDRRKAMLQDIATLTGGTVISEEIGLELEKTILDDLGQAKRVVINKDTTIIIDGIGNEINIKGRIAQIHQQIEEATSDYVKEKLQERVAKLADGVAVIKVGAATEVELKEKKGRVEDALHATRAAVEEGVVAGGGVALIRVAGKISNLTGDNEDQNVGIKVALRAMESPLRQIVINAGEEASVIANNVKACEGSYGYNAYTEEYGDMISMGILDPTKVTRSALQYAASVAGLMITTECMITDLPKGETPDLNNSGGMGGGMGGGMGGMGGMM

SEQ ID NO: 18898 - protein, 394 aa, Lotus corniculatus var. japonicus
MALRMNPLPTQTSSFMALPQIASLRSPKFVMASTLRSGSKEVESIKKPFTPPREVHVQVTHSMPPQKIEIFKSLEGWAEENILVHLKPVEKCWQPQDFLPDASADGFEEQVRELRERAKEIPDDYFVVLVGDMITEEALPTYQTMLNTLDGVRDETGASPTPWGVWTRAWTAEENRHGDLLNKYLYLCGRVDMRQIEKTIQYLIGSGMDPRTENSPYLGFIYTSFQERATFISHGNTARHAKEHGDIKLAQICGLIAADEKRHETAYTKIVEKLFEIDPDGTVMAFADMMKKKIAMPAHLMYDGRDDNLFDNYSSVAQRIGVYTARDYADILEFLVGRWKVEQITGLSGEGRKAQEYVCGLPPRIRRLEERAAARVKETSTIPFSWIHDREVLL

SEQ ID NO: 18899 - protein, 209 aa, Pseudomonas fluorescens
MTRHTETAILAGGCFWGMQDLLRRYPGVLHTRVGYTGGDVPNATYRNHGNHAEAIEIVFDPAVISYRQILEFFFQIHDPSTPNRQGNDLGPSYRSAIYYLNEQQRDIAEDTAADVDASHLWPGRVVTEIEPAGPFWEAEPEHQDYLERIPNGYTCHFIRRMEAPQARLKVEFVRRRGDRFRPFSALTTGGNQPGARGGLTNNTCQHPRH

SEQ ID NO: 18900 - protein, 337 aa, Neisseria meningitidis Z2491
MQVYYDKDADLSLIKGKTVAIIGYGSQGHAHAANLKDSGVNVVIGLRQGSSWKKAEAAGHVVKTVAEATKEADVVMLLLPDETMPAVYHAEVAANLKEGATLAFAHGFNVHYNQIVPRADLDVIMVAPKGPGHTVRSEYKRGGGVPSLIAVYQDNSGKAKDIALSYAAANGGTKGGVIETTFREETETDLFGEQAVLCGGVVELIKAGFETLTEAGYAPEMAYFECLHEMKLIVDLIFEGGIANMNYSISNNAEYGEYVTGPEVVNASSKEAMRNALKRIQTGEYAKMFIQEGNVNYASMTARRRLNADHQVEKVGAQLRAMMPWITANKLVDQDKN

SEQ ID NO: 18901 - protein, 427 aa, Pseudomonas syringae pv. syringae B728a
MSRSETLFANAQKHIPGGVNSPVRAFKSVGGTPLFFKHAAGAYVTDEDDKRYVDYVGSWGPMILGHSHPDVLDAVRSQLEHGLSYGAPTAMETEMADLVCELVPSMEMVRMVSSGTEATMSAIRLARGFTGRDSILKFEGCYHGHSDSLLVKAGSGALTLGVPSSPGVPAAFAKHTLTVPFNNLDAVRDLLAEVGQEVACIIVEPVAGNMNCVPPAPGYLQGLRELCDEHGVVLIFDEVMTGFRVALGGAQAYYGVTPDLSTFGKIIGGGMPVGCFGGKREIMSHIAPLGPVYQAGTLSGNPLAMAAGLTTLRLISRPGFHDELSDYTRRLLEGLQQRADAAGIPFVTTQAGGMFGLYFSEADEIVTFEDVMTSDSERFKRFFHLMLDGGVYLAPSAFEAGFTSIAHGDAELKLTLDAAEKAFAALK

SEQ ID NO: 18902 - protein, 283 aa, Raphanus sativus
MAKEVEGAEGFATRDYEDPPPTPFFDAEELTKWSLYRAVIAEFVATLLFLYVTVLTVIGYKISSDTKAGGDECGGVGILGISWAFGGMIFILVYCTAGISGGHINPAVTFGLFLARKVSLVRAVLYMVAQCLGAICGVGFVKAFQSSYYVRYGGGANSLADGYSTGTGLAAEIIGTFVLVYTVFSATDPKRNARDSHVPVLAPLPIGFAVFMVHLATIPITGTGINPARSFGAAVIYNESKPWDDHWIFWVGPFIGAAIAAFYHQFVLRASGSKSLGSFRSAA

SEQ ID NO: 18903 - protein, 283 aa, Raphanus sativus
MAKDVEGAEGVTARDYEDPPPTPFFDAEELTKWSLYRAVIAEFVATLLFLYITVLTVIGYKISSDTKAGGDECGGVGILGIAWAFGGMIFILVYCTAGISGGHINPAVTFGLFLARKVSLVRAVLYMVAQCLGAICGVGFVKAFQSAYYVRYGGGANSLADGYSTGTGLAAEIIGTFVLVYTVFSATDPKRNARDSHVPVLAPLPIGFAVFMVHLATIPITGTGINPARSFGAAVIYNESKPWDDHWIFWVGPFIGAAIAAFYHQFVLRASGSKSLGSFRSAA

SEQ ID NO: 18904 - protein, 372 aa, Kluyveromyces lactis NRRL Y-1140
MEYQPVNLQQMNTAPAPATNPVNPADVTVGSQSTDYLLAQQKESLLPQRSTVSKGKYTLHDFQIMRTLGTGSFGRVHLVRSVHNGRYYAIKVLKKHQIIRMKQIEHTNDERRMLKLVEHPFLIRMWGTFQDSRNLFMVMDYIEGGELFSLLRKSQRFPNPVAKFYAAEVTLALEYLHSHNIIYRDLKPENILLDRNGHIKITDFGFAKEVITVTWTLCGTPDYIAPEVITTKPYNKSVDWWSLGILIFEMLAGYTPFYDVTPMKTYEKILAGEVVYPPFFHPDVVDLLGKLITADLTRRLGNLQSGPDDIKSHPWFAEVIWEKLVAKDIETPYEPPIAVGVGDSSLFDQYPEEQLDYGVQGEDPYGQYFLDF

SEQ ID NO: 18905 - protein, 566 aa, Listeria monocytogenes str. 4b F2365
MTNLRKRLSRLYAEDVVDSLAARIEARVQQTQQRKLTRKDQWDEKDIVLITYGDQFKEESKKTLKTFKKMYDSYLKSTFEVVHFLPFYPYSSDDGFSVIDYKAVNPELGDWEDIKEMEQSARLMFDFVCNHMSAKSDWFKRYLAGDEEFRNFFVEMDPKTDLSSVTRPRATPVLTPFQFDSGKVGHIWTTFSEDQIDLNFASPEVLYKMIDVLMFYLEEGAEYVRLDAVGFMWKVPGTSSIHLEETHEIVKLFRDLVDIAAPGTIIITETNVPHVDNISYFGNGEKEAHMVYQFPLPPLVLHAIHHGNAEFLRNWAKNLELPEGKRTFFNFLASHDGIGLNPVRGIIPEAEILALVNDLEEEGALVSYKQNPDGSKSPYEINVTYMDALSKQADTDDLRMSRFLVAHAVLMSIPGVPAVYVQSILGSRNDYSGVETTGHNRSINRKKYDLAEITAELEQRGSLRKATYDALTKLISTRKAESLFHPEIPMEVLESTAELFVVKRSSDVESIILIHNLSEKEVSYSLDSGVYTNLYTGSTVTGSDSIKLSGYEFCWLKTKNYREEQK

SEQ ID NO: 18906 - protein, 283 aa, Brassica napus
MSVGVPVNTSSSSQLPAATTRRRVADSQEDHCNFSTVGGGNAVVYVPDEEEATSCCSLSDGGGLSSCCPSGSHNNYLVGFLSLRKFRLVWMLMVDNKSQWTAKNMRSASNLGRVILSLLGILVFTFFLIVALSGGRRQHVEEKHEFVFSIHPRNNIEKIIREEESSSNSIQLLLPQRKPIPEIWNQPETGNYHKCLTRPKNQRPIKQTNGYLVVHANGGLNQMRTGICDMVAIAKIMNASLVLPFLDHSSFWSDPSTFKEIFDWRHFINVLAEDVNIVEYLPQ

SEQ ID NO: 18907 - protein, 175 aa, Secale cereale
  misc_feature (168)..(168): Xaa can be any naturally occurring amino acid
  unsure (1)..(175): unsure at all Xaa locations
MAPAVMASSATTVAPFQGLKSTAGLPVGRRSGSAGLSSVSNGGRIRCMQVWPIEGIKKFETLSYLPPLSTEALLKQVDYLIRSKWVPCLEFSKVGFVFREHNNSPGYYDGRYWTMWKLPMFGCTDATQVLNEVEEVKKEYPDAYVRVIGFDNMRQVQCVSFIAFRPPXCEESGKA

SEQ ID NO: 18908 - protein, 380 aa, Oryza sativa
MAHDEAVATQKIGKTTSPPKDQPTPCPFPDWSAVQAYYGPGVLPPTYFAPAIASGHAPPPYMWGPQPIMPPPFGTPYAAMYPHGGAYPHPLMPMMANPLSMEPAKSASSKEKGSNKKLKEVDGAAVSTGSGDSKKTMTSSGDYSAEGSSDVNDLKVGKTGRKRRLDDGAGAETSAAAKMENALPPSHILGSTAILPNHSFPAQVIRPSATNVANSRALGTPISPPPGVIVPSHTGVSTELLIKDERELKREKRKQSNRESARRSRLRKQAETEDLATQVESLTAENTSLRSEISRLSESSEKLRLENSALMGKLKDPAASTQAETSLQKTTTASSPRVVENFLSMIDNTNKTSVRHTEHAEPKLRQLLGSGPATDVVAAS

SEQ ID NO: 18909 - protein, 645 aa, Xanthomonas axonopodis pv. citri str. 306
MPGVTLHALFYSSRDSEMSDWSLDQARKTYSIPHWADGYFDVNAAGHVVVTPTADGPAVSLPEVVDAARAAGAKLPLLVRFPDILGQRLGKLQAAFAQAQSEWDYAGGYTAVYPIKVNQHRGVAGTLASHHGEGFGLEAGSKPELMAVLALSRPGGLIVCNGYKDREYIRLALIGRKLGLQTFIVIEKPSELTLVLEEARALDVKPGLGVRMRLASLGAGKWQNSGGDKAKFGLSPRQVLDLWKTLRDTEYADSLNLLHFHMGSQISNVRDIANGMREATRYFVELSRLGAKISHVDVGGGLGIDYEGTRSRSYCSINYGLHSYASNIVQPLASACEEHGLTPPRIVTECGRAMTAHHAVLIANVSEVEQAPEGRVPDAHDDEPAAIRHLREIHDELDVRPAVELFQEAQHFHAEGLSAYALGQIDLTHRARIDDLFYAIAHGVRARLSFDEKSHRPVLDELNERLVDKYFVNFSVFESIPDVWAIDQVFPIVPIERLNEAPQRRGIIADMTCDSDGMVKTYVENESLDSSLPLHRLNAGESYRIGFFLVGAYQEILGDIHNLFGDTDAVEVVVDRDGYRIAQQRRGDTTDVMLDYVGYQLDTLRATYAERIAAAHLSPERAQELSAALEAGLTGYTYLSDEPLG

SEQ ID NO: 18910 - protein, 175 aa, Secale cereale
MAPTVMASSATSVAPFQGLKSTAGLPVSRRSNGASLGSVSNGGRIRCMQVWPIEGIKKFETLSYLPPLTTEALLKQVDYLIRSKWVPCLEFSKVGFIFREHNASPGYYDGRYWTMWKLPMFGCTDATQVINEVEEVKKEYPDAYVRIIGFDNMRQVQCVSFIAFKPPGCEESGKA

SEQ ID NO: 18911 - protein, 262 aa, Pyrococcus furiosus DSM 3638
MVKVAYVQMEPKILELDKNLSKAEKLVKEAAKREAKLIVLPELFDTGYNFESRDEVFEIAQRIPEGETTTFLMDLAGDLEVYIVAGTAEKYNDRLYNSAVLVGPTGYLGKYRKIHLFYREKVFFDPGDLGFNVFDLGFIRVGIMICFDWFFPESARTLALKGADIIAHPANLVMPYAPRAMPIRALENRVYIITADRVGEERGLRFIGKSLIASPKAEVLAMGSETEEEVGVAEVDISLVRNKRINDLNDIFKDRRPEYYFR

SEQ ID NO: 18912 - protein, 192 aa, Chara globularis
MGRAKIEIKRIDNATSRQVTFSKRRNGLLKKAYELSVLCDADIAVIMFSPTGKLFEYANSSMKEILDRYHSCPPEQREKRKFDNTDYLSKEAKRLRHEVELAKQENRHLSGEDLNAVQMPELDGLELKLEDALRKIRFRKREVMQMEIDRLQQKVWTSSPQFLLAWRSCHPAVVQIIIFCSHPAFVPKFILQ

SEQ ID NO: 18913 - protein, 782 aa, Crocosphaera watsonii WH 8501
MNSIKTHSLGYPRIGAKRELKRATEAYWKGDLTLEELLATGKTIRETNWKKQESAGIGLIPINDFSFYDQMLDMSCLLGNVPARFKWTGGKTDVDTVFTVARGTQGGVSLVEEEKDCQTGKVSTFASEMTKWFDTNYHYIVPEFRSDTTFKLSSDKIFEEFAEAKALGINGKPVLIGPVTYLSLGKIQGTNNPDFDPFSLLDNLVDVYEEIIGKLAAAGAEWIQLDEPIFSTDLSKEQLNALKKSYDRLQAAKGTAKILVTTYFGGVRENLGSYLSLPVDALHFDFVRGAEDVETVLANFPSDKILSVGIVEGRNIWKNNYDRSLEVLQKATAAVGADRLWVAPSCSLLHSPVTLENERKIDEELKSWMAFANEKLQEVVELRQLLDGTGDEKALQANREAIKARATSQRIHNEAVKTRLAGVGDRDFHRASEFTVRQGKQQEKLQLPEFPTTTIGSFPQTKEIRKARAQWKKGAMSDADYDQFLKTETAKCVTFQDDIGIDMPVHGEFERNDMVEYFGENLEGFAFTSNGWVQSFGSRYVKPPIIFGDVSRPSPVTVYWSNYAQSLTNRPMKGMLTGPVTILQWSFVRDDQPRSVTTHQIALAIRDEVVDLEAAGIAAIQIDEPAFREGLPLRKSEWDEYLDWAVKAFRLSASGVKDDTQIHTHMCYSEFNDIINSIADLDADVITIETSRSNMELLNAFVEFKYPNEIGPGVYDIHSPRVPAEDEMVNLMNKAEAVLPRGHLWVNPDCGLKTREWKEVKLSLTNMVKAASKLRSLNNPMG

SEQ ID NO: 18914 - protein, 479 aa, Burkholderia sp. 383
MKAGRHTNLAAVLRAMAGGLALAGACACGCSTATAAERPAQPGAASPTPTPTVALPNFAALVRRVGPAVVNISVTREVTQMGIQLPPGIAPDHPLAPFLARRVIGNREEVSLGSGFIVSEDGVILTNRHVVGDAVAIDVKLTDKRQFKGRVIGSDPVSDVAVIRIDAHNLPVVATGDPARTEVGDWVMAIGSPYGFANTVTQGIVSAKSRSLPGERAIPFIQTDVPINPGNSGGPLFDLGGRVIAINSMIFSKTGGYQGLAFAIPIDIALDVKDQLLRTGKVTRGRLGVAVQEVSQALARSFGLASPDGALITMVEPDGPAAHAGLQPGDVVLAVDGKPVAESSDLLGTVAGMRAGRQADLLVWRAGRAMHMSATVGAFDSGTAAASGEQGPARFGLALRAATEQERQRLGVGQALVVEQASGQAARAGLQPGDVVLSVNGTPVANIGALMTEIDAAHGNVALLVQRGGTRLYVPIEIG

SEQ ID NO: 18915 - protein, 372 aa, Triticum aestivum
MDLSNGSPVISDPMAMSQSLMGVLPSNMMPFSVRPGGYSGAGGAGVNVSRRKIEEVLVSGLLDAMKSSSPRKKHNVVFGQENLPEEDPAYSAWMAKCPSALASFKQIVASAQGKKIAVFLDYDGTLSPIVDDPEKAVMSPVMRAAVRNVAKYFPAAIVSGRSRKKVLEFVKLKELCYAGSHGMDIMTSSSAHYEHNTEKGKEANLFQPARDFLPMIDEVSKALLEVTSGIEGASVEDNKFCVSVHYRNVDEKDWELVARLVNEVLEDFPALKVTNGRMVLEVRPVIDWDKGKAVEFLLQSLGLSDSENVIPIYIGDDRTDEDAFKVLRERNCGYGILVSQVPKETEAFYSLRDPSEVMEFLNSLVRWKKHSL

SEQ ID NO: 18916 - protein, 336 aa, Coleochaete scutata
MGRGKIEIRRIENATSRQVTFSKRRNGLLKKAYELSVLCDVDIAVIVFSPTGKLFQYASSSMKEILERYEQVPPEQKEKGSQRLDNMDYLNREVAKLRNEVEHKYHEARQLEGEDLDRLGVYELEQLEQKLSNSMRRIRGRKDELMKAELEGLRKQVADMETALVGAASFDGRPLSGSSNYLLQSIPGIRTMPPSSLGGMNPASTSLQLGSDRLFGNRGVELHDRSASDESPVMTNRMSVDFAQAPREMSGVDLSGSPVPPWKSQAAAAAQQEWKNQASSPTDWKVTNTEHLDSWPKAPAPTPEWKSTSVQPEWKNQSSPSSEWKPLDWMYHGPQD

SEQ ID NO: 18917 - protein, 591 aa, Arabidopsis thaliana
MAAATSSIAPSLSCPSPSSSSKTLWSSKARTLALPNIGFLSSSSKSLRSLTATVAGNGATGSSLAARMVSSSAVKAPVSLDFETSVFKKEKVSLAGYEEYIVRGGRDLFKHLPDAFKGIKQIGVIGWGSQGPAQAQNLRDSLVEAKSDIVVKIGLRKGSRSFEEARAAGFTEESGTLGDIWETIAGSDLVLLLISDAAQADNYEKIFSHMKPNSILGLSHGFLLGHLQSSGLDFPKNISVVAVCPKGMGPSVRRLYVQGKEINGAGINASFAVHQDVDGRAADVALGWSVALGSPFTFATTLEQEYRSDIFGERGILLGAVHGIVESLFRRYTENGMSEDLAYKNTVECITGTISRTISTQGMLAVYNSLSEEGKKDFETAYSASFYPCMEILYECYEDVQSGSEIRSVVLAGRRFYEKEGLPAFPMGNIDQTRMWKVGERVRKSRPAGDLGPLYPFTAGVYVALMMAQIEILRKKGHSYSEIINESVIESVDSLNPFMHARGVSFMVDNCSTTARLGSRKWAPRFDYILTQQALVAVDSGAAINRDLISNFFSDPVHGAIEVCAQLRPTVDISVPADADFVRPELRQSSN

SEQ ID NO: 18918 - protein, 153 aa, Narcissus pseudonarcissus
MCGGAIISDFIPPSRSRKLTADYLWPNLNKGKDKKKSFGFEDDFEADFNEFEDESEEGESEAVDVKPFKFGAKAGFSREGSTYLKPIELNGAAERSSKRKRKNQYRGIRQRPWGKWAAEIRDPNKGVRVWLGTFNTAEEAARAYDDEARRIRG

SEQ ID NO: 18919 - protein, 182 aa, Zea mays
  misc_feature (66)..(66): Xaa can be any naturally occurring amino acid
  unsure (1)..(182): unsure at all Xaa locations
VPIPPGQVYAINDALSAEGAADDYEACLKQLVKNGVISMSAATGFPRFDLQLLGMGPDGHIASLFXGHPLVNEKERWVTYIKDSPKPPPERITFTFPVINSSAYVAMVVTGAGKAAAVQKALSDKQTSSDLLPVEMAVLQDGEFTWFTDKAAVSLLQNKLVDPGMFQFPVVFSARAISDMKS

SEQ ID NO: 18920 - protein, 221 aa, Closterium peracerosum-strigosum-littorale complex
MGRGKIEIRKIDNATTRQVTFSKRRNGLLKKAYELAVLCDVEIGVIIFSATGKLFQYASTNMDSIVERYRRLALETGKDPRPPWQQQNPPQSTGLGAQHGQHNKHGKEKPGQLQARTQQQRQQEQQEGEAKDTLHGVLTLKKAAEPQPLDLELSRLQAEQSRALVPLDTSAESFEGLGLEEMRQLEKQLEASLSRLRERKEELFNRTISELKSRLEGRSKA

SEQ ID NO: 18921 - protein, 438 aa, Bacteroides fragilis YCH46
MKVKPDLSFWKLWNISFGFFGVQIAYALQSANISRIFATLGADPHSLSYFWILPPLAGIIVQPIIGAASDKTWTRFGRRIPYLFAGSLLAVWVMCLLPNAGSFGMAVGTAMIFGLVALMFLDTSINMAMQPFKMLVGDMVNEKQKGLAYSIQSFLCNAGSLMGYLFPFIFTFIGISNTADKGTVPDSVIYSFYIGAAILILCVIYTTVKVKEMPPKEFEEFHGITADEKKEKADFISLLKHAPKVFWTVGLVQFFCWAAFMYMWTYTNGAIAATVWGTTDVQSAGYQEAGNWVGVLFAVQAIGSVIWAVILPLFKARKQAYAFSLVLGGIGFISTLFFHNEYLLFISYLLIGCAWAAMLAMPFTILTNSVSGKNMGAYLGLFNGTICVPQIAAALVGGGLLHLVGGHQVNMLVLAGVLLIAGAVCVYFIKETMAHHEA

SEQ ID NO: 18922 - protein, 551 aa, Buchnera aphidicola (Chaetophorus leucomelas)
MAAKDVKFGSEARAKMLRGVNILADAVKVTLGPKGRNVVLDKSFGAPSITKDGVSVAREIELEDKFENMGAQMVKEVASKANDVAGDGTTTATLLAQSIVNEGLKAVAAGMNPMDLKRGIDQAVIKAVKELKKLSVPCSDSKAITQVGTISANADETVGSLISEAMDKVGNDGVITVEEGTGLEDELDVVKGMQFDRGYLSPYFINKPETGNIELENPYILMVDKKISNIRDILSLLESVAKSGKPLLIIAEDLEGEALATLVVNSMRGIVKIAAVKAPGFGDRRKAMLQDISILTFLYNSDVISEELAMDLDKTTLEDLGQAKGVVITKDHTIIVGSGKKEIFKQILIRQQLIESTSDYDKEKLNERLAKLSGGVAVLKVGAATEVEMKEKKARVEDALHATRAAVEEGVVAGGGVALVRVAEKISRLKGQNEDQNVGIRVAVRSMEAPLRQIVANSGEEPSVVTNNVKDGVGNYGYNAATDQYGDMIKFGILDPTKVTRSALQYAASVAGLMITTECMVTDSPKEDKSSDMPSPSAGGMGGMGGMGGMM

SEQ ID NO: 18923 - protein, 338 aa, Cryptococcus neoformans var. neoformans JEC21
MFARQVAKNSSSLARGFASSARSNRKVAVLGAAGGIGQPMSLLLKQNPGVTGLSLYDIRGAPGVAADISHVNTHSTVKGFEKDDIKEALTGAEIVIIPAGVPRKPGMTRDDLFNTNASIVRDLAEACAEYCPKAFIGIISNPVNSTVPIFAEVLKKKGVFDEKRVFGITTLDVVRASRFLGEIKGKDPKDIKVTVVGGHSGVTIVPLLSQTPEGKDVSGEAYKALVNRIQFGGDEVVKAKAGTGSATLSMGYAGARFTDSLIRALNGETGIVEPTFVKSPLYESEGVEYFASNVELGPEGVKKINPVGQLSAEEQELLKACLPDLVKNIKKGVDFVKA

SEQ ID NO: 18924 - protein, 161 aa, Ashbya gossypii ATCC 10895
MPIDQEKLAKLQKLSANNKVGGTRRKLAKKSGTASANKDDSKLQAQLAKLKAVTMDQVEEANFFKDDGSVLHFNKVGVQVAPQHNTSVFYGIPQEKSLQDLFPSIIPQLGSESIDALTQLATQLQNAQAAAPATEGHEAGEKKDNDIPELIEGQSFDADVE

SEQ ID NO: 18925 - protein, 100 aa, Arabidopsis thaliana
  misc_feature (2)..(3): Xaa can be any naturally occurring amino acid
  misc_feature (6)..(6): Xaa can be any naturally occurring amino acid
  misc_feature (24)..(24): Xaa can be any naturally occurring amino acid
  misc_feature (88)..(88): Xaa can be any naturally occurring amino acid
  unsure (1)..(100): unsure at all Xaa locations
AXXLKXLWLKEVRSWLIGITGMRXTLRESLEKLGSPLSWEHVTKQIGMFCYSGLTPEQVDRLTSEYHIYMTRNGRISMAGVTTGNVGXLANAIHEVTKSS

SEQ ID NO: 18926 - protein, 472 aa, Oryza sativa
MAFFRGLTAVSRLRSRVAQEATTLGGVRWLQMQSASDLDLKSQLQELIPEQQDRLKKLKSEHGKVQLGNITVDMVLGGMRGMTGMLWETSLLDPDEGIRFRGLSIPECQKVLPTAVKDGEPLPEGLLWLLLTGKVPTKEQVDALSKELASRSSVPGHVYKAIDALPVTAHPMTQFTTGVMALQVESEFQKAYDKGMSKSKFWEPTYEDCLNLIARLPAVASYVYRRIFKGGKTIAADNALDYAANFSHMLGFDDPKMLELMRLYITIHTDHEGGNVSAHTGHLVGSALSDPYLSFAAALNGLAGPLHGLANQEVLLWIKSVIGETGSDVTTDQLKEYVWKTLKSGKVVPGFGHGVLRKTDPRYTCQREFALKYLPEDPLFQLVSKLYEVVPPILTELGKVKNPWPNVDAHSGVLLNHFGLSEARYYTVLFGVSRSIGIGSQLIWDRALGLPLERPKSVTMEWLENHCKKVAA

SEQ ID NO: 18927 - protein, 456 aa, Burkholderia sp. 383
MRQFDLQAVIDEARFGRFHAVVLCWCILIMILDGYDLAIVGISLPLIMKAMHISPVMAGVIASSSLFGMMVGSILLGSVADRIGRRPAIVLCVLLFSVFSAAAGAVSSAVAFCALRFLAGLGLGGIAPTCAAQMTEYSPRRMRSMLVSLMFAGYSGGGVLAALLGKTLLENYGWRSIYYAAAVPIVLVPVIWRTLPESLSFLVLKGRDADVRRIAQRLMPGEVPRPGDRFAMPKEEAGPTRLLGALFSEGRAFSTLMFWVTCITNLFMVYGLSSWLTKLMASAGYSLGSALTFVMAMNLGAVVGAIGGGWLADRLNIQRVLIGMYLVAAVSIALLGYQAPTAVLYAVVTVAGACTIGTQIVVYAYAGQFYPTNVRSTGVGWAAGIGRLGAMFGPILIGVIVGLALPLRFNFYAMAIPAVIGALAVALVNDRLSDRIRSRAAHDRAGELGAVGEGSA

SEQ ID NO: 18928 - protein, 493 aa, Candida glabrata CBS138
MFRAVSRRGFSSSSYLAAIKKQHDLVIIGGGPGGYVAAIKAAQLGLDTACIEKRGSLGGTCLNVGCIPSKALLNNSHLYHQIKSDTKNRGIDVKGDVEINVEQFQKAKDTVVKQLTGGVEMLFKKYKVNYYKGVGSFESENSVKVTPVEGIKGTVEDETIIEAKNIIIATGSEVTPFPGIKIDEERIVSSTGALSLKEVPKRLAVIGGGIIGLEMGSVYSRLGSKVTVLEFQPKIGASMDGEVAATSQKFLKKQGFNFKLSTKVVSAERNGDVVDIVVEDTKSGKTENIQADVLLVAVGRRPYIEGLGAEKLGLEVDKRGRLVIDEQFSTKHPHIKVIGDVTFGPMLAHKAEEEGIAAVEYIKKGHGHVNYGNIPSVMYTHPEVAWVGKTEEQLTEEGIKYKVGKFPFIANSRAKTNMETEGFVKILIDAETERMLGAHIIGPNAGEMIAEAGLALEYGASAEDVARVCHAHPTLSEAFKEANLAAFDKPINF

SEQ ID NO: 18929 - protein, 838 aa, Brassica napus
MILWWWSSTSYSPLRFLYCKCLCFFCLREKIMPTGRFETMREWVHDAISAQRNELLSLFSRYVAQGKGILQSHQLIDEFLKTVKVDGTTEDLKNRPFMKVLQSAEEAIVLPPFVALAIRPRPGVREYVRVNVYELSVDHLTVSEYLRFKEELVNGHANGNYLLELDFEPFNATFPRPTRSSSIGNGVQFLNRHLSSIMFRNKDSLEPLREFLRTHKHDGRAMMLNDRILNIRTLQEALARAEEFLSKLPLATPYSEFEFELQGMGFERGWGDTAQKVSEMVHLLLDILQAPDPSVLETFLGRIPMVFNVVILSPHGYFGQANVLGLPDTGGQVVYILDQVRALESEMLLRIQKQGLDVTPKILIVTRLIPEAEGTTCNQRLEKVSGTEHAHILRIPFRTEKGILRKWISRFDVWPYLETFAEDASNEIAAELQGVPNLIIGNYSDGNLVASLLACKLGVIQCNIAHALEKTKYPESDIYWRNHEDKYHFASQFTADLIAMNNADFIITSTYQEIAGSKNKVGQYESHTAFTLPGLYRVVHGINVFDPKFNIVSPGADMTIYFPYSDKERRLTALHESIEELLFSSEQNVEHVGFLSDQLKPIIFSMARLDRVKNLTGLVECYAKNSKLREVANLVVVGGYVDVNQSRDREEMAEIQKMHSLIKQYGLHGEFRWIAAQMNRARNGELYRYIADTKGVFVQPAFYEAFGLTVVESMTCGLPTFATCHGGPAEIIENGVSGFHIDPYHPEQVATTLVSFFETCNADPSHWEKISDGGLKRIYERYTWKKYSERLLTLAGVYSFWKHVSKLERRETRRYLEMFYSLKFRDLANSIPLATNEH

SEQ ID NO: 18930 - protein, 234 aa, Hyacinthus orientalis
MGRGKIEIKRIENTTNRQVTFCKRRNGLLKKAYELSVLCDAEVALIVFSTRGRLYEYSNNSIKSTIERDKKACADSSSSSAVIEVNTQRYYQQEASKLRQQIQILQNANRHLMGESLDPLNVKELKQLETRLERGITRVRSKKHELLFAELEYMQKREVELQTDNMYLRAKIGENERAHQASVVQAGTEFDALPTFDSRNYYQVHMLQAASHYSHHQDQTALHLGYETKADPSA

SEQ ID NO: 18931 - protein, 569 aa, Wolbachia endosymbiont of Drosophila ananassae
MAATNFSVACISKIFPTRSHTVAAQGGISAALGNIGEDDWRWHAYDTIKGSDWLGDQDAIEYMCKNAAKAVIELENFGVPFSRTEDGKIYQRSFGGMTTHFGKGKSAQRTCAAADKTGHAILHTLYQQCLKFNAEFFVEYFVIDLIMDSETCCGVLAWSLCDGTLHRFRAHRVVLATGGYGRVYFSATSAHTCTGDGNGMVVRAGLPLEDMEFVQFHPTGIYGSGCLMTEGCRGEGGYLVNSQGEKFMERYAPKAKDLASRDVVSRAITIEIREGRGVGPKKDYMYLTIAHLDPEVIKLRLPGISETARTFAGVDVTKDPIPVIPTVHYNMGGIPTNYYGEVITLKQGKEEVVDGLFAIGEAACVSVHGANRLGSNSLLDLVVFGRAAALRAKEKLKSGTPHKKLHSDCTDWIVDRFNKMRFASGGLKVAKIRSEMQNTMQKYASVFRVAEVLEEGKKAIKKVAKMMPDISLEDHSMMWNSDLVEALELANMIPQAVITMECAANREESRGAHAREDFPERDDKNWMKHTIAWLEEKKGQINVKIDYKKVAEKTLSGEIDFIAPEKRVY

SEQ ID NO: 18932 - protein, 284 aa, Zea mays
LAVIYGALLAASPSSRFLLLFLSGIYIINLGKTWEKLQLAARVIVAIENPQDIIVQSARPYGQRAVLKFAQYTGAHAIAGRHTPGTFTNQLQTSFSEPRLLILTDPRTDHQPIKESALGNIPTIAFCDTDSPMRYVDIGIPANNKGRNSIGCLFWLLARMVLQMRGTILPGHKWEVMVDLFFYRDPEEAKEQEEEAAVAPEFAAITDYQGADQWGGDQWTSDVTAPPVAPTGADWGAAPAPVPTGDGWDQAGAPAPVVDGTVPPLVAPTGWDQAAPPPTAQGWE

SEQ ID NO: 18933 - protein, 578 aa, Photobacterium profundum SS9
MYPNDVKIEEDHNAALKVKSDGNDEFTVFTSKLNQLLEDRHFSQANIIKAKEEAEKANAAKSSFLANMSHEIRTPLNGIIGMSGILSDTELNPSQAEYLQTIETSSQTLLLLINDILDLSKIESGNLVLSPHESNLAEVVYDTITIVQAKASEQGLNLQIQLDPELPTSVMLDEHRLRQVLMNLMSNAVKFTLQGSVTLSITYTDIGDKKASLLFSIKDTGIGIEKDKQQQVFAPFTQEDGSITRQFGGTGLGLAICRQLVELLGGSIELKSEKGVGSDFYFSLDVDVVKYQPKIISNFENKKCLLLSNQSSNAELIEIECKKWGLNVTISDIETAAVSGISQQYDLILYCQKTLNRTIKDIELFNRIQERPALVICSQLQDEQFDFGHTIDGLTILPLLGQRFVKAINSAFTNVLKNSEIQTKSALNPDSRLIDIKPVSINTTPVITESQDVILIVEDNIVNQKVASLLLKKAGYQIVVANNGQEAVDLITQKEPTLFKAILMDCMMPIMDGFAATEAIRLWEKEQHTDRLPIIALTASVLDEDISKCYEAGMDDYVAKPFRKEHLLDKLERLNEVA

SEQ ID NO: 18934 - protein, 464 aa, Lycopersicon pennellii
MARVTLFLLLLLVYGVVSEHFIVETLPGFHGKLPFTLETGYISVGEEEKVQLFYFFVQSERDPRNDPLMIWLTGGPGCSGLSSFVYEIGPLTFDYANSSGNFPKLELNSYSWTKVANIIFIDQPAGTGYSYANTSEAYNCNDTLSVTLTYDFLRKWLMDHPEYLNNPLYVGGDSYSGIFVALLTRKIYDGIEVGDRPRVNIKGYIQGNALTDRSIDFNGRVKYANHMGLISDKIYQSAKANCNGNYIDVDPNNILCLNDLQKVTRCLKNIRRAQILEPYCDLPYLMGILQETPTNGQSVFPIAGPWCREKNYIYSYVWANDKAVQKALNVREGTTLEWVRCNESMHYRGKERTESYVYDVPSVIDDHQHLTSKSCRALIYSGDHDMVVPHLSTEEWIETLKLPIADDWEPWFVDDQVAGYKVKYLQNDYEMTYATVKGAGHTAPEYKPEQCLPMVDRWFSGDPL

SEQ ID NO: 18935 - protein, 446 aa, Shewanella sp. ANA-3
MSEAKLLLVEDDASLREALLDTLMLAQYDCIDVASGEEAIIVLKQHQFDLVISDVQMQGIGGLGLLNYLQQHHPKLPVLLMTAYATIGSAVSAIKLGAVDYLAKPFAPEVLLNQVSRYLPLKQNSDQPVVADEKSLALLSLAQRVAASDASVMILGPSGSGKEVLARYIHQHSSRADEAFVAINCAAIPENMLEATLFGYEKGAFTGAYQACPGKFEQAQGGTLLLDEISEMDLGLQAKLLRVLQEREVERLGGRKTIKLDVRVLATSNRDLKAVVAAGQFREDLYYRINVFPLTWPALNQRPADILPLARHLLTKHAKALSIIDVPEFDEAACRRLLGHRWPGNVRELDNVVQRALILRSGTVITANDIIIDAQDVPLSSDDAEYCSEPEGLGEELKAQEHVIILETLAQCQGSRKLVAEKLGISARTLRYKMARMRDMGIQLPN

SEQ ID NO: 18936 - protein, 650 aa, Vibrio sp. Ex25
MAQQHNDWADITRLDTFPKVLQHNAKHWPEQVAMREKEFGIWREFTWQDYENRVKWMALALQDLGVGEQDVVGLLGDNRPEWVWGELAAHAIKGFSLGIYQDSMHEEVAYLINYAKAKVVVAEDEEQCDKLLELGDEIPSVEFIIYCDPRGMRKYDDPRLIDVEQVYKKGQLIDKADPDKYLNMVEATKGSDLSILCTTSGTTSKPKLAQLHSGTFLDHCAAYLRADPRSPGDNYVSVLPLPWIMEQVYVVGQALISRQIVNFVEEQETMMSDLREIGPNFVLLAPRVWENIVADVSARMMDSTPFKQKMYKLGMSLANKALEQGKRSKLAEWILLRALRDRLGFSNLTSAATGGAAMGPDTFRYLQAIGVPLKQLYGQTEMCGAYTVHQADDVDYDSVGVAFDNAEVKVINPDSNGVGEIIAKSTGMFTGYLNNQEAYDEDVQDGWMHTGDAGYFKDSGHLVVIDRLKDMSETSHGDRYSPQFIENKLKFSPFIAEAVVVGKGRPWLSAIICIRYAIVAKWAEQRGLAFTNYTNLSAQPEVYQAIREEVLKVNESLPDAQKISKFILLYKELDADDGELTRTRKVRRGVVAEKYGDIIETIYSDDPKVDVDTVITYQDGTKTRIQTSLVIETLIEHEPTLVDSEQRRIA

SEQ ID NO: 18937 - protein, 366 aa, Bradyrhizobium sp. BTAi1
MAPSRPDGSLATQTSTTSDADDPDANDPRRQRPQTPKETNMTAAIKQTPVTVLTGYLGAGKTTLLNRILTETHGKRYAVIVNEFGEIGIDNDLVVNAEEEIFEMNNGCICCTVRGDLIRILQGLMKRRGKFDGIIVETTGLADPAPVAQTFLVDEDVRRDTRLDAIVTVIDARHLLGDIDRAQEAQEQIAFADVVLLNKTDLASEAELDTIEARIRLINPYATLHRTQRCALDLEQILDRHAFDLDRVLAFEPNFLAEDHDHEHDSHVKSLSLTTEIPLVPEKFFPWIQQTVQLFGTDILRLKGILHFRDDPDRFVVQGIHMLLEGDHQRPWKPGEPRSSRLVFIGRDLPEEILRDGFGRCQSPEP

SEQ ID NO: 18938 - protein, 421 aa, SYNECHOCOCCUS SP. WH 8102
MALRAEPAAVVGWGSLNPLGADANSTWDAVIAGHSGIQTLQAPWSEDLPVRLAGCVPTGALDSLPPLLRRRSDRCAQLALVAARQAWAMTGPITQGLDPSRIAVVIGTGIGGLATMHDQHTQLSTGGPSRVNPLTVPMLIPDAAAGQVAIELGLLGGAHTPVSACASGAEALMLGQMLLNDDRADLVLAGGSEAPVNRLGLVGFAAMRALSSRNDAPDQASRPYGLGRDGFVLSEGAGVLALMRQRDTPAGADLGWLLASGSSSDAHHIVAPEPQGLQASRAIDDALRRADVSPSDLCGVQAHATGTSLGDLAEARALRRSLGSAADHLPVCAPKGQLGHLLGGAGAVETILALQALRLGVLPGSLNADPLDPEVELAVANQGPVQLSSDQGQRLLLKNAFGFGGHNISLVLAGSTPAQPG

SEQ ID NO: 18939 - protein, 385 aa, Brassica rapa
MVAHKETVCVTGASGFIGSWLVMRLLERGYFVRATVRDPGNLKKVQHLLDLPNAKTQLTLWKADLSDEGSYDDAINGCDGVFHIATPMDFESKDPENEVIKPTVNGVLGITKACDKAKTVRRIVFTSSAGTVNVEEHQKNVYDENDWSDLDFIMSKKMTGWMYFMSKTLAEKAAWDYAKEKGIDFISIIPTLVIGPFITTSMPPSLITALSPITRNEAHYSIIRQGQYVHLDDLCNAHIFLYEQAAAKGRYVCSSHDATILTISEFLRQKYPEYNVPSTFEGVDENLKSIMFSSKKLIDMGFNFKYSLEDMLVESIETCRQKGFLPVTLPEHLKSEDKVPGSDDNKEIKNGSAGLTDGMVACKKTEPGMAGEKADSHMSAQQICA

SEQ ID NO: 18940 - protein, 424 aa, Xylella fastidiosa Ann-1
MSNSPQTPLVTRQRLSEVRYEIRGELARRARELEAEGRKLIKLNIGNPGAFGFRAPEHLQRAIADDMGRTDPYTHQQGLPIAREAIAAAYARRHYPDVDADRVFVGNGVSELIDLSLRALLNPGDEVLVPSPDYPLWSAATILNDGRPVYYRCAPENGFQPDAVEIETLVSSRTRAIVLINPNNPSGANYSQELLERIVAIAVKHHLLLLVDEIYDQILYDGAVFVPVAPLAGTHPCITFSGLSKVHRACGWRVGWALLSGSSIQVDNLRNAMDLLGALRLCANVPGQYAIDAAVNGPDTITPLCSPGGPLYETRRAVIDACAASEHLSLVVPAGALYAFPSVVGPAARHFDDYAFALELMNEEGVLVVPGSSFNVPYRDHFRVTLLPDAGLIREVFSRIDRALSRRAEVADKVVPLKSRSAAA

SEQ ID NO: 18941 - protein, 743 aa, Kineococcus radiotolerans SRS30216
MSSIDRVIADGSVHSVFQPIIDLDSGAVVAYEALARGPQGPLATPDALFGAAREAGLLAELDQACRAAAFRGAVEHGLLAPLTVFVNVEPEVLDTAPVDDLLALAAGAPGELRIVLEITERALATRPAELLRTVDRVRALGWGVALDDVGADAASLAFMPLLRPDVVKLDLSLVQKRPSPVIAEIMNAVNDYAERTGARVLAEGIETPQHLTIARALGAHLGQGWLFARPAAGPAERFPVASLTLPDPVAAGAVDQPSPFDCLPAGTQLRRSPKRLLVELSKQLERQAMRLGETCVVASTFQEARHFTPATAQRYRDLVARTGFVCALGEDLPLEPVPGVRGAALAADDPIRGEWDVVVVSPHFSAALLARDLGDDGPDMERTFEYALTYRRQTVVAAAHSLLSRVAPAVGPVPAAAPAAAPASPPPGARPAAVVAPAAGEPLLQRALAASTSGITIADMRRPDQPLVYVNRAFEELAGYRSEELLGRNCRFLQGADTDHDAIGRLRSAIAEGREVRETLLNYRGPDRSEWWNEIYMAPVTDEDGRLVQYIGVQNDVTAQVEAERALIRERDRAQSYLARIEELAYTDSLTGLVNRRRFEERVEVELWEARGGDSALAVLFMDLDGFKAVNDELGHAAGDQLLVQVAARLKARLRRSDLAARLGGDEFLVSLQGLDRASARREADRVAEQLRAAIAEPYDIAGQPVRVTVSIGVATFPEDDAEDFRSLLHRADVRMYAAKHGR

SEQ ID NO: 18942 - protein, 141 aa, Photorhabdus luminescens subsp. laumondii TTO1
MTVERTFSIIKPNAVKKNAIGAIYARFESAGFKIIAAKMLHLTREQAEGFYAEHKGRPFFDGLVEFMTSGPIVVQVLEGENAVQRHRDLMGATNPDNALAGTLRADYADSFTENAVHGSDAVESANREIAYFFTEDEICPR

SEQ ID NO: 18943 - protein, 212 aa, Wolbachia pipientis
TSCSSAITFIDGDKGVLRYRGHDVADLTENNDFTAVIYLLLYGKLPSSNQHRTFLLKIKELSKVPEQVIDVIKAFPKTAHPMSILIACFASLSALYYEKHGTNINNKDLNFGISAIAQIPVIVAMIYRYINDQAFINTNNELNYSENFLKMMFGDAFNNDKGTLFARALDKIFTLHADHEQNASTTAVRLVGSAGSNLLASLSAGVATLWGP

SEQ ID NO: 18944 - protein, 394 aa, Zea mays
MQAAAASVKSSTTAAAAAATCKAGFKPLHLPPLPAAGSRPLSLSVSARPLYRQDHVLATTVAMAAAGRSDRAASPAPPSATADGARPVVEVAAPAETARRAKIGVYFATWWALNVIFNIYNKKVLNAFPYPWLTSTLSLAAGSAIMLASWATRIAEAPQTDLDFWKALTPVAIAHTIGHVAATVSMAKVAVSFTHIIKSGEPAFSVLVSRFFLGEHFPAPVYFSLLPIIGGCALAAVTELNFNMVGFMGAMISNLAFVVRTIFSKKGMKGKSVSGMNYYACLSIMSLVILLPFAVAMEGPKLWAAGWQQAVAEIGPNFVWWVAAQSVFYHLYNQVSYMSLDEISPLTFSIGNTMKRISVIVASIIIFQTPVQPINALGAAIAILGTFIYSQAKQ

SEQ ID NO: 18945 - protein, 411 aa, Clostridium thermocellum ATCC 27405
MKRRVVVTGLGVVSALGTEIDEFWNAIKEGKCGITMVTKFDASNMPTKVAAEIKDFDPTKYIDKKEAKRMDPYCQYAMAASKMAVEMSGLDLDKVDKNKFGVIVGSGIGGITTFEEQFRVYIEKGPGRVSPFFIPMMISNMAAGQIAMQFGAKGFNECVVTACATSANAIGDAFKVIQRGDADVIITGGSEAPITPLSFAGFCSMKAMTTTEDPALACRPFDAERNGFVMGEGAAILVLEELEHALKRGANILAEIVGYGVTNDAYHITAPAPEGEGAARCMKMAIDDAGIKPEDIDYINAHGTSTEYNDKFETAAIKTVFGEHARKLAVSSTKSMTGHLLGAAGAIEAIITVLSIKDGFLPPTINYRTPDPECDLDYVPNKGRSADITYALSNSLGFGGHNVTIVFKKFC

SEQ ID NO: 18946 - protein, 560 aa, Pseudomonas sp.
MTKLQIVGMTCASCVEHVKEALEKIPGVHRADVSYASGKAELKVDEGVSREQMQAAVEALGYRAAFEDATAPTRSGLLDKARGWLSGSIGAGKDGDRLHVAVIGSGGAAMAAALKAVEGGARVTLIERGIIGGTCVNVGCVPSKIMIRAAHVAHLRRESPFDAGLSTTSLTVLRERLLAQQQGRVDELRHAKIEGILESTPAITLVRGTARFQDGRTLSVELAEGGERIVAFDRCLIATGASPAVLPIPGLKDTPYWTSDEALASDTIPKRLAVIGSSVVAVELAQAFARLGSKVTVLARSTLFFREDPAIGEALTAAFRMEGIEVLEHTQASQVSHVDGEFILSTNHGELHADRLLVATGRTPNTQGMNLQGAGVKLDERGAIQIDSGMRTSAPDIYAAGDCTDQPQFVYVAAAAGTRAALNMTGGEAKLNLDAMPAVVFTDPQVATVGYSEAEAHHAGIETDSRTLTLDNVPRALANFDTRVSSSWSSEEGSGRLIGVQAVAPEAGELIQTAAIAIRARMTVQELADQLFPYLTMVEGLKLAAQTFAKDVKQLSCCAG

SEQ ID NO: 18947 - protein, 152 aa, Oryza sativa
  misc_feature (20)..(20): Xaa can be any naturally occurring amino acid
  misc_feature (30)..(30): Xaa can be any naturally occurring amino acid
  misc_feature (136)..(136): Xaa can be any naturally occurring amino acid
  unsure (1)..(152): unsure at all Xaa locations
MHAFLPYYISSFGHVSNGGXIRSMQVLPIXVIKNFETLSYLPPLTVEDLLKQIEYLLRSKWVPCLQFSKVGFVYPENHKSPGYYDCRYWTMWKLPMFGCTDPTQVLKELEGAKKAYPGAFVRIIGFDNVRQVQLIXSFIANKPPGCEESGGN

SEQ ID NO: 18948 - protein, 316 aa, Arabidopsis thaliana
MATLKVSDSVPAPSDDAEQLRTAFEGWGTNEDLIISILAHRSAEQRKVIRQAYHETYGEDLLKTLDKELSNDFERAILLWTLEPGERDALLANEATKRWTSSNQVLMEVACTRTSTQLLHARQAYHARYKKSLEEDVAHHTTGDFRKLLVSLVTSYRYEGDEVNMTLAKQEAKLVHEKIKDKHYNDEDVIRILSTISKAQINATFNRYQDDHGEEILKSLEEGDDDDKFLALLRSTIQCLTRPELYFVDVLRSAINKTGTDEGALTRIVTTRAEIDLKVIGEEYQRRNSIPLRAITKDNCGDYGKMLVAIFGEDDA

SEQ ID NO: 18949 - protein, 243 aa, Streptomyces peucetius ATCC 27952
MTTTASTTASGTPSATVPSGFGGLGRLMALMTGDEKHGPAATSTLDALWVLYDRVLRVTPATADTPDRDRFLLSKGHGPMAYYAVLAAKGFFPQEWLPGFGSYDSPLGHHPDRVLVPGAEIGSGSLGHGLPLAVGTVLGLRAQGLTEPRVWVLIGDAELDEGSNHEAIAYAGPAGLEQLHTLVVDNSSATHGWPGGIASRFEAAGWSAQTVDGRDHEALYAAFTAPHPGRPRAVVARVEPKNA

SEQ ID NO: 18950 - protein, 595 aa, Listeria monocytogenes str. 1/2a F6854
MGKRDRLIFSAGHGIVLQYVLLYLNGYISLEELKTFRTMYSKLPGLSEYKSLPYIESTTGSLGQGIANAVGMAISLKRAHETKKVENKEAIQSNVYCIVGDGCLMEGISYEASSLAGTLALSNLIVLYDSNNITIDGPTDKTFNENIEKRFTSMNWDYLLVKDGDDVEAINDSIQEAKLRDKPVLIEVGTRIARSSLNKENSADAHGKPLGKEEVELIKQQFKLLKPFEICEASVKEFTKIENQRKQYQRDLSYVNNENRGVNKNILEWNTIKDIKIPDNLTMIEKFSHIINRIKENGTDILVGSADLAASTKLWIEKGGYISKGSYLGANIAFGIRESAMAAIATGIYQGTCLKTLISTYFAFSDIMKNPIRMSALMNIPNIYVFTHDGFSLGLDGGTHIPVEQINMLRDIPNLNVYRPGNDDELKVACYESILNPSTPSAIILTRDVINIQSDIPISSIKKGGYLFKSKKNAKLKIFSTGSELAIAIEVQDMLNKEGIYADVISIPCHEKLMEQSDEYISNLFLKDTKKVFIEIGGKSIWPIYGDKDSIYICLDNYVSPGPPESLKEKYGYTPKKVFERIRNHYNIGDEDKLK

SEQ ID NO: 18951 - protein, 497 aa, Mesorhizobium loti MAFF303099
MKGDDGLTVTQSLTRRLKNPELFDDLAGVPGRKAEQSTRRFSVFNPSTGELLAELPDMDVRDVSKAIDKAEAAQEHWAALTARERSDILWEWHQLILDHSEDLAAILTAEMGKPLAEAKSEIAHAAAYLQWYAEEANRIYGETISPPSNDRRMLVIKQPIGVVGAITPWNFPASMVARKISPALAAGCAIVLKPAEQTPLVAGAMFTLARMAGFPDGVLNLIYASEGDAVGRELCSNPKVRKISFTGSTEVGRLLMRECSDQIKRTSFELGGNAPFIVFDDADVDAAVDGALQAKFRNAGQTCVSANRLYVQSSVYNEFCDKFTKRVSALRVGDGFEPEVAIGPLIDKCALAKIEDHIRDAVRQGGKIRCGGNRIGESGTFFEPTVITDVERTMRVAQEETFGPLAPIIRFNDPDQVVREANDTIYGLAAYFYASNLKRVWRVAEALEYGMVGINTGRMSSEAAPFGGMKQSGIGREGSRHGLEDYLEMKYLCMGGL

SEQ ID NO: 18952 - protein, 552 aa, Mesorhizobium loti MAFF303099
MAAKDVKFSRDARERMLRGVNILADAVKVTLGPKGRNVVIDKSFGAPRITKDGVTVAKEIELEDKFENMGAQMVREVASKTNDIAGDGTTTATVLAQSIVQEGHKAVAAGMNPMDLKRGIDLAVSDVVWTLIKNATKIKTSEEVAQVGTIAGNGDESVGKMIAEAMQKVGNEGVITVEEAKTAETELEVVEGMQFDRGYLSPYFVTNADKMVADLEDAYILLHEKKLSNLQAMLPVLEAVVQTSKPLLIISEDVEGEALATLVVNKLRGGLKIAAVKAPGFGDRRKAMLEDIAILTGGQVISEDLGIKLENVGLDMLGRAKKVSISKENTTIVDGAGKKEEIQGRVAQIKQQIEETTSDYDKEKLQERLAKLAGGVAVIRVGGATEVEVKEKKDRVDDALNATRAAVEEGIVPGGGVALLRASLSINAVGANSDQTAGISIVRRALQAPARQIAANAGAEASIVAGKILENKGATFGFNAQTGEYGDMIAMGIVDPVKVVRTALQDAASVAGLLVTTEAMIAEAPKKESAGGGGMPGGMGGGGMGGMGGMDF

SEQ ID NO: 18953 - protein, 228 aa, Rubrivivax gelatinosus PM1
MPEDDLLQRLRRFHDDAFPTQRSLFRHLVDDGQHPTTLFIGCSDSRIVPYLLTGAGPGELFLVRNVGAFVPPHDQSQGFHGTAAAIEFAVLNLNVQRIVVCGHTHCGAIRALYGEVPASATNLRAWLELGREATLPVADPGPEALRRTEQRAIVLQLERLMDYPMVRERVEAGVLSLHGWHYVIEDGEIHVFDIQRGGFVPAGLADNAGTGPYRFSEGFGAEGIQEPV

SEQ ID NO: 18954 - protein, 98 aa, Mesorhizobium loti MAFF303099
MAQSNLRPLHDRVVVRRVESESKTAGGIIIPDTAKEKPQEGEIIAVGSGARDEAGKLVPLDVKAGDRILFGKWSGTEVKLNGEDLLIMKEADIMGIIG

SEQ ID NO: 18955 - protein, 677 aa, Kluyveromyces lactis NRRL Y-1140
MGHNDSVETMDEISNPNNILLPHDGTGLDATGISGSQEPYGMVDVLNPDSLKDDSNVDEPLIEDIVNPSLDPEGVVSAEPSNEVGTPLLQQPISLDHVITRPASAGGVYSIGNSSTSSAAKLSDGDLTNATDPLLNNAHGHGQPSSESQSHSNGYHKQGQSQQPLLSLNKRKLLAKAHVDKHHSKKKLSTTRARPAFVNKLWSMVNDKSNEKFIHWSTSGESIVVPNRERFVQEVLPKYFKHSNFASFVRQLNMYGWHKVQDVKSGSMLSNNDSRWEFENENFKRGKEYLLENIVRQKSNTNILGGTTNAEVDIHILLNELETVKYNQLAIAEDLKRITKDNEMLWKENMMARERHQSQQQVLEKLLRFLSSVFGPNSAKTIGNGFQPDLIHELSDMQVNHMSNNNHNNTGNINPNAYHNETDDPMANVFGPLTPTDQGKVPLQDYKLRPRLLLKNRSMSSSSSSNLNQRQSPQNRIVGQSPPPQQQQQQQQQQGQPQGQQFSYPIQGGNQMMNQLGSPIGTQVGSPVGSQYGNQYGNQYSNQFGNQLQQQTSRPALHHGSNGEIRELTPSIVSSDSPDPAFFQDLQNNIDKQEESIQEIQDWITKLNPGPGEDGNTPIFPELNMPSYFANTGGSGQSEQPSDYGDSQIEELRNSRLHEPDRSFEEKNNGQKRRRAA

SEQ ID NO: 18956 - protein, 619 aa, Streptomyces avermitilis MA-4680
MKSPSATGTSSWSARLRRAGGAVRPTRYPPARRRRTRRPKRPRRRLLRLTWPLPRAPRLPMPKSPPCRRCPAFRPTPRPPVWPTRPSTRPTLLPPRPTLPPVLPTRPSKPRAKPPPRRPCPAPRPMPRAVFPSTGPSRCTIPIPTAPTRYGHAGALGSGLRPSSCPGDHARPTGTPPESASHDCPGTCRALGTPDARRPGHRRMASPTGRPRVAGRSPMSAPWQNYDPWAATSAPVHQTRHRSRAPGRSGASARVRVLVLGAVVLALVSGGIGGAVGVYLERTGGVTDVELPQAGQESEERAADSVAGIAARALPSVVTLHVKGSAAEGTGTGFVLDGRGHILTNNHVVEPAGSSGEISVTFSGGETAKATVVGRDSGYDLAVVKVSGVGGLKPMPLGNSDNVQVGDPVVAIGAPFDLANTVTSGIISAKERPITAGGEKGDGSDVSYVDALQTDAPINPGNSGGPLLDSKARVVGINSAIRSADSSSDQSGQAGSIGLGFAIPVNQAKRVAEELINTGRATHPVIGVTLDMDYTGDGARVGTKSNDGGSPVTRGGPGDRAGIQAGDVITEVDGQRIHSGEELIVKIRAHRPGDRLALTVERDGKEKPVTLVLGSASGA

SEQ ID NO: 18957 - protein, 342 aa, Pseudomonas putida KT2440
MTHPRHALQRSSTMRALLFSSQHYDQESFTKAAGGTALELHFQPARLTLDTAALADGFEVVCAFINDELDAPVLQRLAAAGTRLIALRSAGYNHVDLAAAQRLGLAVVRVPAYSPHAVAEHAVALILALNRRLHRAYNRTREGDFTLHGLTGFDLHGKTVGVVGTGQIGVAFARIMAGFGCQLLAYDPYPNPELLALGARYLPLPELLREARIISLHCPLTEHTRHLINAQSLAQLQPGAMLINTGRGALVDTPALIDALKSGQLGYLGLDVYEEEAQLFFEDRSDLPLQDDVLARLLTFPNVIITAHQAFLTREALDAIAATTLDNINRWAAGNPQNLVMG

SEQ ID NO: 18958 - protein, 917 aa, Pseudomonas putida KT2440
MLDRLGIRSRVLLLALLPAGLMALVLGSYFTWLQQNDLRTQLLQRGKMIAEQLAPLAAPAMARLAPAQLERIAAQTLEQADVRAVAFLAPDRTRLAHAGPSMLNLPPSGGTGTQLLQRSGNDATRYLMPVFGHHRDLATDAVPAEAERLLGWVEIELSHDGTLLRGYRNLFTSLLLILACLALSGLLALRMSRTINDPIERIKHAVNQLKDGHLEERLPTMGSHELDELAHGINRMAETLQNAHEELQHSIDQATEDVRQNLETIEIQNIELDMARKEALEASRIKSEFLANMSHEIRTPLNGILGFTHLLQKSEMTPRQLDYLNTIEKSADNLLGIINEILDFSKIEAGKLVLDSIPFNLRDLIQDTLTILAPAAHAKQLELLSLIYRDTPASLVGDPLRLKQILTNLVSNAIKFTREGTIVVRAMLEDEHEDCAQLRISVQDTGIGLSPQDVRTLFQAFSQADNSLARQPGGTGLGLVISKRLIEQMGGEIGVDSTPGEGSQFWISLNLPKAHDDAEALPPQPLLGRRAAIVDGHELARQALEHQLEDCGLSVSLFASYDQLLQGVQAASQAGLPFEFAVLGANLGNLSPEQLGHYHQQLERYHCQCVVLCPTTEQALYHPYLPNGHGQLLSKPTCTRKLRRLLLELVQPRRPLAEGSNPNGQRRPKILCVDDNAANLLLVKTLLEDLGAEVLAVNNGYAAVQAVQEELFDLVLMDVQMPGMDGRACTEQIRLWENTQSGNPLPIVALTAHAMANEKRALLHSGMDDYLTKPISERQLAQVVMKWTGLSLGTPQQAQAELLTNGDELKVLDPEEGLRLAAGKADLAADMLSMLLASLDTDREAIRAARAADDRNGLIEQVHRLNGASRYCGVPQLRAACQRSETLLKQDNPQAQQALDELDSAISRLAAQARLSA

SEQ ID NO: 18959 - protein, 255 aa, Bradyrhizobium sp. BTAi1
MTNPLDYTGKVALVTGASSGMGLATAQAFAVAGAAVVLADIREDAVVAAARELVGRGHNALAIRCDVSDDADVAALVDRTVATFGRLDAAFNNAGVMARIAPITDSPREDWDRVIGINLRGVWSCMAYELRQMQKQGSGAIVNNASVGALTGNPGIASYIASKHGVVGLTRTAALEVVRHGIRVNAVNPGLIDTQIARDVVAGDETAYDGIANTVPIGRAGRPEEIASAVLWLCSPGASYVIGHALTVDGGMTVA

SEQ ID NO: 18960 - protein, 472 aa, Arabidopsis thaliana
AIWFARSKTLVSSLRHNLNLSTILIKRDYSHRPIFYTTSQLSSTAYLSPFGSLRHESTAVETQADHLVQQIDEVDAQELDFPGGKVGYTSEMKFIPESSSRRIPCYRVLDEDGRIIPDSDFIPVSEKLAVRMYEQMATLQVMDHIFYEAQRQGRISFYLTSVGEEAINIASAAALSPDDVVLPQYREPGVLLWRGFTLEEFANQCFGNKADYGKGRQMPIHYGSNRLNYFTISSPIATQLPQAAGVGYSLKMDKKNACTVTFIGDGGTSEGDFHAGLNFAAVMEAPVVFICRNNGWAISTHISEQFRSDGIVVKGQAYGIPKHPVWDGTDALAVYSAVRSAREMAVTEQRPVLIEMMTYRVGHHSTSDDSTKYRAADEIQYWKMSRNPVNRFRKWVEDNGWWSEEDESKLRSNARKQLLQAIQAAEKWEKQPLTELFNDVYDVKPKNLEEQELGLKELVKKQPQDYPPGFHV

SEQ ID NO: 18961 - protein, 485 aa, Escherichia coli O157:H7 EDL933
MQQNQSGFDLRHFVNVNFTLPKEGEKYVPPEGQSLREHIDGLWPVLTRSTENTEKWDSLLPLPEPYVVPGGRFREVYYWDSYFTMLGLAESGHWDKVADMVANFAHEIDTYGHIPNGNRSYYLSRSQPPFFALMVELLAQHEGDAALKQYLPQMQKEYAYWMDGVENLQAGQQEKRVVKLQDGTLLNRYWDDRDTPRPESWVEDIATAKSNPNRPATEIYRDLRSAAASGWDFSSRWMDNPQQLNTLRTTSIVPVDLNSLMFKMEKILARASKAAGDNAMANQYETLANARQKGIEKYLWNDQQGWYADYDLKSHKVRNQLTAAALFPLYVNAAAKDRANKMATATKTHLLQPGGLNTTSVKSGQQWDAPNGWAPLQWVATEGLQNYGQKEVAMDISWHFLTNVQHTYDREKKLVEKYDVSTTGTGGGGGEYPLQDGFGWTNGVTLKMLDLICPKEQPCDNVPATRPLSESTTQPVKQKEAEPTP

SEQ ID NO: 18962 - protein, 544 aa, Propionibacterium acnes KPA171202
MAKLIEFNIEARRGLEAGMNTLADAVKVTLGPKGRNVVLEKSWGAPTITNDGVSIAKEIELDDPYEKIGAELVKEVAKKTDDVAGDGTTTATVLAQAMVREGLRNVTAGANPMGLKKGIEAAVQAVSARLSDMAIDIETKDQIASTASISAADPTVGEIIAEAMDKVGKEGVITVEESNTFGLELELTEGMRFDKGYISPYFVTDTERMEAVLEDPYILIVNSKISSLKDLLPVLEKVMQSGKPLFVIAEDVEGEALAGLIVNKIRGTFKSVAVKAPGFGDRRKAMLNDIAILTGGQVISEEVGLSLDAVTLDLLGRARQVVVTKDEATIVDGAGDSEQIAGRVSQIRKEIENSDSDYDREKLQERLAKLAGGVAVIKVGAATEVELKERKHRIEDAVRNAKAAVEEGIIPGGGVALLQASKAAEIEGLEGDELTGAQIVLAACTAPLKQIAINAGLEGGVVAEKVAGLPAGQGLNAANDEYVDMVEAGIIDPAKVTRSALQNAASIAALFLTTEAVIADKPEPVKAPAGGGDMDGMGGMGGMM

SEQ ID NO: 18963 - protein, 358 aa, Propionibacterium acnes KPA171202
MKINYTPGPLLDASRTTPTALWNDSADLDELRQSIAFGGVGATCNPVIGYTTIKKHPDIWEDRIRAIAENNPTWGESQIGWQAIKDMSVEAAKLLEPIFVEHKGRNGRLSIQTDPRLHRDAKALADQAEEFSNLAPNIIVKIPCTSVGIEAIEEATYRGVSVNVTVSFTVPQAVKSAEAIERGLQRRAAEGKPIDEMGPVVTIMAGRLDDWLKIVAERDRLFIDPGHLEWAGIAAIKRANQIFVERGFHSRVLCAAFRNVLQWSELIGGDLVVSPPFKWQKRINDSDYHVVPRIDEPVAAEHLDALKKIPEFMRAYDPDGMTIKEFDTFGATRRTLRQFLQADADLDTLVRDIITPAI

SEQ ID NO: 18964 - protein, 329 aa, Propionibacterium acnes KPA171202
MVSSRRRDLDVLTMGRIGVDIYPLQYGVGLEDVTSFGKFLGGSPTNVAVAAARLRHSAAVVTAVGDDPFGRFCRREMARLGVYDNYVLVNSELPTPVTFCEIFPPDDFPLYFYRRPTAPDLRITPDDVPEDAVRNAQILWLSVTGLCQQPSYDAHCRALEVRGKAEHTVLDLDYRSMFWQSAAKAHEAVSAVLPHVTVAIGNREECEMAVGESDPDRAAHALLDAGVQLAVVKQGPKGTLAMTREERVEVAPTPIDVTNGLGAGDSFGGSLCHGLLEGWSLAETIQAASAAGALVATRLECSTAMPSEPELFAMMAKHPDIAIKEEHLS

SEQ ID NO: 18965 - protein, 212 aa, Wolbachia pipientis
TSCSSAITFIDGDKGVLRYRGHDIADLTENNDFTAVIYLLLYGKLPSSSQHRTFLLKIKELSKVPEQVIDVIKAFPKTAHPMSILIACFASLSALYYEKHGTNINNEDLNFGISAIAQIPVIVAMIYRYINDQAFINTNNELNYSENFLRMMFGDAFNNDRGTLFARALDKIFTLHADHEQNASTTAVRLVGSAGSNLLASLSAGVATLWGP

SEQ ID NO: 18966 - protein, 350 aa, Yersinia pestis KIM
MSQVSEQSALVTSSKKAIPRGTDMAKHIQFTTTGGPDVLQYLEFTPSDPAPHEVQVENKAIGINYIDTYVRSGLYPPAHLPSGLGTEAAGIVSKVGAAVSSVKVGDRVVYAQSALGAYSEVHNVPADKIALLPEQISFEQAAASFLKGLTAYYLLRQTHEIKPGEVFLFHAAAGGVGLIACQWAKALGAKLIGTVGSDEKAQLAKAAGAWATINYRTENIAQRVAELTEGEKVGVVYDSVGKSTWEASLDSLKRRGLLVSFGNASGPVTGVNLGILNQKGGIYVTRPSLNVYVANRQELESASQQLFSMITSGAINVDVAQAQQFPLRDAQRAHETLEGRQTTGSSLLIP

SEQ ID NO: 18967 - protein, 324 aa, Triticum aestivum
MDDSNMFIQWAMETLEQEQDGAATGHVFPSSLLELDNSAALQNGTHMAAHRHGATDSWSSGDSGAAVAVENDGWSSNCSTNYPAASWNFISAIPQPPSIIEATPSPPAAPSHVVPELAHRSPPSRKSSGASTGTVPTVQEHVMAERKRREKINRRFIELSTVIPGLKKMDKATILSDAVRYVKEQQEKLKALQDRDARSIDSVVLVKRPCISNGDDGCPSPPPSAAAGGGPPTTRVTLPEIEARISESNVMMRIHCQDGKGVLVTLLAEVEGLHLSITHTNVVSFPASTLIINLMAKLDEGFAVTADDIVWKLDSALRGHHSGK

SEQ ID NO: 18968 - protein, 212 aa, Wolbachia pipientis
TACSSAITFIDGNEGVLRYRGHDITDLAENNDFTTVIYLLLYGKLPSLEQYEMFLLKIKRLSKVPEQVIDVIKAFPKTAHPMSILIACFASLSALYYEEHGTNINNKDLDFGISAIAQVPAIVAMIYRYINNQTFIDADSELNYSENFLRMMFGDTFDSNRSTLFARALDKIFTLHADHEQNASTTAVRLVGSAGSNLLASLSAGVAALWGP

SEQ ID NO: 18969 - protein, 397 aa, Yersinia pestis KIM
MFQNVDAYAGDPILSLMESFKADNRAHKVNLSIGLYYNEQGEIPQMQAVDAAEAQLSTQPHGTPVYLPMEGLQSYRTAIQQLLFGHDHPMLVQQRVATIQTVGGSGALKVGADFLNHYFPDSQVWVSDPTWENHVAIFSGAGFKVNTYPYFDNDKLAVKFDPMLATLQQLPARSIVLLHPCCHNPTGSDLTNAQWDRLIDVVKERELIPFLDIAYQGFGAGLNEDAYAIRAMAAVGLPCLISNSFSKIFSLYNERVGGLSVVCESDEAAGRVLGQLKATVRRNYSSPPNFGAQVVSKVLNDTVLRAQWQAEVEQMRLRILDMRHTLVEALKASLPERNFDYLLQQRGMFSYTGFSEAQVESLREEFGVYLIASGRMCMAGVNHQNVEQVAVAFAAVQ

SEQ ID NO: 18970 - protein, 468 aa, Corynebacterium glutamicum ATCC 13032
MNDPQRSPTLLWFRDDLRLSDNAALKWAADHGPVIGLFIDETINRSIGAAARWWREQSLNALAQDLSFYGVPLLRRTGNPLEILPKIVSEMEVKAVTWNRRYHQPLCEVDATLKKNLRDKGIEVHSHPGFLLTEPWEVSTATGTPYKVFTPFSKAAWEVARVHAYETVKNNVPVPSHLTGPEDVELPILEMEQPFWSTTLVKECAPGEKNASEKLFDFLEHLQDYPQARDSLARSATSKLSAHLRFGEISIHRVWAETAAIDSEGTELFLKELLWRDFAWHRLYALPHMDTQNVRMQFNRFGWSWDPSEKDKLNTPSTPLIPTKADQFHEDLAAWRAGKTGIPLVDAGMRELWATGSMHNRVRMVVASFLTKNLQIHWRHGEEWFWETLVDADPASNAFNWQWAAGSGDDASPYFRIFNPVTQAKKFDPDETYIRRWVPEYGTPSYPDPIVDLKESRQIALDAYSAIK

SEQ ID NO: 18971 - protein, 331 aa, Arabidopsis thaliana
MSSLTVRRVSREDIQLVQNLIERCLQLYMNQKEVVDTLLEQAKIEPGFTELVWQKLEEENREFFKAYYLRLMVKHQIMEYNELLEQQINHMRQMHPTAGASVRNRNGSHVPPMNQQQLLYERKEPDQSSPNLSSPYLNGGSAINTNIPSYVDFSSHSRRVDPSPNSLSLQATNMPLMQGMIKSETAYQNCAPYMYGGEAQSTVGDVTIASFSNDSSNQSLNDPLVDPDAPTFGSLGQIPQNFSLSDLTADFSQSSDILESYEGSPFLLADAENFLDSSERVEHQDFMECLAHLSYNGKNLKLNHSGTRDTRDHERLRTISSGFSYENFRSN

SEQ ID NO: 18972 - protein, 242 aa, Nostoc punctiforme PCC 73102
MESHKEKILVVDDEASIRRILETRLSMIGYDVVTAGDGEEALETFRKTEPDLVVLDVMMPKLDGYGVCQELRKESDVPIIMLTALGDVADRITGLELGADDYVVKPFSPKELEARIRSVLRRVDKNGASGIPSSGVIHVANIKIDTNKRQVYKGDERIRLTGMEFSLLELLVSRSGEAFSRSEILQEVWGYTPERHVDTRVVDVHISRLRAKLEDDPSNPELILTARGTGYLFQRIIEPGEE

SEQ ID NO: 18973 - protein, 212 aa, Wolbachia pipientis
ASCSSAITFIDGDEGVLRYRGHDIADLAQSNDFTAVIYLLLYGKLPNLEQHKKFFLKIQELSKVPEQVVNVIKAFPKTAHPMSILIACFATLSALYHERYGNNVSNENLDFGISAIAQVPAIIAMVYRHTNDQEFIDTDNELNYSKSFLRMMFGNALDNDKSTLFAKALDKIFTLHADHEQNASTAAVRVVGSAGSNLFACLSAGVATLWGP

SEQ ID NO: 18974 - protein, 550 aa, Yersinia enterocolitica
  misc_feature (3)..(3): Xaa can be any naturally occurring amino acid
  misc_feature (377)..(377): Xaa can be any naturally occurring amino acid
  misc_feature (383)..(383): Xaa can be any naturally occurring amino acid
  misc_feature (510)..(510): Xaa can be any naturally occurring amino acid
  misc_feature (530)..(530): Xaa can be any naturally occurring amino acid
  misc_feature (543)..(543): Xaa can be any naturally occurring amino acid
  unsure (1)..(550): unsure at all Xaa locations
MPXKDVKFGNDARIKMLRGVNILADAVKVTLGPKGRNVVLDKSFGSPTITKDGVSVAREIELEDKFENMGAQMVKEVASKANDAAGDGTTTATVLAQSIITEGLKAVAAGMNPMDLKRGIDKAVIAAVEELKKLSVPCSDSKAIAQVGTISANSDSTVGELIAQAMEKVGKEGVITVEEGSGLQDELDVVEGMQFDRGYLSPYFINKPETGSIELESPFILLADKKISNIREMLPVLEAVAKAGKPLLIIAEDVEGEALATLVVNTMRGIVKVAAVKAPGFGDRRKAMLQDIATLTAGTVISEEIGLELEKTTLEDLGQAKRVVINKDTTIIIDGVGDEAAIQGRVAQIRQQIEDATSDYDKEKLQERVAKLAGGVXVIKVGXATEVEMKEKKARVEDALHATRAAVEEGVVAGGGVALIRAASAITAAGLKGDNEDQNVGIKVALRAMESPLRQIVVNAGEEASVIANNVKAGSGSYGYNAYSEEYGDMIAMGILDPTKVTRSALQYAXSIAGLMITTECMITDLPRDXKGADMGAGGMGGXGGMGGMM

SEQ ID NO: 18975 - protein, 255 aa, Zea mays
CTRLLSFCSERTHSPVPDLRSPRRSKMQIFVKTLTGKTITLEVESSDTIDNVKAKIQDKEGIPPDQQRLIFAGKQLEDGRTLADYNIQKESTLHLVLRLRGGMQIFVKTLTGKTITLEVESSDTIDNVKAKIQDKEGIPPDQQRLIFAGKQLEDGRTLADYNIQKESTLHLVLRLRGGMQIFVKTLTGKTITLEVESSDTIDNVKAKIQDKEGIPPDQQRLIFAGKQLEDGRTLADYNIQKESTLHLVLRLRGGQ

SEQ ID NO: 18976 - protein, 212 aa, Wolbachia pipientis
TSCSSAITFIDGDKGVLRYRGHDVADLTENNDFTAVIYLLLYGKLPSSNQHRTFLLKIKELSKVPEQVIDVIKAFPKTAHPMSILIACFATLSALYHERYGNNVSNETLDFGISAIAQVPAIIAMVYRHTNDQEFIDTDNELNYSKSFLRMMFGNALDNDKSTLFAKALDKIFTLHADHEQNASTAAVRVVGSAGSNLFACLSAGVATLWGP

SEQ ID NO: 18977 - protein, 187 aa, Gracilaria tenuistipitata var. liui
MKKICVLFCMIILYTSINPINSLAEVETAGLTKCQESPAFTKRLNNSVKKLETRLAKYDANTPPAIALQTQIIKTKIRFNKYAKSGILCGTDGLPHLITDGRWNHAGEFMIPGVLFLYITGWIGWVGRGYLRDISQTTKPTEKEIILDVPLALKYCLSGFTWPLAAIKELTSGELVADNKDIPISPR

SEQ ID NO: 18978 - protein, 862 aa, Nicotiana tabacum
MLGVDEKDRVPGGNRKTYARSVSWSDRSPTKSSAKPQWNSKARACLPPLQPLSITRPTAEEWPCAGSDDLGVWPNNPPTPGVRLGPVSTHVGSATKRVPREFEFKKDKLAFFNKECSKIVDHIYLGSDTVAKNRDILHENGITHVLNCVGFSCPEYFKDDLVYKTLWLQDSPTEDITSILYDVFDYFEDVREQGGRVFVHCYQGVSRSTSLVIAYLMWKEGLSFEDAFQHVKAARGVTNPNMGFACQLLQCQKRVHALPVSPSSVLRMYRMAPHSPYDPLHLVPKMLNEAGAEGFDSRGAFLVLIPSAIYVWIGKHCDSVMSDNARAAAFQVIRYEKAQGPVIIINEGKEPSDFWSALSHGSFFTGGCSKEKTKVEASLLDGTTGTITDNIIQYIGQQKVGEYDLDFEIFYKALAGGVVPPFPLSGTESEMRLPARENGWSRLRRKFSSGIMKEFITASKLYSHTGGQASPVLDKMDTSKEISPALPSSPSSPQCDSPDSFSSYATSSPSFRDVGNSGLDSEPLLSPSPSFSSLDSLSCFLVNKPKSDTTSPSLSPSTSDYSSSFTFSPSSSNWSDLAYLSAQPSPTRFEYEDPNFVKNDSFKESSSLLCKETSLPAEEAFPTCHTLGQANSCLLYKEAFPSLAERRGSHPPPRMMLRCNDDSTQISAKLVRTSSFSLPSFGDDTIKCLECDNLNDGDFADTSKEELMLDAESSITDNQLPNGVQPDDVSRSFYDHPIVVADTTDLGLYQWPSMHKLGLASGFFDSRSVYIIVIPDLNLDENSSNSLYIWVGRDVQWKESPNQVINNESMCEDGHVHWEKVGRRFLIQKGLATSSLVQIVKEGEEPEQLLKHLPCFSLEKTY

SEQ ID NO: 18979 - protein, 544 aa, Neisseria meningitidis
MAAKDVQFGNEVRQKMVNGVNILANAVRVTLGPKGRNVVVDRAFGGPHITKDGVTVAKEIELKDKFENMGAQMVKEVASKTNDVAGDGTTTATVLAQSIVAEGMKYVTAGMNPTDLKRGIDKAVAALVEELKNIAKPCDTSKEIAQVGSISANSDEQVGAIIAEAMEKVGKEGVITVEDGKSLENELDVVEGMQFDRGYLSPYFINDAEKQIAGLDNPFVLLFEKKISNIRDLLPVLEKVAKASRPLLIIAENVEGEALATLVVNNIRGILKTVAVKAPGFGDRRKAMLQDIAILTGGTVISEEVGLFLEKATLDNLGQAKRIEIGKENTTIIDGFGDAAQIEARFAEIRQQIETATSDYDKEKLQERVAKLAGGVAVIKVGAATEVEMKEKKDRLEDALHATRAAVEEGVVAGGGVALLRARAALENLHTGNADKDAGVQIVLRAVESSLRQIVANAGGEPSVVVNKVLEGKGNYGYNAGSGEYGDMIEMGVLDPAKVTRSALQHAASIAGLMLTTDCMIAEIPENKPAMPDMGGMGGMGGMM

SEQ ID NO: 18980 - protein, 112 aa, Arabidopsis thaliana
VEAKITAWQTAKLAKINNRFKREDAVINGWFNEQVNKANSWMKKIERKLEERKAKAMEKTQNNVAKAQRKAEERRATAEAKRGTEVAKVVEVANLMRALGRPPAKRSFFSFS

SEQ ID NO: 18981 - protein, 484 aa, Arabidopsis thaliana
MLYFILLPLLFLVISYKFLYSKTQRFNLPPGPPSRPFVGHLHLMKPPIHRLLQRYSNQYGPIFSLRFGSRRVVVITSPSLAQESFTGQNDIVLSSRPLQLTAKYVAYNHTTVGTAPYGDHWRNLRRICSQEILSSHRLINFQHIRKDEILRMLTRLSRYTQTSNESNDFTHIELEPLLSDLTFNNIVRMVTGKRYYGDDVNNKEEAELFKKLVYDIAMYSGANHSADYLPILKLFGNKFEKEVKAIGKSMDDILQRLLDECRRDKEGNTMVNHLISLQQQQPEYYTDVIIKGLMMSMMLAGTETSAVTLEWAMANLLRNPEVLEKARSEIDEKIGKDRLIDESDIAVLPYLQNVVSETFRLFPVAPFLIPRSPTDDMKIGGYDVPRDTIVMVNAWAIHRDPEIWEEPEKFNPDRYNDGCGSDYYVYKLMPFGNGRRTCPGAGLGQRIVTLALGSLIQCFEWENVKGEEMDMSESTGLGMRKMDP

SEQ ID NO: 18982 - protein, 1184 aa, Anabaena variabilis ATCC 29413
MKRDTTGKFVSNWDSEPKHRYSVSLTSTAWRSLDEEAHKQGISRSELIEHFARHLGSEQNLTDEVISVNAGNAEQQPILATVFNQDINNHQQLQLVTSPETECQVTTILESITDAFVAFDENWHYTYVNQAAVKILHKTPVELIGKHVWDEVFPELVGGVAYQELHRAVAEQVAVSWEEFGESVQCCLEANAYPFAQGVAVYFRDITERKKAEAERERLLHELETERTRFEAVLRQMPAGVMIADADSGKLVLTNEQAKQILRYNFEDSLELEEYVPVTPFAAFRCDGQPYTPYEYPLPRSLLTGEVISQEEMLLRWEDNSHIFISVNSAPILNSQGQIVAAAIVFQDITERKRLESELQQREQEFKMVAENAPDIISRVDREFRHLYVSPAVEAATGIPPEVFIGKTNTELGMPEEICTFWHENLQRAFDTGQKQVVEFSFPTPTGLRWYQSHLAPEFASDGSATTLVNIARDVTDYKRIEQALLDNEERLRLALTVAQAAQRQLATIFETSPVGIALLDSQQRFVAINQALAQINGLTRQEHLGRSITELFGESDPQVVQVFHDIYTTGEPFISPSFAVNLPGRSDRQPGYYNVYYLPTTNSNHQVEDVLVYVLDVTEQVRLERGLRFLSETSKVLASSLDYQTTLERLAQLAVPELADWCTVHMVAENGSVEEIAVAHVDPAKLAWAEEIRRKYPLNLNDPRGAALTLRTGQSDLLIDIPDELLVQAARDPEHLEILRQVGFKSAMTVPLRTQTRTLGVISFICAESGHKYDQSSMQLAEELAYRASLAIDNAHLYRLAQSDRTKAEAANRIKDEFLAVLSHELRSPLNPILGWSRILRTKQLSPTKVDQALETIERNAKLQAQLIEDLLDVSRILQGKMTLNVAPVNLAATITAALETVQLAAEAKNIHIQTTLKPIAGNVVGDQNRLQQVIWNLLSNAVKFTPSGGQIEVQLAQVNLYAQIQVKDSGKGIAREFLPYVFEYFRQEDGATTRKFGGLGLGLAIVRHFTELHGGTVHVSSLGQDLGATFTVRLPLNLVEQELPADDEQLKKVTDLTGTHILVVDDDADMRELAEFILIQFGAQVTTAASAVEALNIFSHFIPDLLLCDIGMPEMDGYSLMRQIRQWLPHEGGTIPAIALTAYAGEINQQQALAAGFHQHISKPVEPEELVQTIFQLLHPVQ

SEQ ID NO: 18983 - protein, 510 aa, Oryza sativa
MEYERIEKPFPTQGGGFSPKRLRAMLLGVEKRRKGQEEEEEGDAGEVDDEYGAVPKSSVRSDADSDARRGGSMCEEYKDVDVVSTISESSSSLETGSGHRSRDTHSMGSRVRVPEEDSCDSESVASTGCRNSARGASARSVTAAIVPPFSKPAPSKWDDAQKWIASPTTNRPGRAGGVPQRKMEKTSFGGGRLPATKVVLEATEEIDTKRVDPSQEKREIGWQKAVNWAPPDPYPEVETCAKSALAEEITVADSAVTFSRHDSSATLQSATTCIPPPPTVRSVSMRDMGTEMTPIASQEPSRTGTPVRATSPDCSRPTTPRKTIGPNAIGAVIGHGECSNVELSEQELQMKTRREIMLLGTQLGKTNIAAWASNKEEEKDASLSLKGVPMDQSTQKVTEIRAAAWEEAEKAKYLARFKREEIKIQAWEDHQRAKIEAEMRKIEVDVERMRARAQDKLMSQLASARHTADEKRAAAELKRSRAAAKTAEQADHIRRTGRMPSSIGCWNWCS

SEQ ID NO: 18984 - protein, 421 aa, Pseudomonas syringae pv. syringae B728a
MTESVLDYMTRLGRAAREASRVIGRASTAQKNRALQATAAALDEARAELSAANALDLANGQANGLEPAMLERLALTPARIDGMIVGLRQVAALADPVGAIRDMSYRPSGIQVGKMRVPLGVVGIIYESRPNVTIDAASLCLKSGNATILRGGSEAIHSNRAIAACIERGLAEAGLPAAVVQVVETTDRAAVGALISMPEYVDVIVPRGGKGLIERVSRDARVPVIKHLDGICHVYVSAHADLPKAQKIAFNAKTYRYGICGAMETLLVDQTIAADFLPSMAAQFREKGVELRGCERTRELIDVIPATEDDWHTEYLDAILSIRVVSGLDEAIEHINHYGSHHSDAIVSDHQSQVRRFMAEVDSSSVMVNAPTCFADGFEYGLGAEIGISTDKLHARGPVGLEGLTCEKYIVIGDGQLRGQA

SEQ ID NO: 18985 - protein, 330 aa, Photobacterium profundum SS9
MKRIPTNIITGFLGAGKTTSILSLLARKPENEKWAVLINEFGNVGVDGAILSQQGAIIKEVPGGCMCCVAGLPMSVGINALLAQKPDRLLLEPTGLGHPKEVIRKLTSGMYKDYIDLRATITVVDPRHFADTAYTDNSNFQDQLALADVVVANKIDESTEYDLIAFEHFIESCQPAKAAIGKVQQGELELSWLDVERLEREAQHSHHHHHSDSADMAPLPDFELAPGQVFIRKENSGQGYRSCGWFFAADQIFDFSQLFTLFSKISAQRVKAVVNTERGCIAFNVVNQVVSVNELSLDGFESRIEFIDKELLPWDELESILCSIIRKESL

SEQ ID NO: 18986 - protein, 653 aa, Ureaplasma parvum serovar 3 str. ATCC 700970
MNRYVNAMRSLALQAINKAKQGHSGMSISAAPIVYTLYKGLMTISKSHPKWFNRDRLVLSAGHGSMALYPVFYFSSLLTLDDIKNFRNDNYLTPGHPEVLANNYIDASTGPLGQGVANAVGMAITESYLRTEFATLKGVIDHYTYCIVGDGDLQEGICYEAMSIAGKLKLSKLIILHDSNDYQLDSAVSDVNIEDLKMRVESMGWNYLKTDNNPENIFKAIAEAKWKKNVKPTFIEVKTIIGEGTSFENSNEAHAAAISNDELEKFSKRFHIKTNNFEFHQEIFDHFFFNVVARGESAYNQWQQLVDQYMQTNPEQMQRLLNYINGNYEDLNKLLDENKITNLNDSTRSYLKQYFNQLKDLKSALVLSADLAKSTFTKIGEGAFNDNHKNPYIKFGIREFAMAGAMNGISLHQGVKAIGGTFLAFSDYMKPAIRLAAISNLANLFIFSHDSYAVGGDGPTHQPVDQLPMLRAIPNVEVIRPADHYEVKYALSYSFKQKQKPICLITSRQTIKQINDQKPQDFSKGAYIINSPFSFCKDVDYTIIASGSEVSLANDAAKELFEKHKLKIKVISAFNLNLFLRQKPEDIKSLLASKNGLLAIEASSEMLWWKLSIYTNKFIQIAANQFGRSADGDKLMNEFGFSVKNIINQLLNQ

SEQ ID NO: 18987 - protein, 443 aa, symbiont bacterium of Paederus fuscipes
MYSDRNTTGFPVDVQISGMGVVSSIGHDLTTFTVSLAEGRSGIRQLDNRCSTGMGATNIIAGIADFNFSYALEVCTSIPPTLKRAALRIARRAPFAIQTCVLSALEAWTTALLHDAHLLPESIGLVMAGHNTTQNYQYQLHEAFQQAPYHLSPRYALQFMDSYLLGVLSEIFKIRGEGFVCGGASASGNVGIIHGLRMIQAGIVDACLVCGVTADLSPMELQGFNAIGALGGKHFHDRADLACRPFDTQHEGFIYGQASACLLLESTTSAKCRGTVGMARLLSGAIRLHASSSSEPNLEGEVQTMRTALQRSSLEPGNIDYVNTHGSSSPLGDKIEMQAIEQVFGEHFPNIWLNSSKGLIGHCLYSAGVVEVIASVVQMRQGFIHPSLNLDTPINNRAKFSGPIAVRHPIHTAMSNSFGFGGINTSVVLGSIPQPKNSPKQDR

SEQ ID NO: 18988 - protein, 290 aa, Oryza sativa
MASKEEVAVETVEGGAAAAKAPYWDPPPAPLLDTSELGKWSLYRALIAEFMATLIFLYVSIATVIGYKNQRATVDACTGVGYLGVAWSFGATIFVLVYCTGGVSGGHINPAVTLGLFFGRKLSLVRTVLYVVAQCLGAIAGAGIVKGIMKRPYDALGGGANTVSDGYSAAGALGAEIVGTFILVYTVFSATDPKRTARDSFIPVLVPLPIGFAVFVVHLATIPITGTGINPARSLGAAVLYNQHAAWKDHWIFWVGPVIGAFLAAAYHKLVLRGEAAKALSSFRSTSVTA

SEQ ID NO: 18989 - protein, 345 aa, SYNECHOCOCCUS SP. WH 8102
MMGVHCVTNPLAQLLITGGAGFIGSHTGLVLLEAGHELLVFDDFSNSSPIALERVRELAGPAAAPRLRQMQGDIRSPRNLEQAFTKAPSGIDAVIHFAGLKAVGESVEKPLHYWDVNLNGSRCLLEAMDAHSCHTLVFSSSATVYGNPETVPIPATAPISPINPYGHTKAAVERMLSDLHASAQDAWRIACLRYFNPVGAHPSGRIGENPLGIPNNLFPFVSQVANGRREQLQVFGGDWPTPDGTGVRDYIHVMDLADGHRAALDCLLAEATQMVTLNLGSGQGQSVLEVVQSMQAASGRSIPNTITDRRPGDAAQRLGWRTQRSLEDICRDGWAWQQQNPERYT

SEQ ID NO: 18990 - protein, 674 aa, Rhodobacter capsulatus
MAAKDIDDTKPDTAADEDASFDMSQAAVKRMIGEAKERGYITIDQLNAVMPPETVSGEQIEDVMSMLSEMGINVVEGEEVEESEGGEVVETGSGSREIAVAGAAGETLDRTDDPVRMYLREMGSVELLSREGEIAIAKRIEAGRNTMIAGLCESPLTFQAITIWRDELLSEEILLRDVIDLEATFGRSLDGDEGMEGMEGIEGPVVEGLDLETAEGAAPAARRPASDEPEYDADGNPISRIDEEEDDDDSSNMSLAAMEAALKPKVLETLELIARDYAKLAEMQDLRMSATLNEDGTFSVAEEAAYQKLRSEIVLLVNELHLHNNRIEALIDQLYGINRKIMSIDSGMVKLADAARINRREFIDEYRGYELDPTWMDRMSAKPARAWVTLFEKSRDKVEDLRHEMAQVGQYVGVDISEFRRIVNQVQKGEKEARQAKKEMVEANLRLVISIAKKYTNRGLQFLDLIQEGNIGLMKAVDKFEYRRGYKFSTYATWWIRQAITRSIADQARTIRIPVHMIETINKLVRTGRQMLHEIGREPTPEELAEKLQMPLEKVRKVMKIAKEPISLETPIGDEEDSQLGDFIEDKNAILPLDSAIQENLKETTTRVLASLTPREERVLRMRFGIGMNTDHTLEEVGQQFSVTRERIRQIEAKALRKLKHPSRSRKLRSFLDQ

SEQ ID NO: 18991 - protein, 215 aa, Serratia marcescens
  misc_feature (158)..(158): Xaa can be any naturally occurring amino acid
  unsure (1)..(215): unsure at all Xaa locations
LQFLDLIQEGNIGLMKAVDKFEYRRGYKFSTYATWWIRQAITRSIADQARTIRIPVHMIETINKLNRISRQMLQEMGREPTPEELAERMLMPEDKIRKVLKIAKEPISMETPIGDDEDSHLGDFIEDTTLELPLDSATSESLRSATHDVLAGLTAREXKVLRMRFGIDMNTDHTLEEVGKQFDVTRERIRQIEAKALRKLRHPSRSEVLRSFLDD

SEQ ID NO: 18992 - protein, 398 aa, Arabidopsis thaliana
  misc_feature (180)..(180): Xaa can be any naturally occurring amino acid
  misc_feature (235)..(235): Xaa can be any naturally occurring amino acid
  misc_feature (304)..(304): Xaa can be any naturally occurring amino acid
  misc_feature (343)..(343): Xaa can be any naturally occurring amino acid
  unsure (1)..(398): unsure at all Xaa locations
MALGLSSEESEMSPDGELVPVDSSAVVTAKRKTSQLSRSWISIDATGQKTVLDVDKHVIMHRVQIHARDLRILDPNLFYPSAILGRERAIVLNLEHIKAIITAEEVLIRDSSDENVIPVLEEFQRRLPVGDEAHGVHGDGDLGEEDESPFEFRALEVALGAICSFLAARATELEKFAYPXLDELTLKISSRNLERVRELKSAMSRLSARAQKVRDVLEQLSDDDGDKADLYLTMXLVGASSSVSVSDEPIWYPTSPTIVSIISRASRVSLVTVRGDDDTDVEELEMSLEAYLMQIDSTLNKSTXLREYIDDTEDHINIQLDNHRNQLIQLELMLSAGTVCVSXVYSMIAGIFGMNIPNTWNHDHGYIFKWVVSLTGTFCIVLFVIILSYARFRGLIGS

SEQ ID NO: 18993 - protein, 588 aa, Zea mays
  misc_feature (229)..(229): Xaa can be any naturally occurring amino acid
  unsure (1)..(588): unsure at all Xaa locations
MAMIDEPLYPIAVLIDELKNEDIQLRLNSIRRLSTIARALGEERTRKELIPFLSENNDDEDEVLLAMAEELGVFIPYVGGVEHAHVLLPPLETLCTVEETCVRDKAVESLCRIGAQMKETDIVDWFIPVVKRLAAGEWFTARVSSCGLFHIAYPSASDQLKTELRTIYGQLCQDDMPMVRRAAASNLGKFAATVEQNHLKTEIMSIFDDLTQDDQDSVRLLAVEGCAAXLGKLLEPQDCVAHILPVIVNFSQDKSWRVRYMVANQLYELCEAVGPEPTRADLVPAYVRLLRDNEAEVRIAAAGKVTKFCRILNPQLSVQHILPCVKELSSDSSQHVRSALASVIMGMAPVLGKDATIEQLVPIFLSLLKDEFPDVRLNIISKLDQVNQVIGIDLLSQSLLPAIVELAEDRHWRVRLAIIEYIPLLASQLGVGFFDDKLGALCMQWLEDKVFSIRDAAANNLKRLAEEFGPEWAMQHIIPQVLEKINNPHYLYRMTILQAISLLAPVMGAEITCQKLLPVVINSSKDRVPNIKFNVAKVLQSLVPILDQSVVEKTVKPCLVELSEDPDVDVRYYANQALQACDQMMVSS

SEQ ID NO: 18994 - protein, 212 aa, Wolbachia pipientis
TSCSSAITFIDGDKGILRYRGHDIADLAKNNDFTAVIYLLLYGKLPNLEQYKKFFLKIQELSKVPGQVVNVIKTFPKAAHPMSILIACFASLSALYYEKYGNNVSNENLDFGISVIAQVPAIIAMIYRHTYNQEFIDTDNELSYSKNFLRMMFGNALTNEKSHLFAKALDKIFILHADHEQNVSTAAVRVVGSAGSNLFACLSAGVAALWGP

SEQ ID NO: 18995 - protein, 212 aa, Wolbachia pipientis
TSCSSAITFIDGDKGILRYRGHDIADLAKSNDFTAVIYLLLYGKLPNLEQHKKFFLKIQELSKVPGQVVNVIKAFPKAAHPMSILIACFASLSALYHEKYGNNVSNENLDFGISAIAQVPAIIAMIYRHTDDQEFIDTDNELSYSKNFLRMMFGDALDNDKSTLFAKALDKIFTLHADHEQNASTAAVRVVGSAGSNLFACLSAGVAALWGP

SEQ ID NO: 18996 - protein, 212 aa, Wolbachia pipientis
TSCSSTITFIDGDKGVLKYRGHSIADLAENNNFTAIIYLLLYGELPNLEQHKKFLLKIGELSELPEQVINVVKAFPKTAHPMSILIACFAGLSALYHERHGNNVNSEDLDFGISAIAQVPAIIAMIYRYINNQEFINANNELSYSENFLRMMFGDTFDNDKSALFAKALDKIFTLHADHEQNASTAAVRLVGSAGSSLFASLSAGVATLWGP

SEQ ID NO: 18997 - protein, 193 aa, Triticum aestivum
LVAGSRSTSQPRPAAGSTPKLVASFPAITYAEARALRDKDGDDTAVLECAVCLSEFEDGDQLRLLPKCSHAFHPDCIGEWLAGHVTCPVCRCSLAPEEPAPAAAEENSAGAEEQRAPEVAIDMDPEGDGAAHEERMREAAELERIGSLRRAVRSRSGRPFSRAHSTGHSLSARFDGDLERFTLRLPEHVRRDM

SEQ ID NO: 18998 - protein, 212 aa, Wolbachia pipientis
TSCSSSITFIDGDKGALRYRGHDIADLAENNDFTAVIYLLLYGKLPNLEQYKEFFLKIKELSKVPEQVIEVIKAFPKTAHPMSILIACFASLSGLYYEKYGTNINSKDLSFGISIIAQVPIIVAMIYRYINDQVFINADNESSYSEKFLMMMFGNIFDKNKNVLFAKALDKIFTLHADHEQNASTTAVRLVGSAGSNLLASLSAGVATLWGP

SEQ ID NO: 18999 - protein, 392 aa, Staphylococcus aureus subsp. aureus Mu50
MNQQLIEALKSKEDKMIEIRRYLHQHPELSFHEDETAKYIAEFYKGKDVEVETNVGPRGIKVTIDSGKPGKTLAIRADFDALPITEDTGLSFASQNKGVMHACGHDAHTAYMLVLAETLAEMKDSFTGKVVVIHQPAEEVPPGGAKAMIENGVLDGVDHVLGVHVMSTMKTGNVYYRPGYVQTGRAFFKLKVQGKGGHGSSPHMANDAIVAGSYFVTALQTVVSRRLSPFETGVVTIGSFDGKGQFNVIKDVVEIEGDVRGLTDATKATIEKEIKRLSKGLEDMYGVTCTLEYNDDYPALYNDPEFTEYVAKTLKEANLDFGVEMCEPQPPSEDFAYYAKERPSAFIYTGAAVEDGEIYPHHHPKFNISEKSLLISAEAVGTVVLDYLKGDN

SEQ ID NO: 19000 - protein, 212 aa, Wolbachia pipientis
TSCSSQITFIDGDEGVLKYRGHDIADLAENNNFTSVIYLLLYGELPSAEQQKNFLLKIQDLSKVSEQVINVIKAFPKTAHPMSILVACFANLAALYHEKYGNNVNSGNLDFGISAIAQVPAIVAMIYRHISGQEFTDANSELSYSENFFRMMFGNAISSDKSTLFAKALDKIFTLHADHEQNASTASVRLSGSAGSNLFACLSAGVVTLWGP

SEQ ID NO: 19001 - protein, 457 aa, Cryptococcus neoformans var. neoformans B-3501A
MDITAALHEASSQQNQKLRSQAYLSLLQSLLQPPLTSASPLIAFGTHFTTSNTVIIIVGRRILGAYLVALLAGTTVVQKGTAKVPLDEEGQADEAEWAALGKAAFGGEKGEEVRRDVVEGVLAAGSSGWCDEQITVLRHLHSHLLMLEEDWEGAARALMPMQLEGGSRVVSDDEKLNVYMQIVRLFLECGEWGQAQTYFTRASLLPRPTDKETRLSMRLSQAKLYDFANEFAKASVTYHEVSHDPSIDPSDRLIILSAAVTTSILAPSGPHRSRILATLNRDDRVHTELPAGLGTMLKKMLLEYIVKPEEMKEFEGALAPHQRAVVEGGGTVLERAVREHNVGACAKVYDNISFSALGAILNLSPSSAETIAQRMIEQSRLRAWIDQPSQLIFFESRPQLDTDADAQGTAGGLGVEKEEKEVEKVGWGVRWDERIRGTSLRVEGIAEAILAKGLIDA

SEQ ID NO: 19002 - protein, 228 aa, Fusobacterium nucleatum subsp. vincentii ATCC 49256
MKLVLIRHGESAWNLENRFTGWKDVDLSPKGVEEAKAAGKSLKEMGLVFDVAYTSYLKRAIKTLNIVLEEMDELYIPVYKSWRLNERHYGALQGLNKAETAKKYGDEQVHIWRRSFDVAPPSIDKNSEYYPKSDRRYANLADSDIPLGESLKDTIARVLPYWHSDISKSLQEGKNVIVAAHGNSLRALIKYLLNISNEDILNLNLTTGKPLIFEMDKDLKVLKAPESF

SEQ ID NO: 19003 - protein, 426 aa, Arabidopsis thaliana
MISLSLLICFIALFSCSSKEKPTLGGTRIKTRKRNIAAPLDPAAFSDALVQIYLDNAGDLELVARSLESSDLNFSRYGDIFFEVVFIGGRTQTGSVKSDEGERHPYSIIDCEPKREAILPSVVYIQKILRRKAFLIKNLENVTRRFLQSLELFEENERKKLAIFTALAFSQKLSGLPAETVFQPLLKDTLVAKGIVLNFVTDFFNEYLVENSLDDLISILRRGKMDDKLLEFLPPTKRTTESFAEHFTKAGLTALVEYNERKIFEVKLKEIKAVLTSQVTEEINVDEVTEMVKQQVKDAKLPETEVVHVIWDGIMNAVQWSGKNQQQNSNAVLRQVKTWAPLLNTLCSTGNMEMELMYKVQMQCYEDAKLMKVFPEVVRSLYELDVLAEDTILHWYRKGTNPKGRQTFVKGLEPFVNWLEEAEEEE

SEQ ID NO: 19004 - protein, 150 aa, Zea mays
GQQAPEPPLHHPKPTEQSHDGLDLSDQARLFSSIPTSDLLRSTAVLHAAAIGPMVDLGTWVMSSKLMDASVTRGMVLGLVKSTFYDHFCAGEDADAAAERVRSVYEATGLKGMLVYGVEHADDAVSCDDNMQQFIRTIEAAKSLPTSHFS

SEQ ID NO: 19005 - protein, 152 aa, Nicotiana tabacum
FGTSSTFFNRPTGRFSNGRVIIDFITQSFKLPFLNAYLDRGAAFTQGVNFAVAGGTALNTSFWTARNIRLPTWNTPLANQLGWFKTHLQSTCGSRCADSLKNSLIVMGEWGGNDYYNGFFQNKQISEVRTYVPNVVAGIMRGIKRCDSARSH

SEQ ID NO: 19006 - protein, 206 aa, Zea mays
MDDPVERLKDGFHKFKTEVYDKKPELFEPLKAGQAPKYMVFACSDSRVCPSVTLGLQPGEAFTVRNIAAMVPAYDKTKYTGIGSAIEYAVCALKVEVLVVIGHSCCGGIRALLSLQDGAPDNFHFVENWVKIGFPAKIKVKKDHASVPFDDQCSILEKEAVNVSLENLKTYPFVKDGLANGTLKLVGGHYNFVSGEFLTWDNKQPS

SEQ ID NO: 19007 - protein, 422 aa, Mesorhizobium loti MAFF303099
MMPQSRVWHPFTQHALEPAIPEIARTEGAYLYKADGTRILDAISSWWVVTHGHRHPRIIKAIETTASSLVQIIFAGFTHEPAERLAKALVGLAPAGLDWVFYSDSGSTSVEVALKMALGYFRNIDAPRSRIVVMEHSYHGDTIGTMSVGARGAFNAAYEPLLFEVDTIPFPAAGREQETLDRFEAVARDRRTAALIVEPLVLGAGGMLMYPAWVLAELKKIAETSGTLLIADEVMTGWGRTGTMFACEQASISPDILCTSKGLTGGAIPLAATLATDAIFQAHYSEDRKKTFFHSSSYTANPIACAAALANVEIWRDEPVAERVAALSAKQAAGLQRFRDNPYFTDCRATGTIAALDLRTGSAGYLAEIGPKLRAFFLERGLLVRPLGNVLYLLPPYCITGGELDALYDAIEEAAERFGSRP

SEQ ID NO: 19008 - protein, 94 aa, Bacillus clausii KSM-K16
MLKPLGDRIIIEQIQSEEKTASGIVLPDSAKEKPQEGKVVAVGTGRVTDNGEKVALEVKEGDSIIFSKYAGTEVKYEGTEYLILRESDVLAIIG

SEQ ID NO: 19009 - protein, 545 aa, Bacillus clausii KSM-K16
MAKDIQFSEEARRSMLKGVDTLANAVKVTLGPKGRNVVLEKKFGSPLITNDGVTIAKEIELEDAFENMGAKLVAEVASKTNDIAGDGTTTATVLAQAMIREGLKNVTSGANPMGIRKGIEKATAAAVKELKAISKPIEGRESIAQVAAISSADEEVGQIIAEAMERVGNDGVITIEESKGFSTELEVVEGMQFDRGYASPYMVSDSDKMEAVLDNPYVLITDKKITNIQEVLPVLEQVVQQSRPVLIIAEDVEGEALATLVLNKLRGTFNAVAVKAPGFGDRRKAMLEDIAILTGGQVITEDLGLDLKSATIESLGRAAKVVVTKENTTIVEGAGDPEQISGRVNQLKAQVEETTSEFDKEKLQERLAKLAGGVAVLKVGAATETEMKERKLRIEDALNSTRAAVEEGIVAGGGTALVNVIKAVKAVDATGDEATGVNIVLRALEEPVRQIAHNAGLEGSIIVEKLKAEEVGVGYNAATGEYVNMVETGILDPVKVTRSALQNAASVSAMFLTTEAVIADKPEENAGGADMGGMGGMGGGMPGMM

SEQ ID NO: 19010 - protein, 173 aa, Brassica napus
ETYKGFEGLTSLVDVGGGIGATLKMIVSKYPDLKGINFDLPHVIEEATSTHASDHVGGDMFVSVPKGDAIFMKWICHDWSDEHCVKFLKNCYEALPEDGKVILAECILPETPDSSLSTKQVVHVDCIMLAHNPGGKERTEKEFEALAKGSGFKGINVACNAFGVYVIELLKKM

SEQ ID NO: 19011 - protein, 227 aa, Neisseria meningitidis Z2491
MELVFIRHGQSEWNAKNLFTGWRDVKLSEQGLAEAAAAGKKLKENGYEFDIAFTSVLTRAIKTCNIVLEESDQLFVPQIKTWRLNERHYGRLQGLDKKQTAEQYGDEQVRIWRRSYDTLPPLLDKDDEFSAHKDRRYAHLPADVIPDGENLQVTLERVLPFWEDQIAPAILSGKRVLVAAHGNSLRALAKHIEGISDEDIMGLEIPTGQPLVYKLDDNLKVIEKFYL

SEQ ID NO: 19012 - protein, 416 aa, Ustilago maydis 521
MPPNERTPLVSANDNGLPSHNNEHSGAHSQQPNIVSSLYWILTCSWINAFLVFVPLGIVAEHLHWPAIWIFSLNFLAIIPLAKILGDATEQVSLRLGQTLGGLLNATFGNAVELIVGIVALIQGQLRIVQTSLIGSILSNILLVLGMSFVAGGLFRSENTFQQTAAQASGSIMTLGCITLAIPAAYHMSVKSSAALAGNFEKLALLNAPVVGEEDRTGLLFISRGTSLILVGIYVLYLYFQLKSHAFLYEADEQDDEQEEANMSPIAAMIALGGVTVLTAFNADYLVGAIDEVANDYKIPKAFIGTILLPIVGNMAEHLTAVWMASKGKMEISLGIAIGSSIQISVGMIPILVLVGWAIKQPLTLYFETFETVILVAAVFLVNTLVQDGKSNYMEGAMLCSLYAVAALSFWVSPEV

SEQ ID NO: 19013 - protein, 138 aa, Brassica napus
SRDELFLNLVMEYVPETLYRVLKHYTNSSQRMPIFYVKLYTYHIFRGLAYIHTVPGVCHRDVKPQNLLVDPLTHQCKLCDFGSAKVLVKGEANISYICSRYYRAPELIFGATEYTSSIDIWSAGCVLAELLLGQPLFP

SEQ ID NO: 19014 - protein, 355 aa, Propionibacterium acnes KPA171202
MTGFVLTLGSLAVTGENPALSNTGVHSMIRIAIIGAGRIGHVHARAIQGRNDVTLALVCDPFEQNARALAGEYDVRYCLDPDEVFDDSTIDAVVIGSPTQFHVDHILKAVNGGKRVMCEKPIALDVESAKRCINELGDRADQVMMGFNRRFDPTFSALKSRLDDGEIGSLQQLTVISRDPAAPSASYIAGSGGIFKDMTIHDFDMVRHFLGDIAEVNAVGTNVSPEIAEQGDFDQVIVTLKSRDGKLATIINSRTCAFGYDQRLEAFGADGMLSADNLTDAAVRMATSTQTDAKTAIMDFFLERYEDAYRIELETFLDSIAIGGAVSPSVRDGYEALVLADAATRSAQEHRVVAL

SEQ ID NO: 19015 - protein, 427 aa, Pseudomonas aeruginosa PAO1
MSRSETLFNNAQKHIPGGVNSPVRAFKSVGGTPLFFKHAEGAYVLDEDDKRYVDYVGSWGPMILGHSHPDVLDAVRRQLDHGLSYGAPTALEVEMADLVCSMVPSMEMVRMVSSGTEATMSAIRLARGYTGRDSIIKFEGCYHGHSDSLLVKAGSGALTFGVPNSPGVPAAFAKHTLTLPFNDIEAVRKTLGEVGKEVACIIVEPVAGNMNCVPPAPGFLEGLREACDEHGVVLIFDEVMTGFRVALGGAQAYYGVTPDLSTFGKIIGGGMPVGAFGGKREIMQQISPLGPVYQAGTLSGNPLAMAAGLTTLRLISRPGFHDELTAYTTRMLDGLQQRADAAGIPFVTTQAGGMFGLYFSGADAIVTFEDVMASDVERFKRFFHLMLDGGVYLAPSAFEAGFTSIAHGDKELEITLNAAEKAFAALK

SEQ ID NO: 19016 - protein, 139 aa, Brassica napus
MTTTASNSTHNPHEDSPVKNPPSTTVSAQSVSSSGSMGSPSEQTTTVATTPASDDPASQLASGGKKKRRGQRASGPDKNGRGLRQFSLKVCEKVESKGRTTYNEVADELVAEFALPNNDDTSPDQQQYDEKNIRRRVYD

SEQ ID NO: 19017 - protein, 195 aa, Triticum aestivum
MTGKKRKAEAARLDETDRAMYGAFRGAANSLSQLYTLAMGGQKLSFQAGERHAMEKLYEWILRQHENGLRLTVGDIASHVQHEIQYGGDNPLASPRSQYASQSTHATVHMPNTSNQQPSASLFALGNPGLTQPKNSAVFSNALSSPVRRGLQPYHLDQGGDAGYFANGLAREPNPTASNDSSMDMHSDSPAHDSS

SEQ ID NO: 19018 - protein, 194 aa, Oryza sativa
MVHPLGRTSMGRQRIEIRRIDNKERRQVTFTKRRGGLFKKASELALLTGASVAVVVFSPAKHVYAFGHPSVDAVLRSYASVPGEAAAVAPVPVHGGSGGEDVDLLGLRLAADDTGAQVAAEHARMRDVAARIVQAKAGRRFWWEADVDALGEAELLEFFTALKKLRDNVGRHANALLAPQPPPLPLQQKQRRRR

SEQ ID NO: 19019 - protein, 184 aa, Photobacterium profundum SS9
MALKSLAIVEAEWFFYPHIRVRMMMTTFYDISADNIRGESVSMNEFAGKLVLVVNTASECGFTPQYRGLQDLYAKYKDQGLVIIGFPCNQFGGQEPGENTDIAESCLINYGVDFPMFAKVDVNGADSHALFQYLVKALPGTFGSKVKWNFTKFMISRDGKPLKRFAPTKKPESMEADIVRALKA

SEQ ID NO: 19020 - protein, 447 aa, Hordeum vulgare subsp. vulgare
MGKEKIHISIVVIGHVDSGKSTTTGHLIYKLGGIDKRVIESFEKEAAEMNKRSFKYAWVLDKLKAERERGITIDIALWKFETTKYSCTVIDAPGHRDFIKNMITGTSQADCAVLIIDSTTGGFEAGISKDGQTREHALLAFTLGVKHMICCCNKMDATTPKYSKSRYDEIVKEVSSYLKKVGYNPDKVPFVPISGFEGDNMIERSSNLDWYKGPTLLEALDQINEPKRPSEKPLRLPLQDVYKIGGIGTVPVGRVETGVIKPGMVVTFGPTGLTTEVKSVEMHHESLLEALPGDNVGFNVKNVAVKDLKRGYVASNSKDDPAKEAANFTAQVIIMNHPGQISNGYAPVLDCHTSHIAVKFAEIQTKIDRRSGKELEAAPKFLKNGDAGFVKMIPTKPMVVETFAQYPPLGRFAVRDMRQTVAVGVIKSVEKKEPTGAKVTKAAIKKK

SEQ ID NO: 19021 - protein, 68 aa, Ammopiptanthus mongolicus
MLLVLLASQEMVVQTEGLFRRKCPSVLSNRFKGKCFSDHNCASVCQLEGYFGGDCRGLRQRCFCTKSC

SEQ ID NO: 19022 - protein, 92 aa, Zea mays
  misc_feature (55)..(55): Xaa can be any naturally occurring amino acid
  unsure (1)..(92): unsure at all Xaa locations
VFDQLTDDSQKRYKESLIFEEVYIIVLCVYNDINNYLPGPHHYPLSKENLMAMMXEYYVNLDGLLYQKEFAEFIPKLTEVSLCSINEKLLIT

SEQ ID NO: 19023 - protein, 520 aa, Zea mays
  misc_feature (492)..(492): Xaa can be any naturally occurring amino acid
  misc_feature (504)..(504): Xaa can be any naturally occurring amino acid
  unsure (1)..(520): unsure at all Xaa locations
MMVGHSHVVCRLKHRGPDWSGLYQHEGNFLAQQRLAIVSPLSGDQPLFNEDRTVVVVANGEIYNHKNVRKQFTGAHSFSTGSDCEVIIPLYEKYGENFVDMLDGVFAFVLYDTRDRTYVAARDAIGVNPLYIGWGSDGSVWMSSEMKALNEDCVRFEIFPPGHLYSSAAGGFRRWYTPHWFQEQVPRTPYQPLVLREAFEKAVIKRLMTDVPFGVLLSGGLDSSLVASVTKRHLVKTDAAGKFGTELHSFVVGLEDGIDAIEEVIYHDETYDVTTIRASTPMFLMARKIKSLGVKMELHRETCRKVKALHQYDCLRANKATSAWGLEVRVPFLDKEFVDVAMGMDPEWKMYDKNLGRIEKWVLRKAFDDEEHPYLPEHILYRQKEQFSDGVGYNWIDGLKAFTEQQVTDEMMNSAAQMFPYNTPVNKEAYYYRMIFERLFPQDSARETVPWGPSIACSTPAAIEWVEQWKASNDPSGRFISSHDSAATDRTXTSWRWSTATGTXANGTVNGNDVAVAIAV

SEQ ID NO: 19024 - protein, 513 aa, Oryza sativa (japonica cultivar-group)
MQPDPSGSGGDGNANAKAKLAPPPVTAAGGRPVSVLPHKTANVRDHYRIGKELGQGQFGTTYLCVDKASGGEFACKSIPKRKLLCREDYEDVWREIQIMHHLSEHPNVVRIRGAYEDALFVHIVMELCAGGELFDRIVAKGHYTERAAAQLIRTIVAVVEGCHSLGVMHRDLKPENFLFASAAEDAPLKATDFGLSMFYKPGDKFSDVVGSPYYVAPEVLQKCYGPESDVWSAGVILYILLCGVPPFWAETEAGIFRQILRGKLDFESEPWPSISDSAKDLVRNMLCRDPTKRLTAHEVLCHPWIVDDAVAPDKPIDSAVLSRLKHFSAMNKLKKMALRVIAESLSEEEIGGLKELFKMIDTDDSGTITFDELKEGLKRVGSELTEHEIQALMEAADIDNSGTIDYGEFIAATLHMNKLEREENLVSAFSFFDKDGSGFITIDELSQACREFGLDDLHLEDMIKDVDQNNDGQIDYSEFTAMMRKGNAGGAGRRTMRNSLQLNLGEILNPSNS

SEQ ID NO: 19025 - protein, 212 aa, Wolbachia pipientis
TSWSSAITFIDGDEGILKYRGHDIADLAEGNNFNDVIYLLLYGELPNSEQQRNFFFKIGELSKVSEQVVNVIKAFPKTAHPMSILIACFASLSALYHEKHGNNINSEDLNFGISAIAQVPAIIAMIYRHVNNQEFTRTDNKLSYSENFLRMMFGNAFDSNKSTLFARALDKIFTLHADHEQNASTTAVRLVGSAGSNLLASLSAGVATLWGP

SEQ ID NO: 19026 - protein, 212 aa, Wolbachia pipientis
TSCSSAITFIDGDKGVLKYRGHSIADLAENNNFTAVIYLLLYGELPNLEQHKKFLLKIEELSKVPKQVVSVVKAFPKTAHPMSILIACFASLSALYHERHGNNVNSEDLDFGISIIAQVPAIVAMIYRHINDQEFIDANNELSYSENFLRMMFGDAFDNDKSALFAKALDKIFTLHADHEQNASTAAVRLVGSAGSSLFASLSAGVATLWGP

SEQ ID NO: 19027 - protein, 347 aa, Leuconostoc mesenteroides subsp. cremoris
MTTKMFYDKDIDTKPLENKKIAVIGYGAQGHAQANNLRVSGFDVIMGLRPGKSFDSVKKDGFEVYSAAEATAQADVVMMETPDELQAAVWEKEVEPNLKAGSDLGFSHGFNIVYGLIKPNADINVMIIAPKGPGNIERRQFVEGGGIPSLYGVHQDPTGDTAEVAKAYAKGIGSGCAGILETTFEEETTEDLFGEQAVLCGGLTQLIEAGFNTLVEAGYSPELAYFETSHEMKMIVDLIFEGGFEKMRHDCSNTCEYGEMLNGPRIITEESKQGMRDVLKDIQDGTYAKKWLAEYNSGLKDLEKMRTEYKSGLYEQTGKKVRAMMPWISDADKYSTAADTEQFSAAK

SEQ ID NO: 19028 - protein, 156 aa, Oryza sativa
QKRDLSTNTKTDVQHTQHHSEHHPSKEPENHSFDNCRLHQAQPITGSGSPIHHHLGRVVILLLLGDDPDSVDDAGEVAEEGEQQADPELNPAAELEEDAERRQDDGEDDVDAGRRAVRHSSACSQLTTMHNCTNKKKKKNQRLSSKLRRRERSQES

SEQ ID NO: 19029 - protein, 271 aa, Neurospora crassa
MDPQNPSSAGHNQQQRQQPVYDTSQGGHYGASAALSQQGFAPSDLYTGTWANVHQGHQGNYKENLTAYWQQTINHLENDTHDYKLHQLPLARIKKVMKADPEVKMISAEAPILFAKGCDIFITELTMRAWIHAEENKRRTLQRSDIASALSKSDMFDFLIDIVPREEASTHAKRATGQSAAAAAQAAQNAAQQAQGMPGVAAPNHGGQHPMAAPDYTLGGHAIAPEADYRQQNMYSGQVQPGAPAPYGQPQPPMYDVDGMYYSTMPPQQNA

SEQ ID NO: 19030 - protein, 420 aa, Oenococcus oeni PSU-1
MNTNKLHKQINLIGERAQAASQIVSGLSIDERNKILLSFASEIEKNSDKIVEINVQELKEHRDDLSLPMQKRLQLSKEKISTIASSLKALVKLADPLSEGNTSWQAKAGFKVVKKTVPLGVVAMIYEARPNVTIDAAALTIKSANAVILRGGKESIKTNQVLVSILQQSLKKLGYSENIVQLIEDTSHDSVKELLHLRKFIDVLIPRGSGSFINYVVDNSTVPVIETGAGNDHIFVDKSADQEEAIKVIVNSKIQNPSVCNSAEKLLVHADIAKEFLPKLFDRLSNEGVEIRGDKEVQLIDNRVELAKDFDWDTEYNDLIIAVHLVNNLKEAIDWIGKHTTHHTEAILTNSAENASEFMQRIDAAVVTENASTRFTDGFEFGFGAEIGISTQKLHARGPMGLTALTSYKYEIFGHGEIRK

SEQ ID NO: 19031 - protein, 268 aa, Oenococcus oeni PSU-1
MAEKSFDNWKKIVVKVGTSTIVQENSQINLPIIGQLVQTLCALRNQNREVVFVTSGAVGVAINQLGFKERPNEIPRQQALAAIGQADLMAIYNQNFSFYHQITGQILLTYDVFDNPKMLENMLNALRELLKMKAIPIINENDVIAVDEMDHQHSFGDNDCLAAMVTKIIDADGLIILSDVDALYDRNPHEFANAKAIKRVGSITKQVINLASGKSNLGKGGMLTKLKAAKYLLKNDKQMLLLPGSEPDGILKALSGQEIGTLFANEYK

SEQ ID NO: 19032 - protein, 310 aa, Prochlorococcus marinus str. NATL2A
MQWILILIFSIFCLFTLTNQWVRKSRKYESVNSVASSYDSWTNDRLLENLWGEHIHLGFYEKPRIKKDFRKAKVDFVHELVRWSGLNQLPKGSRVLDVGCGIGGSSRILSDYYGFDVIGISISQEQVKRARELTANRDFCSFEVMNALDLKFEKGSFDGVWSVEAGPHILDKQTFADEMLRVLRPGGVLAVADWNQRDSTKHPLNFFEKLIMNQLLIQWTHPEFSSIEGFKNNLLNSPYCGSSVETSNWTKYTIQSWNESIYEGFRRPSSILKLGLRSLLKAFKEIPTILMMRWSFSRGLMKFGVFKSRG

SEQ ID NO: 19033 - protein, 3982 aa, Bacillus subtilis
MYTSQFQTLVDVIRERSSISDRGIRFIESDKNETVVSYRQLFEEAQGYLGYLQHLGIKPKQEIVFQIQENKSFVVAFWACILGGMIPVPVSIGEDDDHKLKVWRIWNILNHPFLIASEKVLDKIKKYAAEHDLQDFHHQLNEKSDIIQDQTYDYPASFYEPDADELAFIQFSSGSTGDPKGVMLTHHNLIHNTCAIGTALTVHSKDSFLSWMPLTHDMGLIACHLVPFITGINQNLMPTELFIRRPILWMKKAHEHKASILSSPNFGYNYFLKFLKNEPDWDLSHIKVIANGAEPILPELCDEFLKRCAAFNLKRSAILNVYGLAEASVGARFSKIGKEFVPVYLHRDYLNLGERAVKVSKEDQNCASFVEVGQPIDYCQLRISDETNERVEDGIIGHIHIKGDNVTQGYYNNPESTEKALTSDGWVKTGDLGFISESGNLVVTGREKDIIFVNGKNIYPHDIERVAIEMEEVDLGRVAACGVYDQKTQSGEIVLFVVYKKSPEKFAPLVKEIKKHLYKRGGWSIKEVLPIRKLPKTTSGKVKRYELARQYEAGNFSTESAAINECLESSTETSGQTPIHEIETELLSIFSDVLNGKKVHLADSYFDMGANSLQLSQIAERIEQKFGRELAVSDLFTYPSITDLAAYLSESRAEIKQDAAAKPSHVTPKDIAIIGLSLNVPGASTKSDFWNLLEKGEHSIREYPESRLKDAADYLKSIQSEFNESQFVKGGYLDEIDRFDYSFFGLAPKTAQFMDPNQRLFLQSAWHAIEDAGYAGGSMNGSRVGVYAGYSKVGYDYERLLSANYPEDLHQYIVGNLPSVLASRIAYFLNLKGPAVTVDTACSSSLAAVHMACKSLISGDCEMALAGGIRTSLLPICIGLDMESSDGYTKTFSKDSDGTGTGEGAAAVLLKPLQDAVRDGDHIYGVIKGRAMTQDGTTAGITAPNPAAQTEVIETAWKDAGIAPETLSFIEAHGTGTKLGDPVEFNGLCKAFEKYTAKKQFCAIGSVKSNIGHLFEAAGIVGLIKSVLMLNHKKNPPLAHFNEPNPLIHFHSSPFYVNQEAAAFTSGDEPLRGGISSFGFSGTNAHVVLEEYISQSEYAPEDEHGPHLFVLSAHTEKSLYELAQQYRQYVSDDSQASLKSICYTASTGRAHLDHGIAMIVSGKQELSDKLTRLIQGDRNLPGVYIGYKNMKEMLPAHKEELNQQAAALIKQRLRTQDERITWLHRAAELFVQGAVIDWRALYSGETVQKTPLPLYPFERSRCWAEADQLRLNEGEKKGGAALNINQSKAHIESFLKTVISNASGIRAEELDLNAHFIGLGMDSIMLSQVKKAIADEFGVDIPMDRFFDTMNNLQSVIDYLAETVPSSFASAPPQENVPAQEIQVISEAQSESDRREGHQEHMLEKIIASQNQLIQDTLQAQLNSFNLLRNSGHHSDEKEYAKAQKKSIPSVKQGHPTVNAEKKAAQEAKPYVPFQPQNLNDQGHYTARQKQYLEDFIKKYADKTKGSKQYTDNTRFAHANNRNLSSFRSYWKEIVYPIIAERSDGSKMWDIDGNEYIDITMGFGVNLFGHHPSFITQVIDDSTRSSLPPLGPMSDVAGEVADRIRTCTGVERVAFYNSGTEAVMVALRLARAVTGRKKVVAFSGSYHGTFDGVLGVAGTKGGAASANPLAPGIPQSFMDDLIILHYNNPDSLDVIRSLGDELAAVLVEPVQSRRPDLQPRPFLKELRAITQQSGTALIMDEIITGFRIGLGGAQEWFGIQADLVTYGKIIGGGQPLGVVAGKAEFMNAIDGGTWQYGDDSYPQDEAKRTFVGGTFNTHPLTMRMSLAVLRHLQTEGEHLYEQLNQKTAYLVDELNRCFEQAQVPIRMVRFGSLFRFVSSLDNDLFFYHLNYKGVYVWEGRNCFLSAAHTADDIENIIQAVKDTVEDLRRGGFIPEGPDSPDGGGRKKSGTRELSPEQKQLVMASHYGNEASAALNQSIMLKVKGELQHTPLKQAVRHIVDRHEALRTVIHPDDEVQQVQERMNIDIPVIDFTGLPHEHREPEIQKWLTEDAKRPFHFHEQKPLFRIHVLTSAHNEHLIVLTFHHIIADGWSIAVFVQELESSYAAIVQGIPISPKEADVSFRQYLDWQQAQIDSGHYEEGVRYWRRHFSEPIQQPILPSTASVRYPNRYEGDRCTVRLGRPLSEALRSLSIQMKNSVFVTMLGAFHLFLHRLTKQSGLVIGIPAAGQSHMKQHALIGNCVNMIPVKNTSSSESTLSGYLGNMKESVNLAMRHQAVPMTLVARELPHDQVPDMRIIFNLDRPFRKLHFGKAEAEPVAYPVKCTLYDLFLNITDAHQEYVLDFDFNTNVISPEIMKKWGAGFTKLLQKMVEGDSIPLDAMMMFFDEEQHDLQALYADHQKRVSSIGSNTANFTEAYEAPVNETERQLARIWEELFGLERVGRSDRFLALGGNSLQATLMLSKVQKTFHQKVSIGQFFNHQTVKELARFIQNETKVIHLPMKTAEKKAYYPTSPAQQRVYFLHQLEPDQLAQNMFGHISITGKYDEQALISSLQQVMQRHEAFRTYFDIIDGDIVQKLENEVDFNVHVRTMSRDEFDAYSDRFVKPFRLDQAPLVRAELIKIENEQAELLIDMHHIISDGYSVNILTNELLALYHQKPLPDIEFEYKDFAEWQNQRLNDDAMKRQETYWLEQFQDEIPILDLPTDGSIAAERSSEGQRVTCSLQPDVIRSLQDLAQKAETTLYTVLLAAYNVLLHKYTGQEDIVVGTPASGRNHPDIEKIIGIFIQTIGIRTKPHANRTFTDYLEEVKRQTLDAFENQDYPFDRLVEKLNVQRETTGKSLFNTMFVFQNIEFHEIRHNECTFKVKERNPGVSLYDLMLTIEDAGQQIEMHFDYKPGRFTKDTIEQITRHYTAILNSLVEQPEMTLSSVPMLSETERHQLLTECNGTKTPYPHKETVYRWFEMQAEQSPDHEAVIFGNERYTYRQLNERANRLARTLRTKGVQADQFVAIICPHRIELIVGILAVLKAGGAYVPIDPEYPEDRIQYMLRDSRAEVVLTQRSLLDQLPYDGDVVLLDEENSYHEDHSNLESDSDAHDLAYMIYTSGSTGNPKGVLIEHQGLADYIWWAKEVYVRGEKTNFPLYSSISFDLTVTSIFTPLVTGNTIIVFDGEDKSAVLSEIMRDSRIDMIKLTPAHLHVIKEMNIAGGTAIRKMIVGGENLSTRLAKRVSEQLKGRLDIFNEYGPTEAVVGCMIYHFDAERDKREFVPIGTPAANTDIYVADASRNLVPFGVIGEIYISGPGVARGYWNRPDLTAEKFVENPYVPGAKMYKSGDLAKRLKDGNLAYIGRVDEQVKIRGHRIELGEIEAAMHNAEAVQKAAVTVKEEEDGLKQLCAYYVSDKPIAAAQLTEQLSSTLPDYMVPSYFVHLEHMPLTSNGKINRKALPAPEASLQQTAEYVPPGNETESKLTDLWKEVLGISHAGIKHNFFDLGGNSIRAAALAARIHKELDVNLSLKDIFKFPTIEQLADKALHMDKNRYVPIPAAKEMPYYPVSSAQRRMYLLSHTEGGELTYNMTGAMNVEGTIDPERLNAAFRKLIARHEALRTSFDLYEGEPAQRIHQNVDFTIERIQASEEEAEDRVLDFIKAFDLAKPPLMRAGLIEIAPARHVLVVDMHHIISDGVSVNILMKDLSRIYEGNEPDPLSIQYKDFAVWQQSDIQKRNIKSQEAYWLDQFHGDIPVLDMPADYERPAIRDYEGESFEFLIPEHLKQRLSQMEEDTGATLYMILLAAYTILLSKYSGQEDIIVGTPSAGRTHLDVEPVVGMFVNTLVIRNHPAGRKTFDAYLNEVKENMLNAYKNQDYPLEELIQHLHLPKDSSRNPLFDTMFVLQNLDHAELTFDSLQLKPYPFHHPVAKFDLTLSIQADRDNYHGLFEYSKKLFKKSRIEVLSNDYLHILSAILEQPSILIEHIGLSGSNEEEENALDSIQLNF

SEQ ID NO: 19034 - protein, 328 aa, Ehrlichia ruminantium str. Welgevonden
MTTDHIHNLTKQQLINCYHDMLLIRRFEEKSGQLYGMGLIGGFCHLYIGQEAIAVGIQHSIIEGDSIITSYRDHGLCFFWYRSKYVMAELMGKSTGCSGGKGGSMHMFNIEKQFFGGHGIVGAQVPIGTGIALANKYKKNNNVVFTCFGDGATNQGQVYEAFNMAALWKLPVVYVIENNEYAMGTSVSRSSYITDLYKKGESFGIPGYQIDGMDLFAVIKAATDAAAYCREQNGPILLEMKTYRYRGHSMSDPAKYRSKEEVEKVKEEKDPLINLKNYMISNKIISEEDCNKYDKEIRNIVKESVEFSQNSSEPAVNTLYTDVYKNTD

SEQ ID NO: 19035 - protein, 494 aa, Haloarcula marismortui ATCC 43049
MLSTRPDALPRAYVDVLSELQDNVPPDAWATIEPVIERELGDDIDTLFEAFDTTAISGASLGQVYEAQIDGQRVAVKVLRPNIRTRVESDLRVLSTLLPVLTYGADPGQAFTLENLTEEFATTVRREMDYGHEARMLREIGDNFANDDDIAIPDVVGSHSTDRVLTMTYLDGVKIDDVERLDELGIDRPALVRRLEEVYIQMIVEDGLFHADPHPGNLAVQPDGTLVFYDFGMTGYLGPRTQDQLLEFYVGLATDDVDRVMDAFVEMGALDPMADRNVMREAFDIVIEQFRGEDISEYRIEQLVGQFETQLYEFPMRLPQDLALVVRVTTVLEGVCRTLDPEFDFIEIISEYVMEQGAGDDVREQIKTEIQEAVTGSTRSAVRAAPKVEDALDRVEREELLVKTVLEDSDGLSRVLAKRLLLGIVASAGVPVSAYLYTVSGLQPAGLALGGSAAVLGILAWSFRRRRGPALSTPQFTRHEMQQRQATDAADGDE

SEQ ID NO: 19036 - protein, 588 aa, Methylobacillus flagellatus KT
MSKIIEVLVPDIGNFDSVDVIEVLVKAGDTIAKEDALITLESDKASMDIPSSHAGVVKEVKVKVGDKVAKGSLILLLEEAGTDQASTTADAAPAAKEESKPVPAATPAAPEPATGDSDINTEVVVLGSGPGGYTAAFRAADLGKQVVLIERYSTLGGVCLNVGCIPSKALLHTAKVITEAEETSLHGVSFGKPKIDLEALRAWKANDVVGKLTAGLAQMAKQRGVTVVQGVGKFTSPHQIAVTAADGKVTTVGFQNAIIAAGSQATKFPGAPEDERIMDSTGALALADVPKRLLVIGGGIIGLEMGTVYEALGSKVSVVEFMDGLIPGADRDLIRPLQKRMEKRFERIMLSTKVANIEAKKDGIHVSFEGENAPKEIEVYDRVLVSIGRRPNGKNIGAENAGVAVDDRGFITVDKQMRTNVPHIFAIGDIVGQPMLAHKATHEAKVAAEVIAGHKVEFQAMVIPSVAYTDPEVAWAGVTETEAKAKGLEIEKASFPWAASGRALSIARSEGATKLIFDKETHRVIGAGIVGTNAGELLAEAVLAIEMGADAHDLGLTIHAHPTLSETICFAAEIKEGTITDMLPPKKR

SEQ ID NO: 19037 - protein, 504 aa, Magnaporthe grisea 70-15
MEKFPDLDVGITNHNANKLNGHANGIANGGSHSQPVGVRWTPASSTYSGSGRSGGHSRQKSISEAIRTIRSRHGSVSQNAHEIADALKAPLSPRLIFAFVCGYCLLLSWLASISPGLRTAVPALKHGIRYPSRDVIQTTMPLAAFQIFGHLLSSTATSKIPVSLVHTIKGLSPLFTVLAYRIVFNIRYPAATYLSLVPLTLGVMLACSGKHKFGGEILGIVYALVATLIFVTQNIFSKRLFNEAARAEAEGMGHKSRKLDKLNLLCYSSGMAFILTVPIWFWSEGIGIIGDFLRDGSVDLTTAPGTFDHGRLFIEFVFNGTFHFGQNIMAFVLLSMVSPVTYSVASLIKRVFVIVIALVWFRSPTTKIQAVGIALTFVGLYLYDRTKEGNRADKRATYLGDKGAKDSLLPLSTKSNGVNGGLVFESPASAGPDGFDGGINAPRPYVNGYALPVRTEGDNKKSDDQTPGRGGRQRGASTTSWLPPGTRQEDTWRVGDRSSGGPVR

SEQ ID NO: 19038 - protein, 236 aa, Bordetella parapertussis 12822
MQPLFKRCGAEFFGTFWLVLGGCGSAVLAAGVPQVGIGYAGVALAFGLTVLTMAYAVGHISGGHFNPAVTVGLAASGRFGWRDVPPYIVAQVVGAIVAAATLASIAQGVAGFDLVASKFAANGYGDHSPGKYSMQAALICEIVLSAGFVFVILGATDKRAPAGFAPIPIGLALTLIHLISIPVTNTSVNPARSTGPALFVGGWALEQLWLFWLAPIAGALVGALAYRLVGTPSAQR

SEQ ID NO: 19039 - protein, 328 aa, Shigella flexneri 2a str. 301
MGQLIDGVWHDTWYDTKSTGGKFQRSASAFRNWLTADGAPGPTGTGGFIAEKDRYHLYVSLACPWAHRTLIMRKLKGLEPFISVSVVNPLMLENGWTFDDSFPGATGDTLYQHEFLYQLYLHADPHYSGRVTVPVLWDKKNHTIVSNESAEIIRMFNTAFDALGAKAGDYYPPALQTKIDELNGWIYDTVNNGVYKAGFATSQQAYDEAVAKVFESLARLEQILGQHRYLTGNQLTEADIRLWTTLVRFDPVYVTHFKCDKHRISDYLNLYGFLRDIYQMPGIAETVNFDHIRNHYFRSHKTINPTGIISIGPWQDLDEPHGRDVRFG

SEQ ID NO: 19040 - protein, 346 aa, Salmonella typhimurium LT2
MNDKIRVGLIGYGYASKTFHAPLIMGTPGLELAAVSSSDETKVKADWPAVSVVSEPRHLFNDPHIDLIVIPTPNDTHFPLAKRALEAGKHVVVDKPFTVTLSQARELDALARSTGRVLSVFHNRRWDSDFLTLKALLADGVLGEVSLFESHFDRFRPQVRDRWREQGGPGSGIWYDLAPHLLDQAIQLFGLPVSMTVDLAQLRPGAQSTDYFHAILSYPQRRVILHGTMLAAAESARYIVHGSRGSYVKYGLDPQEERLKNGERLPQEDWGYDMRDGVLTLVEGETRKEENWLTLPGNYPAYYAAIRDALNGNGENPVPASQAIQIMELIELGMESAKHRATLCLA

SEQ ID NO: 19041 - protein, 448 aa, Ustilago maydis 521
MREIVHLQTGQCGNQVGTKFWEVLSDEHGIDHNGNYIGTSDDQLARINVYYNEASGNKYVPRAVLVDLEPGTMDSTRSGPLGGLFRPDNFVFGQSGAGNNWAKGHYTEGAELVDSVLDVIRKEAENCDMLQGFQITHSLGGGTGAGMGTLLISKIREEYPDRMMATFSVLPSPKVSDTVVEPYNATLSVHQLVENSDETFCIDNEALYNICFKTLKLNAPTYGDLNHLVSLVMSGVTTCLRFPGQLNSDLRKLAVNMVPFPRLHFFMVGFSPLTARGSQSYRAVTIPEITQQAFDSKNMMTACDTRLGRYLTCAAYFRGKVSMKDVEDQMQSFQQKHSTQFVEWIPNNVQTAQCDIPPRGLKMSVTFIGNSTAIQDVFKRIAEQFSAMFKRKAFLHWYTGEGMDEMEFTEAESNLQDLIAEYQQYQDASALDEDIEGEYIEEEELVQE

SEQ ID NO: 19042 - protein, 338 aa, Zea mays
  misc_feature (102)..(102): Xaa can be any naturally occurring amino acid
  unsure (1)..(338): unsure at all Xaa locations
MGKIKIGINGFGRIGRLVARVALQSEDVELVAVNDPFITTDYMTYMFKYDTVHGQWKHSDIALKDSKTLLFGEKPVTVFGIRNPEEIPWGEAGAEYVVESTXGVFTDKDKAAAHLKGGAKKVVISAPSKDAPMFVVGVNEDKYTSDVNIVSNASCTTNCLAPLAKVIHDNFGIIEGLMTTVHAITATQKTVDGPSAKDWRGGRAASFNIIPSSTGAAKAVGKVLPELNGKLTGMSFRVPTVDVSVVDLTVRIEKGASYEEIKKAIKAASEGPLKGIMGYVEEDLVSTDFTGDSRSSIFDAKAGIALNDHFIKLVSWYDNEWGYSNRVVDLIRHMFKTQ

SEQ ID NO: 19043 - protein, 152 aa, Triticum aestivum
MLARSPALPSPFLTATETAAASSAFFQPCHLSTSPSVTFSKKTHGTRLTVQPNARHGNTKAASRIQGKWRTLSSDPAQAAAVVDAAGNSKTWVECKQILTTLNFSTEDAEKMLKKAFGWLHSPYWTEERKKEVPSTEVVSGVLDYVRGLGLS

SEQ ID NO: 19044 - protein, 505 aa, Solanum melongena
MDVPCPWYSLLIPLFVFIFLLIHHCFFTTSKKQNMLLLPSPRKLPIIGNLHQLGSLPHRSLHKLSQKYGPVMLLHFGSKPVIVASSVDAARDIMKTHDVVWASRPKSSIVDRLSYGSKDVGFSPFGEYWRRAKSITVLHLLSNTRVQSYRNVRAEETANMIGKIRQGCDSSVINLGEHLCSLTNNIISRVALGRTYDEKESGIEHIIEQFVELLGIFNVGDYIPRLEWVNKFTGLDAKVKKVAKELDMFLEIVIEEHIIRKKKEEYTSTGEAKDFVDVLLEIQNGNETDFPLQRDSLKAILLDSFAAGTDTTFATLDWTMAELLRQPRALKTLQDEVRGLAQGKSEITEDDLKNMQYLRAVIKESLRLHPTQESLLVPRESMEDVNLLGYYHIPARTQAIINAWAIGRDPLSWENPEEYQPERFLNSDADVKGLNFKLLPFGAGRRGCPGSSFAIAVIELALARLVHKFDFALPEGIKPEDLDMTETIGITTRRKLPLLVVATPC

SEQ ID NO: 19045 - protein, 180 aa, Aspergillus parasiticus
EFAKTLIPELFKHNNYASFVRQLNMYGFHKKVGLSDNSMRASERKNKSPSEYANPYFKRGHPDLLWLIQKPKNTAGQGSKSGKANVRVKTEEVDEHDNDDYDDVSGARDDRSRNRQLSLVQGGSIMPKDQLAGVYRELQAIRQQQQVISNTITKLRREHEQLYAQAANFQEQHTRHENSI

SEQ ID NO: 19046 - protein, 578 aa, Tortula ruralis
MGNSCVGAAGYFQGFTSVIALGGRSSRSPSEVSPTPSKAESRGGSRAEAESPETQRKPPRPAHIPAVEPAETQQFKEVIEAMKKGREMKPVPGQSLTHSVLQRKTENLRDLYVLGKKLGQGQFGTTYLCIEKATNREYACKSIAKRKLISKEDVDDVRRELQIMHHLSGHPNIVMIKGAYEDPASVHLVMELCAGGELFDRIIQRGQYSEAKAAVLTRTIVGVVETCHSLGVMHRDLKPENFLFSSTKEDAALKTTDFGLSVFFKPGEVFRDVVGSPYYVAPEVLRKNYGPEADVWSAGVILYILLSGVPPFWAETEQGIFEQVLKSELDFASDPWPKISDSAKDLIRKMLTPQASKRLKAHQVLAHPWICEDGVAPDRPIDSAVQSRLKHFSAMNKLKKIAIRVIAESLSEEEIAGLKEMFKMMDTDNSGSISYEELKAGLKKVGSNLKEEDVRQLMDAADVDGSGAIDYGEFLAATLHLNKVERDENMFAAFSYLDKDNSGYLTVDELQHALAEFNMGDVSVEELLREVDQNNDGQIDYTEFVTMMRKGNMGGGAGRSSLRNSQQLSLTDVLGIGG

SEQ ID NO: 19047 - protein, 582 aa, Ustilago maydis 521
MSLLRNAATPARKAASNQGRSFSTSLVANAHKEVKFSNDGRAAMLNGVNLLANAVSVTLGPKGRNVIIEQPFGGPKITKDGVTVAKSITLKDKFENLGARLVQDVANKTNEIAGDGTTTATVLARAIYAEGVKNVAAGCNPMDLRRGVQAGVDAVIKFLETNKRAVTTSAEIAQVATISANGDQHVGQLIATAMEKVGKEGVITVKEGKTLEDEIEITEGMRFDRGYISPYFITDVKTAKVEFEKPLILLSEKKISALQDILPSLEAAAQLRRPLLIIAEDVDGEALAACILNKLRGQLQVAAVKAPGFGDNRKSILGDLGILTGAQVFSDELETKLDRATPEMLGTTGAVTITKEDTIFLNGEGDKDRLAQRCEQIRAAINDTTTSEYDRTKLQERLAKLSGGVAVIKVGGSSEVEVGEKKDRYDDALNATRAAVEAGVLPGGGVALLKASLALNDVATANFDQQLGLSMLKAALTRPARTIVENAGEEGSVVVGRLLEKPGDFTYGYDASVGEYKDMIAAGILDPLKVVKTALQDASGVASLLTTSECCIVEAPEEKGPAGGMGGMGGMGGMGGMGGMGF

SEQ ID NO: 19048 - protein, 588 aa, Arabidopsis thaliana
MAMVDEPLYPIAVLIDELKNDDIQLRLNSIRRLSTIARALGEERTRKELIPFLSENSDDDDEVLLAMAEELGVFIPFVGGIEFAHVLLPPLESLCTVEETCVREKAVESLCKIGSQMKENDLVESFVPLVKRLAGGEWFAARVSACGIFHVAYQGCTDVLKTELRATYSQLCKDDMPMVRRAAASNLGKFATTVESTFLIAEIMTMFDDLTKDDQDSVRLLAVEGCAALGKLLEPQDCVARILPVIVNFSQDKSWRVRYMVANQLYELCEAVGPDCTRTDLVPAYVRLLRDNEAEVRIAAAGKVTKFCRLLNPELAIQHILPCVKELSSDSSQHVRSALASVIMGMAPILGKDSTIEHLLPIFLSLLKDEFPDVRLNIISKLDQVNQVIGIDLLSQSLLPAIVELAEDRHWRVRLAIIEYVPLLASQLGIGFFDDKLGALCMQWLQDKVYSIREAAANNLKRLAEEFGPEWAMQHLVPQVLDMVNNPHYLHRMMVLRAISLMAPVMGSEITCSKFLPVVVEASKDRVPNIKFNVAKLLQSLIPIVDQSVVDKTIRQCLVDLSEDPDVDVRYFANQALNSIDGSTAAQS

SEQ ID NO: 19049 - protein, 147 aa, Vibrio cholerae O1 biovar eltor str. N16961
MVSEAISKKEIERVKFESKDLHKPDEYWREHLTEEAFYVCRQQGTEAPYSGKLLHNKDTGLYHCTCCQSALFSSENKYDSGCGWPSFDAPINEQVIRFLDDFSHGMVRTEIRCAACDSHLGHVFEDGPKTTGLRFCVNSVSLIFNKK

SEQ ID NO: 19050 - protein, 693 aa, Brassica napus
MIPYAAGVIVPLALTLLVRNAKKDKKRGVVVDDVGGEPGHTVRNHRFKDPVSSHWEDISTLPELFEISCKSHSDRFFLGTRRLIAREVETSEDGKVFEKLHLGDYEWKTFGETLEAVCSFASGLVQIGHKSEERVAIFADTREEWFIALQGCFRRNVTVVTIYSSLGEEALCHSLNETEVTTVICGNKELKKLMDISQQLETVKRVICMDDEFPSEASSTWTTTSLADVQKLGRESPVDPSFPLSADVAVIMYTSGSTGLPKGVMMTHGNVLATVSAVMTIVPDLGKRDTYMAYLPLAHILELAAESVMATIGSAIGYGSPLTLTDTSNKIKKGTKGDVTALKPTIMTAVPAILDRVRDGVRKKVDAKGGAAKKLFDFAYARRLSAINGSWFGAWGLEKLLWDVLVFGKIRAVLGGQLRYLLSGGAPLSGDTQRFINICVGAPIGQGYGLTETCAGGTFSEFDDTSVGRVGAPLPCSFVKLIDWPEGGYLISDKPMPRGEIVIGGSNITLGYFKNEEKTKEVYKVDEKGMRWFYTGDIGQFHPDGCLEIIDRKKDIVKLQHGEYVSLGKVEAALSISPYVENIMVHADPFYSYCVALVVAAQQTLEGWASKQGIEFTNFEELCAKEQPVKEVYASLVKAAKQSRLEKFEIPAKIKVLAAPWTPESGLVTAALKLKRDVIRKEFSEDLTKLYAS

SEQ ID NO: 19051 - protein, 233 aa, Glycine max
MVVEDAQKSAITEDQNPSRVANDNNDDEDLEEGEILDDGDDGASATSKPPSALVRNPHPLENSWTFWFDNPSAKSKQAAWGSSIRPIYTFATVEEFWSIYNNIHHPSKLGVGADFHCFKHKIEPKWEDPICANGGKWTMTFQRGKSDTSWLYTLLAMIGEQFDHGDEICGAVVNVRSRQKKIAIWTKNASNEAAQVSIGKQWKEFLDYNDTIGFIFHEDAKKLDRGAKNKYVV

SEQ ID NO: 19052 - protein, 339 aa, Phaeospirillum molischianum
  misc_feature (310)..(310): Xaa can be any naturally occurring amino acid
  unsure (1)..(339): unsure at all Xaa locations
MRVYYDRDADVNLIKSKKVAVIGYGSQGHAHVLNLRDSGVKDVAVALRPGSASIKKAEAEGLKVLTPAEAAAWADVVMILTPDELQADLYKSELAANLKPGAALVFAHGLAIHFKLIEARADLDVFMVAPKGPGHTVRGEYLKGGGVPCLVAVAQNPTGNALELALSYASAIGGGRSGIIETTFREECETDLFGEQVVLCGGLSKLIQYGFETLVEAGYAPEMAYFECLHEVKLIVDLIYEGGIANMRYSISNTAEYGDYVTGSRIITEATKAEMKRVLADIQSGRFVRDWMLECKAGQPSFKATRRIQXEHVIEVVGEKLRGMMPWISKNKLVDKARN

SEQ ID NO: 19053 - protein, 564 aa, Escherichia coli
MSTLKITGMTCDSCAVHVKDALEKVPGVQSADVSYAKGSAKLAIEVGTSPDALTAAVAGLGYRATLADAPSVSTPGGLLDKMRDLLGRNDKTGSSGALHIAVIGSGGAAMAAALKAVEQGARVTLIERGTIGGTCVNVGCVPSKIMIRAAHIAHLRRESPFDGGIAATTPTIQRTALLAQQQARVDELRHAKYEGILEGNPAITVLHGSARFKDNRNLIVQLNDGGERVVAFDRCLIATGASPAVPPIPGLKDTPYWTSTEALVSETIPKRLAVIGSSVVALELAQAFARLGAKVTILARSTLFFREDPAIGEAVTAAFRMEGIEVREHTQASQVAYINGEGDGEFVLTTAHGELRADKLLVATGRAPNTRKLALDATGVTLTPQGAIVIDPGMRTSVEHIYAAGDCTDQPQFVYVAAAAGTRAAINMTGGDAALNLTAMPAVVFTDPQVATVGYSEAEAHHDGIKTDSRTLTLDNVPRALANFDTRGFIKLVVEEGSGRLIGVQAVAPEAGELIQTAALAIRNRMTVQELADQLFPYLTMVEGLKLAAQTFNKDVKHLSCCAG

SEQ ID NO: 19054 - protein, 163 aa, Malus x domestica
HKNGSLHDFLHLSDEYNKPLTWNSRVKIALGTARALECLHEVCSPSIIHKNIKSTNILLDVELNPHLSDAGLASSIPNSDQALDHNAGSGYSAPEVAMSGQYTLKSDVYGFGVVMLELLSGRKAFDNLKPRSEQSLVRWATPQLHDIDALSKMVDPELKGLYP

SEQ ID NO: 19055 - protein, 949 aa, Escherichia coli
MKYLASFRTTLKASRYMFRALALVLWLLIAFSSVFYIVNALHQRESEIRQEFNLSSDQAQRFIQRTSDVMKELKYIAENRLSAENGVLSPRGRETQADVPAFEPLFADSDCSAMSNTWRGSLESLAWFMRYWRDNFSAAYDLNRVFLIGSDNLCMANFGLRDMPVERDTALKALHERINKYRNAPQDDSGSNLYWISEGPRPGVGYFYALTPVYLANRLQALLGVEQTIRMENFFLPGTLPMGVTILDENGHTLISLTGPESKIKGDPRWMQERSWFGYTEGFRELVLKKNLPPSSLSIVYSVPVDKVLERIRMLILNAILLNVLAGAALFTLARMYERRIFIPAESDALRLEEHEQFNRKIVASAPVGICILRTADGVNILSNELAHTYLNMLTHEDRQRLTQIICGQQVNFVDVLTSNNTNLQISFVHSRYRNENVAICVLVDVSSRVKMEESLQEMAQAAEQASQSKSMFLATVSHELRTPLYGIIGNLDLLQTKELPKGVDRLVTAMNNSSSLLLKIISDILDFSKIESEQLKIEPREFSPREVMNHITANYLPLVVRKQLGLYCFIEPDVPVALNGDPMRLQQVISNLLSNAIKFTDTGCIVLHVRADGDYLSIRVRDTGVGIPAKEVVRLFDPFFQVGTGVQRNFQGTGLGLAICEKLISMMDGDISVDSEPGMGSQFTVRIPLYGAQYPQKKGVEGLSGKRCWLAVRNASLCQFLETSLQRSGIVVTTYEGQEPTPEDVLITDEVVSKKWQGRAVVTFCRRHIGIPLEKAPGEWVHSVAAPHELPALLARIYLIEMESDDPANALPSTDKAVSDNDDMMILVVDDHPINRRLLADQLGSLGYQCKTANDGVDALNVLSKNHIDIVLSDVNMPNMDGYRLTQRIRQLGLTLPVIGVTANALAEEKQRCLESGMDSCLSKPVTLDVIKQTLTLYAERVRKSRDS

SEQ ID NO: 19056 - protein, 241 aa, Gracilaria tenuistipitata var. liui
MHNSKEKILIVDDETSIRTILETRLSMIGYDVISASDGEEGLHIFRREYPNLVILDVMMPKLDGYGVCQEIRKESDVPIIMLTALGDVSDRITGLELGADDYVIKPFSPKELEARIRCVLRRVYKININSSIPSSGILNMGFLKIDTNKRQVYKKNERVRLTGMEFSLLELLVSKAGEAFSRSSILQEVWGYKPERHVDTRVVDVHISRLRAKLEDDPSNPDLILTARGTGYLFQRIIENI

SEQ ID NO: 19057 - protein, 179 aa, Methylobacillus flagellatus KT
MAESVAIFAGGCFWCLEPVFSQLQGVRQVVSGYIGGNVVDPTYEEVCTGATGHAEAVQIIFDPLEIDYEVLLEIFFLAHDPTTLNRQGHDVGTQYRSAVFCQSQDQLVAVHRLLERFARENTFGAPVVTEVSTNGKFYAAEEYHQQYYARNSSQPYCQAVAAPKIAKIREKYADRIKLP

SEQ ID NO: 19058 - protein, 352 aa, Arabidopsis thaliana
TIISNTSFLSLASKFTTRGSRLQCTVSMARSAVDETSDSGAFQRTASTFRNFVSKDSNSQFPAESGRYHLYISYACPWASRCLSYLKIKGLDDAISFSSVKPIWGRTKETDEHMGWVFPGSDTEVPGADPDHLNGAKSVRELYEIASPNYTGKYTVPVLWDKKLKTVVNNESAEIIRMFNTEFNHIAGNPDLDLYPSHLQAKIDETNEWIYNGINNGVYRCGFAKKQGPYEEAVEQVYEALDRCEEILGKHRYICGNTLTETDIRLFVTLIRFDEVYAVHFKCNKKLIREYPNLFNYTKDIFQIPGMSSTVNMNHIKQHYYGSHPSINPFGIIPHGPNIDYTSPHDRHRFSK

SEQ ID NO: 19059 - protein, 455 aa, Glycine max
VIPSFTVGEACQKYGSIFMHPQGLYISLKEKGKIREVLRNWPEKNIQVIVVTDGERILGLGDLGCQGMGIPVGKLSLYTALGGVRPSACLPITIDVGTNNEKLLNDELYIGLKQRRATGQEYAELMHEFMTAVKQTYGEKVLIQFEDFANHNAFNLLEKYRSTHLVFNDDIQGTASVVLAGLVASLKLVGGNLADHRFLFLGAGEAGTGIAELIALETSKQTNAPLEEVRKNIWLVDSKGLIVSSRKDSLQHFKKPWAHEHEPVKNLLDAVNKIKPTVLIGTSGQGRTFTKEVIEAMASINKRPIILSLSNPTSQSECTAEEAYKWSQGRAIFASGSPFPPVEYEGKVFVPGQANNAYIFPGFGLGLIMSGTIRVHDDLLLAASEALAAQVSQENFDKGLIYPPFTNIRKISAHIAANVAAKAYELGLATRLPQPKDLVKFAESCMYTPAYRSYR

SEQ ID NO: 19060 - protein, 510 aa, Zea mays
MQPDPSGNANAKTKLPQLVTAPAPSSGRPASVLPYKTANVRDHYRIGKKLGQGQFGTTYQCVGKADGAEYACKSIPKRKLLCREDYEDVYREIQIMHHLSEHPNVVRIRGAYEDALFVHIVMELCAGGELFDRIVAKGHYSERAAAKLIKTIVGVVEGCHSLGVMHRDLKPENFLFASTAEEAPLKATDFGLSMFYKPGDKFSDVVGSPYYVAPEVLQKCYGPEADVWSAGVILYILLCGVPPFWAETEAGIFRQILRGKLDFESEPWPSISDSAKDLVCNMLTRDPKKRFSAHEVLCHAWIVDDAVAPDKPIDSAVLSRLKHFSAMNKLKKMALRVIAESLSEEEIGGLKELFKMIDTDSSGTITFDELKDGLKRVGSELTENEIQALMEAADIDNSGTIDYGEFIAATLHMNKLEREENLVSAFSFFDKDGSGFITIDELSQACREFGLDDLHLEDMIKDVDQNNDGQIDYSEFTAMMRKGNAGATGRRTMRNSLHLNLGELLNPSKT

SEQ ID NO: 19061 - protein, 664 aa, Bacillus cereus G9241
MTQNINQLAVNTLRTLSIDAINAANSGHPGLPMGAAPMAYALWANHLNHNPNHPKWFNRDRFVLSAGHGSSLLYSLLHLAGYDVSIDDLKSFRKLNSKTPGHPEYGHTSGVEATTGPLGQGIANAVGMAMAEAHLAAKFNKDGHSIIDHNTYALVGDGDLMEGVAYEAMSMAGHMKLGKLIVLYDSNEISLDGELNIAFSEDMQKRVESAHWQYVRVEDGNDVDAITKAIQLAKDNTDQPTLIEIRTVIGYGSPKVAGTNKAHGNPLGVEEATATKQVYGWHYEEDFFVPKEVTAHFNDLKQKGIEKENEWNEQFNVYRESNPALADELEKAITGEVLIEAKDILSFDTEKTISTRVASGEAINHYVKSIPSIFGGSADLSHSTMTDIKGEAVYAVESYAGRNIYFGVREHAMGAAANGLALHGGVKPFVSTFFVFNDYLRPSIRLAALQKLPVTYVFTHDSIAVGEDGPTHEPIEHLAALRAIPGLTVIRPSDANETANAWAYALQQTDGPVALVLSRQNLPVFDETRTNIEDLSRGAYILTQTNENPEVILIATGSEVSLAVNAKVQLEQEHISVCIVAMPSWELFDRQSKEYKESVLPSSITKRVSLEMGISLGWERYVGQEGKVLSIETFGASGTGAEVMNLFGFTTENVVQITKNVLHS

SEQ ID NO: 19062 - protein, 227 aa, Arabidopsis thaliana
TNEGEREFMFYRNPSADMLLEESELDFDLIKKAKIFHYGSISLITEPCKSAHISAAKAAKEAGVILSYDPNLRLPLWPSADNAREEILSIWETADIIKISEEEIVFLTKGEDPYDDNVVRKLFHPKLKLLLVTEGPEGCRYYTKDFSGRVHGLKVDVVDTTGAGDAFVAGILSQLANDLSLLQDEERLREALMFANACGALTVKVRGAIPALPTKEAVHEALLKAVV

SEQ ID NO: 19063 - protein, 177 aa, Oryza sativa
  misc_feature (45)..(45): Xaa can be any naturally occurring amino acid
  misc_feature (93)..(93): Xaa can be any naturally occurring amino acid
  unsure (1)..(177): unsure at all Xaa locations
FDEKMETRRAIENANIPHTYVSANCFAAKFSPNLCQMKTHLPPKXVGVYGDGNVKVFFVYEDDVGTYTIKSIDDPRTLNKTIYIRPQDNCLTXNELIAMWEKLSGKSLTKFHIQGDEFLASMKDTNFAHQVGVTHFYHIFYEGCLTNFDIGDYGAEATLLYPDVQYTRINEFLKRYL

SEQ ID NO: 19064 - protein, 78 aa, Amaranthus cruentus
MSCCGGNCGCGSNCGCGNGCGGCKMFPDFDEKVQNATVLVSGVAPKISYVEGSEMGVAAEDDGCPCGPNCKCDPCTCK

SEQ ID NO: 19065 - protein, 548 aa, Zea mays
MAKSTVSLLNRSANFASRTSQDAVDGLSDESDGETSTKKKRTPRRGRKKATVETSRDVGEEIEVITEQTAAEETKEVKRRGRKKAATSASSEEEKDKAKEPKKRGRRKVKTVEEPIDNAGEHLSKDLMLYNEREDQTRLQNSASVLESKIASVLHEDIGEVDDLIPLVCCFGPAKYSFIPSGRPANRLIDHEIHDRMKDMFWSPDKFVRAPGGSSSNVALALAAIGGRVAFMGKLGDDDYGQSLLYHLNINGVQTRAVYMDPSAPTAVSLMKVRTEGSLKTNCVKPCAEDRFLPSDINPAVLKEAKMFYYNSSALLEPTTESSLLKAIDVSKKFGGTIFFDLNLPLPLWSSSKETKSLIKEAWEAANIIEVTKQELEFLCGIKPSEKFDTNDNDKSKFTHYSSEVIMKLWHSNLKVLFVTNGTSKIHYYTETHNGWVRGTEDAPITPFTGDMSQSGDAIVAALMRMLVINPHLITDKVYLHKAVKHAIKCGVIDQWVLARERGFLPKERADPTGEQYEVRSITEREYRTLPDAMQSENSSTSELAYVE

SEQ ID NO: 19066 - protein, 303 aa, Glycine max; identical to SEQ ID NO: 945

SEQ ID NO: 19067 - protein, 278 aa, Nocardioides sp. JS614
MAIPTHQLNDGSTLPAIGFGTYPMKGEEGVTAIRGAIEVGYRLLDTAVNYQNETAVGEAIRRSRVPRELLQVTSKLPGRDHGYDDAIASVHGSLERLGLEYLDLHLIHWPNPSRDQYVDAWRALVDLREQGLVRSIGVSNFTERHLERIIAATGVTPAVNQIELHPYFPQADMRAVDEGLGIRTEAWSPLGKRQAPFAEPAVADAARRHGMTPGQVILRWHVQLGSIPIPKSAAPERQRQNLDVFGFELSEDEVAAITALGRPDGRLFGGDPDVHEEM

SEQ ID NO: 19068 - protein, 331 aa, Lactobacillus plantarum WCFS1
MSILVLGGAGYIGSHMVDRLVEHGTDVVVVDNLVTGHRAAVNSAAKFYQGDLRDADFLNHVFDTEDIEAVVHFAAFSIVPESMSKPLKYFDNNTGGMITLLETMQAHDVKQIVFSSTAATYGTPKQIPIKETDPQLPINPYGASKLMMEQIMHWADVAYGIKFVALRYFNVAGAKPDGSIGEDHGPETHLVPIILQVAQGKRDELKIFGDDYNTPDGTNVRDYVHVVDLADAHILALKYLAAGNDSNAFNLGSSTGFSNKQMLAAAREVTGQPIPAKLAPRRPGDPDSLVAASDKARDVLGWQPNYDNVNDIIETAWAWTQKHPNGYDDRD

SEQ ID NO: 19069 - protein, 487 aa, Candida albicans
MAPTFTNSNGQPIPEPFATQRVGQHGPLLLQDFNLIDSLAHFDRERIPERVVHAKGSGAYGVFEVTDDITDICAAKFLDTVGKKTRIFTRFSTVGGELGSADTARDPRGFATKIYTEEGNLDLVYNNTPVFFIRDPSKFPHFIHTQKRNPETHLKDANMFWDYLTSNEESIHQVMVLFSDRGTPASYREMNGYSGHTYKWSNKKGEWFYVQVHFISDQGIKTLNNEEAGALAGSNPDYAQEDLFKNIAAGNYPSWTAYIQTMTEAEAKEAEFSVFDLTKVWPHRKYPMRRFGKFTLNENPENYFAEVEQAAFSPAHTVPYMEPSADPVLQSRLFSYADTHRPHRLGTNYTQIPVNCPVTGAVFNPHSRDGAMTVNGNLGSHPNYLASDKPVEFKQFSSFQEDQEVWNGAATPFHWKATPADFKQAQELWKVLKRYPNQQEHLAHNIAVHAAGADAAIQDRVFAYFGKVSQDLADAIKKEVLELSPRK

SEQ ID NO: 19070 - protein, 216 aa, Mycoplasma mycoides subsp. mycoides SC str. PG1
MKKSRNDVKGQWRTSIALDESNYKEVLKNSQGILVPGGFGKRGIEGMMLASRYARENDIPYLGICLGMQIATISIARDLLNWSDADSTEFNKNTTHPIFDYIKGIDRDNIGGTLRLGTMVTKLEKNSLVSKLYNSDIVLERHRHRYEFNNEYKKDLESVGLRFSGIYEEKNLVEVVEMPSLKFFVASQFHPEFTSRPNKPTPLFKGFIKAIVENNK

SEQ ID NO: 19071 - protein, 352 aa, SYNECHOCOCCUS SP. WH 8102
MSQSACSVFDWSKVLISEDLSFNDALKVLSAGGYQIALVQKANGRVAGIVTDSDVRKALLRGVRLDDTVSLVMNTDPKVILSRSIPHDINGLMKNQNVFHLPIVDDQNRFEGLYIAPQLNPKKYNPETIVIMAGGKGKRLMPLTANTPKPMLPVHGKPMLEHILDRLREDGFKNVIISVNYLSERITSYFQDGSKFDMNISYLYEDKPLGTAGALSGLDSKTRENPVIVTNADILSGISYSDLLIYFRRNTSNGLMAVRTQEWQNPFGVVQSNGSHITNIIEKPTHYYQVNAGLYVLDNKLLDLLTPNSYCDMPDLFRMGLEINLNLQVYPLHEQWLDIGRPKDYDIANKES

SEQ ID NO: 19072 - protein, 133 aa, Brassica napus
  misc_feature (25)..(25): Xaa can be any naturally occurring amino acid
  misc_feature (39)..(40): Xaa can be any naturally occurring amino acid
  misc_feature (42)..(42): Xaa can be any naturally occurring amino acid
  misc_feature (131)..(131): Xaa can be any naturally occurring amino acid
  unsure (1)..(133): unsure at all Xaa locations
MVAEEDSRLINLQHKYKQTMPEVVXEMKKIWDISFPVAXXSXLNYLKNMTSVVCMGRLGSLELAGGALAVGFTNITGYSVLSGLATGMEPLCGQAIGSKNPQLASLTLKRTIFLLILASLPISLLWLNLQXLM

SEQ ID NO: 19073 - protein, 80 aa, Zea mays; identical to SEQ ID NO: 1210

SEQ ID NO: 19074 - protein, 291 aa, Brassica napus
  misc_feature (142)..(142): Xaa can be any naturally occurring amino acid
  unsure (1)..(291): unsure at all Xaa locations
MATQGSAQKEADIKMMCAAEVHLGTKNCNYQMERYVFKRRNDGIYIFNLGKTWEKLQMAARVIVAIENPQDIIVQSARPYGQRAVLKFAQYTGANAIAGRHTPGTFTNQMQTSFSEPRLLILTDPRTDHQPIKEGALGNIPXIIAFCDTDSPMRFVDIGIPANNKGKHSIGCLFWLLARMVLQMRGTIRPAQKWDVMVDLFFYREPEEAKPEDEDEVAPQAEFGLPAPEYGGGDQWTTAAIPDAAWPGEAQAPIAAAPAGASWNESGAAPAAEGGWDTAVPPTNAAVSGWE

SEQ ID NO: 19075 - protein, 427 aa, Photorhabdus luminescens subsp. laumondii TTO1
MADNKATLAPDGSVAIELDVLTPTLGSKVIDVRTLGSQGFYTYDPGFTSTASCESKITYIDGNEGVLLHRGFPIDQLATKSTYLEVCYILLYGETPTQEQFDKFKKTITRHTMIHEQIHRLFNGFRRDSHPMAVLCGVTGALAAFYHDALDVNNPRHRDITAYRLLSKMPTVAAMCYKYSIGQPFVYPRNDLSYAGNFLNMMFATPCEEYKVNPVLERAMDRIFILHADHEQNASTSTVRTAGSSGANPFACIAAGIASLWGPAHGGANEACLRMLEEIQSVEHIPEFIKRAKDKNDAFRLMGFGHRVYKNYDPRATVMRETCHEVLDELGLNDSLLEVAMELERIALHDPYFIEKKLYPNVDFYSGIILKAMGIPSTMFTVIFAIARTIGWIAHWNEMHDGGVKIARPRQLYTGYTKRDFDSQLEK

SEQ ID NO: 19076 - protein, 103 aa, Zea mays
YIQPQDFFSEILPRAVRGHCVHACIFTGYWEDAGTINSFFDANLGLIVLPSKVDHYEQKTPLLTVPRYLPDTQFDYCPTIDASIYERLPLTECHIELPAIGGC

SEQ ID NO: 19077 - protein, 855 aa, Arabidopsis thaliana
MEEKLSRRRRVVLVPVPAQGHITPMIQLAKALHSKGFSITVVQTKFNYLNPSNDLSDFQFVTIPENLPVSDLKNLGPGRFLIKLANECYVSFKDLLGQLLVNEEEEIACVIYDEFMYFVEVAVKEFKLRNVILSTTSATAFVCRFVMCELYAKDGLAQLKEGGEREVELVPELYPIRYKDLPSSVFASVESSVELFKNTCYKGTASSVIINTVRCLEMSSLEWLQQELEIPVYSIGPLHMVVSAPPTSLLEENESCIEWLNKQKPSSVIYISLGSFTLMETKEMLEMAYGFVSSNQHFLWVIRPGSICGSEISEEELLKKMVITDRGYIVKWAPQKQVLAHSAVGAFWSHCGWNSTLESLGEGVPLICRPFTTDQKGNARYLECVWKVGIQVEGELERGAIERAVKRLMVDEEGEEMKRRALSLKEKLKASVLAQVKAETAVVKVELLARVEAELVTSERNRECGISVLALGVQQFAFRACHTISVKLEAENNAHFFSIITKIDIAGLIQMAHFERTFGFGILISNTICEKLELQSVLLKNSDRLINRDGRLCDWHGRDCGDPWIGSTEYKLEEMDNHNEEPKIAPEPNRWYNITLGPTLLNNNHSYSPKFCTLRYEFKPASIDSTKPGLLHKSKDNKVTLEFQNNQLNKPKVRFDGVSEDYNDRDKDAILFFDGENFRLEKLHRSVKRLKCLRVPDESASASRVVTKIVPPVEKPVKMAHIDINNPVDFEEDVNIEDDNEEETLSRKEFQTGGLDIDINLPHPAEMEDDEIAVVDINDDESYKGLNAAEALRAQVNAEAREESRKSSSSGSGRESESSESGVESSGSGSSSTSESRKSGSEGGTASESGSRDSL

SEQ ID NO: 19078 - protein, 896 aa, Saccharomyces cerevisiae
MTTTAQDNSPKKRQRIINCVTQLPYKIQLGESNDDWKISATTGNSALFSSLEYLQFDSTEYEQHVVGWTGEITRTERNLFTREAKEKPQDLDDDPLYLTKEQINGLTTTLQDHMKSDKEAKTDTTQTAPVTNNVHPVWLLRKNQSRWRNYAEKVIWPTFHYILNPSNEGEQEKNWWYDYVKFNEAYAQKIGEVYRKGDIIWIHDYYLLLLPQLLRMKFNDESIIIGYFHHAPWPSNEYFRCLPRRKQILDGLVGANRICFQNESFSRHFVSSCKRLLDATAKKSKNSSNSDQYQVSVYGGDVLVDSLPIGVNTTQILKDAFTKDIDSKVLSIKQAYQNKKIIIGRDRLDSVRGVVQKLRAFETFLAMYPEWRDQVVLIQVSSPTANRNSPQTIRLEQQVNELVNSINSEYGNLNFSPVQHYYMRIPKDVYLSLLRVADLCLITSVRDGMNTTALEYVTVKSHMSNFLCYGNPLILSEFSGSSNVLKDAIVVNPWDSVAVAKSINMALKLDKEEKSNLESKLWKEVPTIQDWTNKFLSSLKEQASSNDDMERKMTPALNRPVLLENYKQAKRRLFLFDYDGTLTPIVKDPAAAIPSARLYTILQKLCADPHNQIWIISGRDQKFLNKWLGGKLPQLGLSAEHGCFMKDVSCQDWVNLTEKVDMSWQVRVNEVMEEFTTRTPGSFIERKKVALTWHYRRTVPELGEFHAKELKEKLLSFTDDFDLEVMDGKANIEVRPRFVNKGEIVKRLVWHQHGKPQDMLKGISEKLPKDEMPDFVLCLGDDFTDEDMFRQLNTIETCWKEKYPDQKNQWGNYGFYPVTVGSASKKTVAKAHLTDPQQVLETLGLLVGDVSLFQSAGTVDLDSRGHVKNSESSLKSKLASKAYVMKRSASYTGAKV

SEQ ID NO: 19079 - protein, 528 aa, Gracilaria tenuistipitata var. liui
MAKKILYQDNARKALEKGMDTLVEAVAITLGPKGRNVVLERKFGAPQIINDGVTIAKEIELQDLAENTGVALIRQAASKTNDVAGDGTTTATVLAHAIVKQGLKNVAAGANPITLKKGIQKAVKFVVGKIAEYSKPICSMQDVTHIGSISSGNDVEVGTMIANAIQQVGKEGIISLEEGQSTSTELDIKEGMKFDKGFISPYFVTDTSRMEVIQDNPYILITDKKITLIQQELLPILEKVTKTGRPLLIIAEDIEKEALATIIVNKLRGIINVVAVRAPGFGDRRKLLLEDIAILTSGVVITQDMGLSLDSMSLDQLGSARRVQITKDSTTIVADAQKDLIQARCDQIRRQLEAATNSYAKDKLHERLAKLSGGVAVVKVGAATETEMRDKKLRLEDAINATKAAIEEGIVPGGGSTFVHLSEVLRVWAINNLVEEELVGALIIVDSLLHPLKRIVENAGNNGSIIIEKIKNSNFSTGYNADIGQIVDMYKEGIIDPAKVTRSALQNAASIASMILTTECLIAEQVDN

SEQ ID NO: 19080 - protein, 124 aa, Triticum aestivum
PPFPGVTHVGGDMFQKVPSGDAILMKWILHDWSDEHCAMLLKNCYDALPAHGKVVLVECILPVNPDATPKAQGVFHVDMIMLAHNPGGRERYEREFEALAKGAGFAAMKTTYIYANAWAIEFTK

SEQ ID NO: 19081 - protein, 92 aa, Malus x domestica
AEDLFSDVWAWRKYGQKPIKGSPHPRSYYRCSSSKGCSARKQVERSCSNPETFIITYTAEHNHVHPTRRNSLAGSTRSKFPSSRNKDKCSSS

SEQ ID NO: 19082 - protein, 186 aa, Zea mays
VGSCPHEEKHILNLDHRACNCLYCFVLDPTYLLTTIHSGGSQLIWIAPSGGRDRPNPSTGEWYPAHFDSSTVDNMRRLLEHAGVPGHIYPLSLLCYEVMPPPQQVEKEIGEQRVISFHGVGLSATEETKYGDITCHTKNADEGRELFTNTLYNSVVNQYNVLKSAIFRDRGAAVSNNAISLSQPWR

SEQ ID NO: 19083 - protein, 626 aa, Solanum tuberosum
MAIFSNQMRLSSTLLKRLHQRVAAAVNSSSSRNFTTTEGHRPTIVHKRSLDILHDPWFNKGTAFSFTERDRLHIRGLLPPNVMSFEQQIARFMADLKRLEVQARDGPSDPYVLAKWRILNRLHDRNETLYYKVLMENIEEYAPIVYTPTVGLVCQKYSGLFRRPRGMYFSAEDRGEMMSMVYNWPADQVDMIVVTDGSRILGLGDLGIQGIGIAIGKLDLYVAAAGINPQRVLPVMIDVGTDNENLLKDPLYLGLQDHRLDGEEYIEVIDEFMEAVFTRWPHVIVQFEDFQSKWAFKLLQRYRNNYRMFNDDIQGTAGVAIAGLLGAVRAQGRPMIDFPKMKIVVAGAGSAGIGVLNAARKTMARMLGNTEIAFESARSQFWVVDAKGLITEARENVDPDARPFARKIKEIERQGLSEGATLAEVVREVKPDVLLGLSACGGLFSKEVLEALKHSTSTRPAIFPMSNPTRNAECTPEEAFSILGENIIFASGSPFKDVDLGNGHVGHCNQANNMFLFPGIGLGTLLSGSRIVSDGMLQAAAECLAAYITEEEVLKGIIYPSISRIRDITKEVAAAVVKEAIEEDLAEGYREMDSRELRKLDEAQISEFVENNMWSPDYPTLVYKKD

SEQ ID NO: 19084 - protein, 304 aa, Klebsiella pneumoniae
MRFCQALMTELYRHLGADTDVPAGDIGVGGREVGFMAGMMKKLSNNTACVFTGKGLSFGGSLIRPEATGYGLVYFTDAMLKRHGLGFEGMRVAVSGSGNVAQYAIEKAMALGARVITASDSNGTVVDEAGFTTEKLARLCQIKSQQDGRIADYAKEFGLTYLEGQQPWGVSVDIALPCATQNELDAPAARILIANGVKAVAEGANMPTTIEATDLFLEAGVLFAPGKAANAGGVATSGLEMAQNAARMGWKAEKVDLRLHHIMLDIHQACVEYGGEDKQTHYVRGANIAGFVKVADAMLAQGVL

SEQ ID NO: 19085 - protein, 336 aa, Triticum aestivum
  misc_feature (136)..(136): Xaa can be any naturally occurring amino acid
  misc_feature (139)..(139): Xaa can be any naturally occurring amino acid
  misc_feature (293)..(293): Xaa can be any naturally occurring amino acid
  misc_feature (318)..(318): Xaa can be any naturally occurring amino acid
  misc_feature (334)..(334): Xaa can be any naturally occurring amino acid
  unsure (1)..(336): unsure at all Xaa locations
HYRTSLYKKAGWYRSGIPGISSTHASAGRNHLFVPGPVNIPDQVIRAMSRQNEDYRSPAIPALTKTLLEDVKKIFKTTTGTPFLFPTTGTGAWESALTNTLSPGDRIVSFSLGQFSLLWIDQQQRLGFSVDVVESXWGXGADLGALESKLRTDSQHTIKAICIVHNETATGVTNDLHAVRKLLDAYRHPALLLVDGVSSICALDFRMDEWGVDVALTGSQKALSPPDGAGPSCAASPKALGGGQDGQVGCASSFDWEGYLKVYKMGPYWPYSPSIQLLYGLRAGLDLLFEEGXDNVIKRHTRLGTATRLAVAAWGLKXCTAKEENSATRHAVVXPP

SEQ ID NO: 19086 - protein, 455 aa, Candida albicans SC5314
MSNRGRQPSGPPPSRKRETKWSGKPKRYANFGAQSFDTVITGHLTQEQLDAYQRYFRIEEISNFLSVAKQQHKSIVDVLPSAKVDETDHYKRDPSPPPKYDKNGNRTNTRERRVTEALEKERHELVELAASSIKNYMIPSNYRRPSRTVERLYVPVKDYPDINFVGFLIGPRGNTLKKLQEDSGARLQIRGKGSVKEGKSSDGFGSSQTGTDIQDDLHVLITADSPLKISKAVKLVNEIIDKLIFSPQGMNFMKRDQLKELAVLNGTLRETKPFDPEAHEKKQQQQMDITKIVCKICGNIGHIARDCKQNNGKRPLDDNAENEPTTINKKARTDVPPPPPPPPPPAPPSSSTEISKQVPPPPPPPPPPAPSAAASGFATTENYKQGLVPPPPPPPPPPPPPVRSALVNFENNSKVLLTKEKEESGSSELKNTGESSSSSSGVPPSPPPPSSNVPR

SEQ ID NO: 19087 - protein, 140 aa, Brassica napus
KRLVAGDAFVFLRGHQTGDLRVGVRRLAKQQSTMPASVISSQSMHLGVLATASHAFNTTTMFVVLYKPRISQFIISVNKYMAAMKKGFGIGMRFRMRFEGEESPERIFTGTIVGTGDLSPQWPSSKWRSLQIQWDEPSTV

SEQ ID NO: 19088 - protein, 157 aa, Triticum aestivum
  misc_feature (93)..(93): Xaa can be any naturally occurring amino acid
  unsure (1)..(157): unsure at all Xaa locations
IYEDDEDMDGDTAEQQDGNLNSREVKLEEVTKEDKLNQKAGKEIELENVACIDEKPVTIAEKGGLVEVGDKAAVSPKGDSAKHEVVDKDLLQXAFRYFDKSRVGYIKAEDLRCIVHNLGKFLSNRDVQDLVEAALDESNSARDNRVIYTKLVKIVDL

SEQ ID NO: 19089 - protein, 421 aa, Pseudomonas aeruginosa PAO1 [sequence omitted]

SEQ ID NO: 19090 - protein, 588 aa, Photorhabdus luminescens subsp. laumondii TTO1
MKLPVREFDAVVIGAGGAGMRAALQISQMGLSCALISKVFPTRSHTVSAQGGITVALGNSHDDNWEWHMYDTVKGSDYIGDQDAIEYMCKTGPEAILELEHMGLPFSRLDDGRIYQRPFGGQSKNFGGEQAARTAAAADRTGHALLHTLYQQNLKNHTTIFSEWYSLDLVKNQDGTIVGCTAISIETGEVVYFKAKATILATGGAGRIYQSTTNAHINTGDGVGMALRAGVPVQDMEMWQFHPTGIAGAGVLVTEGCRGEGGYLLNKDGERFMERYAPNAKDLAGRDVVARSIMIEIREGRGCEGPWGPHAKLKLDHLGKEVLESRLPGILELSRTFAHVDPVKEPIPVIPTCHYMMGGIPTKVTGQALMVNENGEDVVIPGLFAVGEIACVSVHGANRLGGNSLLDLVVFGRSAGLHLKESLMEQGTSREASESDIEISLQRLNRWNSTRTGEDPVKIRKDLQACMQNNFSVFREGDAMAKGLEELKVIRERLKSARLDDTSSEFNTQRIECLELDNLMETAFSTAAAANFRTESRGAHSRFDYPDRDDANWLCHTLYLPQTETMTRRDVNMQPKLREAFPPKARTY

SEQ ID NO: 19091 - protein, 496 aa, GIBBERELLA ZEAE PH-1
MNTRTNYYQDHPNTGVIRKYDFTVNRAKIAPDGYELSTILVNGQFPAPLIEANWGLSLHWHGILQKNMPWEDGVPGVTQCPIAPGQSYTYSFIADLYGTSWYHSHYSAQYLAGLFGPLVIYGPQERKDYDIDVGPILLSDWYHKEYFDLVEEIMTPGAPGIVFSDSNLINGKMNFNCSSVQPGDKTPCKNNAGISKFRFRRGKVHRLRLINPSAEAIQRFSIDGHTMTVIANDFVPVEPYNTKVVTLGIGQRTDVLVKGNGKLESYWMRSNISANCSLARAHDALAAIYYDNANPKKEPKSKPWNIPDPATCANDDLSMTRPLMKLPLPPADKTIELDIASFKNASNITLWSLGGVAARTNYNSPTLLLSKLGNHTFDKEWNVINTGKAKSVRVVVNNKTPVAHPMHLHGFNMYVLHEGLGDWDGTIINEHNPQRRDVVQIRGRGHLVIQFDAGSNPGVWPFHCHIAWHVSAGLLAQFLTNPDQVEKLRSSASSVL

SEQ ID NO: 19092 - protein, 547 aa, Bartonella quintana str. Toulouse
MAAKEVKFGREARERLLRGVDILANAVKVTLGPKGRNVVIDKSFGAPRITKDGVSVAKEIELEDKFENMGAQMLREVASKTNDIAGDGTTTATVLGQAIVQEGVKAVAAGMNPMDLKRGIDAAVEEVVGNLFKKAKKIQTSAEIAQVGTISANGAAEIGKMIADAMEKVGNEGVITVEEAKTAETELEVVEGMQFDRGYLSPYFVTNADKMVADLDDPYILIHEKKLSNLQSLLPVLEAVVQSGKPLLIIAEDVEGEALATLVVNKLRGGLKIAAVKAPGFGDRRKAMLEDIAILTSGQVISEDVGIKLENVTLDMLGRAKKVNISKENTTIIDGAGKKAEINARVNQIKVQIEETTSDYDREKLQERLAKLAGGVAVIRVGGATEVEVKEKKDRVDDALNATRAAVEEGIVAGGGTALLRAANALAIKGSNPDQEAGINIVRRALQAPARQIATNAGEEAAIIVGKVLENNADTFGYNTATGQFGDLIALGIVDPVKVVRSALQNAASIASLLITTEAMVAEVPKKDTPMPPMPGGGMGGMGGMDF

SEQ ID NO: 19093 - protein, 98 aa, Bartonella quintana str. Toulouse
MANIQFRPLHDRVVVRRVESENKTAGGIIIPDTAKEKPQEGEIIAVGNGALDDNGKRVPLEVKTGDRILFGKWSGTEVKINGEDLLIMKESDIMGILG

SEQ ID NO: 19094 - protein, 125 aa, Triticum aestivum
  misc_feature (34)..(34): Xaa can be any naturally occurring amino acid
  misc_feature (68)..(68): Xaa can be any naturally occurring amino acid
  misc_feature (74)..(74): Xaa can be any naturally occurring amino acid
  misc_feature (96)..(96): Xaa can be any naturally occurring amino acid
  misc_feature (103)..(103): Xaa can be any naturally occurring amino acid
  unsure (1)..(125): unsure at all Xaa locations
PARRTFQGSPDLKAAREVADYLGTIHHEFHFTVXDGIDAIEEVIYHDETYDVTTIRANTPMFLMARKXIKSLGXVRWCVPGKGSEQLLGRLLYFNXAPNKEGXHKEDCRKGEGLHNTPARNKATS

SEQ ID NO: 19095 - protein, 459 aa, Nostoc sp. PCC 7120
MTFDYDLFVIGAGSGGLAASKRAASYGAKVAIAENDLVGGTCVIRGCVPKKLMVYGSHFPALFEDAAGYGWQVGKAELNWEHFITSIDKEVRRLSQLHISFLEKAGVELISGRATLVDNHTVEVGERKFTADKILIAVGGRPIKPELPGMEYGITSNEIFHLKTQPKHIAIIGSGYIGTEFAGIMRGLGSQVTQITRGDKILKGFDEDIRTEIQEGMTNHGIRIIPKNVVTAIEQVPEGLKISLSGEDQEPIIADVFLVATGRVPNVDGLGLENAGVDVVDSSIEGPGYSTMNAIAVNEYSQTSQPNIYAVGDVTDRLNLTPVAIGEGRAFADSEFGNNRREFSHETIATAVFSNPQASTVGLTEAEARAKLGDDAVTIYRTRFRPMYHSFTGKQERIMMKLVVDTKTDKVLGAHMVGENAAEIIQGVAIAVKMGATKKDFDATVGIHPSSAEEFVTMR

SEQ ID NO: 19096 - protein, 222 aa, Arabidopsis thaliana
IQTITSNVQLSETNSPRNQKTRPRAEKEEVDYMQRAQWLRAALLGANDGLVTVASLMMGVGSIKEDVKAMLLVGFAGLVAGACSMAIGEFVSVCTQRDIETAQMKRAIEHKTSLSAIDEQEEEEKKERLPNPGQAAIASALAFSVGAAMPLLGAVFIENHKVRMVVVAVVATIALVVFGVTGAVLGKTSVVKSSVRVVIGGWMAMALTFGLTKFIGSAAMQI

SEQ ID NO: 19097 - protein, 237 aa, Pseudomonas syringae pv. tomato str. DC3000
MAICDLELPAGLVARDFDTPQQLADALAGNVAARLKQAISENGLATLVVSGGRSPVAFFQSLAAQPLEWSNVVISLADERFVPTEHADSNAGLLQRHLLQGPAAKAKFVGLYSVAGNVEDAALAADQALAELPPIDVLILGMGDDGHTASLFPDSPNLSEALDLDGERRCLPMLAPSVPHQRLTLTRRLLASARSPILSVSGQAKLDTLRAALAGDNLAEMPVRAFLNPSLEIYWCP

SEQ ID NO: 19098 - protein, 407 aa, Shewanella sp. MR-4
MNNRVAITQIGLCTPLGQTPEQVLARLIAGDTSAMQTSDTLLFGESTLVAPVTEPLPTIPAALAQFDCRNNQLLLAAALQIRDAVEQAKSDFGVDRIGVVLGTSTSGISKGEAALAYRNQHGHFPADYHYFQQELGSTSDFLRQLFALQGPCYTISTACSSSAKVFASAKRLLEAKLCDMVIVGGIDSLCQLTVNGFHALESVSKGHCNPFSANRDGINIGEGAALFTLTLAENETLGSAQANVLLAGIGESSDAHHMSAPHPEGAGAIAAMQAALDDAQISAQQIDYINLHGTATPKNDAMESRAVRSVFGDTPPPASSTKPLVGHTLGAAGAIEAAFCYLLLSPHNHHLALPPHRYDGQPDPQDPSIALVAPKQCAEHGKLNYVMSNSFAFGGSNASLIFCRKGA

SEQ ID NO: 19099 - protein, 399 aa, Brassica napus
MALKLNNPLASQPYNFPSSARPPISTFRSPKFLCLASSSPALSSKEVESLKKPFTPPKEVHVQVLHSMPPQKIEIFKSMEDWAEQNLLTQLKDVEKSWQPQDFLPDPASDGFEDQVRELRERARELPDDYFVVLVGDMITEEALPTYQTMLNTLDGVRDETGASPTSWAIWTRAWTAEENRHGDLLNKYLYLSGRVDMRQIEKTIQYLIGSGMDPRTENNPYLGFIYTSFQERATFISHGNTARQAKEHGDLKLAQICGTIAADEKRHETAYTKIVEKLFEIDPDGTVMAFADMMRKKISMPAHLMYDGRDESLFDNFSSVAQRLGVYTAKDYADILEFLVGRWKIESLTGLSGEGNKAQEYLCGLTPRIRRLDERAQARAKKGPKVPFSWIHDREVQL

SEQ ID NO: 19100 - protein, 207 aa, Magnaporthe grisea 70-15
MTVMAGGALASRHLPASPRPAGRRAAPSSRRPHSTFVTWRESQLTPAAAEKGEETPLADYKGKVVLVVNTASKCGFTPQYAGLEALYKKITEKHPEDFTILGFPCNQFGGQEPGTDDDIQNFCQVNYGVTFPIMKKVDVNGDNADPLFKWLKEEMPGIMGLKRVKWNFEKFLIGRDGKVKGRWASTTKPESLEKDILKEIEAPKPSI

SEQ ID NO: 19101 - protein, 313 aa, Zea mays
  misc_feature (62)..(62): Xaa can be any naturally occurring amino acid
  unsure (1)..(313): unsure at all Xaa locations
MARKPLDYHELNENLKRVQYAVRREPYLRASELQKEGKKIIFTNVGNPHALGQKPLTFPRQXVVALCQAPFLLDDLLVGLMFPADAIARAKHYLAMAPGGLGAYSDSRGIPGIRKEVADFIHKRDGYPSDPELIYLTDGASKGVMQILNTIIRNEMDGILVPVPQYPLYSATISLYGGSLVPYYLEEEANWSLDFVNIRQTVAEAPSKGISVMFDMGPPISRAMYSFPQIRLPPRAIEAARRAGKSADVFYCLKLLEATGISTVPGSGFGPKQRLFRLRTTILPAEEDFPAIMRSFKKFNDSFMEQYEGYSRL

SEQ ID NO: 19102 - protein, 480 aa, Erwinia carotovora subsp. atroseptica SCRI1043
MSRRLRRTKIVTTLGPATDRDNNLEKIINAGANVVRMNFSHGTAEDHQLRANKVREIAAKLGRHVAILGDLQGPKIRVSTFKEGKIFLNIGDKFLLDANLAKGEGDKEKVGIDYKGLPSDVVPGDILLLDDGRVQLKVLQVEGLKVYTEVTVGGPLSNNKGINKLGGGLSAEALTEKDKADIITAAKIGVDYLAVSFPRTGEDLNYARRLARDAGCNAKIVSKVERAEAVCSDAAMDDIILASDVVMVARGDLGVEIGDPELVGIQKKLIRRARQLNRAVITATQMMESMITNPMPTRAEVMDVANAVLDGTDAVMLSAETAAGQYPAETVAAMAKVCLGAEKIPSINVSKHRLDVQFDNTEESIAMSSMYAANHLKGVTALIAMTESGRTALMMSRISSGLPIFAMSRHEHTLNLTALYRGVTPVHFDSYTDGVAAANDAVILLRDKGFLMSGDLVIVTQGDIMGTVGTTNTIRILRVE

SEQ ID NO: 19103 - protein, 331 aa, Nostoc punctiforme PCC 73102
MARMYYDEDANLDLLAGKTIAIIGYGSQGHAHALNLKDSGLNVIVGLYPGSKSVAKAEAAGLTVKSVADAANAADFIMILLPDEVQKTIYKNEIEPNLEEGNVLAFAHGFNIHFGQVVPPANVDVVMVAPKGPGHLVRRTYEGGEGVPALFAVYQDASGQARDRAMSYAKGIGGTRAGVLETTFREETETDLFGEQAVLCGGLSALIKAGFETLVEAGYQPELAYFECLHEVKLIVDLVVEGGLAKMRDSISNTAEYGDYTRGPRIVTQQTKAEMQKILSEIQSGQFAREFVLENQSGKPGFTAMRRKESEHKIEEVGKDLRAMFSWLKKA

SEQ ID NO: 19104 - protein, 106 aa, Arabidopsis thaliana
TWGNHPKIFTLAGLTVKTYRYYDPATRGLNFQGLLEDLGAAAPGSIVLLHACAHNPTGVDPTIQQWEQIRKLMRSKGLMPFFDSAYQGFASGSLDTDAKPIRMFVA

SEQ ID NO: 19105 - protein, 163 aa, Methylobacillus flagellatus KT
MISKIKELFASFMLLELVKGMALTGRYFFARKVTVQFPEERTPISPRFRGLHALRRYPNGEERCIACKLCEAVCPAMAITIESEQREDNTRRTTRYDIDLTKCIFCGFCEESCPVDSIVETRIFDYHGEKRGDLIYTKPMLLAVGDKYEEQIAADRAADARYR

SEQ ID NO: 19106 - protein, 279 aa, Arabidopsis thaliana
MIFRTTRFAVSGEMEFVNSSPPRYECLLFDLDDTLYPLSSGLSDACSNNIIEYMVEKLGIDEDGVVELNQILYKKYGTSMAGLKAVGYEFDNDEYHRYVHGRLPYENLKPDPVLRSLLLGLPLRKLVFSNGDEVHVMKALTRLGIEDCFERIISFETLNPDINEAELSCVTGHLPENPVICKPTEIAFEKAFDIAQLNPHKTLFFDDSTRNIQTGKAVGLHTVLVGKSEKIDGSDYALESIHNMKEAFPELWSESIINNKETERIDYASQISIETSVQA

SEQ ID NO: 19107 - protein, 147 aa, Bdellovibrio bacteriovorus HD100
MPMRSLSPWGGRRLPSSDLFSQFQDFINEFDRGESSALTRAGFDFSPSVDVEEKDNAYLVSADLPGMKKDEIKVELNDNILTISGERTRESKSEGGYSERSYGRFQRSFTLPVQVNSEKIEAHFEDGVLQITVPKAEGARSHSIKIM

SEQ ID NO: 19108 - protein, 328 aa, Bacillus cereus ATCC 10987
MKAIIVTSFGGPEVMKYTDVDMPVISENQVLIRVVATSVNFADIKSRYGKKGNKALPFIPGIDVAGIVERVGSHVKNINPGQRVIAFPQNGSYAEYVVSNENLTFVLPDEVDFQTAAACPIVSFTSYNLLANVARLQQGESVLIHAAAGGIGTTAIQLAKLLGAGTVIGTVGSEAKKEIPLYAGADYIICHQNEDFAEKVNELTNGEGVDVILDSISGTVSERSLKCLAYYGRLVHFGNASGEIGNFQTKDLHASCRSILGFSFGTTRKKRPELLQATANEVFRYLRDGRLQITATKSFPLQDAGKAHEWVESRKSTGKVILTVQSSS

SEQ ID NO: 19109 - protein, 303 aa, Solanum tuberosum
VILYPQAIFKDPFRGGNNILVICDTYTPAGEPIPTNKRHKAAQIFSDPKVASQVPWFGIEQEYTLLQPNVNWPLGWPVGGYPGPLGSYYCGAGVEKSFGRDISDAHYKACLYAGINISGTNGEVMPGQWEFQVGPSVGIEGGDHIWCARYLLERITEQAGVVLSLDPKPIEGDWNGAGCHTNYSTLSIREEGGFEVIKKAILNLSLRHKGHISAYGEGNERRLTGKHETASIDQFSWGVANRGCSIRVGRYTEKEARGYLEDRRPASNMDPYVVTALLAETTILWEPTLEAEALAAQKISLKV

SEQ ID NO: 19110 - protein, 483 aa, Vibrio salmonicida LFI1238
MSKKLTTAAGCPVAHNQNVQTAGKRGPQLLQDVWFLEKLAHFDREVIPERRMHAKGSGAYGTFTVTHDITKYTKAKIFSDIGKKTDMFARFSTVAGERGAADAERDIRGFSLKFYTEEGNWDLAGNNTPVFFLRDPLKFPDLNHAVKRDPRTNMRSAKNNWDFWTSLPEALHQVTIVMSDRGIPATYRHMHGFGSHTFSFINSDNERYWVKFHFVSQQGIKNLSDAEAGELVGNDRESHQRDLLDSIDNQDFPKWTLKVQIMPEADAATVPYNPFDLTKVWPHKDYPLIEVGEFELNRNPQNYFAEVEQAAFNPANVVPGISFSPDKMLQGRLFAYGDAQRYRLGVNHQHIPVNAPRCPVHSYHRDGAMRVDGNFGSTLGYEPNDQGQWAEQPDFSEPPLNLDGAAAHWDHREDEDYFSQPGDLFGLMTAEKQAILFDNTARNLNGVPKEIQLRHVTHCYKADPAYGEGIGKLLGFDISEYNS

SEQ ID NO: 19111 - protein, 94 aa, Lactobacillus plantarum WCFS1
MLKPLGDRVILQQQEEEEQTIGGIVIANNAKEKPQSGKVVAVNDGRVLDNGTKVDPSVKVGDQVLFDKYAGTEVKYQGAKYLVLHEKDIVAIED

SEQ ID NO: 19112 - protein, 1013 aa, Thermoplasma volcanium GSS1
MLKISKRSIILRKIYEIISLSIIEIKEISNIKLNNNNIKIPYSTFQDPNEIKDFSFEVNLDQLDDGYKYLLSVELSGNAELIIDGMLDQSIDAGHTYSIFDGPKHEFVLRVGSRELFGKNSWYLNIKSIKIITINYKLFKLGLNFLQLFKYADTTSRSKLRIYNYMLKYLLTLYESPNIEQIMGIGSIFLNKNKEELVDFLSDVYGYPIINHMIKDYPRKDINLYKYTNVLEHIIKTIAASDNKYKTNKVFAFGHCHIDVAWLWPYSETLRKIERSFLNVLKLYEMGFNFVFAQSTALYYYEIEKRNVYIFNKIRRLVNDGKWFIVGGMWVESDTNLIRGESLARQLLYGQGYFKEVFNRYSRIAWLPDTFGFSGQLPQLFVKSGMEVFVTHKPMWNDTTEFPYHCFKWFGIDGTPIITSIVNLSYNENLDFDSVVNAYKSNKNKNLPITYLYGYGDGGGGPDIEMMLKLEQIKDLQFMPNVNGSFSEQEYIDSFKEFYKEMPSYFGEIYLENHRGVYTTNLEIKKYVANIEDKLIMLDFINSMIYNSKLYISNTKKLWYGLLKAQFHDILPGSAYYYAYEEAFAELDDIILEIDKITEFAIRKFIEDKNIKKGLIAINNSQYEFNHFVEIDNSLASEIPADKVVNVGDKKFVLVNVPPLGFSVINTNTENKFENEIKIRKIKGKYIIENKIIKLIINSVGIISFFYNNKRYIKKGNIVKIYNDIPANFDSWNINAQNIRKDLFMDEIKTEIRVISKNIIGMVEIKKIFEDGSSIIQKIIIRPGSSIVEFENTLLLKNREKLVKVVFQPYFHADYIKREIPFGYIMTKLNSKNEKTRPEFPALRYVDYSDNSHGFSILSRESHGYSFINGELGISIAKVPLYPNPFSDRNEVREKFYVYLHNEYYNIYKDANFVFNPIKLHVNEYDGDNVRESLFNFSGENIILENIKVAEDNSGLVTRFYNCSDKMSTLELNFPGGDIYETDILENKQVKYNKNIIFKPFEIKTLLIEKNNL

SEQ ID NO: 19113 - protein, 620 aa, Cornus canadensis
MASSGEQNQVELLENLKNRLAIAVRSIQWSYAIFWSISSRQPGVLEWGDGYYNGDIKTRKTVQAVEFNADQLGLQRSEQLKELYESLAVTESNQQARRPSAALSPEDLTDTEWYYLVCMSFVFNIGQGLPGRTFANGQPIWLCNAHYADSKIFSRSLLAKSASIQTVVCFPFLGGVVELGVTELVLEDPNFIQHIKTSFLENPYRTVPKIPSYASENTRTEKDLILAKPSHNLLDAALECGEIDLCAPNNNSSGFLPNQRTEKSVMVEGLSGGASQVQSWQFMDDEISNCVQNSTNSSESIARTSENPEKDCCLTDLPECNLTKLTSLDLPNDDIHHHSVVSSLLKNSHQLILGPYFHKCNRESSFMGWKKTPSDIQQRRRGTPQELLKKVLFEVARMHGGCLVESRQDNSRKDGLWRPEDDEIGTTDLFSERRRRDKTKERYSVLGSLIPSTSKDDKVSILDGTIEYLKELERRLEDSECLEARTRSKPQDTAERTSDNYENDRIGIGKKPMINKRKACDIVEAELEINLVQLKDSSTDDVSVRIIDKDVFIEIRCPWRERLLLEIMDAISNFHLDSHSVQSSNIDGILSLSIKSKFKGSTVASTGMIIQALQRIIWKC

SEQ ID NO: 19114 - protein, 894 aa, Oryza sativa
MPPWWGKSSSKEVKKTAKENLIDTFHRLLSPNEQKGRTKSRGNRRHSKDPTAEKGCWSTAQSRSASPSKEVSRCQSFAAARAHAQPLPLPRSRAMVARTASDITESKVVLEKRGKGQQLPLPTTNWVKERPETTEPVAELSTASISSHGSIDSDDPGDLRLQGPVANDTDNVAKVATTGNSSVVHKECSSAITRKGTKEVTMPTNAFLSNQILSTSPRGTVVADSYQSNLQNSRKVVLDSAPNSVMSSPSRSPRILCPDQIPSSAFWAVKPHTDVTFVGSAQCSSPGSGQTSGHNSVGGDMLAQLFWQPSRGSPECSPIPSPRMTSPGPSSRVHSGSVSPLHPRAGGMAPESPTRRLDEGKRKQTHRLPLPPLSICNNSTFLPNNSTPTSPISHSPGRVENPTSPGSRWKKGKLVGRGTFGHVYIGFNSDKGEMCAMKEVTLFSDDPKSKESAKQLCQEILLLNRLQHPNIVRYYGSEMVDDKLYIYLEYVSGGSIHKLLQEYGQFGEPAIRSYTKQILLGLAYLHAKNTVHRDIKGANILVDPNGRVKLADFGMAKHINGQQCAFSFKGSPYWMAPEVIKNSNGCNLAVDIWSLGCTVLEMATSKPPWSQYEGIAAVFKIGNSKELPPIPDHLSEEGRDFIRQCLQRNPSSRPTAVDLLQHSFIRNASPLEKSLSDPLLQLSTTSCKPDLKVVGHARNMSSLGLEGQSIYQRRAAKFSSVHSDIHVRSYISCPVSPCGSPHLRSRSPQHQNGIMSPSPISSPRTTSGASTPLTGGNGAIPFNHARHLAYNNEGFTITSRCLDEPLPNQPPDPVLGRFVRVKQPSLGFQERAVPEADILSPQFGRMGHVSVWNLHDKPLPSEHASQKGFEDRVKLKPPLDLRSGPPHLGCNHGH

SEQ ID NO: 19115 - protein, 648 aa, Bacillus cereus ATCC 10987
MFFQFFLLAVIMSFISGRLIGTKLNFFKQASAATLGVSLTSAMYWFLYLRYQDESIVGVDRYFWLGSSLIVSMLCYLVFELFDPIKRGEMDDVLIESRNPISKFFAKIGRQKRYMRVSSIAIKHGMGKYLALKRSPEVDRKLATSLRNTLEECGGIFIKFGQVLSTRSDLLPPVFIYELSNLQENVTRLSQQQVEEILQKELHIPKDEIFSSFEMEPLAAASIGQVHKAKLKDNDQDVVVKLLRPNISETIKRDLDILIHFALWISNKSTWAKNIGFLDLAHGFSIAMKEEIDFKIEARNFEQVSDSLKNSETTVKIPKVYQEYSNSKILVLEFLDGVSVKSGSALLNELQIDTKKVQRQLFDCILEQIFFKGIFHADPHPGNVYILRDGTPALLDFGSVGRLGTLQQDAFKRLLIGFERKNSYVLLDGLLQLVEKKPNVDKEGLEQSISQLLIQSTYVSTNSSEEFMQGLFQIIAEFELAFYPMVAGAFRSLITLEGTMVQLNPEFNLMDEAKRFARDHAASFMPINNYSNLKEAATNELLSMLPAMRRIPRKLDDLSSKLENGELSVKVGFFSDETNASFITTFISQFLIAFIGTAFGGISVGVLHLANNAKEPNDQFLSVVGYCGLFISAILLVRVAIHAVRKFK

SEQ ID NO: 19116 - protein, 625 aa, Cornus unalaschkensis
MASSGEQNQVGLLENLKNRLAIAVRSIQWSYAIFWSISSRQPGVLEWGDGYYNGDIKTRKTVQAVEFNADQLGLQRSEQLKELYESLAVTESNPQARKSSAALSPEDLTDTEWYYLVCMSFVFNIGQGLPGRTFANGQPIWLCNAHYADSKIFSRSLLAKSASIQTVVCFPFLGGVVELGVTELVLEDPNFIQHIKTSFLENPYRTVPKIPSYYASENTRTEKDLILAKPSHNLLDAALDAALECGEIDMCAPNNNSSGFLPNQRTEKSVMVEGLSGGASQVQSWQFMDDEISNCVQNSTNSSESISRTSENPEKDCCLTDLPECNLTKLTSLDLPNDDIHHHSVVSSLLKNSHQLILGPYFHKCNRGSSFMGWKKTPSDIQQRRRGTPQELLKKVLFEVARMHGGCLVESRQDNSRKDGLWRPEDDEIGTTDLFLERRRRDKTKERYSVLGSLIPSTSKDDKVSILDGTIEYLKELERRLEDSECLEARTRSKPQDTAERTSDNYENDRIGIGKKPMINKRKACDIVEAELEINLVQLKDSSTDDVSVRIIDKDVFIEIRCPWRERLLLEIMDAISNFHLDSHSVQSSNIDGILSLSIKSKFKGSTVASTGMIIQALQRIICKC

SEQ ID NO: 19117 - protein, 317 aa, Solanum tuberosum
SGPVDDPSKLPKWNYDGSSTGQAPGEDSEVILYPQAIFKDPFRRGNNILVICDCYTPAGEPIPTNKMCHNAAKIFSNPDVVVEEPWYGLEAEYTLLQRRNYWPLGWPIGGFPGLQGPYYCGIGSGKAFGRDIVDAHYKAYIYAGINISGINGEVMPGQWEFQVGLQVGIASGDEVWAARYILERITEIAGVVVSFDPKPIPGDWNGAGAHTNYSTKSMRNEGGYEVIKKAIEKLGLRHKEHIAAYGEGNERRLTGKHETADINTFKWGVANRGASIRVGRDTEKEGKGYFEDRRPASNMDPYIVTSMYAETTLLWNP

SEQ ID NO: 19118 - protein, 442 aa, GIBBERELLA ZEAE PH-1
MGVKSDSHLNHGELRTSCVFSSQDALKAEQDHSAKNYQSLPIVFSRAQGASVWDPEGRHYLDFHAASTALNHGHCHPKLVATLVDQASRLTLTSRAFHNDIYPQFARYVTGLFGYDRVLPSSTGAEASETAIKVARKWAYKVKGVPENQAIVFGAAGNHHGRTLATIALASDNMSRDNYGPLDQNISCTIPGTNRHIEYNNKAALDEAFEAAGFNLAAFIVEPIQGDAGVIVADDDYLRHARSLCDKHNVLLICDEIQTGIGRTGKFLGHYWSGIRPDMVLLGKTMTGGMYPFSCVLGDNAVMLTVEPGTHGSTYGGNPLGAAIAMRALQVVEEENLAENAERLGCVMRDGLKEIQAQTNIIETVRGRGLLNAVVIDQSKTNGHTGIGLCELMKEKGLLLKSSRTGIIRISPPLVITVEEIHWSLRIMKESIDELMQLPSAS

SEQ ID NO: 19119 - protein, 624 aa, Cornus suecica
MASSGEQNQVGLLENLKNQLAIAVRSIQWSYAIFWSISSRQPGVLEWGDGYYNGDIKTRKTVQAVEFNADQLGLQRSEQLKELYESLVVTESNPQARKPSAALSPEDLTDTEWYYLVCMSFVFNIGQGLPGRTFANGQPIWLCNAHYADSKIFSRSLLAKSASIQTVVCFPFLGGVVELGVTELVLEDPNFIQHIKTSFLENPYRTVPKIPSYASENTRTEKDLILVKPSHNLLDTDLDAALECGEIDMCAPNNNSSGFLPNQRTEKSVMVKGLSGGASQVQSWQFMDDEISNCVQNSTNSSESISRTSENPEKDCCLTDLPECNLTKLTSLDLPNDDIHYHSVVSPLLKNSHQLILGPYFHKCNKESSFMGWKKTPSGSQQRRRGTPQKLLKKVLFEVARMHGGCFVESRPDYSQKDGLWRSEDDEIGTTDLFLERRRRDKTKERYSVLGSLIPSTSKDDKISILDGTIEDLKEPERRLEGSECLAARTRSKPQGTAERTSDNYENDRIGIGKKPLINKRKACDIVEAELEINLVQLKDSSTDDVSIRIIDKDVFIEIRCPWRERLLLEIMDAISNFHLDSHSVQSSNIDGILSLSIKSKFKGSTVASTGMIIQALQRIICKC

SEQ ID NO: 19120 - protein, 161 aa, Bacillus cereus ATCC 10987
MTVYDFSAKTITGEEKSLKDYEGKALLIVNVASKCGFTPQYKGLQEVYDKYKEQGLEILGFPCNQFGGQEPGTEADITSFCELNYGVNFPMFAKIDVKGDKAHPLYTYMTEQAPGLLGMKAVKWNFTKFLIGKDGKVVGRFAPQTKPVDLEVEIEKVLGNN

SEQ ID NO: 19121 - protein, 430 aa, GIBBERELLA ZEAE PH-1
MRATQMAPPTNCLCHESSFANPGELFTAKPLNTLRIVWYYEAELTYYLSLRILWVIAHSDNAFLNPDRNFILNFLLRKSFYAQFCAGETHAQVKSTVKRLRDIGFGGVILTHAKEAVPQDDAKSASILDPSIETSHDITADIIPWVNSIVETINMADPGNYVALKLSGAGRLALYNLSRNKNPSPYLSKSLDDICNLARQRHVSILVDAEHDVQQEGIDSWTMTFARRHNTDTAIIYGTYQAYKKVTPATISRHLAEAQEGGFALGVKLVRGAYLGSDPRECFYDTKFETDNCYNSISESVLTRQWSPVVCGNGNFPDTHLVLATHNAESAYKARTICSRGEAKSSIVFAQLQGMADELGCELIQADFGGSPVALPAYKYLVWGSTSECMKYLLRRAYENRDAVQRTNSGRKALWSELIRRFKSALSLSS

SEQ ID NO: 19122 - protein, 243 aa, Oryza sativa
MGRSPCCEKEHTNKGAWTKEEDERLVAYIRAHGEGCWRSLPKAAGLLRCGKSCRLRWINYLRPDLKRGNFTADEDDLIIKLHSLLGNKWSLIAARLPGRTDNEIKNYWNTHIRRKLLGRGIDPVTHRPVNAAAATISFHPQPPPTTKEEQLILSKPPKCPDLNLDLCISPPSCQEEDDDYEAKPAMIVRAPELQRRRGGLCFGCSLGLQKECKCSGGGAGAGAGNNFLGLRAGMLDFRSLPMK

SEQ ID NO: 19123 - protein, 624 aa, Cornus suecica
MASSGEQNQVGLLENLKNQLAIAVRSIQWSYAIFWSISSRQPGVLEWGDGYYNGDIKTRKTVQAVEFNADQLGLQRSEQLKELYESLVVTESNPQARKSSAALSPEDLTDTEWYYLVCMSFVFNIGQGLPGRTFANGQPIWLCNAHYADSKIFSRSWLAKSASIQTVVCFPFLGGVVELGVTELVLEDPNFIQHIKTSFLENPYRTVPKIPSYASENTRTEKDLILVKPSHNLLDTDLDAALECGEIDMCAPNNNSSGFLPNQRTEKSVMVEGLSGGASQVQSWQFMDDEISNCVQNSTNSSESISRTSENPEKDCCLTDLPECNLTKLTSLDLPNYDFHYHSVVSPLLKNSHQLILGPYFHKCNKESSFMGWKKTPSGSQQRRRGTPQKLLKKVLFEVARMHGGCLVESRQDNSKKDGLWGSEDDEIGTTDLFLERRRRDKTKERYSVLGSLIPSTSKDDKISILDGTIEDLKEPERRLEGSECLAARTRSKPQGTAERTSANYENDRIGIGKKPLINKRKACDIVEAELEINLVQLKDSSTDDVSIRIIDKDVFIEIRCPWRERLLLEIMDAISNFHLDSHSVQSSNIDGILSLSIKSKFKGSTVASTGMIIQALQRIICKC

SEQ ID NO: 19124 - protein, 616 aa, Thermoplasma volcanium GSS1
MVEVKIIKSDGFFNEVLISSDKKIHFDTAYAEGDFNCFGEGSIVSETTDDLKFKIANLIPGKYHFKIAIDQYKILREAENRSGSYSFSIWLEKPYHNPDYAQFCAIIDKKLMDVRIAVPKHSISVSIFTKDTLKPVYSRRASFDTFDAVEYVFDGMSDYYFEVDNSRLPKEGYFSPKVHIEHEGGSKIIYHIFPDRFFRVGPHLPTLSRWGDKPTFSSFFGGNLRGITEKIGYIKALNVDTIYLNPVYKSKSNHRYDVDDYFSIDGLLGGEQDFIELVNEAHENGIKIVADMVFNHTSTDFPYFLDALKNGKNSKYWNWYIFHGEGAAVFDGRAKGKTKPLYETFMGVGRMPKLNHKNAEVRKFCIDVMKYYKNKFGVDGFRYDVAHSIYPEFFLEAVKEFGNEMLHIGEAWCLPSMFMLSGYWNSFTNYYLRNAIIKFVREEINITEFYNMIQNMIISYGPLIQQNVMNILDSHDTERILRAFKGNKKKVKLAYSILFMFDGFATIYYGDEVGLDGGRDPDDRRCFPWDNMDEDMLQFLKKLGEIRRMYHTGSAGIITVEETQECKYITRLSGESIIKVAIAKKPVTLEGEIILSSCGEKTIYEGDFALSIAKYA

SEQ ID NO: 19125 - protein, 629 aa, Cornus florida
MASSGEQNQVELLENLKNRLAIAVRSIQWSYAIFWSISSRQPGVLEWGDGYYNGDIKTRKTVQAVEFNADQLGLQRSEQLKELYESLSVAETNPQARRPSAALSPEDLTDTEWYYLVCMSFVFNIGQGLPGRTLANGQPIWLCNAHCADSKVFSRSLLAKSASIQTVVCFPFLGGVVELGVTELVLEDPTFIQHIKTTFLENPYPTVPKISNYASENTRTDKDLVLPKLNHNKLDTNLDPAVECREVNLCAPNNNSSGFLPNQQTEESVMVEGLNGGVSQVQSWQFMDDEVSNCVQNSSNSSDSISQTFVTPEKDSCLLDLQECNHTKLTSLDLPNDDIHYHSVVSSLLKSSHQLVLGPYFQKCHKESSFIGWKKGPVGIRKHRSGTPQRVLKKVLFEVARMHGGRLIESRQDNSREDGLWRPQVDEIGTTNLFSGRRRRENINERYSVLGSLIPSTSKVDKVSILDGTIEYLKELERRVDDLECCREVTNLDAMTRKKPQDTTERTSDNYGNSTGIGKRPSINKRKACDIDGGEPEINLVQLKDSSTDNVTVKMTQKDVLIEIRCPWRECLLLEIMDAISNFHLDSHSVQSSNVDGILSLNIKSKFKGSTVASTGMIIQALQRVICKC

SEQ ID NO: 19126 - protein, 199 aa, Oryza sativa (japonica cultivar-group)
MAAMMNNERSSSNKLQVDAENPAAVGDELDLAARANWLRAAVLGANDGLVSTASLMLGVGAVKAEARAMVISGFAGLLAGACSMAIGEFVSVCSQRDVELAQLERDGKRGGEEEKALPSPAQAAAASAMAFSVGAVVPLLAAGFIVNYRLRIAVVVAVASVALAAFGCVGAVLGRAAVARSSARVVLGGWPPWASPSAS

SEQ ID NO: 19127 - protein, 299 aa, Zea mays
  misc_feature (35)..(35): Xaa can be any naturally occurring amino acid
  unsure (1)..(299): unsure at all Xaa locations
MGRPPCCEKGGVKKGPWTPEEDLVLVSYVQDHGPXNWRAVPTNTGLMRCSKSCRLRWTNHLRPGIKCGNFSDQEEKLIIHLQALLGNRWAAIASYMPERTDNDIKNYWNTHLKKKFTRTGAAGAEARSGRWAAPRGQWERRLQTDIHTARQALREALSLDPAPLSTKPPEQLPQPTAPASQATSYASSAENIARLLEGWWSMHPGAAGKVSSGSRSSSVSVSVFSDDDGVISASNSGGTAAARTPEASIRMTKADGEGTAGPGPGPSFSMLESWLLDDAMGHGDTGLVTVPMGDPCDFF

SEQ ID NO: 19128 - protein, 368 aa, Coxiella burnetii RSA 493
MTPKTTTVANFTIRYLQFLDANSNPTQPFPDFADPDMLLYLYRRMALIRQLDNKAINLQRTGKMGTYPSSRGQEAVGIGMGSAMQKEDIFCPYYRDQGALFEHGIKLSEILAYWGGDERGSRYANPDVKDDFPNCVPIAGQLLHAAGVAYAVKYRKQARAVLTICGDGGTSKGDFYEAINLAGCWQLPLVFIINNNQWAISVARGEQTHCQTLAQKAIAGGFEGWQVDGNDVIAVRYAVSKALEKARDGGGPTLIEALSYRLCDHTTADDATRYIPQEEWKVAWQKEPIARLGYYLESQGLWSREKEAVLQKELAQEVDQVVEEFLTMPPPKATDMFDYLYAELPVSLEKQREELADNKPSHPSGREG

SEQ ID NO: 19129 - protein, 350 aa, Coxiella burnetii RSA 493
MRYARMLGFGDIHVKNDSKTGLQAIIAIHSTKRGPAIGGCRFFEYSSLGLALKDVIRLSYMMTLKAAVSDLPHGGAKAVILKPRVIPDREALFRSFGDFVHDMNGRYITAMDVGTTTDDMDIIAERTPHVIGAAGTDELQSDPSPFTSRGVFQGIKAAVKFKWERDDVEGLHIALQGAGKTAYYLAQLLHQHGATISICDPKPEATELFVKEFQATVVELENIYDVQCDIFSPCAVGGVINLNTLNRIKAPIIAGPANNQLAHRKYGAIAQQRGFLYAPDYVLNSGGLIQAASIHDYHNIEIANQLIEKLYDRLLELFERAAKENKPTTEVADLIAKEKLAATTDYLETV

SEQ ID NO: 19130 - protein, 720 aa, Zea mays
MEVNSSGEETVVKVRKPYTITKQRERWTEAEHKRFLEALKLYGRAWQRIEEHVGTKTAVQIRSHAQKFFTKLEKEAMNNGTSPGQAHDIDIPPPRPKRKPNSPYPRKSCLSSETQTKELPNDKSTKPNMPLSNGHVKMVGDASLQNFQRKELSEKGSRSEVLNLFRDAPSASFSSVNKSSSNHGAPRRTEASKTESRDMSIMENNSFNPNTQEDVKVISDQEMERLNGIQIRSKCEHSHEGYLDISTQQMKLMPKSVETTYVDEQTARASHTLAESDGTASIPVTVPEGTHPDQTSDQVGINGSMNPCIHPMVSADPKFGSSATPQTFPHNYAAFAPMMQCNCNQDTYRSFTNMSSTFSSMLVSTLLSNPAIHAAARLAASYWPAAEGNTPIDPNQENPADGVQGRNIGSPPSMVSIVAATVAAASAWWATQGLLPFFAPPVAFPFVPAPSAAFPTVDVPRPSEKDRDCPAENAQIECQEARKQVQFEGLRIAASSESDGSGKGEVSLHTELKLSPAQNADATPTTGAGTNDAFRNKKKQDRSSCGSNTPSSSDVDAGNVPEEDNANEKAKQASCSNSSAGDTNHRRFRSNGSTSDSWKEVSEEGRLAFDALFSREKLPQSFSPPQAVDSKEVAKEEEDEVTTVAVDLNKNATSIDHDDLDTMDEPRASFPNELSHLKLKSRRTGFKPYKRCSVEAKENRVPASDMVGTKRIRLDSEAST

SEQ ID NO: 19131 - protein, 319 aa, Glycine max
MFFFIVLIMEEDPSHIFLLNCDVCCSFPLPEMLDAHKRYGGMGTILVVKVSAESASEFGELVADPTTNELLHYTEKPETFVSDRINCGVYVFTPDIFTAIEGVSTQRKDRANLRRVSSFEAMQPDTRNTRSLPVNYVRLDQDILSPLAGKKQLYIYETNDFWEQIKTPGMSIKCSGLYLAQFRYTSPHLLANGDGIKKASITGDVYIHPSAKVHPSAKIGPSVSISANARIGAGTRLKHCIILDDVEIKENALVGHAIVGWKSSIGRWACVEASGDYNAKLGVTILGESVTVEDEVVVLNSIVLPHKTLNLGVQDEILL

SEQ ID NO: 19132 - protein, 349 aa, Methylobacterium extorquens
MGAGSEAGKPAAETDAPQHRPAPNIPQFTKDEDLHAYREMLSIRRFEEKAGQLYGMGLIGGFCHLYIGQEAVVVGMQMAGEDGDQNITGYRDHGHMLACGMDPKGVMAELTGRRGGYSRGKGGSMHMFSREKQFFGGHGIVGAQVALGTGLAFADAYLKNGKVSFTYMGDGAANQGQVYESFNMAALWKLPVVYVIENNRYAMGTSVARASAQTDFSKRGLSFGIPGEQVDGMDVRTVREAAARAINHARSGEGPYILEMQTYRYRGHSMSDPAKYRTKDEVSKMRDEHDPIEMVRKRLLEAHGVPEAELKSIDAKVREIVNESADFATHDPEPDPSELWTDILLEARA

SEQ ID NO: 19133 - protein, 341 aa, Glycine max
MLEIHSIGGGRFFGGGGDRRLRPHHQNHHQQPPIKCPRCDSLNTKFCYYNNYNLSQPRHFCKNCRRYWTKGGVLRNVPVGGGCRKSKRSNKPKTTTSAAATTSSNNNNNNPSSSSETAAATAPTPPQQPPPPLELEHNSHSHSSSESSTYTVAATEAMSAPTTNAVSNNNLLLDNNRESKMFANPNPYLEQSRSGGLFSDIESFSSLVNLNNQALGFGFGNNNSNISILDATSFRFGVSVTNPHGNDQVLAAPGGGHGQWQQQQQNHHEFGTASFLDHTVPLEFSSLQHKAGHQGGFGPLDWQPGGDQGLFDLPNTVDQPYWTHHTHWSDQDNPSSLFHLP

SEQ ID NO: 19134 - protein, 517 aa, Lolium rigidum
MDKAYIAILSCAFLFLVHYVLGKVSHGRRGKKGAVQLPPSPPAIPFIGHLHLVEKPIHATMCRLAARLGPVFSLRLGSRRAVVVSSSECARECFTEHDVTFANRPKFPSQLLASFNGTALVTPSYGPHWRNLRRVATVQLLSAHRVACMSGVIAAEVRAMARRLFHAAEASPGGAARVQLKRGPFELSLSVLMETIAQTKATRSEADADTDMSVEAQEFKEVVDKPIPHLGAANMWDYLPVMRWFDVFGVRNKILHAVSRRDAFLRRLIDAERRRLADGGSDGDKKSMIAVLLTLQKTEPKVYTDTMITALCANLFGAGTETTSTTTERAMSLLLNHPAALKKAQAEIDASVGTSRLVSVDDMPSLAYLQCIVNETLRLYPAAPLLLPHESSADCKVGGYNVPADTMLIVNAYAIHRDPAAWEHPLEFRPERFEDGKAEGLFMIPFGMGRRRCPGETLALRTIGMVLATLVQCFDWEPVDGVKVDMTEGGGFTIPKAVPLEAVCRPRAVMRDVLQNL

SEQ ID NO: 19135 - protein, 314 aa, Sphagnum cuspidatum
VGINGFGRIGRLVARVISDRDDIELVAVNDPFISAEYMAYMFKFDSVHGQWKNHDIKAQNENSLLLGGKPVAVYGLKDPSEIPWGKHGADYIVESTGVFTDKAKAAAHLKGGAKKVVISAPSKDAPMFVMGVNEDKYTADLDIVSNASCTTNCLAPLAKVINDKFGIVEGLMTTVHSTTATQKTVDGPSHKDWRGGRAAGVNIIPSSTGAAKAVGKVLPELNGKLTGMAFRVPTIDVSVVDLTVRLEKPASYDAIKAAIRAEANGKMKGILGYTEEDVVSTDFITDSRSSIFDAKAGIALTDNFVKLVAWYDNE

SEQ ID NO: 19136 - protein, 479 aa, Methylobacterium extorquens
MSETYDVLIIGAGPGGYVAAIRSAQLGFKTAVVDREHLGGICLNWGCIPTKALLRSAEIYHYMQHASDYGLSAKEVSFDAAAIVKRSRGVSGRLNGGVGMLLKKNKVDVIWGEASIESGAKGNEPGKVTVKETKRAEPPKGAKGAGTYAAKHIIVATGARPRVLPGIKPDKKQIWTYYEAMVPEKMPKSLLVMGSGAIGIEFASFYRTMGADVTVIELLPQILPVEDAEIAGLARKRFEKQGIKILTSAKVTKVEKGADSVTATVEDDKGKTQQLTAEKLISAVGVVGNIENLGLEKVGVKIERGVVVTDGLGRTNVPGVYAIGDVAGPPMLAHKAEHEGVLCVETIKGLHTHPMDKAKIPGCTYCQPQIASVGVTEGKAKELGLSIKVGRFPFAGNGKAIALGEPDGLVKTIFDAKTGQLLGAHMVGAEVTELIQGYVVAMTLESTEEELMHTVFPHPTLSEMMHESVLDAYGRVIHT

SEQ ID NO: 19137 - protein, 517 aa, Lolium rigidum
MDKAYIAILSCAFLFLVHYVLGKVSHGRRGKKGAVQLPPSPPAIPFIGHLHLVEKPIHATMCRLAARLGPVFSLRLGSRRAVVVSSSECARECFTEHDVTFANRPSSRRKLLASFNGTALVTSSYGPHWRNLRRVATVQLLSAHRVACMSGVIAAEVRAMARRLFHAAEASPDGATRVQLKRRLFELSLSVLMETIAQTKATRSEADADTDMSVEAQEFKEVVDKLIPHLGAANMWDYLPVMRWFDVFGVRNKILHAVSRRDAFLRRLIDAERRRLADGGSDGDKKSMIAVLLTLQKTEPKVYTDTMITALCANLFGAGTETTSTTTEWAMSLLLNHPAALKKAQAEIDASVGTSRLVSVDDVLSLAYLQCIVSETLRLYPAAPLLLPHESSADCKVGGYNVPADTMLIVNAYAIHRDPAAWEHPLEFRPERFEDGKAEGLFMIPFGMGRRRCPGETLALRTIGMVLATLVQCFDWEPVDGVKVDMTEGGGFTIPKAVPLEAVCRPRTVMRDVLQNL

SEQ ID NO: 19138 - protein, 526 aa, Glycine max
  misc_feature (223)..(223): Xaa can be any naturally occurring amino acid
  unsure (1)..(526): unsure at all Xaa locations
MLQVLSFSLKSDTHTLLRSTLRTKTASSLAYAVVSRSAQENLLQAPLLSRSNSTEASLAKDTSSNDVKNGQGFKGHSMLAPFTAGWQTTDLHPLVIEKSEGSYVYDINGKKYLDALAGLWATSLGGSEPRLVDAAIAQLKKLPFYHSFWNRTTLPSLDLAKELLEMFTARKMGKAFFVNSGSEANDTQVKLVWYYNNALGRPDKKKFIARAKSYNGSTLIAAXLSGPSGFCHQKFDLPAPFVLHTDCPHYWRYHLPGETEEEFSTRLANNLEQLILKEGPETIAAFIAEPVMGAGGVIPPPSTYFEKVQAVVKKYDILFIADEVICAFGRLGTMFGCDKYNIKPDLVSLAKALSSAYLPIGAVLVSPEISEVIHDQSNKLGSFSHGFTYSGHPAACAVAIEALKIYKERNIVDQVNKIAPRFQDGIKAFSDSPIIGEIRGTGLILGTEFTDNKSPNDPFPPEWGIGAYFGAQCEKHGMLVRVAGDNIMMSPPYIISPGEVEELISIYGKALKETEKKVQELKSQRK

SEQ ID NO: 19139 - protein, 517 aa, Lolium rigidum
MDKAYIAILSCAFLFLVHYVLGKVSDGRRGKKGAVQLPPSPPAIPFIGHLHLVEKPIHATMCRLAARLGPVFSLRLGSRRAVVVPSSECARECFTEHDVTFANRPKFPSQLLASFNGTALVTSSYGPHWRNLRRVATVQLLSAHRVACMSGVIAAEVRAMARRLFHAAEASPDGAARVQLKRRLFELSLSVLMETIAQTKATRSEADADTDMSVEAQEFKEVVDKLIPHLGAANMWDYLPVMRWFDVFGVRNKILHAVSRRDAFLRRLIDAERRRLADGGSDGDKKSMIAVLLTLQKTEPKVYTDTMITALCANLFGAGTETTSTTTEWAMSLLLNHPAALKKAQAEIDASVGTSRLVSVDDVPSLAYLQCIVNETLRLYPAAPLLLPHESSADCKVGGYNVPADTMLIVNAYAIHRDPAAWEHPLEFRPERFEDGKAEGLFMIPFGVGRRRCPGETLALRTISMVLATLVQCFDWEPVDGVKVDMTEGGGFTIPKAVPLEAVCRPRAVMRDVLQNL

SEQ ID NO: 19140 - protein, 337 aa, Mycobacterium avium subsp. paratuberculosis K-10
MRAAVLRDGRMVYRDDVPEPIPETGQVLVGVRACGICGSDLHFAAHGAQVLQMSDRVAGGAGGMRVDLDHDIFMGHEFSAEILEAGPDTETHPPGTLVTSLPVLLSAKGVEPIVYSNTTIGGYAERMLLSAPLLLPIPNGLDVKHAALTEPMAVGLHAVNKSNITPAETALVLGCGPIGIAIIAALATRGVESIVASDFSPKRRQLATAMGAHRTLDPAQGSPFDSVKPAVVFEAVGVPGIIDDVLLRARPGTRLVVAGVCMQPDTVHPFFAIAKEINVQFVLAYTPEEFGDSLRALAEGDIDVAPLITGEVGLDGVGAAFDDLADPERHCKVLVTP

SEQ ID NO: 19141 - protein, 348 aa, Marchantia polymorpha
MAGSTEPSTISSGKVKIGINGFGRIGRLVARVALERDDIELVAVNDPFISTEYMAYMFKYDSVHGRYTKNTIEAKDDKTLLFGKFPVSIFQCRDPAEIPWGQTGAEYVVESTGVFTTKDKAAAHLKGGAKKVVISAPSADAPMFVMGVNEKEYTTDIDIVSNASCTTNCLAPLAKVIHDKFGIVEGLMTTVHSITATQKTVDGPSAKDWRGGRGASFNIIPSSTGAAKAVGKVLPALNGKLTGMSFRVPTADVSVVDLTVRTEKKATYEEVKAAIKAESEGEMKGIMGYTEDDVVSTDFIGDSRSSIFDAKAGIALNDNFMKLVSWYDNEWGYSNRVVDLILHMASTQ

SEQ ID NO: 19142 - protein, 396 aa, Pseudomonas fluorescens Pf-5
MHFDAIGRVPGDPILGLMGAYANDPNPRKFDLGVGVYKDSQGLTPIPRSVKLAEQRLVDSQDTKIYIGGHGDTAFGKVINELVLGSDSKLIATQRTGATQTPGGTGALRLSADFIAHCLPGRGVWLSNPTWPIHETIFAAAGVKVSHYPYVGSDNRLDVEAMLATLNQVPEGDVVLLHACCHNPTGFDLGHADWQRVLDVVRSRKLLPLIDFAYQGFGDGLEQDAWAVRLFAAELPEVLITSSCSKNFGLYRDRTGALIVCTQDTEKLLDVRSQLAHIARNLWSTPPDHGAAVVATILGDPELKSLWADEVETMRLRIAQLRAGLLEALQPYGLAERFAHIGVQRGMFSYTGLSPAQVQELRDHHSVYMVSSGRANVAGIDASRLDLLAEAIARVV

SEQ ID NO: 19143 - protein, 163 aa, Triticum aestivum
  misc_feature (8)..(9): Xaa can be any naturally occurring amino acid
  misc_feature (16)..(16): Xaa can be any naturally occurring amino acid
  misc_feature (19)..(19): Xaa can be any naturally occurring amino acid
  misc_feature (39)..(39): Xaa can be any naturally occurring amino acid
  misc_feature (61)..(64): Xaa can be any naturally occurring amino acid
  misc_feature (68)..(73): Xaa can be any naturally occurring amino acid
  misc_feature (92)..(92): Xaa can be any naturally occurring amino acid
  unsure (1)..(163): unsure at all Xaa locations
IAQRYAKXXGLYGERXELXSIVCGSADIAVKGESQLKLXLRPIYSNPPLHGASIVATKIKXXXXANDXXXXXXGMEADRIISMREQLFYALXDIRETLGDWSHIIKQIGRLTFTGLNSDQVAFMRQEYHIYMTSDGRISMAGLSSRTVPHLADAIHAAVTKLK

SEQ ID NO: 19144 - protein, 503 aa, Methanobrevibacter arboriphilus
MSNKKKFTTNKGIPVPNDQASITTGKGSNYTMLGDSHLTEKLAHFGRERIPERVVHAKGTGAYGYFEVTNDLSKYTRAKFLSEVGKKTEVFIRFSTVGGERGSADAKRDPRGTAMKYYTEEGNYDLVGNNTPIFFIRDAIKFPDFIHTQKRNPKNNLSDADMFWDFMSLTPESIHQATFLFTDRGTPQNYRHMDLFGSHSFMWYNEKNEYVWVKYHFKTAQGIQNLTNDEAIKMCGENPDHATEDLFNAIEEGNYPEWNVYVQIMTPEEAEKYEFDPFDVTKVWFHGDYPLIPLGKLVLNKNPENFFAEVEQVAFAPSNFVPGIGPSPDRLLQGRLFSYEDTQRHRLGPNHHQIPINRAKNAEVNTYQRDGPMTVTDNGGSGPNYYPNSFDGPEVDETVTPPTIELKAEINRHPRPVEDVDFFQTGELWRRVLSDEDKDHLVYNIVAHLGNAQERIQYRQCALFYKAEPEYGTRVAEGIGLDISKVKNLSEMTQEERVEATKK

SEQ ID NO: 19145 - protein, 319 aa, Haloarcula marismortui ATCC 43049
MTELVTFGETMLRLSPPGDERLETADQYAVRAAGAESNVAVAAQRLGVDAMWASKLPDSPVGRRVTGELKHHGVSVDVAWDDSDSARQGTYYLEQGSPPRGNDVIYDRQNASVTTATPAELPTEAIADAAGFHTSGITPALSETLESTTADLLSLAQDAGTTTSFDLNYRSKLWTPAEARSVLTELFPSVDLLVVAERDANVVLDRTGDAETIARDLAAEYGFEATVITRGSDGALALADGTVTEQPTFESTDAHPVGTGDSFVGGFLSQYLSGGTVADGLAWGAATAALKRTIPGDIAVVSPDEIRSILSGDTEAISR

SEQ ID NO: 19146 - protein, 248 aa, Bdellovibrio bacteriovorus HD100
MYKLVLIRHGESVWNQENRFTGWQDVDLSEKGRAEALKGGKALREKGFSFDVAYTSVLKRAIKTLNFVLDEVDQVWLPVHKDWRLNERHYGALQGLNKAETAARHGEEQVKIWRRSYDTPPPPMEVSDPRHPSHDPRYKNVDAQLLPSNESLKDTVARFLPLWDGTIAPAVKSGKNVLIVAHGNSLRALMQHLEGMTPDEIMGVNMPTGIPMMYELDANLKVLKKEFIGDPDEVKAAIEAVANQGKAK

SEQ ID NO: 19147 - protein, 220 aa, Ehrlichia ruminantium str. Gardel
MKIFLDTIDISFLEEFCISGLIDGVTTNPSLFSKSELKCSDLIFKLCSLIKGPVSIEVISTSYKDMISEALEISKIAENIVIKLPLTYDGLIACKILSNEHNLKVNVTLCFSPAQAILAAKSGAYFISPFVGRLDDIGQMGMELIKDIREIYSKYHSFNTQILVASIRHPIHVVQAAKIGADIVTISPSIFKQMFVHPLTNKGLEDFLRNWNESGKKMFS

SEQ ID NO: 19148 - protein, 500 aa, Methanosarcina mazei Go1
MKYISSLRMKAIDRNCAYLGLLPLQLMENAGAAVARSVKEKLGNGKVLFVAGRGNNGGDAFVAARHLAGIPGYAVRVILLGKGSDIGSEEAFHNFSLLRFSRVKTLEIRDSNQLTASEWFSEADLLVDAVFGTGVKGKIKEPESTAIELINKEGKAGKTVIAVDIPSGLDPEGGDFDKAVYADLTVTFHRMKAGLLTEKAKEYTGTIKVEEIGVCADAEHYVGPGDLQMLRKRKFDAHKGNAGRILIIGGGPYSGAPALAALAALKTGADLVTAAVPESVARTVASYSPDLIVRKLSSNVLCPEDMSTLPDLINSHDVVVMGMGLGRATETLETVRKILPFCRKMVLDADALSALSGVLFETLAGNCEIIVTPHGGEFALLRGVETPEDHDAREKAVREFSEEKGVVTLLKGKTDIISDGKQTLLNRTGNPGMTVGGTGDVLAGITGALFSRNPAFLSAACAAFINGSAGDLAFEKSGNALLATDVLEKIPEIIREAGIG

SEQ ID NO: 19149 - protein, 222 aa, Glycine max
MGRGKIEIKRIENTTNRQVTFCKRRNGLLKKAYELSVLCDAEVALIVFSSRGRLYEYSNNNIRSTIERYKKACSDHSSASTTTEINAQYYQQESAKLRQQIQMLQNSNRHLMGDALSTLTVKELKQLENRLERGITRIRSKKHEMLLAEIEYFQKREIELENENLCLRTKITDVERIQQVNMVSGPELNAIQALASRNFFNPNMLEGGTVYPHSDKKILHLG

SEQ ID NO: 19150 - protein, 469 aa, Bdellovibrio bacteriovorus HD100
MADTQFDLIIIGSGPGGYVGAIRAAQLGLKTAVIEKDKTYGGTCLNVGCIPSKALLESSEHYQAAQHDLAAHGVKVSKVDLDLPTMQARKDKVVKTNTEGIAFLFKKNKITPFNGMGKIVAAGKVEVKGADGNTQILTAKNIVIATGSVPVELPFLKYDEKRIVSNTGALALDQVPKSMIVVGGGVIGLELGSVWQRLGAKVTVIEYANRLGGTMDQDCMNVLKKSMEKEGMSFLLSTKVTGSKVGNDGVEVTYESLTDGKASSMKADVVLVSTGRKAFSAGVGCEEMGIQKDPQGRIIVDKHYQTNVPGIYAIGDVIAGPMLAHKAEEEGVALAEILAGGAGHVNYDTVPGVIYTHPEIASVGITEEFAKEKGLEINVGKFPFMANGRARAKGYTEGFVKIIADKKTDKILGAHMVGPSVSELIHEVIVCMEFGGSSEDLARSFHAHPTLSEVVREAALAVEKRQRQM

SEQ ID NO: 19151 - protein, 1115 aa, Bacillus cereus G9241
MEKNIQQEKDKAKPVFYDPKGRRNIAFISFLCISIVSVSIVFYFFFQSIFSTPEIPNMNNAVQQDNKLVPINQKLSDQQLKREDFKPNTETKDNKNLVNSPKDSKQPKEVYGFYVNWDENSTASLKENIDSLTTLVPEWYHLKADLTIRSEIKPEIVKLAEKNQVKIMPLLTNYTEEASGPDSGLIHKLLNSSNDVKTKFVNDLVKQVEKNRFAGINIDFEAIPESDRENVTNFMKELTTVFHKHDLLVTQDVPANDKAFDYSALAKVIDRMIVMMYDEHYGAGEPGPIASNKWFQHTLKELNIPSNKLVVAFGNYGYDWKVKSKEPAKSLTFSEVMAMAHNSNMKIQWDKSSGNPYFRYKTGEKEHTAWFLDGVTLYNQVKIAMDNNAKGFALWRLGAEDPTIWKVLKNPVEAQKNPDVLHKITSLDEVNYSGQGEILQIENEKQNGLRDFKVGKDGYLTDEVYQILPSAYEVQRYGKPKGKQVVLTFDDGPDPKYTPEILDILKENKIKAAFFVLGENAQLNTSIVKRIYDEGHEIGNHTFKHPNVADTSLLRTKVELNTTQRLIQEITGHSTVLFRPPYEADANPDSSNEILPILRAQNMNYTMVAEKVDPEDWATPSTNELVKRALNPVYKGEGNIILLHDAGGNRTHTVEALPIIIKELKKHGYSFVTISDLMNKERDEIMPPVSSEGEQYLLYNKAVFLGAGYFKHMLTTIFYIAIGLGIFRFLFLIYFAWKQKRKTLSRIIHSSYQPFVSVVIAAYNEEKVIAKTIRSILDSKYGEFEVIVVDDGSTDGTSKVMKETFYKHPKVRFIQKENGGKSSAMNLGFQQSRGEIIVTLDADTIIAQDAISLMVRHFEDQNVAAVSGNVQVGNRRNLLTTWQHVEYITGFNLERRAFDELNCITVVPGAIGAWRKKDVVESGYLSEDTLAEDTDLTITFLRQGHRIVYEEKAYAFTESPEDVKSLIKQRYRWSYGTLQCLWKHRKALFNTKQKTLGFIALPNMWLFQYVLQFIAPFADILMIMGLFSSDPLKVLGFYFVFFLMDLLASLFAFKLEEENPKPLVWLILQRFIYRQFMTYVVVKSIFSSIRGIAVGWNKLKRMGSVKHSTEHKEVS

SEQ ID NO: 19152 - protein, 468 aa, Rubrivivax gelatinosus PM1
MLGGAGAISAAVAAASVSKVAMAALPEPVIQTKPDTMPPLVPNTGRPYNPVVTLNGWTLPWRMNNGVKEFHLVAEPVVREMSPGFKAHLWGYNGQSPGPTIEVVEGDRVRLFVTNKLGELTSIHWHGQRLPNGMDGVTGLNQPGIPPGKTYVYEFVARRPGTFMYHPHADEMVQMAMGMMGFWITHPKGKHPLIDEVDRDFCFLLNAYDIDPGAATPKIMTMLDFNLWSWNSRIFPGIDPLVVRHMDKVRIRVGNLTMTNHPIHLHGHEFLITGTDGGPTPKSTRQYEVTADIAVGQMRQMDFLADEEGDWAFHCHKSHHTMNAMGHDVPTMIGVDHRGVAKQITKLIPDYMVMGERGMKDMTEMEMPLPDNTAAMMAGTGPFGAVGMGGMFSVVKVRKDQKRGDYSDPGWYQHPPGTVAYEFTGALPDPARFKADVSPGPGSMPSMAKPAQDVEVKVRKPAGGHSGH

SEQ ID NO: 19153 - protein, 547 aa, Listeria monocytogenes str. 1/2a F6854
MTVKSGFDYMNNPLLNKGTAFSEEERANYQLDGLLPPIIETIEQQAVRIETQIENLETPLHKHQLLTNLYNENRTLYYYLVTKNVTDYLPIIYTPTIGDAVIQYHKEYTAPDEALFIDAFAPEKLSASIKNYAKNNPNIDMIVITDGEGVLGIGDWGVNGVKIAVGKLAVYTVAAGLAPDRVLPVVIDAGTNNETLLNDSLYLGNKGPRLSESEYDAFIASFVNVMKEVFPKAILHWEDFGRANASRILHNYRDKICTFNDDIQGTGAMVVAAVLATIQVSRIPLSEQKIIIFGAGTAGIGIADQLSAQLMRETGLPFEKAKKHFYLVDRKGLVLDNMTDLTTGQKKYAHPSAEWSNVPTDTLENLVEAVHPTMLIGCSGVTGAFKESIVKKMTQYTERPAILPLSNPTKLAEATASDLIQWTDGKALIVTGSPSKPVEYQNTTYEIGQANNALLYPGLGLGALVTRAKYITDDMLAAASMAVAEQISPNKAGAALLPHVRTLRETSRAVAIAVANQAIKENIHQVELTNVIEAIELEMWQPIYKGV

SEQ ID NO: 19154 - protein, 537 aa, Rickettsia sibirica 246
MVHFIFVTGGVVSSLGKGLTAASLAMLLQAKGFRVSVRKLDPYLNIDPGTMNPHEHGEVYVTDDGAETDLDLGHYERFTGVSACKFDSITTGAIYSKLLKDERLGNYAGVTVQVIPHVTNIIKDFILSNTKGFDFIICEIGGTVGDIEGLPFFEAIRQIGNKLKSENCLFIHLTLLPYVKTARELKIKPTQHSVKALRAIGISPNILVCRAEHNISKGEIDKISLLCNIESEYVVPAIDQKNIYLVPIAYHNSGLDNKVLKFFNINIMPSKLDKWHDIINRLKDSNSKVRIAIIAKYHKLKDAYKSVIEALDHAGIYYKYKIDLVWINAENLTEENINKKLLDIDGILVPGGFGERATKGKIIAIKYARTNNIPFFGICFGMQLATIEIAQNLIGIKDAVTEEFKVDGTKIIEKINKNCEDSKITIENVKKTMRLGSYPCSLVASTIAANAYKSLEINERHRHRYKFNNEFQNIFEKHGIVFSGFSKDKEIVEIIELPLLRWFVGVQFHPEFKSKPFEAHPLFIQFIKAAIEYNKCN

SEQ ID NO: 19155 - protein, 547 aa, Bartonella henselae str. Houston-1
MAAKEVKFGREARERLLRGVDILANAVKVTLGPKGRNVVIDKSFGAPRITKDGVSVAKEIELEDKFENMGAQMLREVASKTNDIAGDGTTTATVLGQAIVQEGVKAVAAGMNPMDLKRGIDAAVDEVVANLFKKAKKIQTSAEIAQVGTISANGAAEIGKMIADAMEKVGNEGVITVEEAKTAETELEVVEGMQFDRGYLSPYFVTNAEKMVADLDDPYILIHEKKLSNLQSLLPVLEAVVQSGKPLLIIAEDVEGEALATLVVNKLRGGLKIAAVKAPGFGDRRKAMLEDIAILTSGQVISEDVGIKLENVTLDMLGRAKKVNISKENTTIIDGAGQKSEINARVNQIKVQIEETTSDYDREKLQERLAKLAGGVAVIRVGGATEVEVKEKKDRVDDALNATRAAVEEGIVAGGGTALLRAANALTVKGSNPDQEAGINIVRRALQAPARQIATNAGEEAAIIVGKVLENNADTFGYNTATGEFGDLIALGIVDPVKVVRSALQNAASIASLLITTEAMVAEVPKKDTPVPPMPGGGMGGMGGMDF

SEQ ID NO: 19156 - protein, 587 aa, Streptococcus pneumoniae R6
MNTLGDKLMELSAIYHGPESEYAYLYKDKKLHIRIRTKKGDIESINLHYGDPFIFMEEFYQDTKEMVKITSGTLFDHWQVEVSVDFARIQYLFELRDTEGQNILYGDKGCVENSLENLHAIGNGFKLPYLHEIDACKVPDWVSNTVWYQIFPERFANGNALLNPEGTLDWDSSVTPKSDDFFGGDLQGIIDHMDYLQDLGITGLYLCPIFESTSNHKYNTTDYFEIDRHFGDKETFRELVDQAHHRGMKVMLDAVFNHIASQSLQWKNVVKNGEQSAYKDWFHIQQFPVTTEKLVNKRDLPYHVFGFEDYMPKLNTANPEVKNYLLKVATYWIEEFNIDAWRLDVANEIDHQFWKDFRKAVLAKNPDLYILGEVWHTSQPWLNGDEFHAVMNYPLSDSIKDYFLRGIKKTDQFIDEINGESMYYKQQISEVMFNLLDSHDTERILWTANEDVQLVKSALAFLFLQKGTPCIYYVTELALTGGPDPDCRRCMPWERVSSDNDMLNFMKRLIKIRKYASVIISHGKYSLQEINSDLVALEWKYEGRILKAIFNQSTEDYLLEKEAVALASNCQELDNQLVISPDGFMIF

SEQ ID NO: 19157 - protein, 647 aa, Cornus florida
MASSGEQNQVELLENLKNRLAIAVRSIQWSYAIFWSISSRQPGVLEWGDGYYNGDIKTRKTVQAVEFNADQLGLQRSEQLKELYESLSVAETNPQARRPSAALSPEDLTDTEWYYLVCMSFVFNIGQGLPGRTLANGQPIWLCNAHCADSKVFSRSLLAKVFSCFFLSSSSSSSLVFPSASIQTVVCFPFLGGVVELGVTELVLEDPTLIQHIKTTFLENPYPTVPKISNYASENTRTDKDLVLPKLNHNKLDTNLDPAVECREVNLCAPNNNSSGFLPNQQTEESVMVEGLNGGVSQVQSWQFMDDEVSNCVQNSSNSSDSISQTFVTPEKDSCLLDLQECNHTKLTSLDLPNDDIHYHSVVSSLLKSSHQLVLGPYFQKCHKESSFIGWKKGPVGIRKHRSGTPQRVLKKVLFEVARMHGGRLIESRQDYSKEDGLWRPQVDEIGTTNLFSGRRRRENINERYSVLGSLIPSTSKVDKVSILDATIEYLKELERRVDDLECCREVTDLDAMTRKKPQDTTERTSDNYGNSTGIGKRPSINKRKACDIDGGEPEINLVQLKDSSTDNVTVKMTQKDVLIEIRCPWRECLLLEIMDAISNFHLDSHSVQSSNVDGILSLNIKSKFKGSTVASTGMIIQALQRVICKC

SEQ ID NO: 19158 - protein, 98 aa, Bartonella henselae str. Houston-1
MANIQFRPLHDRVVVRRVESENKTAGGIIIPDTAKEKPQEGEVIAVGNGALDDNGKRVPLEVKTGDRILFGKWSGTEVKINGEDLLIMKESDIMGILG

SEQ ID NO: 19159 - protein, 402 aa, Archaeoglobus fulgidus DSM 4304
MRALVVELRLWKAALSLLLGKVTKSVYYSPLSLLKYYKNYPEPALPDEDWVKVKTRLCGICGSDLRIITLQESFYLAPLTSFPFIPGHEVVGEVVEVGKEADAQEGERVVINTALSCRVRGFDDCDACRKGHFAACHNVDRGRISPGIFTGTCRDTGGGWAEYFVAHESQLVRVPEGIRDENAVFAEPLTIGIHSALRSFPDDGEVVAIVGCGVIGICTIIALRHLGFRGEIIGIDISERQAELARKFGADGVVTENPVERIAEMTGGRVYRPPRDKPMFIGGGVDVAFECTGIPQTVDTALRITKPLGRVVIAGTVAKMGVDWAPVFAKELSVLGTFGCGIEEVNGEKRDAFDIAFEILKKVDLSSLLTHRFTIEDYKKALRAAIEKGKSGAVKVAFDFTL

SEQ ID NO: 19160 - protein, 629 aa, Cornus capitata
  misc_feature (326)..(326): Xaa can be any naturally occurring amino acid
  unsure (1)..(629): unsure at all Xaa locations
MASSGEQNQVELLQNLKNRLAIAVKSIQWSYAIFWSISSRQPGVLEWGDGYYNGDIKTRKTVQAVEFNADQLGLRRSEQLKELYESLSVAETNPQARRPSAALSPEDLTDTEWYYLVCMSFVFNIGQGLPGRTLANGQPIWLCNAHCADSKVFSRSLLAKSASIQTVVCFPFLGGVVELGVTELVLEDPTFIQHIKTTFLENPYPTVPKISNYASENKRTDKDLVLPKLNHNKIDSNLDPDVECGEVNLCAPNNNSSGFLPNQQTEESVMVEGLNGGVSQVQSWQFMDDEFSNCVQNSTNSSESISRTSENPEKDCCLTDLPECNXTKLTSLDLPNDDIHYHSVVSSLLKNSHQLVLGPYFQKCHKESSFTGWKKGPVGIRKHRSGTPQRVLKKVLFEVARMHGGRLIKSRKDNSREDGLWRPQVDEIGTTNLFSERRRRENINERYSVLGSLIPSTSKVDKVSILDGTIEYLKELERRVDDLECCREVTDLDAMTRKKPQDTAERTSDNYGNSTGIGKRPSINKRKACDIDEGEPEINLVQLKDSSTDNVTVKMTEKDVLIEIRCPWRECLLLEIMDAISNFHLDSHSVQSSNVDGILSLNIKSKFKGSTVASTGMIIQALQRVICKC

SEQ ID NO: 19161 - protein, 500 aa, Bacillus cereus ATCC 10987
MKYVIGIDLGTSAVKTLLVNSKGVLCAEVSKSYPLIHEKTGYSEQNPEEWVQQTTSALQELVFESQIRPEDIEGISYSGQMHGLVLLDKNNNLLRNAILWNDTRTTEQCEQIYEMIDEKSLLEITKNQALEGFTLPKLLWVKQHEPEIFKKVAVFMLPKDYLRFRMTGFIHSEYSDAAGTLLLNISEKTWSKELCEIVGIDINICPPLVESNECVGTVNDEFAQKTGLSSLTKVFAGGADNACGAIGSGILSSGKTLCSIGTSGVVLSYEERNNREFNGKVHYFNHGKENAFYTMGVTLSAGHSLNWFRDNFAENETFEELLNDITNVPIGSNGLLFTPYLVGERTPHADANIRGSFIGLDSSHKKRDFVRAIIEGITFSLNESIEIFRESGKNIDAIVSIGGGAKNDTWLQIQADIFNAKIIKLSTEQGPALGAAILAAYGAGWYKSLDECANLFISSSKTYSPISENVRLYARLYCLYKDIYGQTKKLNKGLNEFRKN

SEQ ID NO: 19162 - protein, 634 aa, Cornus oblonga
MASSGEQNQVELLENLKNRLAIAVRSIQWSYAIFWSISSRQPGVLEWGDGYYNGDIKTRKTVQAVEFNADQLELQRSEQLKELYESLSVAETNPHARRPSAALSPEDLTDTEWYYLVCMSFVFNIGQGLPGRTLANGQPIWLCNAHYADSKVFSRSLLAKSASIQTVVCFPFLGGVVELGVTELVLEDPTLIQHIKTSFLENPYPIAPNISNYASENVRTDKDLVRAKLNHNKLDTNLDPAVLCEEVNVCAPNNNSNGFLPNPQTEELDMVEGLNGGTSQAKNCRLMDEEIISNCVHNSMNSSDCISQTIVSPDKIVSNGGSLPSLQECNQMRLTSLDFLNDNIHYQSALSTLLKSSQQLILGPYIQNRNKESSFVSWKKGLVAGQKRPCGTPQRVLKKVLYEVARMHGGWLVESREGNDRREGAQRPEVGEIDTSRVLSERLRREKINERLLVLGSLVPSASKVDKVSVLDNTIEYLKELERRVEELESCKEEAELEAITRRKPQDTAERTSDNHGNNKIGNGKKPLINKRKACDIGESEPEINRVPVNHSSTDNVTVSVVEEDVLIEIKCPWKECLLIKIVDAISNFHLDSHSVQSSSIDGILSLSIRSKFKGSTVASTGMIIQALQRVICK

SEQ ID NO: 19163 - protein, 370 aa, Staphylococcus aureus subsp. aureus MRSA252
MAPKLQAQFDAVKVLNDTQSKFEMVQILDENGNVVNEDLVPDLTDEQLVELMERMVWTRILDQRSISLNRQGRLGFYAPTAGQEASQLASQYALEKEDYILPGYRDVPQIIWHGLPLTEAFLFSRGHFKGNQFPEGVNALSPQIIIGAQYIQTAGVAFALKKRGKNAVAITYTGDGGSSQGDFYEGINFAAAYKAPAIFVIQNNNYAISTPRSKQTAAETLAQKAIAVGIPGIQVDGMDALAVYQATKEARDRAVAGEGPTLIETMTYRYGPHTMAGDDPTRYRTSDEDAEWEKKDPLVRFRKFLENKGLWNEDKENEVIERAKADIKAAIKEADNTEKQTVTSLMEIMYEDMPQNLAEQYEIYKEKESK

SEQ ID NO: 19164 - protein, 493 aa, Campylobacter upsaliensis RM3195
MRINLAQNYCEVKMLKKTKIVATVGPASESEEVLRQMIINGVNVFRLNFSHGTHEYHKENLEKIRKVASELNTRIGILQDISGPKIRTGELKEPFDLKKGDRLDFYRSKILGERVDGAHYKLSINQSDILNMLKIGEYVYLYDGSIRAKIVSVNENFIQSVVENDGFLNSNKGINFPNTRINIDVITQKDKRDLLWGIENGVDFLAISFVQNAHDIDEVREILAQNGAKIAIFAKIEKFDAVENIDEIIASSDGIMVARGDLGIEVPYYKVPNIQKSIIQKANNASKPVITATQMLFSLAKAKTATRAEISDVANAVLDGTDAVMLSEESAVGIDPANAVDVMCKTIVEVEKNYPYNKFNRFDYLDDTDKIMQSSTHLAADLNADAIFALTSSGKSAIKIARYRPDIEIIAIAHSEKTLNFLSIVWGVNPAILVNKSDELTKLLKDAVRSSVERGFMSEDKCYILSAGFPTGVEGTSNLIRILKKEQIAYYLR

SEQ ID NO: 19165 - protein, 630 aa, Cornus chinensis
MASSGEQNQVELLENLKNRLAIAVRSIQWSYAIFWSISSRQPGVLEWGDGYYNGDIKTRKTVQAVEFDADQLGLQRSEQLKELYESLSVAETNPQARRPSAALSPGDLTGTEWYYLVCMSFVFNVGQGLPGRTLANGQPIWLCNAHSADSKVFCRSLLAKSASIQTVVCFPFLGGVVELGVTELVLEDPTLIPHIKTSLLENPYPIVPKTSNYASESARTDKDLVLAKLNHNKLDTNLDPAVECKGVNICAPNNNSTGFLPNQQTEESVMVEGLNGGVCQVQSWQFMDDEISNCVQNSTNSSDSISQILENPEKDSCLPDLQVCNHTKLTSLDLPNDDIHYHGVVSTLLKSSHQLILGPYFQKCNKESSFIGWKKGPVGIRKHKSGTPQRVLKKVLFEVAQMHGGCLIESRQENGRKDRLWRPEVDEIDTTNLFPERRRREKINERYLVLGSLISATSKVDKVSILDGTIEYLKDLETRVEDLECCREVTDLEARTGRIPQDTAERTSDNYENNRIGIGKKPLINKRKACDIDEAEPEINLVHLKDSSTDDVSVRIIDKDVFIEIRCPWRERLLLEIMDAISNFHLDSHSVQSSNIDGILSLSIKSKFKGSTVASTGMIIQALQRIIWKC

SEQ ID NO: 19166 - protein, 401 aa, Xanthomonas axonopodis pv. citri str. 306
MSKQIQEAYIVAATRTPVGKAPKGVFRNTRPDDMLAHVLRAVVAQAPGIDTSRIDDAIIGCAMPEGEQGMNVARIGVLLAGLPNSVAGQTINRFCSSGIQAIAMAADQIRLGNADLMLAGGTESMSMVPMMGNKVAMSPSVFADDHVAIAYGMGITAEKVAEEWKVSREDQDAFALASHQKAIAAIAAGEFRDEISPYEIHSHQPDLAGNVITLRKKLVDTDEGPRPDSSLEGLAKLRPVFRNGQFGGSVTAGNSSQMSDGAGAVLLASEQAIRDYGLTPLARFVSFSVAGVRPEVMGIGPIAAIPKALKQAGLTKDQLDWIELNEAFAAQALAVIRDSELDPSKVNPLGGAIALGHPLGATGAIRAATLVHGLRRRQQKYGMVTMCIGTGMGAAGIIEAL

SEQ ID NO: 19167 - protein, 468 aa, Staphylococcus aureus subsp. aureus MRSA252
MVVGDFPIETDTIVIGAGPGGYVAAIRAAQLGQKVTIVEKGNLGGVCLNVGCIPSKALLHASHRFVEAQHSENLGVIAESVSLNFQKVQEFKSSVVNKLTGGVEGLLKGNKVNIVKGEAYFVDNNSLRVMDEKSAQTYNFKNAIIATGSRPIEIPNFKFGKRVIDSTGALNLQEVPGKLVVVGGGYIGSELGTAFANFGSEVTILEGAKDILGGFEKQMTQPVKKGMKEKGVEIVTEAMAKSAEETDNGVKVTYEAKGEEKTIEADYVLVTVGRRPNTDELGLEELGVKFADRGLLEVDKQSRTSISNIYAIGDIVPGLPLAHKASYEAKVAAEAIDGQAAEVDYIGMPAVCFTEPELATVGYSEAQAKEEGLAIKASKFPYAANGRALSLDDTNGFVKLITLKEDDTLIGAQVVGTGASDIISELGLAIEAGMNAEDIALTIHAHPTLGEMTMEAAEKAIGYPIHTM

SEQ ID NO: 19168 - protein, 592 aa, Solanum tuberosum
KPPHTDVGCLPTVNAVTIHNPAVPFNSPESTLGRHLARRLVQVGVTDVFGVPGDFNLTLLDHLIDEPGLNFVGCCNELNAGYAADGYARARGVGACVVTFTVGGLSVLNAIAGAYSENLPLICIVGGPNSNDYGTNRILHHTIGLPDFTQELRCFQTVTCYQAVVNNLEDAHELIDTAISTSLKESKPVYISISCNLPGIPHPTFSREPVPFFISPRLSNKMGLEAAVEAAAEFLNKAVKPVIVGGPKMRVAKACDAFVELADASGYAVAVMPSAKGMVPEHHPHFIGTYWGAVSTAFCAEIVESADAYLFAGPIFNDYSSVGYSLLLKREKAIIIQPDRVTVGNGPTFGCILMKDFLAALGKRLKHNPTAYENYRRIYVPEGHPLKCEPKESLRVNVLFEHIQRMLSGDTAVIAETGDSWFNCQKLKLPKDCGYEFQMQYGSIGWSVGATLGYAQAAKEKRVIAFIGDGSFQVTAQDISTMLQCGQRTIIFLINNGGYTIEVEIHDGPYNVIKNWNYTGLVDAIHNGQGKCWTTKVRCEEELVEAIETATETKKDSLCFIEVIVHKDDTSKELLEWGSRVSAANSRPPNPQ

SEQ ID NO: 19169 - protein, 635 aa, Cornus alternifolia
MASSGEQNQVELLENLKNRLAIAVRSIQWSYAIFWSISSRQPGVLEWGDGYYNGDIKTRKTVQAVEFNADQLGLQRSEQLKELYESLSVAETNPQARRPSAALSPEDLTDTEWYYLVCMSFVFNIGQGLPGRTLANGQPIWLCNAHYADSKVFSRSLLAKSASIQTVVCFPFLGGVVELGVTELVVEDPTLIQHIKTSFLENPYPTVPKISNYVSENARTDKDLVQAKLNHNKLDTNLDLAVECEEVNVCVPNNNSNGFLPNQQTDESVMVEGLNGGASQAKNCPLTDEEIISNCVHNSMNSSDCISQTIVSPDKIVSNGGSLPSLQECNQMRLTSLDFLNDNIHYQSVPSTLLKSSQQLILGPSIQSRNKESSFASWKKGLVAGQKRPCGTPQRVLKKVLFEVARMHGGWLVESREGHDRREGAQRPEVGEIDTSRVLSERLRSEKINEKLLVLGSLVPSASKVDKVSVLDNTIDYLKELERRVEELESCREQAELEAITRRKPQDTAERTSDNHGNNKIGNGKKPLITKRKACDIGESEPEISRVPVNHSSTDNVTVSVVEEDVLIEIKCPWEECSLIKIVDAISNLSLDSHSVQSSNIDGILSLSIRSKFKGSTVTSTGMIIQALQRVICKC

SEQ ID NO: 19170 - protein, 589 aa, GIBBERELLA ZEAE PH-1
MSSMFKKKGGPAFKPKIPAARRPAASVPSQPPKPSPVSAPPPVSEGSETQSTTQESSASSSTNETVTAPIEPKPQDSHKHDGQPPTPPSTEPEPAKPDDVAVTQEISQGKSPGESQHGANTEDVSVHTEKTAAPVATAKAQESATTQTQPTSEHQDQSPGSEEPSLPPNETQSSDIEAAASPVLQTPTPDDSEGPSGTEPSTTPSHLTDGPDESQPRPSEEVQKATKPTRKPRTRKQATQAAQDEAGAEEGARPKKRQRKTAEDGATPKQPRKRKAATESGTNTPKTRRARSMTPEDSETQLVDLQKLKMADLTKDLHIGKKFSRHDELRERERRARMKNKIGTDVERDSSATPETSGQVEKSGSPAASPAPPAPAPAAPSGPQFRIVDGQIVIDQSSLSVDRHARAAAAAGDMETVEENDFTRLITSNSFMNTSKLKGPNIWTEDETELFYRGLCMFGTDFEMISKMFPGKQRRNVKLKFNREERHCPRRINAALIGEKTVKMNIDEYKAFTGSEFEPVEAIEAEQRKIQEEYEAEEKRRADEQAEAMRKKREELFKDDEDGDAKKKKKKKKQTIIYGLNGEPIVQEE

SEQ ID NO: 19171 - protein, 806 aa, Nostoc sp. PCC 7120
MSELMQAILDSEEKHDLRGFISELRQQDKNYLLRNDILNVYAEYCSKCQKPETSYKFSNLSKLIYYTQEIIQEDSNFCFIIRPKIAAQEVYRLTADLDVEPMTVQELLDLRDRLVNKFHPYEGDILELDFGPFYDYTPTIRDPKNIGKGVQYLNRYLSSKLFQDSQQWLESLFNFLRLHNYNGIQLLINHQIQSQQQLSQQVKNALNFVSDRPNDEPYEQFRLQLQTMGFEPGWGNTASRVRDTLNILDELIDSPDPQTLEAFISRIPMIFRIVLVSAHGWFGQEGVLGRPDTGGQVVYVLDQAKNLEKQLQEDAILAGLEVLNVQPKVIILTRLIPNSDGTLCNQRLEKVYGTENAWILRVPLREFNPKMTQNWISRFEFWPYLETFAIDSERELLAEFQGRPDLIVGNYTDGNLVAFLLTRRMKVTQCNIAHALEKSKYLFSNLYWQDLEEKYHFSLQFTADLIAMNAANFVISSTYQEIVGTPDSIGQYESYKCFTMPELYHVVNGIELFSPKFNVVPPGVNENSYFPYTQTQNRIESDRDRLEEMLFTLEDSSQIFGKLDDPNKRPIFSMARLDRIKNLTGLAECFGQSQELQERCNLILVAGKLRIEESEDNEEKDEIVKLYRIIDEYNLHGKIRWLGVRLSKNDSGEIYRVICDRQGIFVQPALFEAFGLTILESMISGLPTFATQFGGPLEIIQDKINGFYINPTHLEETATKILDFVTKCEQNPNYWNIISEKAIDRVYSTYTWKIHTTKLLTLARIYGFWNFTSKEKREDLLRYLESLFYLIYKPRAQQLLEQHKYR

SEQ ID NO: 19172 - protein, 372 aa, Ralstonia eutropha JMP134
MQSVIAQAKRIVVKVGSSLVTNDGKGLDYDAIARWAAQIAKLRSIGKEVVLVSSGAIAEGMQRLGWVRRPREIHELQAAAAVGQMGLAQVYESQFGRYGIRTAQVLLTHADLADRERYLNARSTLLTLLSLGVVPIINENDTVVTDEIKFGDNDTLGALVTNLIEGDALVILTDQRGLYTADPRKDPNAEFVDEALAGTPELEQMAGGAGTSIGRGGMLTKILAAKRAAKSGAHTTIASGREANVLERLAAGEAIGTQLLAPTGRLTARKQWMADHLQLRGRVVIDAGAVEKLTSGGKSLLPIGVVEVQGEFARGEVIACVGADGREVARGITNYSSAEARLIARKPSSEIESVLGHLNEPELIHRDNLVLV

SEQ ID NO: 19173 - protein, 470 aa, Geobacillus kaustophilus HTA426
MQPVQELKRELKSRHLFMIALGGVIGTGLFLGSGYTIHEAGPGGAVVAYLFGGLVMYLTMLSLGELAVRIPDAGSYQTYATKFISPAVGYCIGWLSWLNWSVTVGIELLTVSILMKRWFPDVPTWVFCAVFALLLFLINALSVKGFGEVEFWFSSIKVLTVIAFIVLGLAAMFGVIHMKNGQPAPFFSNFTDHGGLFPNGFWAIFTTMILVNFSFQGTELVGVAAGESREPEKTVPVALRNTVWRILIFFILAIFVLAGLFPWEKAGVVESPFVEVFDNIGIPYAADIMNFVIITAVLSVANSGLYATSRVLWSMSRQGMVTPFFSKLSKRGVPINALIASIAIGCLSLLCSVYAEDTVYVWLTAIAGFGAVTVWASIALSSYFGRKAFLREGGDVRDLKYRTPLYPFVPLAAFALNMATIIGLAFIPDQRIALYCGIPFLLACYGYYHLVAKKRVQPLAAEEGELKAAK

SEQ ID NO: 19174 - protein, 383 aa, Arabidopsis thaliana
MGKIEEYKPVMAMTMIQLCYAGVTLFARATLVHGLSPRVFILYRQAFATIFIFPFLYLSRRKSKIAISSLDLKSFSLIFLVSLIGITINQNLYLEGLYLTSSSMGSAVGNIIPAITFLISFLAGYEKLNLRDIRGLAKIAGTILCVAGAISMTLLRGPKILNSESALPIAKSVLGHLKDQNTWLIGCLFLFSSTLCWSFWLILQVPISAYYPDNLSLSAWMCLFGTIQCAVVTFFLEKDPNAWILHSYSEFATCLYAGIGASALSFTVQAWAIAKRGPVFSALFNPLCTVIVTILAALFFHEEIYTGSLIGGLGVILGLYTVLWGKAKDVMMNQDQRDNDQKSEVKIHIEDSSNTTICNKDLKNPLLSKHKSTEEIQTHQQLY

SEQ ID NO: 19175 - protein, 467 aa, Methylobacterium extorquens
MSYDLIVIGTGPGGYVCAIRAAQLGLKTAVVEKRATHGGTCLNVGCIPSKALLHASEAFEEANKHFSELGIDVGTPKLDLKKMQSFKQSGVDGNTKGVEFLLKKNKVDTYHGRGRIAGAGRVEVISDDGGNQLLETKNIVIATGSDVTRLPGVEIDEKTVVSSTGALELAEVPKRLVVIGAGVIGLELGSVWRRLGAEVTVIEYLDRVLPGMDGEVGKQFQRILAKQGMVFKLSTKVTGVETGKKGRATVTVEPAQGGEPEKLEADVVLVAIGRVPYTEGLGLETVGVATDDKGRIEVDSHYATNVTGIYAIGDVIAGPMLAHKAEDEGVAVAEILAGQSGHVNYGVIPNVVYTFPEVASVGKTEEELKKDGIAYNVGKFPFTANGRAKANGTTDGFVKILADAQTDRVLGVHIVGADAGNLIAEVAVAMEFAASAEDIARTCHAHPTLTEAIKEAALAVDKRAIHV

SEQ ID NO: 19176 - protein, 399 aa, Geobacillus kaustophilus HTA426
MTTKSQQLIEQTERYGARNYHPLPIVISEAEGVWVKDPEGNRYMDMLSAYSAVNQGHRHPKIIEALKKQADRVTLTSRAFHNDQLGPWYEKVCRLTKKEMVLPMNTGAEAVETALKAARRWAYDVKGVPDNQAEIIVCEGNFHGRTLAAVSLSSEPAYKRGFGPLLSGVKIIPYGDIEALKAAITPNTAAFLVEPIQGEAGIRIPPQGFLKAAYDVCKANNVLFIADEIQTGLGRTGKLFACDWEEVVPDMYILGKALGGGVFPISCVVANRDILSVFEPGSHGSTFGGNPLACAVSIAALEVIEEERLAERSLELGEYFLSKLKQIRNDDIKEIRGRGLFIGVELHVPARPYCEALKEQGLLCKETHETVIRFAPPLIITKEELDWAFERIANVLSRP

SEQ ID NO: 19177 - protein, 308 aa, Triticum aestivum
  misc_feature (74)..(74): Xaa can be any naturally occurring amino acid
  misc_feature (106)..(106): Xaa can be any naturally occurring amino acid
  unsure (1)..(308): unsure at all Xaa locations
PNITSLYKKAGWYRSGIPGISSTHASAPSYSNQTTSSTPPSSPPSSPSPSCYSPVHVLLLPMSPPLELDYIGLXRPPPAAAPDDDLKGTELRLGLPGCESPGPPAXVAATTTLDLLPAKGAKRGFSDEVVPPAPVSAAGKDKDASGDEKDKKVAAPPQPAAKAQVVGWPPVRSYRKSTMATTTNQLKSSKEDSDTKQGQEFLYVKVSMDGAPYLRKVDLKTYKNYKGMVVGLGKMFIGFRTGKDGASENRKDGEYVMTYEDKDGDWMLVGDVPWEMFTESCRRIRVMKSSDVIGLGVTRAGVKSKNKN

SEQ ID NO: 19178 - protein, 435 aa, Geobacillus kaustophilus HTA426
MGVRTDCECLVPSINRVKEANETMEENMFLSTQRVIKEALAKLGYGEEMYELLKEPLRVLTVRIPVRMDDGTVKVFTGYRAQHSDAVGPTKGGIRFHPDVTEEEVKALSMWMTIKAGIVGLPYGGGKGGIVCDPRNMSMGELERLSRGYVRAISQIVGPSKDIPAPDVFTNSQIMAWMMDEYSRIREFDSPGFITGKPLVLGGSQGREKATALGVTICIEEAAKKAGIELQGARVIIQGFGNAGSFLAKFLHEAGARVIGISDAYGALYDPNGLDIPYLLDRRDSFGTVTTLFENVITNQELLEKECDILVPAAVANQITRDNAANIRAKIVVEAANGPTTLEATKILTERGVLLVPDVLASAGGVTVSYFEWVQNNQGYYWTEEEVVEKLKEKLTSAFHRVYELAESRRVDMRMAAYMIGLRQTAEAARYRGWV

SEQ ID NO: 19179 - protein, 541 aa, Streptomyces coelicolor A3(2)
MAKILKFDEDARRALERGVNKLADTVKVTIGPKGRNVVIDKKFGAPTITNDGVTIAREVEVEDPYENLGAQLVKEVATKTNDIAGDGTTTATVLAQALVREGLKNVAAGASPALLKKGIDAAVAAVSEDLLATARPIDEKSDIAAVAALSAQDQQVGELIAEAMDKVGKDGVITVEESNTFGLELDFTEGMAFDKGYLSPYFVTDQERMEAVLDDPYILINQGKISSIADLLPLLEKVIQANASKPLLIIAEDLEGEALSTLVVNKIRGTFNAVAVKAPGFGDRRKAMLQDMAVLTGATVISEEVGLKLDQVGLEVLGTARRITVTKDDTTIVDGAGKRDEVQGRIAQIKAEIENTDSDWDREKLQERLAKLAGGVCVIKVGAATEVELKERKHRLEDAISATRAAVEEGIVSGGGSALVHAVKVLEGNLGKTGDEATGVAVVRRAAVEPLRWIAENAGLEGYVITSKVADLDKGQGFNAATGEYGDLVKAGVIDPVKVTRSALENAASIASLLLTTETLVVEKKEEEEPAAGGHSHGHSH

SEQ ID NO: 19180 - protein, 191 aa, Saccharophagus degradans 2-40
MAKSIGTLLAVSSVVAIAAVFSQVGLVSQTIADEINAEPDMSMTVAQAQQLVARGENLTSIPKHIWRQLLTKHEYNIMWEKGTERAFTGDLLEVQQPGVFVTAGCKLPVFKTEHKFKSGTGWPSFWDVVDKNNIILKDDSSWGMRRIEVLSACGEHLGHVFDDGPEPTGLRYCINSAALDFIAADTAEPEE

SEQ ID NO: 19181 - protein, 537 aa, Zea mays
MGNCFTRKYDEHEHEIPITTDPPRRTSMPVYRPPRPRDDKAQEVPLYSGSDRRPSYRPPRLPVFPSGPGSTGRRRPPTGQTGTVLDRHTVDVRTLFHLERKLGSGQFGTTYLCTERATGKKYACKSVSKRKLVRRADIADMRREITILQHLSGQPNVAEFKGAFEDRDDVHVVMELCSGGELFDRITAKGSYSERQAAAVCRDVLTVVNVCHFMGVMHRDLKPENFLLASPADDAPLKAIDFGLSVFIEEGKVYKDVVGSAYYVAPEVLRRNYGREIDVWSAGVILYILLCGSPPFWEETQKGIFDAILADELDLVSSPWPSISESAKDLIRKMLNKDPQRRITASQALEHPWLKGGAPDRPIDSAVLSRMKQFKAMNKLKQLALKVIAENLTEDEIKGLKQMFNNMDTDRSGTITVEELKDGLAKLGSKISEAEVQKLMEAVDVDKSGSIDYTEFLTAMMNRHKLEKEEDLFLAFQHFDKDDSGYITRDELEQAMAEYGVGDEASIKEVLDEVDKDKDGRIDYEEFVEMMRKGSYT

SEQ ID NO: 19182 - protein, 228 aa, Zea mays
MAGADVDVGTELRLGLPGGGAAAAKKDTIDLKLKLPTAGMEEAAAAARPEPAAEKAKRPAEAPAADAEKPPAPKAQAVGWPPVRSYRRNAMTTVVQAVRSKKEEEPEKQQQPAAANAFVKVSMDGAPYLRKVDLKTYSSYKDLSAALKKMFGTFTASGNSMNEGRLVDPAGDADDVVTTYEDKDGDWMLVGDVPWEMFVESCKRLRIMKSSEAIGLAPRTKDKCKNKS

SEQ ID NO: 19183 - protein, 492 aa, Shewanella sp. MR-4
MANYFNSLNLRQQLEQLGQCRFMDRSEFSDGCNYIKDWNIVILGCGAQGLNQGLNMRDSGLNIAYALRPEAIAQKRASWQKATDNGFKVGTFEELIPTADLVLNLTPDKQHSNVVSAVMPLMKQGATLSYSHGFNIVEEGMQIRPDITVVMVAPKCPGTEVREEYKRGFGVPTLIAVHPENDPNGDGLEIAKAYASATGGDRAGVLQSSFIAEVKSDLMGEQTILCGMLQTGAILGYDKMVADGVEPGYAAKLIQQGWETVTEALKHGGITNMMDRLSNPAKIKAFEIAEDLKEILQPLFEKHMDDIISGEFSRTMMQDWANDDANLLRWRAETAETGFENAPVSSEHIDEQTYFDKGIFLVAMIKAGVELAFDTMVSAGIVEESAYYESLHETPLIANTIARKRLYEMNVVISDTAEYGCYLFNHAAVPMLRDYVNAMSPEYLGAGLKDSSNNVDNLQLIAINDAIRHTSVEYIGAELRGYMTDMKSIVGA

SEQ ID NO: 19184 - protein, 263 aa, Saccharophagus degradans 2-40
MRVAVIQMVSGEQTADNLQQAQALVKSAKEQGAQLAVLPENFLTYGQSAPDLESIRNTYLPALADLAASNSIALVAGTLPFREALGSKPYASSFVFNSLGEQLFRYDKIHLFDANVADATGSYRESDHFAKGSQLGLVDACDTRLGLSVCYDLRFPEYYRLLAQQGAKVVCVPSAFTEVTGAAHWEVLLRARAIENQCFILAANQGGVHPCGRSTWGHSMIVNPWGEVMSKLTSGPGCLVQDLDLASIDSLQVNMPVLSHRVF

SEQ ID NO: 19185 - protein, 1064 aa, Burkholderia fungorum LB400
MTSSGPARPARRNTASPNAQAAEAAKPAASATAAAEPTSAKRAGKSAQAAHAAKAGKAAKTSTPVKTDKAVKAVRSDKTTQAATTAQAQKPAKAGSSKIKIVTAAPQAANASARQPASAQAPAPKANGRTREDKDHPLFQDIRYLGRLLGDVLREQEGDAVFDVVETIRQTAVRFRREDDSAAAQTLDKKLRSLSPEQTVSVVRAFSYFSHLANIAEDRHRNRRHRIHELAGSTSQPGTIAHSLERLVEAGAAATPVLQEFFNNALIVPVLTAHPTEVQRKSILDAQHDVARLLAERDQQLTDRERAHNEAMLRARVTSLWQTRMLRDSRLSVADEIENALSYYRATFLEEIPALYADIEEALAEHGLEARLPPFFQMGSWIGGDRDGNPNVTAETLENAITRQAAVIFEHYMEQVHKLGAELSVSNLLAGASDALKELAAVSPDQSPHRTDEPYRRALIGMYTRLAASARVRLGEGSVPVRSAGRGAAPVRAKPYADSAEFVRDLHVLIDSLAEHHGAPLAAPRLSPLARAAEVFGFHLASIDLRQSSDVHEAVITELLRRAGVEENYAELPEADKLNVLLSELAQPRPLRLPFAEYSDLVKSELGVLEEARVTREKFGARAVRNYIISHTETVSDLVEVMLLQKETGLLRGCLGNANDPAQAGLMVIPLFETIPDLRNAPHIMRDLIALPGVDALIEHQGNEQEVMLGYSDSNKDGGFLTSNWELYRAELALVSLFNERGVTLRLFHGRGGTVGRGGGPTYQAILSQPPGTVDGQIRLTEQGEVIASKFGNPEIGRRNLETVVAATLEASLLPHGIAPAQLPAFEETMQQLSDAAMASYRALVYETPGFKEYFFESTPISEIAELNIGSRPASRKLQDPKQRKIEDLRAIPWGFSWGQCRLLLTGWYGFGSAVAAHLDSAPSDAERTRRLALLKKMHKTWPFFANLLSNMDMVLAKTDLAVASRYAALVSDKKLRKHVFERIVAEWERTSKVLSEITGKSERLAENPLLARSIKNRFPYLDPLNHLQVELLKRHRAGDTNARVRRGIHLSINGIAAGLRNTG

SEQ ID NO: 19186 - protein, 329 aa, Nostoc punctiforme PCC 73102
MGKKYDVYGVGNALVDIEYEVSPELLQELKIDKGVMTLLDEDSQNHILENLKNLHCHKSCGGSAANTMVAISQLGGKAFYSCKVANDEFGDFYIEDLLNSQVDTNLKNGDRQSGITGKCLVLVTPDADRTMNTFLGITEKFSTQELVSSALADSEYIYIEGYLVTSPTAKEAAIKAREIAEKAGVKTAMSLSDYNMVKFFKDGLLDIIGPGLDLIFANESEALELADTQDFQVAVDKLKTLSKKFAITRGSKGSVVFDGQELIEIAAPQVKAIDTVGAGDMYAGAFLYGITQSMSYEEAGKLASTAASKIVTSYGPRLKTEELKALVSA

SEQ ID NO: 19187 - protein, 205 aa, Malus x domestica
GHIKDKRIAAVQALSGTGACRLFADFQKRFRPESQIYIPVPTWANHHNIWRDAHVPQKTFHYYHPETKGLDFAGLVDDIKNAPNGSFFLLHACAYNPTGVDPSEEQWKEISKLIKEKGHFPFLDMAYQGFASGDPERDTKAIRIFLEDGHLIGIAQSYAKNMGLYGQRVGCLSVLCEDEKQAVAVKSQLQMLARPMYSTHLFMER

SEQ ID NO: 19188 - protein, 585 aa, Listeria monocytogenes str. 4b F2365
MKKTKIVCTIGPASESVDTLVQLIEAGMNVARLNFSHGDFEEHGARIVNIREASKKTGKQVAILLDTKGPEIRTNDMVGGKLEFQTGDVVRVSMTPVEGTKEKFSVTYGELYDDVEIGSSILLDDGLIGLEVIEKDEANRELVTKVLNPGVLKNKKGVNVPNVSINLPGITEKDAADIRFGLEQGIDFIAASFVRRATDVLEITKILEEHNATHVQIIPKIENQEGVDNIDEILQVSQGLMVARGDLGVEIPAEEVPIVQKELIRKCNKLGKPVITATQMLDSMQRNPRPTRAEASDVANAIFDGTDAIMLSGETAAGDYPVEAVKMMAKIAVRTEEVLVAQDKFALKLHENTDMTEAIGQAVGHTAKNLNVQTIVAATQSGHTARMISKYRPKSHIVAVTFNEHVYRGLALSWGVYPRLATPVSNTDEMFDLAVKESLASGVAKQGDLIIITAGVPVTESGTTNVMKIQLIGEKVVKGQGIGSKSVIGKAIVAKSNAEALEKAEEGGILIVKTTDKEMLPAFEKSAAVVVEEGGLTSHAAVVGINLGIPVIVGAKDATSLVKDGEIITVDSRQGVVYNGKTATH

SEQ ID NO: 19189 - protein, 106 aa, Malus x domestica
TDVPAPDMGTNAQTMAWILDEYSKFHGHSPAVVTGKPIDLGGSLGREAATGRGVVFGTEALLAEYGKSCKGLTFVIQGFGNVGSWAAKLIHEKGGKVIAVSDITGA

SEQ ID NO: 19190 - protein, 538 aa, Triticum aestivum
  misc_feature (32)..(32): Xaa can be any naturally occurring amino acid
  unsure (1)..(538): unsure at all Xaa locations
MESEMSDAPPAAAAVAEPLAAVAEEGEGEGEXSTLTMERVAAAKKFIGNHYRSHMKNIQERKERRFRLERQLATSEVPREQQINLIKDLERKETEYMRLKRHKICVDDFELLTIIGRGAFGEVRLCREKTSGNIYAMKKLKKSDMVIRGQVEHVRAERNLMAEVASHCTVKLYYSFQDTEYLYLIMEYLPGGDIMTLLMREDTLTEPVARFYIAETILAIESIHKHNYIHRDIKPDNLLLDKNGHMKLSDFGLCKPIDCSKLSTLSEDEPMGDDNLKESMDVDSSLSETANGRRWRSQHEQLQHWQMNRRKLAFSTVGTPDYIAPEVLLKKGYGMECDWWSLGAIMYEMLVGYPPFYSDDPITTCRKIVHWRNHVKFPDDSRLSPEARDLICRLLCDVDHRIGGAGADQIKAHPWFRGVAWDKLYEMEAAFKPQVNDELDTQNFMKFDEMDNSPPARTGSGPSRKAKLNSKDLSFVGYTYKNFDAVKGLKHADMQRSSSLTRPSIGAIFGSNGMESSREPNGKDTHMHTFSSGDPMSP

SEQ ID NO: 19191 - protein, 202 aa, Schizosaccharomyces pombe
MATNITFHPGSVTKEERIKFVGHPGMTIWMTGLSASGKSTIACALEQYLLQRGVTTYRLDGDNVRFGLNSDLGFSEQDRNENIRRIGHVAKLFADACVVAVTSFISPYRKDRDQAREFHKKDGLPFIEVYVECPVEVAEQRDPKGLYKRARAGEIKEFTGISAPYEAPISPEIVVSSHTQSIEECVEKIVNYLLEKDLITLK

SEQ ID NO: 19192 - protein, 856 aa, Magnaporthe grisea
MNPGPAPRPPTDRPRLNLTPSQNLPGNMANMSLNSPGMGRGQFGGGSSVYGGSTISLPLSRAASNTDGLGGVAVIKEGWAQVKESKNFINPWKQKYLILRKEALDFHKQEGSKSSYTLYLKDVINVGRVEAAGTIFEVKRQSNGTSTSPGEDDGTVRTLQIKVKSDDDLYEWIDFIYARCPGMGGVSNPTNFSHAVHVGFDPQTGEFVGLPPEWSKLLNSSAITKEDYERNPQAVFEVLDFYSDLTKRNDNPAQYSSLTPTPPAGAMPNKQLGYSTGANVAPPRQMQQQQQPMQRTNNYPNMSGGGLPPNASGARGPSPPDPQQQQRQQMQNMSSNYINQGDPNRDAERQRQAEAAQRQRMMEIEEQNRRDLEAYNASIPQTKKPIAQQEIGGYGGAPSSSADRFNPNRAPPPAPKPTAQQSNLQAQRPAPRAPNAAGGPRPGISQQNSSQNVRDPASQQQQRVPPRNDQSPNAQRYPNGGPAPQPRTNGQPQNQQPSRLPAPVKPLNVAPKPAAQSDAVRAAEAALTAKPPAQERQKDVRMSTMSETEVMAKLKEAVSKDDPNLSYSKQKKIGQGASGSVYVAKVKETAVSPIARELLREQGSRAQVAIKQMDLAHQPRKELIVNEIMVMKDSTHRNIVNYLDAFLRNNYSELWVVMEYMEGGALTDVIDNNPVITEEQISTICLETCQGLQHLHSQSIIHRDIKSDNVLLDARGNVKITDFGFCAKLTESKSKRATMVGTPYWMAPEVVKQKEYGPKVDIWSLGIMAIEMIESEPPYLNEEPLKALYLIATNGTPRLKNPAKLSKELKAFLSVCLCVDVKSRASAKELLEHDFLKHGCPLGSLSDLLAFKKHAK

SEQ ID NO: 19193 - protein, 166 aa, Silphium perfoliatum
MFPMVTEFMNYGQQTVRAARYIGQGFMITLSHANRLPVTIQYPYEKLITSERFRGRIHFEFDKCIACEVCVRVCPIDLPVVDWKLETDIRKKRLLNYSIDFGICIFCGNCVEYCPTNCLSMTEEYELSTYDRHELNYNQIALGRLPMSIMDDYTIRTIFNLPEIKT

SEQ ID NO: 19194 - protein, 898 aa, Haloarcula marismortui ATCC 43049
MTLHAREINQDVRELGALLGEVLEAQTSTEAFDTVETIRNSCIDYRRGDAETRDEVHRALNRLNPETQDIVARAFTTYFELINLAEERERVREIREGSQGDVLADSVEEAVRDLAERGADPEEFEQVLEDVLIQPTFTAHPTEARRKTVKAKLRSVARDIERLDERRLTEREQKRIERNLDAEVTSLWQTPQVRDRRPEVTDEALNVQWYLENVLFDVIDEVYDELEHTLEDVYDEDIDIDTLYEFRSWAGSDRDGNPFVTTDVTEETLERQRETVLPLYRTKLKELSGVLSQDASNIATDALFNERLDRHKSKLPGVAKEAEERYPDEPYRQKLRLMRESVIRVSDVRQGGYESEEELLTDLRVIADSLRENDAEVIAEAHVDPLIRKVETFGFTLASLDLRDHRKMHTDAIAEAVDRQGIDYASMDEDERVEFLTEAILQDNTVIDMEDTEGLSEDATRVLDRFRATADWQNEFGIDAIDTYAISWCEEPSHALEVLFLADQVDIVDLPGYCGFDVVPLLESEYALSGARRIMGTLFENEAYSQALEARDNIQEIMLGYSDSNKENGFLAANWSLYNNQKRLADITDDYDVEMRLFHGRGGSISRGGGPMNDAMLALPNETVTGQIKFTEQGEAIAEKYANHDIAERNLEQMLNAQIRARQNAIEEPVEEIPDEWAEAMETAADAARDEYQDLLETDGFVEFFEQATPITVIENLNMGSRPASRSEDRSVEDLRAIPWVFSWTQARCIIPGWYSISTGLDAYLENGGDMETLQEMYENWPFFRTKLDNASLALARTDLGIAEEYADLADPELRERIYPRIVEEYENTVAKVLEITGQDGLLSRDWLKENLERRNPYVDPLNLLQVRLLKQSHRTETERRTLRLTVQGIAAGMKNTG

SEQ ID NO: 19195 - protein, 294 aa, Arabidopsis thaliana
MKSRVRKSKYTVHRKITSTPFDGFPKIVKIIVTDPCATDSSSDEENDNKSVAPRVKRYVDEIRFCDEDDEPKPARKAKKKSPAAAAENGGDLVKSVVKYRGVRQRPWGKFAAEIRDPSSRTRLWLGTFATAEEAAIGYDRAAIRIKGHNAQTNFLTPPPSPTTEVLPETPVIDLETVSGCDSARESQISLCSPTSVLRFSHNDETEYRTEPTEEQNPFFLPDLFRSGDYFWDSEITPDPLFLDEFHQSLLPNINNNNTVCDKDTNLSDSFPLGVIGDFSSWDVDEFFQDHLLDK

SEQ ID NO: 19196 - protein, 861 aa, Candida albicans SC5314
MSGLEHLQNLSIQPSNRSTQQQQTNSQPQSQYSQSAAKRRSARDYQFGAKIGEGSYSTVYSALDKYTNRTYAIKVLSKRHIVKENKIKYVNIEKTTLNRLGQQHPGIVQLYYTFQDESSLFFVLDFAEYGELLSIIRKFGSLSESVSKFYMCQIIDAVRFIHSKGVIHRDLKPENILVGHDFNLKITDFGAAKLLGNHEEFNGEKIDYNSVDASPEVSDTDRKGSFVGTAEYVSPELLKHNICGFESDIWAIGCILYQFFNGVPPFKGSTEYLTFEKIINVDYSYKSPIPLPPDVIQLIDSILISEPSARATIPHIMSSRWFSDIPWDDQNFIWHRKVPRFEAFGAITPSPAMPPMMKNGTNRNVNKSNSYHQLQSQISASEFGFIPSIAAKKSYKPPTMIKNNVAMPALNQTTYNHNYQQHVPLPPPVSSQPLTQQNVPQQIQPQRSGSAQTPQFAPVSASSRQPVGNMQTRQAAPQVLVQQKTPPFPKEKNSTPNLRDNTSFAQMAPRRNGEIPGQPQQQIPLPKSQQSPQPQPKAQYQSQQQKQSEDIRGSKNTSANAAAAAFATKNLPQPNHKTSKDSSTPPPPPPLPPKIKKVQENFIKFNEVSGLLKPDEKILKMDNLIKSVLSKRYLNKPEYQVLDDSVLDELTSKYASILKQESKAVITIVTNMARVFFIDAFLNVMLVDLKANKGADYSMYDYEFENTVDEDGNLLSKQDETFGYLIIELIKDGGDLVFLQRVSDEQRLRLTNAVKVLDKKGEEVVVGSSHGWIDCLLIAREISIEQSEDNKKPRSVSSSSNVSINEVKSEKAKKKKSSLSNKKPRSKKKGTSSNGTPQTTPTPTQHSNFAFAAAAAVHHQK

SEQ ID NO: 19197 - protein, 663 aa, Campylobacter upsaliensis RM3195
MNIQYSDALVIGGGLAGLRAAIEVAKSGQSVTLLSICPVKRSHSAAVQGGMQASLGNGAKGEGDNEDLHFADTVKGSDWGCDQEVARMFAQTAPKAVRELAAWGVPWTRVTKGPRTVVINAQKTVIEEKEEAHGLINARDFGGTKKWRTCYIADATGHCMLYGVANEAIKHQVKVIDRMEAVRIIHDGKKCLGVIARDLTNGQLIAYIARGTMIATGGYGRIYKQTTNAVICEGTGAAIALETGLCRLSNMEAVQFHPTPIVPSGILLTEGCRGDGGILRDVDGYRFMPDYEPEKKELASRDVVSRRMMEHIRKGKGVKSPYGDHLWLDISILGRAHVEKNLRDVQDICKTFNGIDPADEGPKGWAPVLPMQHYSMGGIRTKPTGESQWLDGLFACGEAACWDMHGFNRLGGNSCAETVVAGMIVGDYFADYCKNNGEVVDTNVVKDFLSKEYQYLKSLVDKEGQNDVFEIKNRMKEVMWDKVAIFRTGEGLKEAVNELEELYKKSLNVKVHCKELNAANPELEEAYRVPRMLKIALCVAYGALLRTESRGAHYREDYPKRDDLNWMKRTLTYWVDGETLPKVEYDELDIMKMEMPPAFRGYGAKGNIIENPLSEKRQAEVDAIREKMESEGKGRYEIQNALMPYELQAKYKAPNQRIGVDYE

SEQ ID NO: 19198 - protein, 424 aa, Glycine max
NYYGGPHGDHVVRMQQNGMGPGGGGWGAPPPPPPMMMSSAEFSSNYSTGPAPLPPPSPNLALGLKGGTFTYEELAAATNGFNDANLIGQGGFGYVHKGVLPSGKEVAVKSLKAGSGQGEREFQAEIDIISRVHHRHLVSLVGYSISGGQRMLVYEFIPNNTLEYHLHGKGRPTMDWPTRMRIAIGSAKGLAYLHEDCHPRIIHRDIKAANVLIDDSFEAKVADFGLAKLTTDNNTHVSTRVMGTFGYLAPEYASSGKLTEKSDVFSFGVMLLELITGKRPVDHTNAMDDSLVDWARPLLTRGLEEDGNFGELVDAFLEGNYDPQELSRMAACAAGSIRHSAKKRPKMSQIVRILEGDVSLDDLKDGIKPGQNVAYNSSSSSDQYDTMQYNADMQKFRKAVFSNSEEFGTSSGSSGEVSQKQQRL

SEQ ID NO: 19199 - protein, 630 aa, Cornus eydeana
MASSGEQNQVELLENLKNRLAIAVRSIQWSYAIFWSISSRQPGVLEWGDGYYNGDIKTRKTVQAVEFDADQLGLQRSEQLKELYGSLSVAETNPQARRPSAALSPEDLTDTEWYYLVCMSFVFNVAQGLPGRTLANGQPIWLCNAHSADSKVFSRSLLAKSASIQTVVCFPFLGGVVELGVTELVLEDPTLIPHIKTSLFEEPVPNCSKTSNYASESARTDKDLVLAKLNHNKLDTNLDPAVECKEVNICAPNSNSTGFLPNQQTEELVMVEGLNGGVCQVQSWQFMDDEISNCVQYSTNSSDSISQILENPEKDSCLPDLQECNHTKLTSLDLPNDDIHYHGVVSTLLKSSHQLILGPYFRKCNKESSFIGWKKGPVGIRKHKSGTPQRVLKKVLFEVAQMHGGCLIESRQDNGRKDRLWRPEVDEIDTTNLFPERRRREKINERYSVLGSLISATSKVDKVSILDGTIEYLKDLEMRVEDLECCREVTDLEARMGRIPQDTAERTSDNYENNRIGIGKKPLINKRKACDIDEAEPEINLVQLKDSSTDNVTVRMIEKVVLIEVRCPWRECLLLEIMDAISNFHLDSHSVQSSNNDGILSLSIRSKFKGSTVASTGMIIQALQRVICKC

SEQ ID NO: 19200 - protein, 473 aa, Arabidopsis thaliana
MQALQSSSLRASPPNPLRLPSNRQSHQLITNARPLRRQQRSFISASASTVSAPKRETDPKKRVVITGMGLVSVFGNDVDAYYEKLLSGESGISLIDRFDASKFPTRFGGQIRGFSSEGYIDGKNERRLDDCLKYCIVAGKKALESANLGGDKLNTIDKRKAGVLVGTGMGGLTVFSEGVQNLIEKGHRRISPFFIPYAITNMGSALLAIDLGLMGPNYSISTACATSNYCFYAAANHIRRGEADMMIAGGTEAAIIPIGLGGFVACRALSQRNDDPQTASRPWDKARDGFVMGEGAGVLVMESLEHAMKRGAPIVAEYLGGAVNCDAHHMTDPRADGLGVSSCIERCLEDAGVSPEEVNYINAHATSTLAGDLAEINAIKKVFKSTSGIKINATKSMIGHCLGAAGGLEAIATVKAINTGWLHPSINQFNPEQAVDFDTVPNEKKQHEVDVAISNSFGFGGHNSVVAFSAFKP

SEQ ID NO: 19201 - protein, 454 aa, Zea mays; identical to SEQ ID NO: 916

SEQ ID NO: 19202 - protein, 309 aa, Picea glauca
MACDRSALYTSSVIMNTEDNSSAHAIAAMIASSCTPPATFQGTRSISVFETGNERKRPAGNSYSALELSDDIGDEDGSDDCIHLGEKKRRLTLEQVRALEKNFEMANKLEPEKKMQLAKALGLQPRQIAVWFQNRRARWKTKQLEKDFNVLKQDYDALKQDYDNLMEENNNLQAMIERMSSKSQSCNDQKFQANSSKLQKDDQDLQLLMMSATKVDCADKENNNEGPSSIGSEGSSVLDMDSPGTIDSQQNIDSIGFSNVKARDLRLECNFRPKVEENVSQADEPCNYLFYNNLETGPLLWDYNWSSGL

SEQ ID NO: 19203 - protein, 260 aa, Phaeosphaeria spartinicola
GTRWYHRHYSVQYGDGLWGTMIINGPSTANYDIDLGTFPLTDWFYQSIFDVNAATLHANGPPTSQNVLVNGTMTSAHGGKYAVTTLTPGKSHLLRIVNVGINNYLTVGLDGHKMKVITSDFTPIVPYETDSITLAVGQRYDVIITANNTIDNYWLRVGTGGRCDGPNANAANIRSIFRYAGANETYPRNSTAPVPLKTGCKDEANVVPYAKTEVPQDTPKALEFGFSDELGSAGNLVQWLVNGSAILMDLQYPTLQSVSR

SEQ ID NO: 19204 - protein, 587 aa, Zea mays
  misc_feature (19)..(19): Xaa can be any naturally occurring amino acid
  misc_feature (54)..(54): Xaa can be any naturally occurring amino acid
  unsure (1)..(587): unsure at all Xaa locations
MAMIDEPLYPIAVLIDELXNEDIQLRLNSIKKLSTIARALGEERTRKELIPFLXENNDDEDEVLLAMAEELGVFIPYVGGVEHAHVLLPPLETLCTVEETCVRDKAVESLCQIGAQMKENDIVDWFAHVVKRLAVGEWFTARVSSCGLFHIAYPSAPEQLKAELRTIYGQLCQDDMPMVRRAAASNLGKFAATVEQSHLKTEIMSMFDDLTQDDQDSVRLLAVEGCAALGKLLEPQDCAAHILPVIVNFSQDKSWRVRYMVANQLYELCEAVGTEPTRGDLVSAYVRLLCDNEAEVRIAAAGKVTKFCKILNPQIAIEHILPCIKELSSDSSQHVRSALASVIMGMAPVLGKDATLEQLLPIFLSLLKDEFPDVRLNIISKLDQVNQVIGIDLLSQSLLPAIVELSEDRHWRVRLAIIEYIPLLASQLGVGFFDDKLGALCMQWLEDKVFSIRDAGANNLKRLTEEFGPEWAMQHIIPQVLEKINNPHYLYRMTTLQAISLLAPVMGPDITCQQLLPVVIASSKDRVPNMKFNVAKVLQSLVPILDQSVVEKTVKPCLVELSEDPDVDVRYYAHQALRACDQMVISS

SEQ ID NO: 19205 - protein, 677 aa, GIBBERELLA ZEAE PH-1
MLTSPRLILLLLAWVFSALVASALVKKDWTITWEPGAPNGQERNMIKINNQFPGPTILCDEDDDIEVTVHNKMPFNTTVHWHGLERVNCVRMMGTPWSDGTPGMSQKPIEMGQSFIYRFKASPAGTHWYHSHSRATVLDGLYGPIFIRRKPDAPAPWHLISKEQADIDAMSRAVIDPKLVMVSDWTRFMSWEYMAAEESSGMAIFCSDSILVNGKGSLYCPDVDVLINHTSTYMKYGLYPRQVNDKGCFPFMRSTQGPYLTTGKPETIPLHLQHGCTPAEGTNETIEVDPADQWASLNFIGGATFKTIVFSVDEHDMWVYEVDGHYIVPQRVNTVHMYAGERYAVMIKLDKTPKDYTIRVADSGLTQVISAFATLRYKGGIQGSDSVGVIDYGGQNSTKDGSVITLDREHLPPYPPNPPARKADAMHVLSTHRWKSAWQYTMSGHGMYEEDRSAYGPLLYDPHSADAMDEGLVIRTKNGSWVDLVLQVGSLPGQPQEFPHMMHKHTGKTWQIGSGMGIWNYSSVEEAIAAEPHNFDLDTPKWRDTFVTSFDGSAWIVLRYQVTNPGPWLFHCHIETHLAGGMAIAILDGIDVWPQIPAEYGPDQRGFMPGTLPELESGGKQGTVDKQCPLLAVSPSGGPKKDSGETSASDSRWETLIRGLIQVLQGWLSDEASSRSS

SEQ ID NO: 19206 - protein, 595 aa, GIBBERELLA ZEAE PH-1
MLFRFLALLPFVAGAFAEYKVHDDTFKPDYVLEATLDDIKINCVSRSSIVFNGTSPGPTIYLQEEQTTWIRVYNKIPDNNVTVRAAPFSDGTPLVSQWPIPAGQFFDYEIRPEIGDAGSYFYHSHVGFQIVTAFGALIVRDARKPEYKYDGDIPLLVGDNYAAEDEVIEQGLLADPFKWSGEPQAITIQGNSGNKSFYEAPDSSCMPHVVHVDPGKTYRLRFISATALSMIKLGIEDHENLTVIEADGSYTKPAKIDHVQVSPGQRYSYLMKTKTSKEVCGGDKSQYWIRYESRDRPKVISGYALLKYRCDKNQKLPKSLPETSPIELSNSTADYLEYALEGLSEKNNQAFPKLSEVTRTVVIQINQILTTGAYVNGTLNGTVAWAQNGLPWKENVQAERRQVPYLIQIYENGTTPNYTLALEHHGFDPETKAFPAKVGEVLDIVWENNNGPTGGWDYHPMHVHGYHVYDLGSGNGTYNATENEAHFENFTPVLRDTTNLYRYAVKGVPHHTAGWRAWRIRITEENIGAWMMHCHIAQHQVMGMATVWVFGDAEQIRGKFPAPPYTQGYLTYGGSAYGTEDDQPWVNEYYSDKNN

SEQ ID NO: 19207 - protein, 256 aa, Triticum aestivum
NVGGGQAHTLVRGVTFAKRHPHFGVSFPTPARSSSFVKDFSHGVGQFLLHPVVRKLTETVWQKISDPRSIQKIFRQVYPDHSTNVDKVFSRIIETTEHPAAAASFASIMFAPMAQISFQEALSRCQRQDIPISLMYGKEDPWVTPYWGIRVKQQVPEAPYYEISPAGHCPHDEVPEVINYLLRGWLKNVESEGSVDLPFLEDSSFQVHGVSKELEFVRTGSKKSVSVRLFGSQISLWSHLSSFLKRHASNIRVVSR

SEQ ID NO: 19208 - protein, 95 aa, Arachis hypogaea
MASKQQNRQELDERAKQGETVVPGGTGGKSLEAQEHLAEGRSKGGQTRREQLGTEGSKRCRKGGFSTMEKSGGERAEEEGVEIDESKFATKNQNK

SEQ ID NO: 19209 - protein, 435 aa, Arabidopsis thaliana
MTVEMHAGLASDGGSKLKMLISYVDNLPSGDEKGLFYALDLGGTNFRVMRVLLGGKQERVVKQEFEEVSIPPHLMTGGSDELFNFIAEALAKFVATECEDFHLPEGRQRELGFTFSFPVKQTSLSSGSLIKWTKGFSIEEAVGQDVVGALNKALERVGLDMRIAALVNDTVGTLAGGRYYNPDVVAAVILGTGTNAAYVERATAIPKWHGLLPKSGEMVINMEWGNFRSSHLPLTEFDHTLDFESLNPGEQILEKIISGMYLGEILRRVLLKMAEDAAFFGDTVPSKLRIPFIIRTPHMSAMHNDTSPDLKIVGSKIKDILEVPTTSLKMRKVVISLCNIIATRGARLSAAGIYGILKKLGRDTTKDEEVQKSVIAMDGGLFEHYTQFSECMESSLKELLGDEASGSVEVTHSNDGSGIGAALLAASHSLYLEDS

SEQ ID NO: 19210 - protein, 247 aa, Petunia x hybrida
MVFPNQEFESSSSQRKSGRGKIEIKRIENTTNRQVTFCKRRNGLLKKAYELSVLCDAEVALIVFSSRGRLYEYANNSVRATIDRYKKHHADSTSTGSVSEANTQYYQQEAAKLRRQIRDIQTYNRQIVGEALSSLSPRGLKNLEGKLEKAIGRVRSKKNELLFSEIELMQKREIEMQNANMYLRAKIAEVERATQQMNLMHGGGSEYQQQPMSSTSQPYDARNFLPVNLLEPNPHYSRQDQTALQLV

SEQ ID NO: 19211 - protein, 328 aa, Triticum aestivum
QMESPIGQFLSQILVTHPHLLPAAAEQQLEQLQTVQDSSEKKDAQAPPAAGDIVLYRRIAEVKEKERKRTMEEILYALVVQKFVEAGVSLVPALSHSIDASSGRVDQWAEHVEGKLERLHSHEAYEMIENHLNLILGQRQADGTVAAISKLRVGQVYAASVMYGYFLKRVDKRFQLEKSMKSLPWGSEDDALNQVMTTDSQPSDQTYSSHPEVESWTSPDLSAGGLGQSVKPSRLRSYVMSFDSDTLQTYATIRSKVAFGIIEKHTEALFGKPEIVITPEGTVDSSKDEYVRISFSGLRRLILEAVTFGSFLWDVESYVDSRYHFVTN

SEQ ID NO: 19212 - protein, 464 aa, ASPERGILLUS NIDULANS FGSC A4
MTPLIYLPGRVRSAHAVRCSLLKSPLQHPFRSSYPLSLHKRWSTSLSQRPGSDRVRFPGAVNSKFTTEMAFINPMDKPGIPTYRVMDSDGVLIDKSRSELSVSNEEALAWYRNMLTVSIMDVIMFEAQRQGRLSFYMVSAGEEGISVGSAAALTPDDVVFAQYRETGVFQQRGFALKNFMSQLFANANDNGRGRNMPVHYGCEYPKTHTISSTLATQIPQASGAAYALKLQALQNPDTPPRIVACYFGEGAASEGDFHAGLNIAATRSCPVVFICRNNGYAISTPTLEQYRGDGIASRGVGYGIDTIRVDGNDIFAVYEAMKAARTLALSQGGKPVLIEAMSYRVSHHSTSDDSFAYRARVEVEDWKRRDNPIIRLRKWLENEGIWNEDMERQARESIRKEVLREFGEAERAKKPAIRFAFEDVYDEVTEEAREQMKELRRILEEYPEEYDLRSFEGGVKGLDS

SEQ ID NO: 19213 - protein, 213 aa, Malus x domestica
PIKAPILVEQGLFWDNEELISLLSKESEQNELQKPLQISPSLAGARREAVDWMLRVASHYSFSALSAVLAADYFDGFLSSLQLQVEKPWMTQLAAVACISLAAKVEETQVPLLLDFQVEDSKYVFEARTIKRMEILVLSTLQWKMNPVTPISFIDYITRRLGLKNHLCWEVLKRCELVLLSLISDSRFMSFLPSVVATAIMLHVVNNIEPCLL

SEQ ID NO: 19214 - protein, 1919 aa, Neurospora crassa
MTDADPDADPDASTPMGLRSPPESDKAMNLDEASESELSDLDDDVADKLDQDHTFDLDLGSDPLPDPKTGQQQQQPEPSVSHEHEPATAATVESATQIKEEQEGEGKESTSHSQQPDTGAASATTPTSPSEDIGEILPDRYENNVPVFKPTLKQFQDFKLFMEKVDKYGMKSGIIKIIPPEEWRSALPPLDELVKQVRVREPIKQEIMGQNGTYRQVNILHQRSYNLPQWRQLCDQSEHQPPARRGERRANAEKTKPAPRSRAAPPAANGTTSNKTPTNTNTGRGKRKGRVTRGSAKAATDETDDPPITPVSPPPEDEDKPLASIEEEDIKDEACEEEESIPRAGRMGFSRQGKPKMQSTSARRKYIRREGSAMIDEAAFKDWDYRMDVSDFTPERCEELERIYWKTLTYAPPLYGADLPGTLFAESTENWNLNKLPNLLDVLGTKVPGVNTAYLYLGMWKATFAWHLEDVDLYSINFLHFGAPKQWYSISQADARRFEAAMKNIWPTDAKACDQFLRHKSFLISPSHLKQHYGITVNKVVSYPGEFVVTYPYGYHSGYNLGYNCAEAVNFALDSWLPMGKIAKKCQCAQAQDSVWVDVYEIERKLRGESTEYEVTEDEDEDEDEDSDESDQDTGLPSPPSGLDHRGGKRVRTAGQKRKREANNRGTEGKAKRSRFRLKAPVEPPCCLCPNDIPGAEIMPTDDGRKAHRMCALYLPETYIETVDDQEIIANVAGIDKARLELKCLYCRSKKGACFQCSQKKCPRAYHATCAAAAGVFVEEGDVPVIGEDGTEYKEQAFEFSCRFHRVKRDRKTEGAILEDDPVVRKTAEGLKKNDICQIQYYQGNIFAGVVVENLHEEETLLLDVIPSGDRIQVEWKWLLVADPSEYRLPKASPNAIPMPTSKKAKQEINAKRPVEEIPRKGDEFSTGFVWAEFHTGEPDKNKEQVKIDLDKENQVWHYLGPTSTEARAQYTENPSRKQHNSKSNFLDTIPKPPPTYPVQVASAPRKSLSATYPTQQQQTFIASPASSSALASKQDKPYVYKPRKPVQPHTQFNVQYTSHMFMPAPPLPSPSYVPQQNHPFYQAQLRPNVPQTVHPSQVFSPQPMHYDGQRRMSQSTQPYPQQQMSPHHFAQHQMPQQMPQHQFQPQQQQQQFQHFQPPQQHYQQQPQQNYPQTPVPLPPQAFQFQQQTCAPLPQQVQPQQPQQQSPVPLPQQVQTALPEQQQQQQQVHHVQQTPVPVPQVPLQAQQSTQSSPQQQQQPQPQDEEAHQPLPPVDQTQPPSPPQPLPKPRPFKVYKACQFRKLKLPEKRPGAKKDLPDAFASRRFSFAGIDRIHDLPGIVWPPKNLISGRESQCRRGVWAPLSDEGIMPAPMTSSLLKCADDDQRVSQKYEFFQTRDPLKHHSPYKPAVTELDETTGKKKLVHADFTNDYAENFTNFMKNAREALTRKDISEPSSRPVTSQAHSRNASSASAQPNDSQFQQNSFTGQPTQHPRVQPQYTYNQHEAGFGESSSSSPFSSHSVPAPVLFGPAFEQQSGSHQDMRQQYQGPWQQQYQNQGSHNIWMGSPQMVGSPQPQMFSPSPTQQGHHHHMPQSQQQAQNQQPQPQQPAKPQFTKQSHSPIPLPPRQGSQGASSQSQSQKRRQRKSAQQASEQTISPTQLSVDTGAGSTPQGQPPKAQQTSNNPWTNANNVHLQFPSALNASSQQPAPATATQRPSQNTSDHTPAEADAGAEQQESGGEEEAHDVEENSYFNEAQGFQTPPLQPQTLSSTDVSPDQNYFPLSAPPPTPLGGIAFGGVGVGGFNPGSAFNVATLSGGIAGLGALGTLGGLLGGLESGASGNGTWSGRARGLSRSGDNVFMGSTSAIEDGEEGELGCGMGGGGGGGGGGSRGGVHGGGNGGTALSRQDVLDKILSNLHRLGTE

SEQ ID NO: 19215 - protein, 55 aa, Trichodesmium erythraeum IMS101
MSILRILAAIFLPPLGVFLTVGLGGAFWINLLLTIFGFYIAGIVHAIWVIAKHDN

SEQ ID NO: 19216 - protein, 162 aa, Triticum aestivum; identical to SEQ ID NO: 1270

SEQ ID NO: 19217 - protein, 439 aa, Neurospora crassa
MAPSSTISDIVGAPLQLVWGLYDVAAETSTPTLFLIAVSVAGLAFGLIYIVLHIVAPKPRLPYPSEKTYITTNPDGTISKPRPLPCWYDRWHAESRLKEQSSSSTTVSYPTIPAGFPVPDFGTVEPAEVEISVVIPAYNEADRLIPTLEEMVAYLDEHFGRPAISGPGSRPTSKGTGTPKPHRNVFKDASAHKRQHPPSGYEILLINDGSTDRTVDVALDFSRQHNLHDILRIVTLEKNRGKGGGVTHGLRHVRGEYAVFADADGASRFGDLGKLIEGCEDVVDGSNRGVAIGSRAHLVGSEAVVKRSAVRNFLMRSFHFVLMILTPPATSRIRDTQCGFKLFSRAALPHIVPYMHTEGWIFDIEMLMLAESAPATPVLASDGSVIGTSYGIKVAEVPIGWHEVGGSKMNLVKDSVKMAIGLAVLRASWMLGVYRRRLA

SEQ ID NO: 19218 - protein, 166 aa, Steiractinia sodiroi
MFPMVTEFMNYGQQTIRAARYIGQGFMITLSHANRLPVTIQYPYEKLITSERFRGRIHFEFDKCIACEVCVRVCPMDLPVVDWKLETDIRKKRLLNYSIDFGICIFCGNCVEYCPTNCLSMTEEYELSTYDRHELNYNQIALGRLPMSIIDDYTIRTILNLPEIKT

SEQ ID NO: 19219 - protein, 253 aa, Zea mays
  misc_feature (57)..(57): Xaa can be any naturally occurring amino acid
  unsure (1)..(253): unsure at all Xaa locations
TRVRSAHTHNQISPKSTRRHLRFKMQIFVKTLTGKTITLEVESSDTIDNVKAKIQDXEGIPPDQQRLIFAGKQLEDGRTLADYNIQKESTLHLVLRLRGGMQIFVKTLTGKTITLEVESSDTIDNVKAKIQDKEGIPPDQQRLIFAGKQLEDGRTLADYNIQKESTLHLVLRLRGGMQIFVKTLTGKTITLEGESSDTIDNVKAKIQDKEGIPPDQQRLIFAGKQLEDGRPLADYNIQKESPLPLVLRLRGGQ

SEQ ID NO: 19220 - protein, 428 aa, Methanosarcina mazei Go1
MCRRSEVISLRDDPSGESLESWIIRLRREFHKYPELSFKEYETQKRILKILGELGIEGRKIADTGVLASIRGTMSGPCIALRTDTDGLQVQEEPAERNREYISRTEGVMHACGHDGHMAMLFGAARMFMENREFPGEVRLIFQPAEEIPPGGSERVIAEGGLEGVDAIIGMHIFTNHESGSVGFRPGPFMASTNRFEVILKGKGGHISLPAKCIDPVRMAVDFINSLNSALEERLDKEKYVLGVGRIQGGAQFNRTPDNVGILGSYRTFDSETTDIIDATIKECLEKIKQEYLKHGEEFSGLPDYELDILHGYPVLVNDPFFTEAVNLKLHESFPELTVYPEIEKTFAAEDFASYLQVVPGVFISLGTRNQKKGIVEINHSCAFDIDEEILLKGSEIFHTLSLDFLKHPEKYLSLQKYHGPQEYIEKT

SEQ ID NO: 19221 - protein, 166 aa, Stevia rebaudiana
MFPMVTEFMNYGQQTVRAARYIGQGFIITLSHANRLPVTIQYPYEKLITSERFRGRIHFEFDKCIACEVCVRVCPIDLPVVDWKLETDIRKKRLLNYSIDFGICIFCGNCVEYCPTNCLSMTEEYELSTYDRHELNYNQIALGRLPMSIIDDYTIRTILNLPEIKT

SEQ ID NO: 19222 - protein, 157 aa, Arabidopsis thaliana
MEKVVDLFGVGEANSQKLLEGGKDLSEIQQGLFIGSVAEANNKDFLKSSNITHVLTVAVALAPPYPDDFVYKVIEVYFDECYSFIDQAIQSGGGVLVHCFMGMSRSVTIVVAYLMKKHGMGFSKAMELVRSRRHQAYPNPGFISQLQQFEKSIQGNA

SEQ ID NO: 19223 - protein, 656 aa, Geobacter metallireducens GS-15
MSQGIFGIIDFRNAIADRDVLGNAMAAYLKMSGSGEFSVSTGLGHLIGMRRSAADSPSRQTRIEHDPDAGLAAVIHGEVNNYRELLSQHPPSGRPCCGDLDLVLRMYRRSGASFARSINGLFTIGILDEREKTFRLMNDRFGLAHQLYWTVADGRLIFATHLKTLLACPGVRRELDHEGLNLFLKYAYITSPWSILKGINKLPPGHMLTFRDGKAEVAPYWQFDAVTRPGMTMEEAIPAYRDLLRGAIARRMGSDGSTGVMLSGGLDSSANAALAASCSSTPVKTFAIGFEDPRFDERPFARIVAKHFGTDHHEYTITGREIDDLPSLVWHLEEPYFEFGLFLTYMGLKSASGHVQAVIGGEGADQMYGTGGFAGGRPAAVHYLFRKSGMIGPARTVSSLLRGPLFYDRDNLGFQLRLFWNRAADLNDWYFYGYDGHELSQLYRNGNLARVPRIFGEPAGSPESFAQVYLETQIEQDMRHYVNENVMVKSGRMADMLGLVLRESFLDADVADFLVSLPMPVKRGGGLVDHLRGRFKSKLLHRKAMEGILPPEIMSKPKQGGFVPVMIFLNDPALRKRIYEKLLRSEVMGEYFRTDYLRTLFEKYESFQQGAVGWPNFLNSKANRILFLLTFDIWHHCYLANDPLGVTPPSLNEYLG

SEQ ID NO: 19224 - protein, 166 aa, Synedrella nodiflora
MFPMVTEFMNYGQQTVRAARYIGQGFMITLSHANRLPVTIQYPYEKLITSERFRGRIHFEFDKCIACEVCVRVCPIDLPVVDWKLETDIRKKRLLNYSIDFGICIFCGNCVEYCPTNCLSMTEEYELSTYDRHELNYNQIALGRLPMSIIDDYTIRTILNLPEIKN

SEQ ID NO: 19225 - protein, 334 aa, Methylobacillus flagellatus KT
MLLVTGGTGYIGSHACVELINAGYEVVVLDNFSNSQAHIVDRIKQITGKAPVLVEGDVRDEALLSDLFSRYPFQAVMHFAGLKAVGESVAQPLRYYDNNVAGSVTLLRVMQAHDVKRLVFSSSATVYGDPASVPIREDFPLSATNPYGASKLMVEDILRDLAVSDPEWRIAILRYFNPVGAHESGLIGENPNGMPNNLMPYITQVAQGQRESLSVFGSDYPTVDGTGVRDYIHVVDLVVGHLRALERLDKEAGVFTCNLGTGQGYSVLEMVKAFEDASGQAVPYQLVARRPGDVAASYTDPAYAEQALGWKATRGIEQMCKDSWHWQQNLAQRG

SEQ ID NO: 19226 - protein, 386 aa, Thermoplasma volcanium GSS1
MPETTEEISKGLEDVNIKWTRLTTIDGNKGILRYGGYSVEDIINNGAQAEEIQYLFLYGELPNAQELKIFKENVQKGYNIPDFVINSIRQLPRESDAVAMQMAAVASMAASEIKFKWNKDTDRDVAAQMIGSMSAITANVYRHILGMPAERPKPSDSYAESFLKAAFGRNVTKEEVDAINTALILYTDHEVPASTTAGLVAVSTLSDIYSGITAALAALKGPLHGGAAEAAIAQFDEIKEPSNVEKWFNDNIINGKKRLMGFGHRVYKTYDPRAKIFKGIAENLSKNNAEVKKIYDIATKLEDLGVKQFGSKGIYPNTDYFSGIVYMSVGFPLRNNIYTALFALSRVTGWEAHFIEYVEEQQRLIRPRAVYVGPAERKFVKLPDRK

SEQ ID NO: 19227 - protein, 98 aa, Glycine max
KTWIEVSGSSAKDVAKQLKEQQMVMPGHRESNLQKELNRYIPTAAAFGGVCIGALTVLADFMGAIGSGTGILLAVTIIYQYFETFEKERATELGFFGF

SEQ ID NO: 19228 - protein, 341 aa, Triticum aestivum
MDMIDSIECVSSSDGMEDDDAMSSNLPRPFLKASAAAIAAASIGVVPGGVGGASGAGAAGGIAGPLIPPATSVHELLECPVCTNSMYPPIHQCQNGHTLCSTCKARVHNRCPTCRQELGDIRCLALEKVAESLELPCKYYSLGCPEIFPYYSKLKHESQCNFRPYSCPYAGSECSVVGDIPFLVSHLRDDHKVDMHSGCTFNHRYVKSNPREVENATWMLTVFHCFGQYFCLHFEAFQLGMAPVYMAFLRFMGDENDARNYSYSLEVGANGRKMIWEGTPRSIRDSHRKVRDSHDGLIIQRNMALFFSGGERKELKLRVTGRIWKEQQNPDSGACIPNLFS

SEQ ID NO: 19229 - protein, 163 aa, Zea mays
MALGPSGPAGRPRVVNDDVCRQCSCSSSSFPAAARAWVSVSSSRRPVRGAIIMAAVETVVLKVAMSCEGCAGAVRRVLSKMEGVETFDIDLKEQKVTVKGNVKPEDVFQTVSKSGKRTSYWEGEATAPDAAAAPEAEAAPSTAAEAPPAAPAAPEITPAKADA

SEQ ID NO: 19230 - protein, 356 aa, Rhodococcus sp.
MSIDSALNWDGEMTVTRFDRETGAHFVIRLDSTQLGPAAGGTRAAQYSQLADALTDAGKLAGAMTLKMAVSNLPMGGGKSVIALPAPRHSIDPSTWARILRIHAENIDKLSGNYWTGPDVNTNSADMDTLNDTTEFVFGRSLERGGAGSSAFTTAVGVFEAMKATVAHRGLGSLDGLTVLVQGLGAVGGSLASLAAEAGAQLLVADTDTERVAHAVALGHTAVALEDVLSTPCDVFAPCAMGGVITTEVARTLDCSVVAGAANNVIADEAASDILHARGILYAPDFVANAGGAIHLVGREVLGWSESVVHERAVAIGDTLNQVFEISDNDGVTPDEAARTLAGRRAREASTTTATA

SEQ ID NO: 19231 - protein, 166 aa, Nicotiana tabacum
IERYKKHHADSTSQGSVSESNTQYYQQEAAKLRRQIRDIQTYNRQIVGEALSSLSPRDLKNLEGKLEKAIGRVRSKKNELLFSEIELMQKREIDLQNANMCLRAKIAEVERAQQQMNLMPGGSEYNQQQQPMTTSQNYNDARNFLPVNLLEPNPHYSRHDDQTALQ

SEQ ID NO: 19232 - protein, 478 aa, ASPERGILLUS NIDULANS FGSC A4
MKAATPRPSVRALSSGRSYRTARFVSRTSNARSSLAADTNSLLQQAPPSPKKQLASPLAKLPLSSVLRSLLILSVSSSSILLKPCIYTLSALAHPKTALLDVAKNPLLNLLVKHTIYKQFNAGENKLEVQRSINAIKELGYRGVLLGYAREVLVGESKTDPRDEQASRQEIQTWLDGTLQTVDMAQEGDFVALKFTGMGIQALEYLQNQAPPSPFMDEAIKQVCDLAISRNVRLLVDAEEQAVQPGIEEWATMYQKYCNSRTPGRAIFYNTYQAYLCSTPATLARHLEISRKEGYTLGVKLVRGAYLKTEPRHLIWAKKEQTDECYDGIVEALLTRRYNHMLKPASAEHTTELPPVSVIVATHNRDSVRKAHALRLEQASRGEKSDVELSYAQLQGMADEISCELLQGFQTAGPENTKVAESPNVYKLLTWGSVKECMGFLLRRAVENTEAVGRTKQSQEAMFSELRRRARRAFGLRY

SEQ ID NO: 19233 - protein, 147 aa, Listeria innocua Clip11262
MEQTYVMVKPDGVERGLIGEIVAKIEKKGIKLVAGKLMQIDRTLAEQHYAEHIGKPFFEDLIGFITSGPVFAMVLEGDDVIKTARRMMGKTNPLEADPGTIRAEYAIHTNRNVIHGSDSPESAKREIQLFFEPHEILSYEKAVDTWI

SEQ ID NO: 19234 - protein, 246 aa, Rhizobium sp. NGR234
MGILDGKTAIVTGGAGGVGSAVASLFAQEGAKVAVFDMKEDGPQGIDFYRKVDITDEGAVRAAVATVVEVLGLPDVLVNAAAIAGTGAPTHEATSEDFDRVFAINVKGTFLCTKHVIAGLLATGRPGSIVNISSTYGVVGNADIPLYHGTKAAVRLLSKCDAVTYAEKGIRSNAIILGSTRTDMTVAAMKASPEGEAYVRNLIAAHPMKRQAEPVEIARVIAFLASDLASFVTGADIPVDGGYTAQ

SEQ ID NO: 19235 - protein, 763 aa, Pseudomonas syringae pv. tomato str. DC3000
MNHLGDERGQITPSVFASSNHAFSNHASSNHDGMTEVLKAAVQCASCSSGTLMVPGVSGWEQSASFGAFSHCADEAWLRTISSYGDVVCVGLDSPDEHPQGSADTGTLIYVAIRGSMHQLLGALVLSSTHLEAGLSVAQRYALQTHAAHLRTFLRPGDEPETVGSAVGSIERLRLLESVVINANDAILITEAEPIDLPGPRIVYCNPAFLAITGFTEEEVIGRTPRILQCEDTSRETLDVIREALTHWRPVEVELINTRKDGSQFWVELSIVPVANEKGWFTHWVSVQRDITERKESQQLTQRARLEWEEKLALQSRLQERERISEELAYIAFHDELTALFNRAYLMNELADAFSNPDHHYERATVLFLDLDGFKVVNDSMGHLAGDQLLKRVANRLQNCVRANDVLARIGGDEFAILLVGKDQPETAVKMAERIVSQLHAAIEIEGQDIFISCSIGIVTAGEGHSKPEDLLRDADVAMYSAKKQGRGRWSLFNASMREAAIDTLVIQNALRQALENKDFLVFYQPIYSGDSEHLVGVEALVRWDHPSMGIISPDAFIPIAEDLGLIHELGAWVMHKACGDVQAWRKAFPHLDLRLNVNVSGKELSRPGFVDQVTRIIATTGLPAAQLQIEVTESVFLYQPDAIAEVLRQIRHLGVRVALDDFGTGYSSLGYIDRYPIDAVKIDRSFVSRMMTYDRSQAIVSSILSLGRALDLEITAEGVETAEQYNRLRKMGCPYFQGYFLNRPMRSEALEDVMRSAAVCAV

SEQ ID NO: 19236 - protein, 569 aa, Schizosaccharomyces pombe
MSWKLTKKLKETHLASAIGLNSGGSSFTRGLKNSTLSSTSSRKSSDEKSRKSSEDKRSPQSTVVQPGLLQVTIIEARNLKLPSGHVPANYGVSIDNSLLAPPLSNGSGHARSRSHAWWLPYIVVEFDKNEILVDALNTASLENPCWDYQATFDVSRYSKLSLNIYLRSSSSRSRNGMGNDAFLGGIKLSPSFIVNKLTDEWVPLHGGSGELRVQMLYKPNQSTPLTIDAFELLKVVGKGSFGKVMQVRKRDTSRIYALKTMKKAHIVSRSEVDHTLAERTVLAQVNNPFIVPLKFSFQSPGKLYLVLAFVNGGELFHHLQREGCFDTYRAKFYIAELLVALECLHEFNVIYRDLKPENILLDYTGHIALCDFGLCKLNMAKTDRTNTFCGTPEYLAPELLLGHGYTKVVDWWTLGVLLYEMITGLPPFYDENINEMYRKILQDPLRFPDNIDEKAKDLLSGLLTRAPEKRLGSGGAQEIKNHPFFDDIDWKKLCAKKIQPPFKPSVESAIDTSNFDSEFTSEIPMDSVVADSHLSETVQQRFANWSYQRPTTIDTSDDINTIAPGSVIR

SEQ ID NO: 19237 - protein, 580 aa, Triticum aestivum
  misc_feature (221)..(221): Xaa can be any naturally occurring amino acid
  unsure (1)..(580): unsure at all Xaa locations
MYRAAAAAISRSSSSALRRQLARGGGGEQRQWARGYAAKEVTFGVGARAAMLRGVNDLADAVKVTMGPKGRNVVIERPNRSPKVTKDGVTVAKSIEFEDSAKNVGASLVKQVADATNKAAGDGTTCATVLTQAILTEGCKAVAAGVNVMDLRKGINKAISAVTAHLKSKAWVIDSPDEINQVATISANGEKEIGDLISKAMGIVGKDGPVSRADPRARDNXELEAVQGMKLTRGYISPYFVTDHKTQKCELKDPLILIHDKKISNMNSLLPAVQISIQNRRPLLIFAEDVDGEALSMLVLNKHRAGLKICAVKAPGFGENRRANLDDMAVLTGGQVISEDQGLDLDKVELQMLGTAKKVTVSLDDTIILDGGGERQQIEERCQQLRESLENSTSMFDKEKAQERLSKLSGGVAILKIGGASEAEVGEKKDRVTDALNAARAAVEEGIVPGGGVALLYATKELDNISTSHEDEKIGVQIIKNALKAPLMTIAANAGIDGAIVIGKLLEQDNLSLGYDAAKGEYVDMIKAGIIDPVKVIRTALQDAASVSLLMTTTEAAVAELPSTKARIASRMPDMSGMGF

SEQ ID NO: 19238 - protein, 264 aa, Triticum aestivum
MLAIFQKQVAHAPQELNSPRGSTAKPRNPDEILRDFHAAHPADAFSTSFGGGAALACVAAQPRSLAAGGYQRMFCGLDDIYCVFMGTLDNLSSLMRQYGLTGRSTNEALLVIEAYRTLRDRGPYPADQVVKDLSGSFAFVVFDNRGRSGSGAAVFAAQSTDGGVPLHWGVAADGSVVICDDRGVAKAGCGRSYAPFPPGCMFHSEGGLKSFEHPMNRLKALPRVDSEGVMCGANFKVDAFTKINSMPRVGSATNWAAAWDDAAI

SEQ ID NO: 19239 - protein, 184 aa, Carica papaya
VAPKPIVDIDGKPVLYGVDYFVVSAIWGAGGGGLTVYGPGNKKKCPLSVVQDPFDNGEPIIFSAIKNVKDNIVRESVDLNVKFNITINCNETTAWKVDRFPGVIGWTVTLGGEKGYHGFESTHSMFKIKKAGLPFSYKFHFCPSYPRTRLIPCNNVDIFFDKYRIRRLILTNDAKEFVFIKTNR

SEQ ID NO: 19240 - protein, 461 aa, Rhodopseudomonas palustris CGA009
MADFDADLFVIGGGSGGVRAARIAAGYGARVVVAEEYRFGGTCVIRGCVPKKLMVYASQVHEEIRDAAGFGWSIPTAEFNWSALIANKDKEIARLEQIYANNVEKAGARTIKARAVFDDPHTLLLSTGEKVRAKTILIATGGAPNHGKPIPGIEHVISSNEVFHLPQQPKRILIQGGGYIALEFACIFAGLGSDVTLVYRGDNILRGFDEDVRTHVRTEMERAGITIITGCTVTAVEKLGEEYTSHLSSGSSIASDQVMFAIGRHPAVASLGLEKAGVAINPDNGGIAVDDHCRTSVPHIYAVGDVTHRTNLTPVAIREGHAFADNVFGGKQIQVDYAYVPTAVFSQPQVGTVGLTEAQARAQYSVVDIYKTDFRPMKGTMSGSQSRVLMKLIVDGTTDRLLGCHIVGPDAAELVQVVAVAMKMKATKADFDGTMALHPTAAEELVTMRTRTARYQREAAE

SEQ ID NO: 19241 - protein, 412 aa, Burkholderia pseudomallei K96243
MKPIQKSNKLLNVCYDIRGPVLEHAKRLEDEGHRIIKLNIGNLAPFGFDAPDEIIQDMIRNLPASSGYSDSKGVFAARKAIMHYTQQKGVHGVGLDDIYIGNGASELIVMATQALLNDGDEVLLPAPDYPLWTAAVSLSGGTPVHYVCDESNRWMPDPDDIRRKITPNTKALVVINPNNPTGALYSDALLIELIAIAREHGLIIFADEVYDKIVYDGKSHTALASLAEDVITVTFNSLSKSYRSCGYRAGWMSVAGLTAENRRRAHDYLEGLGILSSMRLCANVPGQYAIQTALGGYQSINELIMPSGRLYKQRELAYDMLTSIPGVSCVKPEAALYMFPRLDPKLYPIENDQQFILELLLRERVLLVQGTGFNWPTPDHFRVVFLPNVDDLTDSIERIARFLDGYRKRNSV

SEQ ID NO: 19242 - protein, 435 aa, Chlamydomonas reinhardtii
MGMQAAGMDRSSARRTTRQRRRGCNSRRSRNRTSQPQAPALAKQHAACTCQSRSRWPGANTHGGGRKAGSDREGRFHAPRRQSCEGDRGAQRVAKKLAPNGNMDLAGVEAVDIHASGALDEYRFNMFMRDLMAEKKTDILCCKGVLNMQGYGDTKFVFKGAHEAICYGPAEQPWKPDETRFSHVVFIGRGLDKEALKEGLSSCLWKPPPPAGRRSATLTRSCPSMSIRRRARRRGCVLRRQHKCTASMRAAPVRHAGAALRLGGCWGHPAPWEAHNGAFNFAMKALSLDCLALREQWNTDYEWGKCGCARSRTQGQGAAFEAGLMVRAIHQVTVPNAGMRCICAPSSTCALQSDAGLHVYHALCLTIWTRSLVAARRRLSLLVCRDARCTNETGWGASDTWLLWLPGGLRADHSTCVASWHSYNSFHSCIRPWAC

SEQ ID NO: 19243 - protein, 300 aa, Salmonella typhimurium LT2
MTMVRIACVGITVMDRIYYVEGLPTEGGKYVAKRYTEVGGGPAATAAVAAAKLGAQVDFIGRVGDDDTGNSLLAELESLGVNTRYTRRYTQAMSSQSAIMVDAKGERIIVNYPSPDLLPDADWLNDIDFSQWDVVLADVRWHDGAKQAFTLARQAGVMTVLDGDITPQDISELVALSDHAAFSEPGLARLTGMSEAIDALKKAQMLTNGHVYVTRGSEGCNWLEKAAVRHQPGFTVEVVDTTGAGDVFHGALAFGLASGYAIEEAVRFASGVAALKCTRPGGRAGIPDCEQTRSFLSLFV

SEQ ID NO: 19244 - protein, 400 aa, Candida albicans SC5314
MEDHEFTVVEVDGIYVEKNTTDMLYITTAQRYSVLINTKNSTDKNYAFMQRVDTDMLDVIPSDLQLNGTNYIVYNEDASLPEAYDVDSLDNYLDDFYLKPLSKEKLLDDADYTITVDVQMDNLGNGVNYAFFNNITYTTPKVPTLLTVLSAGDAATNELVYGTNTNSFVLQGGDVVDIVLNNLDTGKHPFHLHGHAFQLIERHKEIPEGEDPVTYNATDHADWPEYPMVRDTVYVRPQSYIVMRFKADNPGVWFFHCHIEWHLEQGLAFQLIEDPQGIQKNEKITDNHKQICEKVGVPWEGNAAANSKDYLNLVGENVQVKRLPTGFTAKGIVALVFSCISAFLGLAAISYYGMNDIENMEKRVARDLDVYFDDDDDEEEEEQSITEQAATGSSSSPSNK

SEQ ID NO: 19245 - protein, 166 aa, Trichocoryne connata
MFPMVTEFMNYGQQTVRAARYIGQGFMITLSHANRLPVTIQYPYEKLITSERFRGRIHFEFDKCIACEVCVRVCPIDLPVVDWKLETHIRKKRLLNYSIDFGICIFCGNCVEYCPTNCLSMTEEYELSTYDRHELNYNQIALGRLPMSIIDDYTIRTILNLPEIKT

SEQ ID NO: 19246 - protein, 472 aa, Bacillus cereus G9241
MNHLRGGSEVANKELKRGLEARHIQMIALGGTIGVGLFMGSASTIKWTGPSVMLAYAIAGIFIFFIMRAMGEMLYMEPSTGSFATFGHKYIHPLAGYMTAWSNWFQWVIVGMSEIIAVGAYMQYWFPDLPAWIPGVIAMVILGAANLISVKSFGEFEFWFAMIKIVTILLMIIAGFGLIFFGIGNGGEAIGISNLWSNGGFFTGGFSGFFFALSLVVGAYQGVELIGITAGEAKDPKKTLTRAIQSTIWRILIFYIGAIFVIVTVYPWDQLSTIGSPFVATFAKVGITAAAGLINFVVITAAMSGCNSGIYSAGRMLYTLGVNGQAPKYFTKLSGNGVPLFGTVGVIIGLAVGVVLSYIAPKNLFVYVYSASVLPGMVPWFVILISQINFRKEKGAEMKDHPFKMPFAPVTNYLTIAFLIMVLIGMWFNDDTRISLVVGIVFLAIVTISFYAFGIGKRPPLDVPNDQEISSK

SEQ ID NO: 19247 - protein, 305 aa, Trichodesmium erythraeum IMS101
MSIIIFGSVNIDLIATTPRLPTPGETINGNNFFTAGGGKGANQAVAAAGLGIPTKIVGRVGNDSFGQQLLVSLSTANVDTTDVLVDENTHTGVAVIAVGASGENNIIVVPGANHSINNTDVERLKNLLSDVTALLLQLEIPVEVAISAAKVAQEMGVKVILDPAPMPANFPNDFYNLIDIITPNEIEASQLVGFEVNNQETAMEAAVELCHRGVKNAVVKIGDRGVICATKEEAFFQPAFVVKTIDTVAAGDAFNGGLAAALDTGLSLKEAVKWGAAAGALCTTKPGAQPAMPDRKTFDNFLLKR

SEQ ID NO: 19248 - protein, 576 aa, Brassica napus
MAASFSVPSMIMEEEGRFEAEVAEVQTWWSSERFKLTRRPYTARDVVALRGHLKQGYASNEMAKKLWRTLKSHQANGTASRTFGALDPVQVTMMAKHLDTIYVSGWQCSSTHTSTNEPGPDLADYPYDTVPNKVEHLFFAQQYHDRKQREARMSMSREERAKTPFVDYLKPIIADGDTGFGGTTATVKLCKLFVERGAAGVHIEDQSSVTKKCGHMAGKVLVAVSEHINRLVAARLQFDVMGTETVLVARTDAVAATLIQSNIDSRDHQFILGVTNPSLRGKSLSSLLAEGMAVGNNGPALQAIEDQWLSSARLMTFSDAVVEALKRMNLSENEKSRRVNEWLNHARYENCLSNEQGRELAAKLGVTDLFWDWDLPRTREGFYRFQGSVTAAVVRGWAFAQIADLIWMETASPDLNECTQFAEGVKSKTPEVMLAYNLSPSFNWDASGMTDQQMMEFIPRIARLGYCWQFITLAGFHADALVVDTFAKDYARRGMLAYVERIQREERSNGVDTLAHQKWSGANYYDRYLKTVQGGISSTAAMGKGVTEEQFKETWTRPGAAGMGEGTSLVVAKSRM

SEQ ID NO: 19249 - protein, 898 aa, Streptococcus pneumoniae R6
MSLQKLENSSNKSVVQEEVLILTELLEDITKNMLAPETFEKIIQLKELSTQEDYQGLNRLVTSLSNDEMVYISRYFSILPLLINISEDVDLAYEINHQNNIDQDYLGKLSTTIKLVAEKENAVEILEHLNVVPVLTAHPTQVQRKSMLDLTNHIHSLLRKYRDVKLGLINKDKWYNDLRRYIEIIMQTDMIREKKLKVTNEITNAMEYYNSSFLKAVPHLTTEYKRLAQAHGLNLKQAKPITMGMWIGGDRDGNPFVTAKTLKQSALTQCEVIMNYYDKKIYQLYREFSLSTSIVNVSKQVREMARQSKDNSIYREKELYRRALFDIQSKIQATKTYLIEDEEVGTRYETANDFYKDLIAIRDSLLENKGESLISGDFVELLQAVEIFGFYLASIDMRQDSSVYEACVAELLKSAGIHSRYSELSEEEKCDLLLKELEEDPRILSATHAEKSELLAKELAIFKTARVLKDKLGDDVIRQTIISHATSLSDMLELAILLKEVGLVDTERARVQIVPLFETIEDLDHSEETMRKYLSLSLAKKWIDSRNNYQEIMLGYSDSNKDGGYLSSCWTLYKAQQQLTAIGDEFGVKVTFFHGRGGTVGRGGGPTYEAITSQPLKSIKDRIRLTEQGEVIGNKYGNKDAAYYNLEMLVSAAINRMITQKKSDTNTPNRYEAIMDQVVDRSYDIYRDLVFGNEHFYDYFFESSPIKAISSFNIGSRPAARKTITEIGGLRAIPWVFSWSQSRVMFPGWYGVGSSFKEFINKNPENIAILRDMYQNWPFFQSLLSNVDMVLSKSNMNIAFEYAKLCEDEQVKAIYETILNEWQVTKNVILAIEGHDELLADNPYLKASLDYRMPYFNILNYIQLELIKRQRRGELSSDQERLIHITINGIATGLRNSG

SEQ ID NO: 19250 - protein, 166 aa, Tridax balbisioides
MFPMVTEFMNYGQQTVRAARYIGQGFMITLAHANRLPVTIQYPYEKLITSERFRGRIHFEFDKCIACEVCVRVCPIDLPVVDWKLETDIRKKRLLNYSIDFGICIFCGNCVEYCPTNCLSMTEEYELSTYDRHELNYNQIALGRLPMSIIDDYTIRTILNLPEIKT

SEQ ID NO: 19251 - protein, 448 aa, Solanum tuberosum
MGKEKIHISIVVIGHVDSGKSTTTGHLIYKLGGIDKRVIERFEKEAAEMNKRSFKYAWVLDKLKAERERGITIDIALWKFETTKYYCTVIDAPGHRDFIKNMITGTSQADCAVLIIDSTTGGFEAGISKDGQTREHALLAFTLGVKQMICCCNKMDATTPKYSKARYDEIVKEVSSYLKKVGYNPDKIPFVPISGFEGDNMIERSTNLDWYKGPTLLDALDQINEPKRPSDKPLRLPLQDVYKIGGIGTVPVGRVETGVIKPGMVVTFGPTGLTTEVKSVEMHHEALQEALPGDNVGFNVKNVAVKDLKRGFVASNSKDDPAKGAASFTAQVIIMNHPGQIGNGYAPVLDCHTSHIAVKFAEILTKIDRRSGKELEKEPKFLKNGDAGMVKMIPTKPMVVETFAEYPPLGRFAVRDMRQTVAVGVVKNVDKKDPTGAKVTKAAQKKGK

SEQ ID NO: 19252 - protein, 884 aa, GIBBERELLA ZEAE PH-1
MLWAAPAMMEHSPKPPSRPRYAAMRDDQERDDQGERALDEQVERSPEEIEVLDRGQGIIAPSLLQGSTVDTPHGDDAKHRLAITYGLQNPQCDHASDPQQNQNQAPGVQIEKEGPGNSHRVGHLCQSIEHLRRGEFSRYLLRANVNQTMNNSPRGDSIRQGHLTLAKNGDLERDHLAGATLQGNDPYGQSPQNSYHNSPTRSPYGSSRGGRNGQQSHPQGSNYGPPSGPSSQYHPNPSRSPPHSAPTGPMQQYPQGGSYRGGYRGGGFRGGSFGNRGRGGFKNSHWNQGPPQRGHHDDLGNGRFSNVDEPSAMDIDRMDDGDESYQTHDRNAEDGADGLATPNRPPPTGPGSQSQSGGSGSKFSFAFKPSSKPALTAPKPEISQKLNAAPRRDAQKDSRDNDRDRSRDHDRERERDRDRDREREREREREREREKGRERDRDREPPRSAPTEPASSRSRHDRRQPPEGPRVTPRMRKVKKMMKRPKPRPTLPADLVDSESVFFRKPGNESVVGSGTYGKVFKGLNVYTKGMVALKKIRMEGERDGFPVTAVREIKLLQSLRHVNIVNLQEVMVEKNDCFMVFEYLSHDLTGLLNHPTFKLEAAQKKDLAKQMFEGLDYLHTRGVLHRDIKAANILVSNEGVLKIADFGLARFYAKRHQLDYTNRVITIWYRSPELLLGETKYTAAVDVWSAACVMVEIFDRNAIFPGDGTEFNQLEKVYNVMGTPNLKDWPGLVEMPWFELMRPTVKKKNIFEEKYREKMSPAAFELLSVMFHYDPVKRPSASEVLQHTYFTKEEPPARQATELSTHNDWHEFESKALRKENDRREREARKLAKEGASRDADKDKDKKRVNEGIDQPDAKRVQVDKNGGNKPTPAVTSSKPTEA

SEQ ID NO: 19253 - protein, 203 aa, Magnetospirillum magnetotacticum MS-1
MTDNRPILTTRQGHPVRDNQSTRTVGERGPATLENYQFIEKITHFDRERIPERVVHARGAGAHGWFEAYGKIGDEPASKYTRARVLNETGVKTPMFVRFSTVAGAKESPETERDPRGFAVKFKTVEGNWDLVGNNLKVFFIRDAIKFPDMIHAFKPDPVTNRQEAWRFFDFVAQHPESIHMVTWLKSPWGIPANYREMEGYGR

SEQ ID NO: 19254 - protein, 481 aa, Nostoc punctiforme PCC 73102
MSDLILFWHRRDLRISDNTGLAAAKRRSPKVVGVFCLDPHILERDDVAPVRVTYMIGCLQKLQERYAQVGSQLLILHADPVQAIPALAEAINAKAVFWNWDVEPYSQERDRTIINALKEKGIEFLNQNWDQILNSPDEIRTGGNSPYTVYTPFWKNWITKPKANPVETLQNVEGLTEAEQEIAKLSGSLTLPSAKDLGFIWDEQLIISPGEAAAQERLEEFTNKAITEYQEQRNFPAVDGTSQLSAALKFGVIGIRTVWQATIEALENSRSEETAVNIRTWQQELAWREFYQHAMYNFPELADGAFRDTFKNFPWETNEEHFQAWCEGRTGYPIVDAAMRQMNESGWMHNRCRMIVASFLTKDLLINPQLGEKYFMKHLIDGDLSANNGGWQWSASSGMDPKPVRIFNPASQTQKFDPEGEYIRQWVSELRSVDTEYLVTGKIPPLERHAVGYPDPIVDHKIQQNQFKLRYQQQKNTSGGE

SEQ ID NO: 19255 - protein, 113 aa, Zea mays
  misc_feature (14)..(14): Xaa can be any naturally occurring amino acid
  misc_feature (37)..(37): Xaa can be any naturally occurring amino acid
  misc_feature (102)..(102): Xaa can be any naturally occurring amino acid
  unsure (1)..(113): unsure at all Xaa locations
NTRSLKEMALLLRXIWIAPSGGRDRPNPSTGEWYPAXMKRDVRCMVDNMRRLLEHAGVPGHIYPLSLLCYEVMPPPQQVEKEIGEQRVISFHGVGLSATEEXKYGDITCHTKN

SEQ ID NO: 19256 - protein, 348 aa, Schizophyllum commune
TSNDLLQPFLALDQGDKVQAEYVWIDGDGGLRSKTTTVSKKVTDIGQLRIWDFDGSSTNQAPGNDSDVYLRPAAIFKDPFRGGDNILLLAECYNNDGTPNRTNHRHNAKKTMDLAKDEHPWFGIEQEYTLFGEDGRPYGWPKGGFPGPQGPYYCGAGAGKVFARDLIEAHYRCCLYAGINISGINAEVMPSQWEFQVGPCEGITMGDHLWMARYLLIRVAEQWGITVSFHPKPLAGDWNGAGGHTNYSTEGMRNPGGIQAISAAIEKLAKKHNEHIAVYGEDNDLRLTGRHETGHIGSFSSGVANRGASIRIPRNVAAQGFGYLEDRRPASNIDPYRVTDMIVQTTCL

SEQ ID NO: 19257 - protein, 472 aa, Zea mays
SLWLYAESSCAALVVASISSFGINHQFTPMVYPLLVSSVGIIACLITTLFATDFFEIKAANEIEPALKKQLIISTVVMTIGIALISWLGLPYTFTIYNFGAQKTVQSWQLFLCVAVGLWAGLVIGFITEYYTSNAYSPVQDVADSCRTGAATNVIFGLALGYKSVIIPIFAIAFSIFLSFSLAAMYGVAVAALGMLSTIATGLAIDAYGPISDNAGGIAEMAGMSHRIRERTDALDAAGNTTAAIGKGFAIGSAALVSLALFGAFVSRAAISTVDVLTPKVFIGLIVGAMLPYWFSAMTMKSVGSAALKMVEEVRRQFNTIPGLMEGTTKPDYATCVKISTDASIKEMIPPGALVMLTPLIVGILFGVETLAGVLAGALVSGVQIAISASNTGGAWDNAKKYIEAGASEHARTLGPKGSDPHKAAVIGDTIGDPLKDTSGPSLNILIKLMAVESLVFAPFFAAHGGIIFKWL

SEQ ID NO: 19258 - protein, 151 aa, Streptococcus pyogenes M49 591
MEHKWKLWLFIVGVVLLIGGASVLIQKGQAKAFSQGKPQLPAKKVKSTKVDPNAPVDQKMIYLAGGCFWGVEEYFSQVDGVLDVVSGYANGRGDTTNYQLIHQTGHAETVEVAYDANRISLKELLLHFFRIIDPTSLNKQGNDRGSQYRTG

SEQ ID NO: 19259 - protein, 334 aa, Mycoplasma mycoides subsp. mycoides SC str. PG1
MNYLLIGGAGYIGSHVAEIINKTDNNKVIIYDNLSSGLNDFIEQKSTFIQGDILDFNKLNEVFSSNKIDVVIYLAGLIKVGESVQKPLDYYQTNILGLINTLKIMQAHNVNYFVFSSSAAVYGNNSRHNGYFYEDDPKEPCSPYGRTKYFGEEIIKDFAIANPNFHYTFLRYFNVAGASKSKRIGYLTKDNNKPTHLIPAISYFAFGLTDQFSIFGSDYNTKDGTCIRDYVYVCELAELHLLTAQKMVKENCNLYYNIGSGKGFSNLEIIKEFEKQLGYKLNIDIAPKRSGDPDVLVASNTKLCQELNYKIKTNIKDIVESEIAFRKAHLKNKE

SEQ ID NO: 19260 - protein, 501 aa, Arabidopsis thaliana
MFNYVIILPLALFLLAYKFFFTSKKQRYYLPPSPSYSLPILGHHLLIKPPVHRLFHRLSNIHGPIFYLRLGSRRAVVISSSSLARECFTGQNDVIVSNRPRFLTSKYIAYNYTTIATTSYGDHWRNLRRICSLEIVSSKRLANFLHIRKEEIQRMLTRLSRDARVGKEVELESILYDLTFNNIVRMVTGKIYYGDDVSDKEEAELFKKLFTFITTNSGARHPGEYLPFMKIFGGSFEKEVKAAAKVIDEMLQRLLDECKSDKDGNTMVNHLLSLQQDDPEYYTDIIIKGLMLGIMVASSETSALTIEWAMASLLNHPKVLDKVKLEIDEIIGQDRLIEESDIANLPYLQNVVSETLRLHPAAPVLVPRSTAEDIKIGGYDVPRDTMVMVNAWAIHRDPDLWTEPERFNPERFNGGEGEKDDVRMLIAFGSGRRICPGVGLAHKIVTLALGSLIQCFDWKKVNEKEIDMSEGPGMAMRMMVPLRALCKTRPIMNKLPAYTKV

SEQ ID NO: 19261 - protein, 596 aa, Saccharophagus degradans 2-40
MGKRFKISEQPMISLQKELRFLVETHLRFIYDEQSYPDLDHAQLARKLIKIVELDEQCLKPAVHESLWDEQDVLVITYGDSIKKEGEPPLDTLNNFFNKHLADTVNGVHILPFFPYSSDDGFSVIDYTQVNDGLGDWGDIEEIASNFDLMADLVVNHCSSRSRWFDNFKQCKEPGKNYFFECDPSADTSDVVRPRTSPLLREVETLEGKKYVWCTFSHDQVDLNFANPDVLCEMIQIIKLYLDRGVKIFRMDAVAFVWKELGTPCIHHPKTHELVRLMRTLIEHHSPRAIIITETNVPNHENLSYFGNANEAHAVYNFSLPPLLLNALITGSSAHLKAWQMSMPPAQEGTFYFNFIASHDGIGLRPAEGLLQDQEIDTLINTMQSFGARISWRAAQGGLNKAYEINVTLFDALQGTTKGPDKWQIQRFLCAHGIMLALEGIPAIYIHSLVATNNYQEGVELTASNRTINRYKWDADELETQLATEHTHHAKVFEQLKRLISIRRGQQAFHPNATQFTLHLGDQLFGFWRQSIRRDQSIFCIYNVTDDTVTIPLSSINLISLNKWVDLVSGQEYTDLHLDLVLEPYQFVWLTNKIAC

SEQ ID NO: 19262 - protein, 290 aa, Arabidopsis thaliana
MANAITFFKLNTGAKFPSVGLGTWQASPGLVGDAVAAAVKIGYRHIDCAQIYGNEKEIGAVLKKLFEDRVVKREDLFITSKLWCTDHDPQDVPEALNRTLKDLQLEYVDLYLIHWPARIKKGSVGIKPENLLPVDIPSTWKAMEALYDSGKARAIGVSNFSTKKLADLLELARVPPAVNQVECHPSWRQTKLQEFCKSKGVHLSAYSPLGSPGTTWLKSDVLKNPILNMVAEKLGKSPAQVALRWGLQMGHSVLPKSTNEGRIKENFNVFDWSIPDYMFAKFAEIEQVRS

SEQ ID NO: 19263 - protein, 740 aa, Magnaporthe grisea 70-15
MVQACFSYTGTEVVGSAFGETPNPRVTIPRAIRQTLWRICFFYIIGVLTLSMAVPYNNERLVGATKARVSAAASPYVIAMAIGGIKVLPDIVNACLLVFVISSANTDIYVGARTLYSLAKDGHAPAIFLYTTEKGVPMYGVAATSVFVLLGYMNVSKSASSVFGYLVSLVTVFGALNWISVLTSYLGFRRGMKAQGIDRNQLPYRGPLQPYGAWYALGLTILIIIFNGYNAFMPKFDPATFVTCYIGIAVYLINIFGWKFIKRTKRVKANEMDLVTGRQLVQSVFMIMTEKERYMDGRKHVQSIKSIGAIITEKQAVRETFQQTNHKLATMAVSPLLAPPVEAASATQQRSTSSPLKRTLSAVSSANGTPKPTKAAKPEAGLPADDLIEQMNRAEANKYVTTKFLGEGTYAIVHQGYEKAKPSNIVAIKMIKVQKEYTDGMAPDAVRELKHLQELSHPNIIALRSVYSSNSQNLCLVLEYLPLGDLEMLIRDASGIIYGGADIKAWMGMLTRAVWFCHENFVLHRDIKPNNLLVAADGEVKLADFGLARSFADPYRVMTANVITRWYRPPELLYGARHYSGAVDVWSVGCVFAELVLRKPYLPGNNELDQLSLICAELGSPTEDNWPGVSKLDQFTAPSEPLSPVPSKERMMVQFGTAGADGVDLLMKTLTLDPRKRITAKEMLKHPWWHSQPKPTRKEDLPKKKTGAEQKFAADQARQPGQVDEKMAKVARKLDFGAPK

SEQ ID NO: 19264 - protein, 458 aa, Oryza sativa (japonica cultivar-group)
MVSKKTSIAAAAAAAGDSGAAETSLLPERYAGAGTPAAAASVLGAVFNVSTSVVGAGIMSIPAAMRVLGVAPTVALVVGVALLANAAVDFMLRYTRGPSSYAALMGDAFGRAGAALLNVFVAFNAIGTLTVYLIIIGDVMSGTTSDGKVHDGVLTEWFGQQWWTGREAVLVAAAVLLLPLVLRKRVDSLKFTSAVSILLAVVFMFISLGIAVYALFTGTAKMPRMLPDFSRLSSPFELFTAVPIVVVAFTFHFNVHPIRTELSKTSDMKAAVRISLVLCAAIYAAVGFFGFLLFGDATMADVLANFDRSSGAGVPQALNDAARLSYALHLVLVFPLLHFSLRVNVDELLFPGRRPLATDTRRFVALTAVLMAVLYALAIAIPSIWTLFEYSGSTFAVCISLIFPGAIVLRGCSWDSKDEGQGIGSDDDRSGRDHEQHRHRLQRHELHQRQGGRRPCRR

SEQ ID NO: 19265 - protein, 376 aa, Lolium temulentum
MNSNSSSTIYEEAVGQEGSWSRLCDGCCMVPSVVYCHADSAYLCASCDVRIHSANRVASRHERVCLSKAHEHAPALLQCRTDAVASCAAYEAQAHYANLLAGMHQCVPVVSHPATAIPAASLLAEAAVTTTILSCKEEEAFWLLLSKNSANQNCSGDNRSSSTYFGEVDEYFDLVGYNSYYDSRMNNNQAQYGMQEQQHLQPMQKEYAEKEGSECVVPSQFATVSKPQQSGYALVGSEQAASMTAGVSVYTDSVNNSISFSSMEGGIVPDNTVVDLPYSIIPTPAGASSLHSGPPLQMPLHFSSMDREAKVLRYKEKKKTRTFEKTTRYATKKAYAEARPRIKGRFAKISEAEMEVDQLFSAAALSDSSYSTVPWF

SEQ ID NO: 19266 - protein, 169 aa, Triticum aestivum
MAPTVMASSATSVAPYQGLKSTAGLPVSRRSNGASLGSVSNGGRIRCMQVWPIEGIKKFETLSYLPPLSTEALLKQVEYLIRSKWVPCLEFSKVGFIFREHNTSPGYYDGRYWTMWKLPMYGCTDSTQVINEVEEVKNEYPDAYVRIIGFDNMRQVQCVSFIAFKPPGC

SEQ ID NO: 19267 - protein, 190 aa, Oryza sativa (japonica cultivar-group)
MTPPASTGKCTGAAAGEVEEPLLPEFSGGGHGASVSGAVFNVSTSIIGAGIMSIPAAMRVLGVLPALLLIATVAALSDASVEFMLRYTGWDSGPPSYAGIMGDAFGRAGAKALNVCIAFTTTGTLVVYLIIIGDVLSGSAGAGDEHAGVLQELFGAQWWTARELVILVTAIVVLLPLVLRRRVGFISATD

SEQ ID NO: 19268 - protein, 63 aa, Malus x domestica
EQVKALERNFEVENKLEPERKVKLAEELGLQPRQVAVWFQNRRARWKTKQLERDYSILKTDYD

SEQ ID NO: 19269 - protein, 219 aa, Brassica napus
MASISNLANLAPATATNSRSSSTSSVLPRSFLNLRSLNAKLSSSSHLSLRHHQTSRPSLFVRCSASGGNGSAAKRTTLHDLYDKEGQSPWYDNLCRPVTDLLPFIARGVRGVTSNPAIFQKAISTSNAYNDQFRTLVESGKDIESAYWELVVKDIQDACKLFEPIYDQTEAEDGYVSVEVSPRLADDTNGTVEAAKYLHKGGDRRNVYIKIPATAPCIS

SEQ ID NO: 19270 - protein, 994 aa, Prochlorococcus marinus str. NATL2A
MLKNPSNENISNHSTVCVEDQDPGSLLQQRLELVEDLWKTVLKSECPPDQTERLLRLKQLSDPSKSNQDNSSKAIVQLITKMDLAEAISAARAFSLYFQLVNILEQRIEEDSYLESIEKGKLDTSNYKIDPFAPALASQTAPATFTQLFERLRRLNVPPAQLDGLMREMDIRLVFTAHPTEIVRHTVRHKQRRVATLLQQLQSNSLISESEKEIFRLQLEEEIRLWWRTDELHQFKPTVLDEVDYALHYFQQVLFDAMPQLRRRLTTALASSYPDVEIPNEAFCTFGSWVGSDRDGNPSVTPEITWRTACYQRQLMLDRYIASVQDLRDQLSISMQWSQVSSPLLESLEMDRVRFPEVYEERAARYRLEPYRLKLSYTLERLRLTQLRNKQLADAGWQFSPDGKPLISTNNSFDEVLHYKSVEELKNELELIRNSLVSTDLTCEPLDTLLNQVHIFGFSLASLDIRQESTRHSDALDELTRYLDLPESYGVMSEESRVQWLMKELRTRRPLIPPSFEWSKSTQETISVFHMLHRLQKEFGTRICRSYVISMSHTASDLLEVLLLAKESGLIDPTLGASDLLVVPLFETVEDLQHAPSVMESLLQTDVYRELLPRVGEKKQPLQELMLGYSDSNKDSGFLSSNWEIHKAQIALQDLASRQGIALRIFHGRGGSVGRGGGPAYQAILAQPSGTLQGRIKITEQGEVLASKYSLPELALYNLETVTTAVIQNSLVTNKLDATPSWNELMTRLAARSREHYRALVHDNPDLVQFFQVVTPIEEISKLQISSRPARRKSGAKDLSSLRAIPWVFGWTQSRFLLPSWFGVGTALATELKADPDQMEMLRMLNQRWPFFRMLISKVEMTLSKVDLDVAHHYVVSLGGSDDRDAFARIFDIISSEYSLTKKLILEITGKSKLLSADPALQLSVNLRNRTIVPLGFLQVALLKRLRDQNRQPPISEDVSIDSTQSSRTYSRSELLRGALLTINGIAAGMRNTG

SEQ ID NO: 19271 - protein, 106 aa, Malus x domestica
TDVPAPDMGTNAQTMAWILDEYSKFHGHSPAVVTGKPIDLGGSLGREAATGRGVVFGTEALLAEYGRSCKGLTFVIQGFGNVGSWAAKLIHEKGGKVIAVSDITGA

SEQ ID NO: 19272 - protein, 125 aa, Castanea sativa
ALGGPEHVDIIQGIERGDALPGLRNYLDIAETARKVGFEVVKERDLAKPPALPWWTRLKMGRIAYWRNHILVMVLSALGIAPKGTLDVHEMLFRTADYLTRGGDSGIFSPMHMILCRKPESPASS

SEQ ID NO: 19273 - protein, 328 aa, Vibrio vulnificus CMCP6
MSMSKKPIPVTILAGFLGAGKTTLLNHILTNANGMRMAVIVNDFGSINVDAELVKSESDNMISLENGCVCCNLAEGLVVSVMRLLALEQRPDHIVVETSGISEPKEVALNFEDPELQQHAPLNAIITTIDAKNVLTLEKQMAELAEQQIQVADIVLINKVDLVEPDELAKVKQWCQVQAPFAKLVEIEFGKVDLPILFEVPERLQVSSHNREHGGEHHHCHDDHCDHVNHQFETFSFETDRPLSLQALYPLLQQFSIDAYRMKGILNLDDRPDHRCIFQCTGQRAQVTIGEPWQEGETRATRLVFIGPKGGLDRDGMRKKLDALVIQQ

SEQ ID NO: 19274 - protein, 458 aa, Pseudomonas fluorescens
MTTTSSSLADKDMRHQLHPYTNARAHEELGPLVIDRGDGVFVIDENGKPYIEAMAGLWSAALGFSNKRLVAAAEKQMSTLPFYHLFGHKAHAPSIELAEKLINMAPVPMSKVFFTNSGSEANDTVIKLVWYLNNAQGKPARKKIISRIGGYHGITLASASLTGLLANQRGFDVPLPGFLHVGCPHHYRHALPHETEEQFADRLAAELDALIVKEGPETIAAFVGEPLMGPGGVIVPPRTYWEKIQRVCRKHDILVVADEVICGFGRTGKDVRQPDFGIEPDIMILSKQLSSSYQPISAILINDRVYQGIADQTKSFGALGHGFTGGGHPVAAAVRLENLKIIDEENLVVHAAHMGELLRRGLQGFSDHPLVGEVRGAGLIAAVELVADRATKAPLDAPGTLGRFLAGRAQEHGMITRNLGDAIAFCPPLIINEDEDEVQSIVDRFGMALDDTSKWVNG

SEQ ID NO: 19275 - protein, 166 aa, Trigonospermum melampodioides
MFPTVTEFMNYGQQTVRAARYIGQGFMITLSHANRLPVTIQYPYEKLITSERFRGRIHFEFDKCIACEVCVRVCPIDLPVVDWKLETDIRKKRLLNYSIDFGICIFCGNCVEYCPTNCLSMTEEYELSTYDRHELNYNQIALGRLPMSIIDDYTIRTILNLPEIKT

SEQ ID NO: 19276 - protein, 243 aa, Triticum aestivum
  misc_feature (167)..(167): Xaa can be any naturally occurring amino acid
  misc_feature (185)..(185): Xaa can be any naturally occurring amino acid
  unsure (1)..(243): unsure at all Xaa locations
MAMPPAEKVIVVDANPSKNGHGDKFDDLPVADETSHQIGVDPWYQVAFVLTTGVNSAYVLGYSGSLMVPLGWVGGSVGLLLAAAVSMYANSLLGRLHLLGGKRHIRYRDLAGHIYGPKMYKITWAMQYVNLFMINTGFIIIAGQALKALYLLISTDGAMKLPYCIAXFGFRGARSFRSGIPYLSXALRIWVGLSHHSLTSPSFFATWRAGPSRERFPVPPPSGITGFPRENPFTPGVVPPPIG

SEQ ID NO: 19277 - protein, 166 aa, Venegasia carpesioides
MFPMVTEFMNYGQQTVRAARYIGQGFMITLSHANRLPVTIQYPYEKLITSERFRGRIHFEFDKCIACEVCVRVCPIDLPVVDWKLETDIRKKRLLNYSIDFGICIFCGNCVEYCPTNCLSMTEEYELSTYDRHELNYNQIALGRLPMSIIDDYTIRTIFNLPEIKT

SEQ ID NO: 19278 - protein, 451 aa, Burkholderia pseudomallei K96243
MFGDIRRIAGLAWPVLVGQLAIIAFGVIDTAMVGRFSALDLAALGLGMSIYVSIYIGLTGILSALQPIAGQLYGARRYAEIGEEVRQAMWLAVLLAAPGFLLLHFPHPLLRLAHAPAELTDRTVAYLRILSFGLPASLLFRIYNALTNAAGKLRLAMILQVGTLAVKVPLNLWFIFGGLGVPALGGPGCGLASTLINWALAIVGFTLLARLDVFEPLAIFARFTRPVWHRQKALLVLGVPMGLSYLIEVTSYTFMALFIAQFGTTTLAGHQIAGNIGAVLYMTPLSIGVASSTLVARALGAGRFDEARALGRHGVALACGLACAYGIVVFALRPLIVSGYTPNPAVAAAAMPLVAIVTVYHFFDALQITTAFVLRAHKMAVVPTAIYAIALWGVGLGGGYLLGFDVGGAVPAQFTGARGFWIASAASLMLAGGGLALYLRHIGKRETGGAR

SEQ ID NO: 19279 - protein, 431 aa, Shigella flexneri 2a str. 301
MVSLEKNDHLMLARQLPLKSVALILAGGRGTRLKDLTNKRAKPAVHFGGKFRIIDFALSNCINSGIRRMGVITQYQSHTLVQHIQRGWSFFNEEMNEFVDLLPAQQRMKGENWYRGTADAVTQNLDIIRRYKAEYVVILAGDHIYKQDYSRMLIDHVEKGARCTVACMPVPIEEASAFGVMAVDENDKIIEFVEKPANPPSMPNDPSKSLASMGIYVFDADYLYELLEEDDRDENSSHDFGKDLIPKITEAGLAYAHPFPLSCVQSDPDAEPYWRDVGTLEAYWKANLDLASVVPELDMYDRNWPIRTYNESLPPAKFVQDRSGSHGMTLNSLVSGGCVISGSVVVQSVLFSRVRVNSFCNIDSAVLLPEVWVGRSCRLRRCVIDRACVIPEGMVIGENAEEDARRFYRSEEGIVLVTREMLRKLGHKQER

SEQ ID NO: 19280 - protein, 166 aa, Bahiopsis tomentosa
MFPMLTEFMNYGQQTVRAARYIGQGFMITLSHANRLPVTIQYPYEKLITSERFRGRIHFEFDKCIACEVCVRVCPIDLPVVDWKLETDIRKKRLLNYSIDFGICIFCGNCVEYCPTNCLSMTEEYELSTYDRHELNYNQIALGRLPMSIIDDYTIRTILNLPEIKT

SEQ ID NO: 19281 - protein, 345 aa, Shigella flexneri 2a str. 301
MVINCAFIGFGKSTTRYHLPYVLNRKDSWHVAHIFRRHAKPEEQAPIYSHIHFTSDLDEVLNDPDVKLVVVCTHADSHFEYAKRALEAGKNVLVEKTFTPTLAQAKELFALAKSKGLTVTPYQNRRFDSCFLTAKKAIESGKLGEIVEVESHFDYYRPVAETKPGLPQDGAFYGLGVHTMDQIISLFGRPDHVAYDIRSLRNKANPDDTFEAQLFYGDLKAIVKTSHLVKIDYPKFIVHGKKGSFIKYGIDQQETSLKANIMPGEPGFAADDSVGVLEYVNDEGVTVREEMKPEMGDYGRVYDALYQTITHGAPNYVKESEVLTNLEILERGFEQASPSTVTLAN

SEQ ID NO: 19282 - protein, 56 aa, Solanum tuberosum
MGDSTMTCVDILLAIILPPLGVFLKFGCKVEFWICVLLTLFGWLPGIVYAVWVLTK

SEQ ID NO: 19283 - protein, 326 aa, Rickettsia prowazekii str. Madrid E
MDIKPEKYKPIKEEYIKSFKDMLLLRRFEEKCGQLYGMGKIGGFCHLYIGQEAVISAVAMIKKKGDSTITSYRDHAHIILAGTEPKYVLAELMGRATGCSKGKGGSMHLFDIPNKFYGGHGIVGAQVPIGTGLAFAEKYNGTNNICFTFLGDGAVNQGQVYEAFNMASLWGLPIVYIIENNEYSMGTSVARSTFMCDLYKKGESFGIRGFQLDGMDFEEMYNGTKQVAEYVRENSFPVILEVKTYRYRGHSMSDPAKYRSKEEVEKYKERDTLVRIREIILDNKYATEADLKAIEQSVREIIKVAVEFSENSPLPAEDELYTEIYV

SEQ ID NO: 19284 - protein, 339 aa, Flammulina velutipes
MAVKVGINGFGRIGRIVLRNALQVGGIEVVAVNDPFIDLEYMVYMFKYDSVHGRFKDDVHTKDGKLFIAGKPIAVFNERDPANIPWSSAGAEYIVESTGVFTTIDKASAHLKGGAKKVIISAPSADAPMFVCGVNLDKYDPKFKVISNASCTTNCLAPIAKVMHDKFGIVEALMSTIHASTATQKTVDGPSNKDWRGGRAVNNNIIPSSTGAAKAVGKVIPSLNGKLTGLAFRVPTLDVSVVDLVCRTEKSATYEEIKAAMKEASEGSLKDILGYTEDSVVSTDFVSDNRSSIFDAAAGIQLNGNFVKIIAWYDNEWGYSRRVCDLLVYAAQQDAKAQV

SEQ ID NO: 19285 - protein, 421 aa, Arabidopsis thaliana
MSPAIKAPLLPNQEPSSSSSENHGSFAGAVFNISTSIVGAGIMAIPAAFKVLGVIPSLSIIVIIAWLSNVSAGFLMKSSLAGESTTYAGVMKESFGKSGAVAVTVVTMVVTFGSMIIFSIIIGDVISGNEKDGIIHLGLLQEWFGSHWWNTRFFERLAFSSAISFLLALLFVVISSVLAIIALVQGKTKPPRLFPELNDGGLSFFSLFTASPVIVTAFTFHFNVHPVAFELKDPLNVLSATRISVILCATIYSATGLFCYLLFGDSTMTDVLMNFDQSTSSSVGSLLNDIVRLSYAIHLMLVFPLLNFSLRANLDELLFPMKLSLVEDNKRFFALTFPLLISCFLGAIAIPDIWYFFQFLGSTSTVSIAFIFPAAIVLRNVNGFSTLREKIVASVMLVLAVATSIIAISTNIYTFTATEET

SEQ ID NO: 19286 - protein, 100 aa, Brassica napus
MAKSQIWFGLASLLALIVVSAVADDVVVLTDDSFEKEVGKDRGVLVKFYAPWCGHCKKLAPEYEKLGASFKKAKSILIAKVDCDEHKSVCTKYGVSGYPT

SEQ ID NO: 19287 - protein, 334 aa, Mycoplasma mycoides subsp. mycoides SC str. PG1
MNYLLIGGAGYIGSHVAEIINKTDNNKVIIYDNLSSGLNDFIEQKSTFIQGDILDFNKLNEVFSSNKIDVVIYLAGLIKVGESVQKPLDYYQTNILGLINTLKIMQAHNVNYFVFSSSAAVYGNNSRHNGYFYEDDPKEPCSPYGRTKYFGEEIIKDFAIANPNFHYTFLRYFNVAGASKSKRIGYLTKDNNKPTHLIPAISYFAFGLTDQFSIFGSDYNTKDGTCIRDYVYVCELAELHLLTAQKMVKENCNLYYNIGSGKGFSNLEIIKKFEKQLGYKLNIDIAPKRSGDPDVLVASNTKLCQELNYKIKTNIKDIVESEIAFRKAHLKNKE

SEQ ID NO: 19288 - protein, 596 aa, Listeria innocua Clip11262
MKIWNSIVGKIWSTIILLLIGILVISGFLVAMIYEKNNMAHITKELEETTSSIITIMKENDEVISNENDNDSALTLLDNTMGVIIEENGKNIYQSQSPDTVSSASANKLIHDKTLNKALEKDNSITMKYNFKTEDSSLPVEISAQKFVLSNGESGVVYVYQSYHDILKVNQKTMRTLIVSGIIAIVITSILSFVFSSRMAFPLREMKKIAIAVSKGNFDNRVPTYTHDEIGELGVAFNDMAKQLKYNISALRQEKEQLSNILVGMADGVIKFSVDKTIILSNPPAEEFLHNWFFSPENTEKVLIPTALNDLLNDTLDKKESQVGEITFSDRTYVAILTLLYTGEHVRSIVAVIRDMTEEKQLEKMKSDFVNNVSHELRTPISMLQGYSEAIIDGVAQSDEEVREFAQIIYDESLRIGRLVNDMLDLARMEAGFNQMDNQKLPLAPLLRKVIANFDVLAKENFVELGLELETPDLEYSYDPDRMEQVLINLIMNAIRHTGKEGYAGKVILKQTIDETRNNLVITVSDNGSGIAEEDIPYLFERFYKVDKARKRGKAVGTGIGLAIVKNIVEAHNGKISVESVLGKGSDFIITLPLYK

SEQ ID NO: 19289 - protein, 357 aa, Magnaporthe grisea 70-15
MILRLRTAVLAVASLSGLALSQTWSACNPMHTTTCPADPALGMAINVDFTKGAVNSFAPSGGNPTYGSDGVTFTVAKGGDSPQLISQFYIMFGRVEIVMKAAPGKGIVSTLVLQSDTLDEIDLEWLGADGSEVQSNYFGKGLTTSYNRGQFHANPGNQDGFHKYVIDWTDERIVWLIDGTAVRTLKASEAEPNQYPQTPMQIKFGAWSGGDPSLPKGTIDWARGPTDYSKGPFSMKVKSVMVADYSTGKQYKYTDQSGSWGSIKAVDGDVNGNLGKVGSPTITATALASSSLSPGVPAGIGANPSPAPRVTGALPDGWVMRPNGKIVPIGNAVHNRPRLALALGPLALSLLLCALML

SEQ ID NO: 19290 - protein, 257 aa, Rhizobium sp. NGR234
MTSSALPRTPSFRLDGKTALVVGASSGIGQAAAVALAEAGANVTLAARSIDKLERTVEALQHMELSATALALDVEDVEATELTIESGAAFDILVNSAGLACHGPALETTIADFDTVMGINVRGAYFVTRAVARKLVATGRTGSLINISSQMAHVGGIDRAVYSATKHAVEGFTKSMAIEWGMHGIRVNTICPTFIRTPLAERTFANPERVRWIEEKIKLGRIGELEDIMGPVTFLASEAAAMITGSALMVDGGWTAD

SEQ ID NO: 19291 - protein, 282 aa, Triticum aestivum
  misc_feature (217)..(217): Xaa can be any naturally occurring amino acid
  misc_feature (222)..(222): Xaa can be any naturally occurring amino acid
  misc_feature (237)..(237): Xaa can be any naturally occurring amino acid
  misc_feature (260)..(260): Xaa can be any naturally occurring amino acid
  misc_feature (266)..(266): Xaa can be any naturally occurring amino acid
  misc_feature (273)..(273): Xaa can be any naturally occurring amino acid
  unsure (1)..(282): unsure at all Xaa locations
MASALSAPAASAVAAARCKVFGGGRNDGRAGCRVGVARKNTSHITMAVAVDASRFEGVPMAPPDPILGVSEAFKADTSDLKLNLGVGAYRTEELQPAVLNVVKKAEKLMLEKGENKEYLPIEGFAAFNKATADLLLGADNPVIKQGRVATLQSLSGTGSLRLAAAFIQRYFPDAKVLISSPTWGKHKNIFNDARVPWSKYRYYDPKNVGAGFLRGNXILDIXAAPEGSFVLLHGCAXHPTGIDPTPEQWEKLADVIEEKXHMPFFXCAYQGFXASGSLDEDA

SEQ ID NO: 19292 - protein, 301 aa, Shewanella oneidensis MR-1
MNKLTDFERYVIEEKGTERPFSGQYYQHDAKGVYLCKKCHTPLYRSEDKFNAHCGWPAFDDEIPGAVSRHIDADGRRTEIVCSQCGGHLGHVFEGEFLTPKNIRHCVNSVSMLFKAQDEAEDIAPKHAFATFGAGCFWCVEAIFKSLKGVLNVRSGYSGGEASDADYKSVCSGQTGHAEVVHIEFDPEQIAFTTLLQVLFESHDPTTLNRQGNDKGPQYRSVVFAHDATQVDEANAMIAKLTEARVFDAPIVTQVVAFESFYPAEAYHNDYFALHGEQPYCQIVVRPKVEKIRALFAELQV

SEQ ID NO: 19293 - protein, 335 aa, Schizosaccharomyces pombe
MQQTYKPNTSALKDGAPKATVDQKQLLPCKYRVGRVLGGGTYATVREAVHIETNKMYAAKIMNKKMMEKKQDFVKNEIAILKRVSYEHPNILHLVDFFETVNNLYLITELATGGELFDRICAKGSFYEADAAALMRTTTSAVKYLHDNGIVHRDLKPENLLYRSKDPNSDLLIADFGLSHFYEDSQYYMLMTACGTPEYMAPEVFRRTGYGKPVDMWAIGVITYFLLSGYTPFARPSQVEVIEAILANEYTFNDPCWSGISETAKDFIKKCLENDPSKRLTAADALKHPFLSEKRPATSNLLPNVRENFNARKTFRTAYNAVRAFNTWKKLENKH

SEQ ID NO: 19294 - protein, 295 aa, Stigmatella aurantiaca
MYKQGHGFFWIGGPGEEAFNVPLGMLMKKGQGPAFDYLHAHYRQSATLLALGEEPIGALRQMKNTATDPYSGGRNFAGHFSKKAWNIAPVSSPIEVQYAIAPGTAMAQKRHGGDGITIVTGGDAGTAEGDFASCLIWSSRPANPLPILIIVTNNHWGISTAAEGQHGETHIADRGRAFNIRSKTINGNDPAESYRELKEAMEYVRQERKPFLLEARVSRLYGHSSASGANFVTNEVDCLKEFETRLEGEGVLTRQQMDALRHGYAEELAAAARLVRDEPLPSVDTLWNHVYAEKK

SEQ ID NO: 19295 - protein, 396 aa, Erwinia carotovora subsp. atroseptica SCRI1043
MFENISAAPADPILGLTDLFRADDRADKINLGIGVYKDETGKTPVLTSVKKAEHYLLENETTKNYLGIDGLPAFGQCTQELLFGKQNAIIADKRARTAQTPGGTGALRVAADFIANQTSAKRIWISNPTWPNHNNVFSAAGLEVCQYDYYDAANHALDFDGLLNSLNAVEAGDVVLFHGCCHNPTGIDPTAEQWATLAELSVAKGWLPLFDFAYQGFARGIEEDAEGLRLFAAKHAELIVCSSYSKNFGLYNERVGACTLVAADAATADKAFSQVKAAIRANYSNPPSHGATIVATILGNDALKAIWEQELTAMRERIQRMRQLFVNTLQEKGAQQDFSFIINQNGMFSFSGLTKEQVLRLRDEFGVYAVNSGRVNVAGMTPENMAPLCEAIVAVL

SEQ ID NO: 19296 - protein, 221 aa, Arabidopsis thaliana
MDPYKNLNPKGYQRQRPFSSAGESGGSGGSGTAHETDDNKKKKKLLHRDIERQRRQEMATLFATLRTHLPLKYIKGKRAVSDHVNGAVNFIKDTEARIKELSARRDELSRETGQGYKSNPDPGKTGSDVGKSEPATVMVQPHVSGLEVVVSSNSSGPEALPLSKVLETIQEKGLEVMSSFTTRVNDRLMHTIQVEVNSFGCIDLLWLQQKLVEDLILSTGY

SEQ ID NO: 19297 - protein, 244 aa, Eucalyptus globulus
MGRGRLQLKRIENKINRQITFSKRRAGLLKKAHEISVLCDAEVALIVFSAKGKLFEYSTDSCMERILERYERYSYAEHQVLASETESIGSWTLEHAKLKARLEVLHRNYRHFMGEDLDSLSLKDLQNLEQQLESALKHIRSRKNQLMHESISVLQKKDRALQEQNNLLTKKIKEKERALAQQAQWEQQDHALDSPVVLPHYLPSLDINGSYQARHNGHDDGENLTQPRAGTLLPPWISASQLRL

SEQ ID NO: 19298 - protein, 144 aa, Oenothera elata subsp. hookeri
MAKSIPSAGLRLRLRLRRNARRRSRKSTRKIPKGVIHVQASFHNTIVTVTDVRGRVISWSSAGTCGFKSTRKGTPFAAQTAAGDAIRPVVDQGMQRAEVRIKGPGLGRDAALRAIRRSGIRLSCIRDVTPLPHNGCMPPKKRRV

SEQ ID NO: 19299 - protein, 499 aa, Methylobacillus flagellatus KT
MIFNSPKKQRAHTLRILFVTSEAYPLIKTGGLADVSGSLPAAIRDLGIDIRILLPGYPAVLEKLQEKHLITQIHGLPEVGSVNLLGGKMPDTGVDVMVVEHAQLFERPGGPYNDGQGIDWGDNALRFGILSKVGSILGGLHSPLQDDWIPDVVHCNDWQSGLTPAFLHHSASPHARSIISIHNLAFQGNFAPEWVQRLGLPNHSYQMHGLEYYGQMSFLKAGIYYADSITTVSPTYAREIQTEQYGFGMQGLLAARSHEIHGILNGIEIQEWNPATDPYLAKTYNLEHLADKKIVKKALQVQLGLETAPHKPLLGVVSRLTHQKGLDIFLEVAESLLAKHCQIVVLGSGEAHMENGFKDLARRYPRQVSVTIGYKEPLSHQIMAGADMFIMPSRFEPCGLNQMYGLRYGTPPVVTRTGGLADSVQDSNSTTMKNNTATGFVLESAEPRQLLHTVQRALVYYHDPRAWRRIQRNGMRRDLSWTSSAKLYLDLYQSLAQRR

SEQ ID NO: 19300 - protein, 211 aa, GIBBERELLA ZEAE PH-1
MFARGIRAVSRRAAIAAPLARPTILPATRQIAPAVAVNSSRSYHEKVLDHYSRPRNVGSMNKKDADVGTGLVGAPACGDVMKLQIRVDPETQKISEVKFKTFGCGSAIASSSYLTELVRGMSLDDAGKVKNTEIAKELCLPPVKRTLSHHAAYYIDTQTDFNIVHCSMLAEDAIKSAISDYYTKNPNAKVSNLSGTGMKLPEADAPAAATA

SEQ ID NO: 19301 - protein, 399 aa, Geobacter metallireducens GS-15
MREAVIVDAVRTPVGKFNGALKNVRSDDLAAHCISELVKRNNLDPNLVEDVVLGCTNQAGEDNRNVGRMAALLAGLPYSVAGQTINRLCASGLNAINSAAHAIKLGEGDVFIAGGTESMTRAPFVMAKSESPFSRDIRVFDSVIGWRFTNPKMTEPYAKEGMGETAENVAVRYGLTRQEQDEFALETQRKWAAADAAGKFNDEIVPVVIPQKKGDPIIVSRDEFPRGNDVTMEQLAKLPAAFRKEGTVTAGNSSGINDGAAALLLMEAETAKKLGYKPLARVVASAVAGCDPSYMGLGPIPAIQKVLQRSGLKIEDIDLFELNEAFAAQSIPCIRELGIDPAKVNVNGGSIAIGHPLGSTGARITATLVHEMKRRGSRYGLVSLCIGVGQGIATIFERV

SEQ ID NO: 19302 - protein, 129 aa, Solanum tuberosum
MGRLFVLTLEGKIYSCKHCGTHLALSENIVSKSFHCKHGKAYLFSKVVNVTSGEIENRMMMTGMHTVADIFCVCCGSIVGWKYETAHEKSQKYKEGKSVLERFKITGPDGSHYWASHDTHVAGSDADDV

SEQ ID NO: 19303 - protein, 439 aa, Desulfovibrio vulgaris subsp. vulgaris str. Hildenborough
MLEAKNRLGVIFFPAFDWAISPTHPEREERLLYTQDQLREEGLFDIAGITEHKPDVATREDVERVHFCLPDVSSVCTKSHLVSAGGAIKAARLVMEKRADKAFALIRPPGHHAMRVVHGNRGFCNINIEAVMLEHIREQYGRLRVAIVDTDCHHGDGTQDIYWHDRDTLFISLHQDGRTLYPGTGFPQELGGPNAMGRTINIPLPPGTSDRGFLHVIEHVVRPILDDFKPDLIINSAGQDNHFSDPITNMNFTARGYAMLNRMLDPDIAVLEGGYAIQGALPYVNLGICLAMAGLDFDDVREPGLDLAAIEQPRNVTDYIERLCDELPRLYFEPPARPKQGDVVGDTFVRTRDVYYDTDGISESQVETVTLCEHCSGAMKVETWSTVNPLSVGIHIPQDACDACHAAGLRMEDEAKTRGNYRYIQCIDRRGKRYTQHGF

SEQ ID NO: 19304 - protein, 358 aa, GIBBERELLA ZEAE PH-1
MDAEWRGNETPASNTFSLKQLPTSLFPQPAIVKTNNLDLKAIYSRSLKSAQETAALDTRGTVAGSGSGPELYSADSGSGKSLNDLLARDDIDAVIIALPIPSQPEYIQAALAAGKHVLAEKPIAPSVADANKLIEYYRSLQGKGTFSIAENFRYKPCFEYAANEAAKLGALQHFSVRVLFFMSEDSQWYGTSWRAKPQFQGGFLLDGGVHFVAAMRQLFDEPAADVSAFTSQVQPHLAPVDTVNAVIRLKSGVSGTYQQSCGTKMSTSAFQFGYEKGSVVVDGDKVTVTPWEGEQVVKDFERTSGVDEEIEAWANALVDGKPDKRQSVEEALADLELLEMMFESGSDGGAAKKYQHQF

SEQ ID NO: 19305 - protein, 493 aa, Burkholderia pseudomallei K96243
MRSIAARSSHAGAGLEQEGVMDLEEGVRQLYPYAAEFGALHEFPERGMPRERLLEELRSMAVREDRKWESGRCSGTMYCGDHEHYAFLNEAYGLFSHVNALQRDLCPSMNRMESEIVAMTVALLHGEAVQRHDGAHRACGALSLGGTESILNATLAYREKARAERGIERPRMIWPASAHPAFRKAAHLFGFDVTVAPIDPVTMQVDADFVRDAVDANTVMLVGSACNYPYGTIDPIGALSAIAVEKDVWLHVDGCLGGWMLPWGEALGYPDIPAFDFRLPGVTSISADTHKFGYGPKGGSVLAWRDASFRRHQYFLMTDWVGGVYGSPGLTGSRSGGLIAATWAALRSLGREGYLARAKAIFETAFDMQAAVRAIPELRVLGKPTFCFAFTSDAFDIYHVNDFMRQRGWRFNGLQHPDALHMCVTGPQTQPGVAERFRQDLGEAVEHARHRAHARPQSSGVYGGDAAGLDLRDDARARAFFTQVLDLFTDCPL

SEQ ID NO: 19306 - protein, 231 aa, Brassica napus
MINFEATELRLGLPGGNHGGDMATKNNGKRGFSETVDLKLNLSSTALDSVSGVDLENMKEKVVKPPAKAQVVGWPPVRSFRKNVMSGQKPTAGDATEGTEKTSSSNGATSSAAAYVKVSMDGAPYLRKIDLKLYKTYQDLSDALSKMFSSFTLGNYGPQGMKDFMNESRLIDLLNGSDYVPTYEDKDGDWMLVGDVPWGMFVDSCKRIRIMKGSEAIGLAPRALEKCKNRS

SEQ ID NO: 19307 - protein, 430 aa, Helicobacter pylori J99
MELLHSINDFNEAKQVIAGGVNSPVRAFKSVKGTPPFILKGKGAYLYDVDNNHYIDFVQSWGPLIFGHADEEIEENIINVLKKGTSFGAPTELETTLAKEIISCYEGLDKVRLVNSGTEATMSAIRLARAYSQKDDLIKFEGCYHGHSDSLLVKAGSGCATFGSPSSLGVPNDFSKHTLVARYNDLNSTEECFKKGDVGCVIIEPIAGNMGLVPAQKEFLLGLKALCEKYQAVLILDEVMSGFRASLSGSQEFYGVVPDLVTFGKVIGAGLPLACFGGRAEIMDLLSPIGGVYQAGTLSGNPLAVCAGLSALYKIKRDKTLYTRLNALAVRLTQGLQKSAQNYNIALETLNMGSMFGFFFNENAVRDFDDALKSDTEMFAKFHQKMLFKGVYLACSSFETGFICEPMTEEMIDLAISKADESFDEIINGV

SEQ ID NO: 19308 - protein, 463 aa, Vibrio parahaemolyticus RIMD 2210633
MNRYRQLAELFKTQIQQNTWRAGEKLPSVRVTSRNHSVSAGTVLQAYQLLEAQGWVAAKPQSGYFVTAELDRLEPSPPATSVYRSNINDELYDYLKNQASPDAMKFGSAFPDPALFPLDALNRNLASSGRKMGPETLLDNLPPGSESLRRLIAQRYIQQGMVLTHDDIVITSGALEALNLSLQAVTQPGDTIVVESPTFYGALQAIERLGLKAIEISVDPRIGHSLQQIEAAFTDHDVRACWLMTNFHNPTGMSLNDEQKQRIVELADKHDVYLIEDDVYSELYFSNKKPSSLRTFDTQDRVLHCGSFSKSLCPGYRLGWVVNKRFNEHLQKLQLISTLSGSAPIQQGIAHYLQNDSYDNHLRKLRKNLEQRQSTFIELIGKYFPKSIHYTQPEGGYFLWVELPESKCGKAIYQKLLEDNITVAFGKLFSVGTDYENYLRLNTSLPCNDELEEAVKTIGELLH

SEQ ID NO: 19309 - protein, 503 aa, Tropaeolum majus
MSGTKATSVSVPLPDFKQSVNLKYVKLGYHYSITHAMYLFLTPLLLIMSAQISTFSIQDFHHLYNHLILHNLSSLILCIALLLFVLTLYFLTRPTPVYLLNFSCYKPDAIHKCDRRRFMDTIRGMGTYTEENIEFQRKVLERSGIGESSYLPPTVFKIPPRVYDAEERAEAEMLMFGAVDGLFEKISVKPNQIGVLVVNCGLFNPIPSLSSMIVNRYKMRGNVFSYNLGGMGCSAGVISIDLAKDLLQVRPNSYALVVSLECISKNLYLGEQRSMLVSNCLFRMGGAAILLSNKMSDRWRSKYRLVHTVRTHKGTEDNCFSCVTRKEDSDGKIGISLSKNLMAVAGDALKTNITTLGPLVLPMSEQLLFFATLVGKKVFKMKLQPYIPDFKLAFEHFCIHAGGRAVLDELEKNLKLSSWHMEPSRMSLYRFGNTSSSSLWYELAYSEAKGRIKKGDRVWQIAFGSGFKCNSAVWKALRNVNPAEEKNPWMDEIHLFPVEVPLN

SEQ ID NO: 19310 - protein, 242 aa, Solanum tuberosum
MASNGENGRHQEVGHKSLLQSDALYQYILETSVYPREPEAMKELREITAKHPWNLMTTSADEGQFLNMLLKLINAKNTMEIGVFTGYSLLATAMALPDDGKILAMDINRENYEIGLPVIEKAGLAHKIDFREGPALPVLDQMIEDGKYHGSYDFIFVDADKDNYLNYHKRLIDLVKVGGLIGYDNTLWNGSVVAPPDAPLRKYVRYYRDFVLELNKALAADPRIEICQLPVGDGITLCRRIS

SEQ ID NO: 19311 - protein, 294 aa, Helicobacter pylori J99
MKTKNPAKRILKTAVIQMQSKPYALNENLQLALNLAKEAHNKGANLIVLPELFDSGYCVNDKDADFGLDFKAIEHGEETLKNETLRALSDFAKSSDTHIVACSIEKNNKKLYDSAYIIPPKGKIVGKHRKIYLWGDEKSRFKRGKKYEVFTLDFGDFSAKVGLQICYETGFGVGANLLVLQGAEVLIYPSAFGKARAYNWDLLSKARALENGCFVCACNHSGEETNAKLKQTLEFAGDSRIIAPNGKIIAQATKLNEVIIAEMDLNEVALQRQKIPYLQDFDTKLTKKGFGKLT

SEQ ID NO: 19312 - protein, 321 aa, Helicobacter pylori J99
MPKIPITLITGFLGSGKTSFLSEYLNQIDHQGVALIINEIGQAALDQRILSVQYCGEKMLYLNAGCVCCNKRLDLVESLKATLNNYEWRGEILKRVIIETTGLANPAPILWTNLSDVFLGAHFEIQSVVACVDVLNAKTHLTNNEAKEQIVFADSVLLTKTDLQNDSTALMKLKERIQSLNPSAEIFDKKNIDYESFFSRKNGARNFMLRMPKDSHSQGFETLSVSFEGTMEWSAFGIWLSLLLHQYGTQILRIKGIIDIGSDLLVSINGVMHVIYPPKHILKDQNGSNLVFIVRHLGREKILNSLKGFKDFLGIKGFETP

SEQ ID NO: 19313 - protein, 451 aa, Zea mays
MLEVSTLRGPTSSGSKAEQHCGGFVGDHHVVFPTSGDCFAMVDDNLLDYIDFSCDVPFFDADGDILPDLEVDTTELLAEFSSTPPPDDLLAVAVFGGDEQPAAAVAQEKPSSSLEQTCGDDKGGGVAVASRRKLQTTTTEEDSSPAGSGAKSSASAEGHSSKKKSAGKNSNGGKRKVDWTPELHRRFVQAVEQLGIDKAVPSRILEIMGTDCLTRHNIASHLQKYRSHRKHLMAREAEAATWAQKRHMYAPPAPRTTTTTDAARPPWVVPTTIGFPPPRFCRPLHVWGHPPPHAAAAEAAAATPMLPVWPRHLAPPRHLAPWAHPTPVDPAFWHQQYSAARKWGPQAAAVTQGTPCVPLPRFPVPHPIYSRPAMVPPPPSTTKLAQLHLELQAHPSKESIDAAIGDVLVKPWLPLPLGLKPPSLDSVMSELHKQGVPKIPPAAATTTGATG

SEQ ID NO: 19314 - protein, 204 aa, Streptococcus pyogenes M49 591
MEAEMVTVSKEQHLDMFLKMERIREFDSRINKLVRRGFVQGMTHFSVGEEAANVGAVAHLSYDDIIFSNHRGHGQSIAKDMDLNKMMAELAGKATGASKGRGGSMHLADFEKGNYGTNGIVGGGYALAVGAALTQQYKGTNNIAVAFSGDGATNEGSFHESVNMAATWKLPVIFFIINNRYGISMSINNATNTPHLYTRITRRP

SEQ ID NO: 19315 - protein, 654 aa, Debaryomyces hansenii CBS767
MDGNFRRMSGEKEPHRPQPTALGRFELIIKFVFRCAILPWLLWELGFRSYYKTVLGVFDMIFKVLLLLIAPENGGLFNGISGDNGRYGVNSAGGVDIDGLFDDVLREGKVNVEKKSDTFILRINSRYRWVIDGIESQQIWQSTRENVEELYFIFEKADYVFDRYVKHSPFCVLNKLNPNGKKSHYEYDGIPLSKFEGFGSYLLYKRLGTKTLTTTKPHLHPILSSTMTAIQKPVVAKREAPKAEVNPTVSRLTQTETIKPTKERTVSVFSPPVFNFAANSFAQSVSNEYKHASPKRIKLDNSRVQVPSIVKPKQDKPRPPAIVTKPRVINIEFPNKQKSGFKLLIRPKHEPSIKKQKQGIEVLSTSNTKRITKSISVDDVEYVEKVKHAIKQVLPKPDYDDGSLGPVILRLAWHCCATYNKFTGNGGSNGSTMRFVPEITDDGNSGLDIARSALEPIKQKFPDITYSDLWTLAGKISIQEMGGPKIPWRCGRVDCIDDRYVPPNGRLPFAYKNANHIRETFGRMGFNDRETVLLLGAHGLGRCHKRFSGWEGKWTENPTSFSNDFYKVLLDEEWSLGTVPETGKEQYYNKDKSLIMLNTDIELIRDPHFLHFVKLYSQHQATFFQDFANAFGKLLELGIERDSNGNVLPKNEFY

SEQ ID NO: 19316 - protein, 137 aa, Streptomyces coelicolor A3(2)
MTQRSLVLLKPEAVRRGLTGEIISRIERKAGWQITALELRTLDTETLEQHYGEHKGKPFYEPLVEFMASGPVVAMVVEGERVIEGVRALAGPTDPIAAAPGSIRGDYGVIVRENLIHASDSEESAERELKIFFPGRV

SEQ ID NO: 19317 - protein, 587 aa, Magnaporthe grisea 70-15
MSTSTQVRTSSAIKIMSPTLLAIDESAAAAETVGPIGLPAKQVPEHPNSVAARAPKLERPRRITFKDIADKRTRAGKLVALTASASDSDMFKVAAAGQKPKARRWDHLLSQESASRKPCRLKQAALNLRKPGIISLGGGLPCPDNFPIESISMRVPSVSGGFSEADTRAHGLDVTVGKYDVQEQAEDPNGAVYDLSIALNYSQATGSAQMMRFVTEHTELVNNPPYADWRCSMSIGSTGALEMALRIFCDRARNDSMLTEEFSFSTAVETAMPLGIKVFGVPVDGEGLIPEKMDEILRTWKPEERKGAAKPHVLYTVPSGQNPTGSTQSEERRRALYQVCREHDVYIIEDEPYYYIQMPPYRGRDAKKEEEQSNDAEETPEQFLESLVPSILSMDVDGRVLRMDSFSKVVVPGSRMGWVTASEQIIDRFIRHGESCNQGPSGIAQVLLHKLLDETWGHEGYIRWLMSVRGEYTRRRDVLLAACEDHLPREVVNWEVPKTGMFHWLKVDHTKHPCASTMSISEMEAEIFKDCIDKGVLVAAGSWFMADHDAEPSGLFFRATFAAATPDNMIEATRRLGDAIRSSFQLN

SEQ ID NO: 19318 - protein, 356 aa, Lactobacillus acidophilus NCFM
MVKQVVKDVKKDKSITEDDFTARLIKPYNLQGKAVDQLVQEFEDNGISIVDENGDPSKLALKKQKDVEKAELKDMSAPSSVRMNDPVRMYLKEIGRVPLLTADQEIALAKRIESGDEEAKQELAEANLRLVVSIAKRYVGRGMSFLDLIQEGNMGLMKAVDKFDYRLGFKFSTYATWWIRQAITRAIADQARTIRIPVHMVETINKLIRIQRQLLQDLGREPTPEEIGAEMNMPTNKVRDILKIAQEPVSLETPIGEEDDSHLGDFIEDKDATSPEQHASYEMLKEQLEQVLETLTDREENVLRLRFGLDDGRTRTLEEVGKVFGVTRERIRQIEAKALRKLRHPSRSNQLRDFMD

SEQ ID NO: 19319 - protein, 276 aa, Listeria monocytogenes str. 4b F2365
MKKITPKAMCAWIPKREDETHKGDYGRVLIVAGNKQFGGAAIMAAEACVKSGAGLTTVASDSVNRPALQTRIPECMFIDYENISSLSEQISQFDTILIGPGLGLDAYAEEIFRLVLEKSTEQQQVIIDGDGITIYAKGENPHPAAKLTFTPHAGEWERLKVLAPDAVTPTDVALAIDATIVLKGHRTKVYSGESAWQNMYGTPAMATGGMGDTLAGTICGLMAQTEKPITGTLAAVFLHSYIGEILAKKRYVVLPTEIAEELPTYLKIFSETDEHA

SEQ ID NO: 19320 - protein, 474 aa, Ehrlichia ruminantium str. Gardel
MIKKYRKKCMQNYDVVVIGGGPGGYKCAIRSAQLGLKVACVDKNEILGGTCLRVGCIPSKALLHFSHEYYHIKNHLDEVGITCNSLSFNLDKIMSFKNKNITELGNGINYLFASNKIDRLCGVGKIRSINSNNFDITVTGNNGEEKITAKYVVIATGSEVASFPGIEIDENNVVSSTAALSFKEVPKKLVVVGAGAIGLEMSSVWSRFGSEVTVVEFLDKIAPSMDIDISKALLASLKKQGINFKLSTKVTSIDKSSDNLTIHLESVKDGKSEIIEAEKVLISIGRIPYTDGLIDQNCIECDSRGFIKVNNKYETNIPGIFAIGDVIGGAMLAHKAEEEGIAVAELIAGNIPHVDYDIIPSVIYTHPAVASIGKTEESLKNINYAYNVGKSNFSANSRSKITNNGEGFVKVLTSKENNAILGVHIIGAYADTIINEAAIAMAYRASSEDVFRISHSHPDVNEAFKDACEAAYLK

SEQ ID NO: 19321 - protein, 264 aa, Salmonella enterica subsp. enterica serovar Typhi Ty2
MNDSLKAQCGAEFLGTGLFLFFGIGCLSALKVAGASLGLWEICIIWGLGISLAVYLTAGISGGHLNPAVTIALWLFACFPKQKVLPYIIAQFAGAFGGDLLAYVLYSSLFTEFETAHHMVRGSVESLQLASIFSTYPAAALNVWQAALVEVVITSILMGMIMALTDDGNGIPKGPLAPLLIGILVAVIGASTGPLTGFAMNPARDFGPKLFTWLAGWGNMAMSGGREIPYFIVPIVAPVIGACAGAAIYRYFIGKNLPCNRCKL

SEQ ID NO: 19322 - protein, 166 aa, Zinnia juniperifolia
MFPMVTEFMNYGQQTVRAARYIGQGFMITLSHANRLPVTIQYPYEKLITSERFRGRIHFEFDKCIACEVCVRVCPIDLPVVDWKLETDIRKKRLLNYSIDFGICIFCGNCVEYCPTNCLSMTEEYELSTYDRHELNYNQIALGRLPMSIIDDYTIRTILNLPEIKT

SEQ ID NO: 19323 - protein, 257 aa, Listeria monocytogenes str. 4b F2365
MTKTLTNKLAKKDHAAVVTYIMGGDGGLDNLEEQLLFLEKSGVSAIEIGIPFSDPVADGPIIQLAGLRALKEQVSLEAILNKLARSKVQIPLIIMSYINPIFHLGIPKFVELVQKTPVKGLIIPDLPYEHQTLITPELQGTDIALIPLVSLTSPKERLEEIAKQAEGFIYAVTVNGTTGVRSEFDAHIDNHLAYLKSISPVPVLAGFGVSSIEHVEKFAHVCDGVIIGSKVVQMLHEEKTAELGAFLQKAAEVRIEN

SEQ ID NO: 19324 - protein, 507 aa, Bordetella bronchiseptica RB50
MPGRGCVPRFFSSDSIDMTISPLQLLNDPSLLRTDALVDGRWIAASRRFAVHDPATGRKLADVANLDAAHAREAIAAAQAAWPAWRARTVKERSAILRKWFDLLLANQDDLARLLTAEQGKPFGEARGEIAYAASFVEWFAEEAKRINGETLPAFDNNRRLLVLRESIGVCAAITPWNFPLAMITRKVAPALAAGCPVIVKPAEHTPLTALAAAQLAVRAGVPAGVLGVLPADGANSIAIGKELCANDAVRHLSFTGSTEVGRILMAQSAATVKKLSLELGGNAPFIVFDDADLDSAVEGAMQSKYRNAGQTCVCANRIYVQDGVYDAFVEKLADAVRALKVGPGFDEGVTQGPLIEPEAVDKIERHIEDAVSKGGRVVAGGRRLGGLFFEPTVLVDATSQMLCAREETFGPLAPVFRFHADEDAIAAANATEFGLASYLYSRDVGRIFRAAEALESGMVGVNVGILATEHVPFGGVKQSGLGREGGRHGIDDYVEIKYMCVGDILK

SEQ ID NO: 19325 - protein, 426 aa, Rhodopseudomonas palustris CGA009
MTVTRDKFGRPIVVVTGMGVVTSLGAGKNDNWAKLTAGESGIRTITRFPIDGLKSTMAGTVDFVPVEPFSSVVLGEKLADLATEEAIAQSGIGRKGDFPGPLFLAVAPVELEWLPRQELARATGANTAIDYDALLRVSGGGTFTQYHRRFLFGSVADHLADTFGTKGSPISLSTACASGASAIQLGVEAIRRGEADAALCVATDGSVNAEALIRFSLLSALSTQNDPPQASSKPFAKNRDGFVMAEGAGALVLESYESAVARGASILGVIAGCGELADNFHRTRSSPDGKPIIGCINKTLADAGMSVDQIDYINAHGTGTPENDKMEYLGISSVFGERASSLPVSSNKSMVGHTLSAAGAVEAIFSLLTLEHQRIPPTINYDVPDPAIPLDVVPNQARDARVTAVMSNSFGFGGQNASLILTREPA

SEQ ID NO: 19326 - protein, 448 aa, Brucella melitensis 16M
MNIRPEAGDVAGMNITIEETLDQAGTGSFQRGLLGIFGLVWAADAMQVLAVGFTGAAIAKTFGLTVPQALQTGTLFFLGMLVGAALFGRLADKYGRRRILLITVACDALFGLLSAFAPDFGSLLALRFLTGLAVGGTLPVDYAMMAEFLPAKNRGRWLVMLEGFWAVGTVVIAIAAWATSVAGVEDAWRYIFIVTAAPALIGIWLRFRVPESPMHLLKSGRVEEAKAVINLVLSRNGKPELPPGAKLLAPRLVTNERLLSPNLRQRTLTSLAIWFLVSVSYYGIFTWIPAKLASDGFGFVRGYGFLVVVALAQLPGYALAAYGVEAWGRRKTLIGFLFVSAAACALFTVATSSSVVGASILIMSFALLGTWGALYAFTPELYPTALRASGMGAAGAMARLGGLLAPSAMAVVINQSFYTAVAMFAGLLALAGIIAFFINVETRQQALN

SEQ ID NO: 19327 - protein, 507 aa, Burkholderia pseudomallei K96243
MRVACFVDFMQPHPGNIRTHIGVPTDVGTAKENVMDLEEGIRRLYPYAEEFGVMRGFPEQGTPRDELLAQLRSMAEREDRNWESGHSSGAMYSGDRDHHAWLNEAYSVFSHVNALRRDMCPSMNRMESEIVGMTVAMLHGDAVAAHHPGQRACGMITLGGTESILGATLAYREKARAERGIERPRMIWPASAHPVFRKAAHLFGFDVTVAPIDPVTMQVDADFVRDAVDANTVMLVGSACNYPYGTIDPIGALSAIAVEKDVWLHVDGCLGGWMLPWGEALGYPDIPAFDFRLPGVTSISADTHKFGYGPKGGSVLAWRDASFRRHQYFLMTDWVGGVYGSPGLTGSRSGGLIAATWAALRGLGREGYLARAKAIFETAFDMQAAVRAIPELRVLGKPTFCFAFTSDAFDIYHVNDFMRQRGWRLNGLRRPDALQMCVTGPQTQPGVAEQFRCDLGAAADYARAHAQERPKTSGVYASDAAGVDLSDDARTRAFFTQVIDLFTDCPL

SEQ ID NO: 19328 - protein, 376 aa, Thermus thermophilus
VEFFGLPLRVEEGVLIPRPETEGLVELALGLPLPPAPRIARQVAALREEGREVVLVSSGAVAAGMRRLGLKERPKDMPKKQALAALGQPLLMAFWQEAFAPFGLPVAQVLLTAEDLSSRSRYLNAKATLRALLDLGAIPVINENDTVAFEEIRFGDNDQLSARVAALVEAGLLALLSDVDALYEEDPKKNPQARPIPEVESVEAVLAHAGGENPLGSGGMKSKLLAARIAGRVGIPTLLLPGKRPGVLLQALSGAPLGTYFHARRRYRGEKAWLFGLLRPKGELVLDRGAVRALKERGASLLPAGVKEVRGRFSRGEAVRLLSEEGEEVGVGLANYASEEIARIKGRRSAEIEAVLGYRYTEEVVHRDHLALKEEA

SEQ ID NO: 19329 - protein, 414 aa, Vibrio parahaemolyticus RIMD 2210633
MLKGINTSRPLRLTWMKIMFEKVVAAPADPILGLTEEFKKDPRAEKINLGVGIYKNEQGETPVLATVKKAEAALIETEKTKSYLTIEGTAEYGLAVQKLLFGADAEIVAEKRAKTAQAPGGTGALRVAGEFIKRQLGNVKIWISNPTWANHNGVFTAAGLETAQYTYYNAETKDKDFDAMLNDLQAASEGDIVLLHGCCHNPTGIDPTAEEWETLAKLIAEKKLLPLFDFAYQGFAKGVEEDAAGLRIFAKYNKEILVASSFSKNFGLYNERVGAFTLVAESEEVATTAFSQVKAIIRSIYSNPPAHGSAVVTHILNNKELRAEWEAEVQEMRDRIQEMRELFVATLKEEGVDADFSFIERQNGMFSFSGLSKEQVNRLKDEFAIYIVGSGRISVAGMTKSNMGPLCKGIAAVL

SEQ ID NO: 19330 - protein, 650 aa, Desulfovibrio desulfuricans G20
MKRGIYEDQRLARKHTLQRWSAEDSAELYGIRNWGAGYFDVSAEGDVVVYPFGRSHKLNVSVPDIIRGMKERGLDMPVLLRIENILESRISLLHKSFRNAIESLGYQGGYRGVFPIKVNQQQQVIEKIATYGSMYHHGLEVGSKAELIAAISQAQDKEACIVCNGYKDEEFIDLGLHAVRMGFKCFFVLEMPRELELILRRSQQMGVRPLIGTRVKLASKAGGHWSDSGGELSTFGLTTAQIMDVVDRLQKEDMLDCFRLLHYHLGSQVPNIRDIRSAVMEATRVYAGLVSEGAAMGYLDLGGGLAVDYDGSHTNFVSSRNYTQDEYCTDIVEAVMSILDETGVPHPHIITESGRATVAYYSMLLFNILDVSGAEAFPDNLPDTLDESEPEMIRNLFEAFRGLTLRNLQECYNDALYYRDEIRRNFLDGRVTLRQRTLGERIFWALMRRVAEEKDKLRHVPKELAEIDRVLADVYYGNFSVFQSLPDSWAIEQLFPVMPVHRLREFPDRPAILSDITCDSDGRIDRFIDPQGVRNTIDLHSLNGEEYYLGVFLVGAYQETLGDLHNLLGDTNVVSIRVEEDGSIEYRRELLGDSVADVLSSVEYDPRRIMEQLRDTAEQAVREGRITPSERYGILQAYENGLRGYTYFER

SEQ ID NO: 19331 - protein, 601 aa, Colwellia psychrerythraea 34H
MSDQPAASDLAENASIDTAEKKKISILLELIQFIRPYKSQVLAAFIALIFTAGVMLSVGQGVRMLIDEGFAQQSIEQLQQAVLFILAITVLIAGGTFFRFYLVSWLGERVSADIRLAVFNHVITLHPSYFETNGSGDIMSRITTDTTLLQSIIGSSFSMAIRSVLMLLGALVMLFATNIKLTFIVLLSVPFILVPILFYGRKVRKLSRKSQDSMADVGSYAGEAIEHIKTVQSYTHEQHERRSFGKEVEKSFNIGRNRIKQRATLIAGVIIIVFGAITGMLWVGGSDVIQGKMSGGDLGAFVFYAILVASSLATISEVLGELQRAAGATERLIEILQVESHILPPVENAISAKDLNAQIVFEAVSFNYPSRPDQAATQALNLTAQQGKVLALVGPSGAGKTTLFELLQRFYDPQVGRITLGGTDIRQLDPKDLRQQMALVPQQPALFSSDVFHNIRYGKPEASDEEVISAAKKAHAHEFIVNLPEGYNSFLGERGVRLSGGQRQRIAIARAILKDPHILLLDEATSALDSESEQHVQQALEELMRGRTTIIIAHRLSTIQHADKIAVLEQGRIIDMGDHQSLLQNCELYQRLVELQFKKLG

SEQ ID NO: 19332 - protein, 273 aa, Methylococcus capsulatus str. Bath
MKKMICAAVQMASGPQVGSNLLEAGRLVKQAAEAGARLVVLPENFAIMGMTETDKLGVAETDGSGPIQEFLAGAAERHKVWLVGGTMPMCAGDGRVRASCLVYDDHGRRVGRYDKIHLFDVVVPGTEETYRESLTIEPGTVPLVLDSPFGALGIAICYDLRFPELFRRMAQQGLDLLAVPAAFTARTGAAHWEILVRARAVENLCYTVASNQGGFHLNGRETFGHSMVVDPWGKVLASLPTGAGIVCAEIDRERLAQVRASFPVLEHRRLHCA

SEQ ID NO: 19333 - protein, 410 aa, Brucella melitensis 16M
MSDDVVLSLHVPEPEWRPGDAPDFSHVKIPRAGSVRRPEIDEKPEAMRDMAFSIIRVLNREGEAVGPWAGTLTDEELKDGLRHMMMLRAYDARMMMAQRQGKTSFYMQHLGEEAVSCAFRKALRKGDMNFPTYRQAGLLIADDYPLVTMMNQIFSNEQDPLKGRQLPVMYSSKEHGFFTISGNLATQYTQAVGWAMASAISHDTKIAAAWIGDGSTAESDFHAALVFASTYKAPVVMNIVNNQWAISTFQGIARGGSGTFAARGHGFGIPSLRVDGNDYLAVHAVAKWAVERARRNLGPTIVEYVTYRAGGHSTSDDPSAYRPKAENDAWPLGDPILRLKNHLIKRGVWSEERHKQAEAEVMDIVVSAQREAEAIGTLHDGRKPSMRDMFEDVYAETPPHLIRQRQEAGF

SEQ ID NO: 19334 - protein, 90 aa, Fusobacterium nucleatum subsp. nucleatum
MNIKPIGERVLLKPIKKEEKTKSGILLSSKSSNTDTKNEAEVVALGKGEKLEGIKVGDKVIFNKFSGNEIEDGDIKYLIVNADDILAVIE

SEQ ID NO: 19335 - protein, 230 aa, Thermobifida fusca YX
MSTAQATQERSDSLTFSERLKAGTRSSHDAAEAHDFSQALVSGTLPRHGYVALAAQHYFIYSALEEVAETLADHPVGGAVYFPELHRVPALERDLAFLCGPDWRDTITPLPTTRAYTDRIRWTVHWPAGFIAHHYTRYLGDLSGGQVIKRVVQRAYGFTDGAGFEFYIFDRLDSLPRFKKNYRAVLDALDLDEAEQTRVVDEVRQAYQFNSELMAELNRSLALASSSDLG

SEQ ID NO: 19336 - protein, 467 aa, Clostridium acetobutylicum ATCC 824
MEKYKICFEEEIPKYIQIAKNIKKLIDNGEVCDGEKLPSIRKLSEFLGVNNDTIVNVYKKLQSEGYAFLKMGSGTYAKKRDINKRLLRDYSNTFKRISKEDYDDYVDFAEENPCAEFFPVDNFKKVINEVLDRDGVDALSYEETLGYEGLRSNISKYFWNGEIDSERILIVSGAQQGIDIISKAIVNVNDNIIVEKPTYSGALSIFKWRRANIFEVDMECGGINIDEFEKILKKNNIKCFYTMSYFQNPTGLSYSYEKKKKIIELANKYDFYIIEDDYLSEIRYDERIDYTSFKAIDEGDRVIYIKSFSKIFLPGIRIGYLVMPSKIKEQIENSKINTDISTSSLMQRALDLYIKNGYWKKYINEINIIYEKRYNFMINNFSSVLKDKVQFISPGGGFSFYLKINDLIKKSCIDLFYECKRNKVLITPGVFFYKDAANGLNYFKVGFSKTNEDKIQRGIDVINSILK

SEQ ID NO: 19337 - protein, 557 aa, Acetobacter pasteurianus
MTYTVGMYLAERLVQIGLKHHFAVGGDYNLVLLDQLLLNKDMKQIYCCNELNCGFSAEGYARSNGAAAAVVTFSVGAISAMNALGGAYAENLPVILISGAPNSNDQGTGHILHHTIGKTDYSYQLEMARQVTCAAESITDAHSAPAKIDHVIRTALRERKPAYLDIACNIASEPCVRPGPVSSLLSEPEIDHTSLKAAVDATVALLKNRPAPVMLLGSKLRAANALAATETLADKLQCAVTIMAAAKGFFPEDHAGFRGLYWGEVSNPGVQELVETSDALLCIAPVFNDYSTVGWSGMPKGPNVILAEPDRVTVDGRAYDGFTLRAFLQALAEKAPARPASAQKSSVPTCSLTATSDEAGLTNDEIVRHINALLTSNTTLVAETGDSWFNAMRMTLAGARVELEMQWGHIGWSVPSAFGNAMGSQDRQHVVMVGDGSFQLTAQEVAQMVRYELPVIIFLINNRGYVIEIAIHDGPYNYIKNWDYAGLMEVFNAGEGHGLGLKATTPKELTEAIARAKANTRGPTLIECQIDRTDCTDMLVQWGRKVASTNARKTTLA

SEQ ID NO: 19338 - protein, 330 aa, Enterococcus faecalis V583
MSILVLGGAGYIGSHAVDQLISKGYAVIVVDNLLTGYRSAVHEQATFYEGDIRDKAFLRSVFEKESIEGVLHFAANSLVGESVEKPLMYFNNNVHGTQIALEVMQEFGVKHIVFSSTAATYGEPKAMPITEETPTNPKNPYGESKLMMEKIMKWCDNAYEMKYVALRYFNVAGAKKDASIGEDHTPETHIVPIILQVALGQRAELSIFGDDYDTPDGTCIRDYVYIEDLIAAHILALEYLKNGGESDVFNLGSNNGYSVKEMLDAAREVTGQEIPATIAPRRAGDPSTLIASSEKAKRVLGWQPEVTEVKDIIATAWQWHQAHPHGYQEK

SEQ ID NO: 19339 - protein, 545 aa, Azoarcus sp. EbN1
MTKYVFVTGGVVSSLGKGIAAASLGAILESRGIKVTHLKLDPYINVDPGTMSPFQHGEVFVTEDGAETDLDLGHYERFTSARMGKRNNFTTGQIYESVIKKERRGEYLGKTVQVIPHITDEIKQYIKRGAEGAEVAIVEIGGTVGDIESLPFLEAIRQMGIEEGRNSTCFIHLTLIPYIPTAGELKTKPTQHSVKELREIGIQPDILLCRADRPVPADERRKIALFCNVMPEAVIECLDANSIYKIPGQLHDQMLDEIVCHKLNILARAADLSVWENLLRALENPKHTVDIAFVGKYVDLTESYKSLIEAVSHAGMHTESKVKIHYIDSEDIERDGCAVLEKMDAVLVPGGFGKRGTEGKIAAIRFARENKVPYLGICLGMQLAVIEFARNVVGLAGAHSTEFERDTPYPVIGLITEWQDRSGKLEKRTEASDLGGTMRLGAQVCHLVENSLAREVYGVADIVERHRHRYEVNNTLLARLEEKGLRVSGRAPGTDLCEMIELPDHPWFVGCQFHPEFTSNPRKGHPLFTAYVKAALARKAAATSA

SEQ ID NO: 19340 - protein, 93 aa, Geobacillus kaustophilus HTA426
MKPLGDRIVIEVVETEEKTASGIVLPDTAKEKPQEGRVVAVGAGRVLDNGQRIAPEVEVGDRIIFSKYAGTEVKYDGKEYLILRESDILAVIR

SEQ ID NO: 19341 - protein, 538 aa, Geobacillus kaustophilus HTA426
MAKQIKFSEEARRAMLRGVDKLADAVKVTLGPKGRNVVLEKKFGSPLITNDGVTIAKEIELEDPFENMGAKLVAEVASKTNDIAGDGTTTATVLAQAMIREGLKNVAAGANPMGIRRGIEKAVAVAVEELKAISKPIKGKESIAQVAAISAADEEVGQLIAEAMERVGNDGVITLEESKGFTTELDVVEGMQFDRGYVSPYMITDTEKMEAVLENPYILITDKKVSSIQELLPVLEQVVQQGRPLLIIAEDVEGEALATLVVNKLRGTFNAVAVKAPGFGDRRKAMLEDIAILTGGEVISEELGRELKSTTIASLGRAAKVVVTKETTTIVEGAGDSERIKARINQIRAQLEETTSEFDREKLQERLAKLAGGVAVIKVGAATETELKERKLRIEDALNSTRAAVEEGIVAGGGTALMNIYNKVAAIEAEGDEATGVKIVLRAIEEPVRQIAQNAGLEGSIIVERLKNEKPGIGFNAATGEWVDMIEAGIVDPTKVTRSALQNAASVAAMVLTTEAVVADKPEENKGNNNMPDMGGMM

SEQ ID NO: 19342 - protein, 878 aa, Debaryomyces hansenii CBS767
MTNALNEIENMSAFPSDGKTVSPKDYANNDKLKLSGRIINVMTLLPTQIVKKTNKSGNDNWDVEPVRGNSALYSSQFFLAQQTDWESHLVGWTGELINKSSNSKSIINENITDDPLYLNKEDKTSLEGKIRDANKSAHIHPVWLLRRDQERWRNYAENVLWPVFHYIQGEPSDGKDEASSWHDYVKFNEAYCQKIISIYKPGDVIWIHDYYLLLLPQLLRMEIPNAIIGLFMHAPFPSSEYFRCLSKRSHLLDGMLGADKIAFQSEAFQRHFSSCCTRLLGCEISKDKLMAYGSAISLETLPIGIDTKKIEYDAFSSDSGIEQKVRALGEIYADKKIIVGRDRLDTVRGVVQKLQAFEMFLQMYPEWRDKVVLIQVSSPGYSHSAKVEQKVTELVHHINSEYGDLNSTPILHYQKRINKDEYLALLRVADLALITSVRDGMNTTSLEFVLCQKENYSPLILSEFTGTASVLSEAILVNPWDSVGIAKTMNDCFYMSKDKKRALEERLYKQVTSNTIQNWTSNFITHLIDHVNNTHQTHYTPALNRPLLLNNYENSHRRLFLFDYDGTLTPIVKDPAAAIPSSRLNAVLDILSSDPKNQVWVISGRDQAFLDKWLGSKNIGLSAEHGCFLKDIGSTEWSNLSASFDMSWQTKVKEVFKEYTEKTPGSNTEQKKVALTWHYRRSDPELGKYQAEKCLKFLKETVATEYDVEVMPGKANIEVRPNFVNKGEIVKRLVLNPHGAKQIPHVVTNYNKDVPVDELPDFILCLGDDFTDEDMFKSLKDIEAEWSLKDHPTNQYGSHGVYPVAVGPASKQTIATSHLTEPSEVLETLGLLSGVVSLFESAGSVSLDDRGHLENSTSSNKSKSAIKEATKKEGSKSC

SEQ ID NO: 19343 - protein, 596 aa, Bartonella quintana str. Toulouse
MNLFNHSEKSTKSSHTKPSFSSFSTFGPYIIRYSWLILFGFLALSVAALVTLALPVAIRQMLDHGFSSSSHGNINFYFAILFVLALLLALASACRYYCVITLGERIVADLRRDVFTHIIQLSPAFFDQSHSGELVSRLLTDTTQIKLAVGSTASIALRHLIVVIGAIFMMVITNAKLSSLVLLAIPFVAIPLVIFGRKVRTRTRIAQDRIADANALATEQVSAVRTVQAFNVEKQVSARFSQLVERAFQTARASVILRSFFTGFTIFLVFSSVVAVLWIGSRDVLNGTMSGGTLGQFVLYAVLGASTFTQLSELGAELIQALGAAERLAELLQKQPTILAPKVPLPLAQPVQGAIIFDQVDFTYPSRPKEKILRSLSFSVKAGETVAFVGASGAGKSTIFSLILRFYDPNSGQIRFDGTEINSLSLQDLRSSISYVPQDVAIFDGTLRDNITFGSENINEEQIIAAAKTANALEFIQALPKGFDTEVGERGTMLSGGQKQRIGIARAIFKNAPLLLLDEATSALDASSEKLVQEALEGLMQHRTTLVIAHRLATILKADRILVMEKGTLVEEGTHAELIAQNGVYAHLAKLQFSPE

SEQ ID NO: 19344 - protein, 465 aa, Bradyrhizobium japonicum
MRLAFVFAREGVFGSVDPSLVPPPGQLALKLARIVERRGPKHGPRLSRALTRMGPAYLKLGQFLATRPDVVGVIMARDLESLQDRLPPFSQAEAEAAIAASLERPLKDVFASLGPPVAAASIAQVHRGEVVRDGIRKAVAVKVLRPNVASRFRRDLSDFFYVAHKAETYSAEARRLRLIEVINTMSRSVAMEMDLRLEAAAMSEMAENTGDDLDFRVPTVDWDRTTHNVLTMEWIDGIALNDHKRLAEAQVDLPDLGRKVIQSFLRHALRDGFFHADMHPGNLFLDDTGRLVAVDFGIMGRLGMKERRFLAEILLGFITRDYRRVAEVHFEAGYVPVHHSVENFGASAIRAIGEPIHNRTAEEISMARLLTCCSRSPDLFDMTTRPELILLQKTMVVVEGVARGFDPRLDIWKTADPVVREWIERNLGPIGGCRARSPAAATSPRADAPARYRAAPLQCSSSSRP

SEQ ID NO: 19345 - protein, 423 aa, Bacillus licheniformis ATCC 14580
MTATSESISAQIEEKAIKAKTAAKSLRLATEKEKNEALAALADHLKQNMSYILTENAKDIEAGRKKGYDAAYIDRLSLNEDRVLDFADGLLEVAELDDPVGETLSSWTLDNGLKAEKVSVPLGVIGMIYEARPNVTVDATGLALKSGNAIVLKGGSSAIHSNTAIVSVMHQALDSTNIPRDAVQFIESTDRSATKQLFKMKEHIDVLIPRGGGALIQEVVENATVPVLETGVGNCHIYIDREADPEKAIDVMINAKTDRPAVCNALETLIVHEKWLEENSAALINALNEHGIQVHGDEKAVQMIPGARPAGEADWQNEYLSLDLAVKVAGSLEEACDHIETYGTKHSEAIITENPETAKAFLNTVDAAALYHNASTRFTDGGALGFGAEIGISTQKLHARGPMGLKELTTCKYIMRGDGHIRR

SEQ ID NO: 19346 - protein, 373 aa, Bacillus licheniformis ATCC 14580
MTSNQQRVVVKVGSSSLTSLHGEISSKKLEKLVEQIVRLKDEGHEVLLVSSGAVAAGYRKLGFINRPDTLPEKQASASVGQGLLIEAYSKLFLSHGYIASQILITKSDFSDEKRYNNVRNTMNVLLKRGIIPIINENDTVTVNRLKFGDNDTLSAKVAGLIDADLLTILSDIDGLYDANPRKTPDAALVQEVTEITPEIEASAGDAGSEVGTGGMKSKLDAFKITMASGIKGFLGRADTPGILHEAICGTARGTYFIPNADSHALNHKKQWIAFNSGPEGDIVVHNESKEFIIDRKKSLYPSSIYDINGRFSNGSVVRILDQEGEEIGLGVVNFSSSQLRKWKKDTNQETAASSQAVVDREAFVCHLELSVPL

SEQ ID NO: 19347 - protein, 1097 aa, Candida albicans
MSTSQPSQQQNPEQVVNDIRQKIEKERKIIQGFNDVKRNTNNPEVIQKWKSKIIESQSMIDYYQETMNKLTRQMQRLNTNSSSRTASRSSVISEYKPSYSNFDLIKYECPSLGNKIQFMLQYLEFKLQVENKYSEANKKLSHLYLMDGDKSSSNAAEGGRAESDQRIQLLEKALKKYQKFSINDHEFDRDYEIMDSTKHSRKLLTGRLTVSITCIRDVDHIATALAKKRETVVVIKVDDLEKARTKPSKNDNWNEEMVIDVDKSHEIELAVMDKQNGIYVPVAVNWFSLFDLAEEIRKKKVAKDQGSSGWLPAANLPQTGGSGAGTGSSMTGGASYGATSPLPAHNDLRPSVSPSSDAKENKVSVSTWLSLEPGGQMLINLNFEKSITNGKQFRGPLGRHGAIRQKKEEVFEKHGHQFVQKQFYNIMSCALCGEFLRYTGYQCQDCKFLCHKKCYQKVVTKCISKSGSDYDAAQLNHRIPHRFEPITNHGTKWCCHCGYILPWGKKNVRKCTECGVMCHAQCTHLVPDFCGMSLQMANEILATIESTKVSPKKAQHQQSHAKPLPPKPPIESKPSMDSEETLHNEPSYKSLRPASVVHQDTNFVSKLPTTVQNKYQEPVELPPQQQNQVVPSTRRRGHGSTDLSFETGYGQQQHQHHRDVPQIVVEDHQHYNSNDNRDVEMEESKDEFDNFDYNNKYTENEILTDVQQDQVRSPFADQIQGVPETSHAKQQNQQVQQVQQQEELGHQRTHSSGKSGKSKRRKRKVGLDDFQFLAVLGKGNFGKVMLAESRHTSKLCAIKVLKKDFIVENDEAESVKSEKRVFLTANKEMHPFLLNLHCCFQTENRIYFVMEYISGGDLMWHIQKNRFTAKRAKFYACEVLLGLKYFHDNGIVYRDLKLDNILLTTKGHIKIGDYGLCKEDMWHKSTTSTFCGTPEFMAPEIVAGKAYDRSVDWWAFGVLLFQMLLCQSPFKGDDEDDIFNAIENDEVKYPINLSRQTVLVLQALLTKDPSQRLGSGPKDAEEIMEHPYFHDVNFDDVLNCRIPAPYIPEVQSEHDYSNFDKEFTSETPRLTPVETVLTSEMQEQFRGFSHISDNATI

SEQ ID NO: 19348 - protein, 84 aa, Triticum aestivum
  misc_feature (5)..(5): Xaa can be any naturally occurring amino acid
  misc_feature (32)..(32): Xaa can be any naturally occurring amino acid
  misc_feature (40)..(40): Xaa can be any naturally occurring amino acid
  misc_feature (69)..(69): Xaa can be any naturally occurring amino acid
  misc_feature (72)..(72): Xaa can be any naturally occurring amino acid
  misc_feature (81)..(81): Xaa can be any naturally occurring amino acid
  unsure (1)..(84): unsure at all Xaa locations
FTFIXEGICTGGNVLVHCFAGRSRSVTVVLAXLMKKHQMXLQSAMSLVRSKRPQIAPNAGFISQLVNFXKSXQVEQGQRTXQSN

SEQ ID NO: 19349 - protein, 298 aa, Oryza sativa
  misc_feature (119)..(119): Xaa can be any naturally occurring amino acid
  unsure (1)..(298): unsure at all Xaa locations
MAAAAGGAARALSQAEQDVQMMLAADVHLGTKNCDFQMERYVYKRRSDGIYIINLGKTWEKLQLAARVIVAIENPQDIIVQSARPYGQRAVLKFAQYTGAHAIAGRHTPGTFTNQLQTXVHRPPCRRIKESALGNIPTIAFCDTDSPMRYVDIGIPANNKGKQSIGCLFWLLARMVLQMRGTILPGHKWDVMVDLFFYRDPEEAKEQEEEEAAVGPEYAAVAEYGAAPTDNWGDQQWGGEVQPPALPAAPTGEWGAAPAPVAAEGWDAVAVPPAAAAAVAPPAAPGWEEGSAPAPTGW

SEQ ID NO: 19350 - protein, 473 aa, Zea mays
MAGAAAAAVASGVSARPAAPRRASAGRRARLSVVRAAISLEKGEKAYTVQKSEEIFNAAKELMPGGVNSPVRAFKSVGGQPVVFDSVKGSRMWDVDGNEYIDYVGSWGPAIIGHADDKVNAALIETLKKGTSFGAPCLLENVLAEMVISAVPSIEMVRFVNSGTEACMGALRLVRAFTGREKIIKFEGCYHGHADSFLVKAGSGVATLGLPDSPGVPKGATYETLTAPYNDVAAVKKLFEDNAGEIAAVFLEPVVGNAGFIPPQPGFLNALRDLTKQDGALLVFDEVMTGFRLSYGGAQEYFGITPDVTTLGKIIGGGLPVGAYGGRRDIMEMVAPAGPMYQAGTLSGNPLAMTAGIHTLKRLTEPGTYEYLDKITGELVRGILDVGAKAGHEMCGGHIRGMFGFFFTGGPVHNFGDAKKSDTEKFGRFYRGMLEEGVYFAPSQFEAGFTSLAHTSQDIEKTVEAAEKVLKRI

SEQ ID NO: 19351 - protein, 539 aa, Fusobacterium nucleatum subsp. nucleatum
MAKIINFNDEARKKLEIGVNTLADAVKVTLGPRGRNVVLEKSYGAPLITNDGVTIAKEIELEDPFENMGAALVKEVAIKSNDVAGDGTTTATILAQAIVKEGLKMLSAGANPIFLKKGIELAAKEAIDVLKDKAKKIESNEEISQVASISAGDEEIGKLIAQAMAKVGETGVITVEEAKSLETTLETVEGMQFDKGYVSPYMVTDSERMTAELDNPLILLTDKKISSMKELLPLLEQTVQMSKPVLIVADDIEGEALTTLVINKLRGTLNVVAVKAPAFGDRRKAILEDIAILTGGEVISEEKGMKLEEATIQQLGKAKTVKVTKDLTVIVDGGGEQKDISARVNSIKAQIEETTSDYDKEKLQERLAKLSGGVAVIKVGAATEVEMKDKKLRIEDALNATRAAVEEGIVAGGGTILLDIIESMKDFNETGEIAMGIEIVKRALEAPIKQIAENCGLNGGVVLEKVRMSPKGFGFDAKNEKYVNMIECGIIDPAKVTRAAIQNSTSVASLLLTTEVVIANKKEEEKAPMGAGGMMPGMM

SEQ ID NO: 19352 - protein, 371 aa, Zea mays
MAHRVLLLLSLASAAAVAAAVDAEDPLIRQVVPGGDDNDLELNAESHFLSFVQRFGKSYKDADEHAYRLSVFKDNLRRARRHQLLDPSAEHGVTKFSDLTPAEFRRTYLGLRKSRRALLRELGESAHEAPVLPTDGLPDDFDWRDHGAVGPVKNQGSCGSCWSFSASGALEGAHYLATGKLEVLSEQQFVDCDHECDSSEPDSCDSGCNGGLMTTAFSYLQKAGGLESEKDYPYTGSDGKCKFDKSKIVASVQNFSVVSVDEAQISANLIKHGPLAIGINAAYMQTYIGGVSCPYICGRHLDHGVLLVGYGASGFAPIRLKDKPYWIIKNSWGENWGENGYYKICRGSNVRNKCGVDSMVSTVSAVHASKE

SEQ ID NO: 19353 - protein, 463 aa, Gluconacetobacter diazotrophicus
MSLPRTIRTFSPRGTTIALATLAGAALPAMAAPAMAADPAPPAINTGDTAWMLVSTALVLMMTVPGLALFYGGMVRKKNVLATLMQSFAICCIVTIVWMVAGYSLAFGTGSPYIGDLSRFMLNGIGAQISKGSDVGFTLGLGSANATVMTIPESVFMMFQMTFAIITPALITGAFAERMKFSALCVFTILWSLLVYAPVAHWVWSPLGWVAGFGAIDFAGGTVVHINAGVAGLVTALVVGKRQGYGQDDMSPFNLTYAVIGASLLWVGWFGFNAGSAVGANGRAGMAMATTQIASAAAGVAWMLAEWARTGKPTVLGIISGAVGGLVAITPAAGFVLPGGALIIGLLAGAVCHWTATTMKHMLGYDDSLDAFGVHGIGGILGALLTGVLAYGPLSATDANPAGVVGSFAQLVTQAKAVGVTIVWCAVVTFVLLKIVDLAIGLRVRSEDEIEGLDMTQHGERIN

SEQ ID NO: 19354 - protein, 356 aa, Gloeobacter violaceus PCC 7421
MSLGGASARGNRKSTRFVMNIACIGLRKAKNCGLFARGSPMMSARGTLFNRHGVPTVAETAQGKPAEARKTRQSASFERDSVGLYLQEIGRIPLLKPEEEVMLARAIAQGGPKGEWAKRKLVQANLRLVVSIAKKYLNRGVPFLDLIQEGSMGLIRAAEKFEHERGYKFSTYAYWWIRQAITRAVASQARTVRLPVHLVEKINRVKKVRRTLAQELGRTPSQGELAEALELAEEDLEHILRAARRTVSLNITVGKEEDTELIHLIEDSQTDQPDVHIDRESMRVEVSDLLDRHLTPRERDILQLRFGLRDGQQRTLDQVGRMFDLSRERIRQIQAKAFRKLRRVRQRQRLQDWIGI

SEQ ID NO: 19355 - protein, 139 aa, Caulobacter crescentus CB15
MTERTFSIIKPDATRRNLTGAINAVIEAAGLRIVAQRRVKLTEAQAKKFYEVHAERPFYGELVGQMTAEPVVVQVLQGDNAVLKYREVMGATNPENADEGTIRKLFALSIGENSVHGSDSLENAGIEIAQFFTEDEIVG

SEQ ID NO: 19356 - protein, 330 aa, Helicobacter pylori J99
MALPVYYDKDIDLGVIQSLQVGIIGYGVQGEAQALNLRDSKVKVRIGLYQGSLSVSKAKKEGFEVLGVKELVQQSDVIMALLPDELHKEVLEKEVIPFLKEGQIIGFAHGFSVHFNQVVLPKGVGAILVAPKGPGSALREEYLKNRGLYHLIAIEQESSIHNAKAVALSYAKAMGGGRMGVLETSFKEECESDLFGEQAVLCGGLEAIVRMGFETLIKAGYPEELAYFECVHEVKLVADLLHYKGVEGLRKHISNTAEFGAIKAREPMGNLLEKRMQKILKKIQNGAFAKDFLLEKSLNYPRLNTERKALKETKIEQIGEILRAPFNHKK

SEQ ID NO: 19357 - protein, 414 aa, Emericella nidulans
MSFANMFNKLSGQPESYEKKSLYRFGRTLGAGTYGIVREADCSSGKVAVKIILKRNVRGNERMVYDELDLLQKLNHPHIVHFVDWFESKDKFYIVTQLATGGELFDRICEYGKFTEKDASQTIRQVLDAVNYLHQRNIVHRDLKPENLLYLTRDLDSQLVLADFGIAKMLDNPAEVLTSMAGSFGYAAPEVMLKQGHGKAVDIWSLGVITYTLLCGYSPFRSENLTDLIEECRSGRVVFHERYWKDVSKDAKDFILSLLQVDPAQRPTSEEALKHPWLKGESASDRDLLPEIRAYIARSRLKRGIEIIKLANRIEALKMQEEDEEDIPSAVDVQASEASDKSGLSPFPALSTENSNTHPASTGNGESGGTKKRSLSKIARGAIFREVVLAKVREMKENEEREKVERERRERAHS

SEQ ID NO: 19358 - protein, 322 aa, Xanthomonas campestris pv. phaseoli
MTASPSKLAQLRELSVVVADTGDYDAIKRLQPVDCTTNPTLVKKALDLPVYADLIERELAWGREHGGDDRTATVNEVADRLTIGVGVKLAGLVPGRVSTEVDADLAHDTQATIAKARKFIAMYAERGVSKDKILIKIAATWEGIEAARQLQKEGIDCNLTLIFNRSQALACAEAGVFLISPFVGRILDYYVGKGQTPASIDEDPGVVFVRTVYNEFKQRGYSTVVMGASFRSTAQIEALASCDRLTISPDLLEKLDAEHGELPRKLSPAKADNAQFTPIDSDSFASGLAADPMATEKLAGGIDTFAKDLHALRKTIADKLAG

SEQ ID NO: 19359 - protein, 252 aa, Clostridium acetobutylicum ATCC 824
MGKENTLKKEEPNYNDNEKLIKSVHEGNKEALNKIIENNLPLVSAISRKFLNRGYEYDDIFQIGCMGLVKAVNNFNSDYKVKFSTYAVPMIMGEIKRFLRDDGIIKVSRSVKSTARQLHYDREKLVKELNREPTIDELSKFSGIDKEEIIMATESTTSMQYLYDVVHQDDGSPVLLIDKLSDPYSEDSDVIDKIVLKQIIKSLDNKSKQIIMLRYFKDKTQTQVANMLGISQVQVSRIEKRILKAIREKLTK

SEQ ID NO: 19360 - protein, 343 aa, Bartonella quintana str. Toulouse
MNECLGDIAQALVCAGKGILAADESTATIGKRFESIGVESNEDNRRAYREMLFTAKEAMESAISGVILFDETVRQRASTGQMLTDLIRNAGALPGIKVDTGAKPLAAFPQEMITEGLDGLRERLKDYYALGARFAKWRAVIAIDAYALPTKGAISQNAQALARYAALCQEAGLVPIVEPEVLMDGASRQHSITRCFEVTQAVLNMVFKELFEARVLFEGMILKPNMVIDGKDARTASVEEVAEKTVRVLKQTVPAAVPGIAFLSGGQSDEEATAHLSAMNALGPLPWKLTFSYGRALQAAALKAWGSHHQNIALAQKAFCHRARMNHLAALGKWTKEQERSCA

SEQ ID NO: 19361 - protein, 234 aa, Triticum aestivum
MAGADVDVGTELRLGLPGGGAEAAKAGKRGYEDTIDLKLTLPTGGGMQEDSAGKPEPAADKAKRPAEAAAADPEKPPAPKAQAVGWPPVRSYRRNAMTVQSVKIKKEEETEKQQPAAAAAAGANGSNFVKVSMDGAPYLRKVDLKMYNTYEDLSIALQKMFGTFTATGNEGKMVEAVNGSDGVITYEDKDGDWMLVGDVPWEMFVASCKRLRIMKGSEAIGLAPRAKDKYKNKS

SEQ ID NO: 19362 - protein, 198 aa, Arabidopsis thaliana
MSASRFIKCVTVGDGAVGKTCMLISYTSNTFPTDYVPTVFDNFSANVVVDGNTVNLGLWDTAGQEDYNRLRPLSYRGADVFILAFSLYCKASYENVAKKWIPELRHYAPGVPIILVGTKLDLRDDKQFFIDHPGAVPITTNQGEELKKLIGSPIYIECSSKTQQNVKAVFDAAIKVVLQPPKQKKKKKTKAQKACSIL

SEQ ID NO: 19363 - protein, 668 aa, Bartonella quintana str. Toulouse
MINTEQQNQMANAIRFLAIDAIEKANSGHPGLPMGAADIATVLYTKFLAHDPKNPHWPDRDRFVLSAGHGAMLLYALLYLSGYEDISLEDLKNFRQIGSKLAGHPEYGHAAGIETTTGPLGQGLANAVGMALGERLQNARFGDIINHYTYALVGDGCLMEGIAQEAISFAGHLKLHKLIVLWDDNNISIDGEISLADSTDQMARFKASGWNTYKVDGHDQGAIARAIEAAQNSDKPTLIACKTTIGFGAPNKAGTNKVHGAPLGTREIAETRIALGWEAEPFVIPADILDNWRLAGLNAAKKRQKWKEKFADLPLSERIEFERLMRGDLVGGFDGAIDAYKQKLVEDCPCVATRKASEMALEVINETVIETIGGSADLTGSNNTKSSQMKSISAEDFSGRYLHYGIREHAMGAVMNGLALHGGCIPYGGTFLCFSDYMRPAMRLSSLMGLRVIYVMTHDSIGLGEDGPTHQPVEHLAALRALPNHFVFRPADAMETVECWQLALKARNTPSTLALSRQNLPLLRQEYEKENLCMLGAYELLTASDDAQVTLFSSGSELQIAVKAQALLEENAIPTRVVSVPCFELFAQQSLSYQRALVGDAPIKIAIEAAIRQGWDRFIGSDGIFIGMEGFGASGTIDALYAHFGITCENVVATVEKELEKINKENVR

SEQ ID NO: 19364 - protein, 221 aa, Gracilaria lemaneiformis
MPASGKSSSIPTALPRSCTTPVLTVPSFLSKSNLLSRFTRNEFSLESKSTIGVEFATRSIQCEGKIIKAQIWDTAGQERYRAITSAYYRGAVGALLVYDITKKDSFDNVQRWLKELKDHADANIVIMLVGNKSDLQHLKAVTTDDASAFAESNGLSFIETSALDNSNVEEAFRSILSEIYRLGSKKALEKGSTSNFAPNATQTIVINPPADEGKTEKAKCC

SEQ ID NO: 19365 - protein, 189 aa, Lactobacillus acidophilus NCFM
MSENNKHIKATDIKENPKYDTAIFAGGCFWCMVEPFDNITGVEEIISGYTGGHTINPTYADVCTGKTGHTEAVKITYDPGKISYNQLLNYYWQVTDPTDAMGQFQDRGDNYRPVIFYNSQFQKEAAEKSKQELANSGKFDKPIVTSIEKAMPFYPAEDYHQDFYKKDPERYALEESGGRSDFIKKHWSK

SEQ ID NO: 19366 - protein, 331 aa, Listeria innocua Clip11262
MTKVYYEDAVKNNALEGKTVAVIGYGSQGHAHSQNLRDNGNNVIIGIREGKSAESARNDGFDVYSVSEAAEKADVIMILLPDETQGETYENEIKPNLKAGNALVFAHGFNIHFDVINPPSDVDVFLVAPKGPGHLVRRTFVEGGAVPSLFAIYQDATGNARDTALSYAKGIGATRAGVIETTFKEETETDLFGEQAVLCGGATHLIQAGFETLVEAGYQPELAYFEVLHEMKLIVDLMYEGGMEKMRHSISNTAEYGDYVSGPRVVTADTKKAMKEVLTDIQNGNFAKSFIDDNKNGFKEFHRMRKEQQGHQIEKVGAELREMMPFVKPQH

SEQ ID NO: 19367 - protein, 306 aa, Oryza sativa (japonica cultivar-group)
MADPSKLQITPCGMLVQGNQINFTKLYLHHTPAGPEQNQSAVTSNDKKTGLGCIVVNNWSVYDGIGSDAKLVAYAKGLHVFAGAWHNSFSLVFEDERLKGSTLQVMGLIVEEGDWAIVGGTGQFAMATGVILKKMQEQKQYGNIIELTIHGFCPLLKGSQCPVTKIGPWGSSHEGTVQDITESPKRLESITLYHGWSVDSISFTYLDHAGEKHKAGPWGGPGGDPIMIEFGSSEFLKEVSGTFGPYEGSTVITSINFITNKQTYGPFGRQEGTPFSVPAQNNSSIVGFFGRSGKYINAVGVYVQPI

SEQ ID NO: 19368 - protein, 296 aa, Oryza sativa
  misc_feature (18)..(18): Xaa can be any naturally occurring amino acid
  unsure (1)..(296): unsure at all Xaa locations
MLSWNNSWHSSSTENRTXEREIVASYEPKKNNEIRMFESSDEMATDLAEYISQVSEISIKERGYFAIALSGGPLISFMRKLCEAPYNKTLDWSKWYIFWADERAVAKNHVDSYYKSTKEDFLSKVPILNGHVYSINDNVTVEDAATDYEFVIRQLVKIRTVGVSESNDCPKFDLILLSIGSDGHVASLFPNHPALELKDDWVTYITDSPVPPPERITFTLPVINSASNIAVVATGEDKAKAVYFAISDGTEGPDAPSIPARMVQPTDGKLVWFLDKASASFLEAKTKNDGYEHPKY

SEQ ID NO: 19369 - protein, 386 aa, Lycopersicon esculentum
MALHATAFSFTGVSTSSKSSRSALLSLPRRCAVKATSQYPHSFPRCKIQGRALPSDNGLVEKDESSLVVCFGEMLIDFVPTTSGLSLAEAPAFKKAPGGAPANVAVGISRLGGSSAFIGKVGEDEFGYMLAEILKENNVNSDGMRFDPGARTALAFVTLRKDGEREFMFYRNPSADMLLQEDELDLELIRKAKVFHYGSISLITEPCKSAHIAAAKAAKDAGVILSYDPNLRLPLWPSAESAREGILSIWNTADIIKISEEEISFLTQGEDPYDDNVVRKLYHPNLKLLLVTEGPEGCRYYTKDFSGRVKGIKVDAVDTTGAGDAFVAGILSQLASDVSLLQDEGKLRDALSFANACGALTVMERGAIPALPTKEVVLNTLLKSVA

SEQ ID NO: 19370 - protein, 127 aa, Cucumis melo
PDQQRLIFAGKQLEDGRTLADYNIQKESTLHLVLRLRGGMQIFVKTLTGKTITLEVESSDTIDNVKAKIQDKEGIPPDQQRLIFAGKQLEDGRTLADYNIQKESTLHLVLRLRGGMQIFVKTLTGKT

SEQ ID NO: 19371 - protein, 538 aa, Euphorbia esula
MDTHILVPLYLALLASSLCFASAGDIVHQDDKSPKRPGCDNNFVLVKVPTWVDGVEDIEYVGVGARFGRTLEAKEKDANKTKLVLADPPDLCQPPKFKLNRDVILVHRGNCSFTTKAKIAELANASAILIINTETELLKMVCEANETDVHIQIPAVMLPQDAGGSLRDYMQNSSQVSVQLYSPERPLVDVAEVFLWLMAVGTILGASYWSAWSAREIAIEQDKLLKDGSDDFTHGEGVPSTGVVNINTTSAILFVVIASCFLVMLYKLMSVWFMDVLVVLFCIGGVEGLQTCLVALLSCFRWFQHPGESFIKLPVVGAISHLTLAVSPFCIVFAVIWAIHRRDSFAWIGQDILGIALIITVLQIVHVPNLKVGTVLLSCAFLYDIFWVFVSKLWLKDSVMIVVARGDKSGEDGIPMLLKIPRMFDPWGGYSIIGFGDIILPGLLVTFALRYDWLTKKNLRAGYFLWAMTAYGLGLLVTYVALNLMDGHGQPALLYIVPFTLGTFLTLGKTRGELKALWTRGEPDSPCPHVQLQSSQSQ

SEQ ID NO: 19372 - protein, 537 aa, Euphorbia esula
MDLGFVISVVVVISLVCYPYYVIAGDIVHDDASAPKKPGCENDFVLVKVQTWVNGEEDAEFVGVGARFGTTIVSKEKNANQTRLTLSDPRDCCSPPKRKFAGEIIMVDRGNCKFTAKANYAEAAGATAVLIINNQKELYKMVCDPDETDLDIKIPAVMLPQDAGASLEKMLLSNASVSVQLYSPRRPLVDIAEVFLWLMAVITILCASYWSAWSTREAVIEHDKLLKDALDEIPNDKGVGFSSVVDINTSSAVLFVVVASCFLVMLYKLMSYWFVELLVVLFCIGGVEGLQTCLVALLSRWFKHAGESYVKVPFFGALSHLTLAVSPFCITFAVVWAVYRNVSFAWIGQDILGIALIITVLQIVHVPNLKVGTVLLSCAFLYDIFWVFVSKKLFKESVMIVVARGDRSGEDGIPMLLKIPRMFDPWGGYSIIGFGDILLPGLLIAFALRYDWLANKSLRAGYFLWAMIAYGLGLLITYVALNLMDGHDQPALLYIVPFTLGTFLALGKKNGDLNVLWTRGEPERACPHNNYRELNVE

SEQ ID NO: 19373 - protein, 163 aa, Triticum aestivum
MDGGVAAAVAAAAAASTVTTAVAPPGAAGAGAGAPPPFLMKTYDMVDDPATDAVVSWGPANNSFIVWNTPEFARDLLPKYFKHNNFSSFVRQLNTYGFRKVDPDKWEFANEGFLRGQKHLLKTINRRKPSHANNQVQVQQQQPQQQQQQQQPQLQNAPMPSCV

SEQ ID NO: 19374 - protein, 471 aa, Pseudomonas fluorescens Pf-5
MTPDKKVKILATLGPAIDGIEDIRELVQAGVNIFRLNFSHGAHADHAQRYEWIRQVERELNYPLGILMDLQGPKLRVGTFAEGKVQLVRGQALRLDLDATPGNAQRVSLPHPEIIAALEPGMDLLLDDGKLRLRVIAKQADAIETTVLNGGELSDRKGVNVPQAVLDLSPLTAKDRRDLSFGLELGVDWVALSFVQRPEDIREARALIGDKAYLMAKIEKPSAVTQLREIAELSDAIMVARGDLGVEVPAESVPQIQKNIISTCRQLGKPVVVATQMLESMRFSPAPTRAEVTDVANAVAEGADAVMLSAETASGEYPLEAVQMMSKIIRQVETGPDYQAQLDVSRPQAEATVSDAISCAIRRVCSILPVAVLVNYSESGSSTLRAARERPSVPILNLTPNLATARRLTVAWGVHSVVNDRLRQVDEVCATALEIAQAQGLAKRGDTVVITTGVPFGQPGTTNSLRVETLL

SEQ ID NO: 19375 - protein, 517 aa, Glycine max
YQYNMQSLRPSSTSYGGAYTAALAQLVFSAVAQAASDSLAIFGEEPAYTSELVMWATKQTEAFALLVKRHALASSAAAGGLRAAAECVQIALGHCSLLEARGLALCPVLLKLFRPSVEQALDANLKRIQESTAALAAADDWVLTYPPTSNRQTSRPSSISISNTTAFQHKLTSSAHRFNLMVQDFFEDVGPLLSMQLGGQALEGLFQVFNSYVNMLIKALPGSMEEEASLEDSGNKIVRMAETEAQQIALLANASLLADELLPRAAMKLSPINQAAYKDDNRRRTSERQNRHPEQREWRRRLVGSVDRLKDTFCRQHALDLIFTEEGDSHLTADMYINMDGNAEEVEWIPSLIFQELFVKLNRMANIAADMFVGRERFATLLLMRLTETVMLWLSEDQSFWDDIEEGPRPLGPLGLQQFYLDMKFVVCFASHGRYLSRNLQRIVNEIITKAMAAFSATGMDPYRELPEDEWFNDICQDAMERLSGKPKEINGERDLNSPTASVSAQSISSVRSHSSS

SEQ ID NO: 19376 - protein, 137 aa, Brassica napus
MVPSSSGSEESLMEQRKRKRMLSNRESARRSRMKKQKLLDDLTAQVNRLKEQNNEILTSVSITTQHYLTVEAENSVLKAQLDELSHRLESLNGIIEFLESTNGICPNPLTGPEPDDFLVNQMNMNMFCMNQPLMASS

SEQ ID NO: 19377 - protein, 779 aa, Glycine max
MHPYNRLPSSGHSTPSPPPSPLRSPRLRHAGRSKAGRFSPSRGSGRTAAQRLSWMFLSVLLRRQGVFLFAPLIYISGMLLYMGTASFDVVPVIKHRPAPGSVYRSPQLFAKLRLDMDSDNSSADAISTIWKYPYRGGEWKPCVNRSSEDLPESNGYIYVEANGGLNPQSTSVCVPGPPASQLGRPPPSLSFTQRDTFSLYTAMDAGEALSDDPNRPNSAADAAPAPAGARYKLLSPAKLPISRSPCVTISPGLSPTSFLESPVLLSNMKVEPSPTTGSLSLLHQTAYGSMTSAASATFPVTTVCFNSNTVDERKPSFFEFKPHSGSNMVPADFDNHASEKSTQIDSQGKAQAFDSSALVKNESASPSNELSLSSPVQMDCSGASARVEGDLDELNPRSNITTGLQASQVDNRGSGLTVAAERVSDDGYNWRKYGQKHVKGSEFPRSYYKCTHPNCEVKKLFERSHDGQITEIIYKGTHDHPKPQPNRRYSAGTIMSVQEDRSDKASLTSRDDKGSNMCGQGSHLAEPDGKPELLPVATNDGDLDGLGVLSNRNNDEVDDDDPFSKRRKMDVGIADITPVVKPIREPRVVVQTLSEVDILDDGYRWRKYGQKVVRGNPNPRSYYKCTNTGCPVRKHVERASHDPKAVITTYEGKHNHDVPTARNSCHDMAGPASASGQTRVRPEESDTISLDLGMGISPAAENTSNSQGRMMLSEFGDSQIHTSNSNFKFVHTTTAPGYFGVLNNNSNPYGSKENPSDGPSLNHSAYPCPQNIGRILMGP

SEQ ID NO: 19378 - protein, 531 aa, Arabidopsis thaliana
LYSSLGEEALCHSLNETEVTTVICGSKELKKLMDISQQLETVKRVICMDDEFPSDVNSNWMATSFTDVQKLGRENPVDPNFPLSADVAVIMYTSGSTGLPKGVMMTHGNVLATVSAVMTIVPDLGKRDIYMAYLPLAHILELAAESVMATIGSAIGYGSPLTLTDTSNKIKKGTKGDVTALKPTIMTAVPAILDRVRDGVRKKVDAKGGLSKKLFDFAYARRLSAINGSWFGAWGLEKLLWDVLVFRKIRAVLGGQIRYLLSGGAPLSGDTQRFINICVGAPIGQGYGLTETCAGGTFSEFEDTSVGRVGAPLPCSFVKLVDWAEGGYLTSDKPMPRGEIVIGGSNITLGYFKNEEKTKEVYKVDEKGMRWFYTGDIGRFHPDGCLEIIDRKKDIVKLQHGEYVSLGKVEAALSISPYVENIMVHADSFYSYCVALVVASQHTVEGWASKQGIDFANFEELCTKEQAVKEVYASLVKAAKQSRLEKFEIPAKIKLLASPWTPESGLVTAALKLKRDVIRREFSEDLTKLYA

SEQ ID NO: 19379 - protein, 492 aa, Arabidopsis thaliana
MDPYKYRPASSYNSPFFTTNSGAPVWNNNSSMTVGPRGPILLEDYHLVEKLANFDRERIPERVVHARGASAKGFFEVTHDISNLTCADFLRAPGVQTPVIVRFSTVIHERGSPETLRDPRGFAVKFYTREGNFDLVGNNFPVFFIRDGMKFPDMVHALKPNPKSHIQENWRILDFFSHHPESLNMFTFLFDDIGIPQDYRHMDGSGVNTYMLINKAGKAHYVKFHWKPTCGVKSLLEEDAIRVGGTNHSHATQDLYDSIAAGNYPEWKLFIQIIDPADEDKFDFDPLDVTKTWPEDILPLQPVGRMVLNKNIDNFFAENEQLAFCPAIIVPGIHYSDDKLLQTRVFSYADTQRHRLGPNYLQLPVNAPKCAHHNNHHEGFMNFMHRDEEVNYFPSRYDQVRHAEKYPTPPAVCSGKRERCIIEKENNFKEPGERYRTFTPERQERFIQRWIDALSDPRITHEIRSIWISYWSQADKSLGQKLASRLNVRPSI

SEQ ID NO: 19380 - protein, 538 aa, Helicobacter pylori J99
MDRAKFIFVTGGVLSSLGKGISSSSIATLLQHCNYQVSILKIDPYINIDPGTMSPLEHGEVFVTSDGAETDLDIGHYERFLNRNLTRLNNFTTGQIFSSVIENERKGEYLGKTIQIVPHVTDEIKRRIKSAAKGLDFLIVEVGGTVGDMEGMFYLEAIRQLKLELGNEKVINVHVTLIPYIQTTNELKTKPTQHSVQELRRLGVTPQIILARSPKPLDKELKKKIALSCDVEQDSVIVATDTKSIYACPILFLQEGILTPIARRFNLNKLHPKMAAWNTLVEKIIAPKHKVKIGFVGKYLSLKESYKSLIEALIHAGAHLDTQVNIEWLDSENFNEKTDLEGVDAILVPGGFGERGIEGKICAIQRARLEKLPFLGICLGMQLAIVEFCRNVLGLKGANSTEFNQRCEYPVVYLIEDFMDQNHQKQVRTYNSPLGGTMRLGEYECEIMPNSLLEKAYKKPNIKERHRHRYEINPKYRQEWENKGLKVVGFGANHLIEAIELEDHPFFVGVQFHPEFTSRLQSPNPIILDFIKSALHKS

SEQ ID NO: 19381 - protein, 82 aa, Helianthus annuus
SLEIDELARFAVDEHNKKQNALLEFGKVVNTKEQVVAGKMYYITLEATNGGVKKTYEAKVWVKPWENFKELQEFKPVDAATS

SEQ ID NO: 19382 - protein, 228 aa, Arabidopsis thaliana
MGRGKIVIQRIDDSTSRQVTFSKRRKGLIKKAKELAILCDAEVGLIIFSSTGKLYDFASSSMKSVIDRYNKSKIEQQQLLNPASEVKFWQREAAVLRQELHALQENHRQMMGEQLNGLSVNELNSLENQIEISLRGIRMRKEQLLTQEIQELSQKRNLIHQENLDLSRKVQRIHQENVELYKKAYMANTNGFTHREVAVADDESHTQIRLQLSQPEHSDYDTPPRANE

SEQ ID NO: 19383 - protein, 407 aa, Oryza sativa
MAVPPVESETRSEETDNFPLLADHMENTGHHAHAVDIPWDSSPSTSRRDNHNGFDQLPRILEGSPGTSTPSNSQNGPLARRDDNRGRRQPSPLNSGCWISVELVVNVSQIIAAICVLSVSRNEHPHSPLFEWVIGYTVGCTATLPHLYWRYLHRNLPTTGQEPTVQNIPPNNTPEANSYGVTGTNGVSRNNEATVNPRFQAFADHFKMALDCFFAVWFVVGNVWVFGGHSSAHDAPNLYRLCIAFLTFSCIGYAMPFILCALICCCLPCIISILGFREDLNQNRGASAETINALGTCKFKSKKTRDGDGNEVGVGVVAAGTNKERVISAEDAVCCICLARYVDNDDLRELPCAHFFHKDCVDKWLKINALCPLCKAEIDGVSTSAPAIGFGRRHSDNRVGNDIESQL

SEQ ID NO: 19384 - protein, 455 aa, Pseudomonas aeruginosa UCBPP-PA14
MPDAPASAAERLERLPLSPYHRLIFVIIALAFFFDSMDLAMMTFLLGSIKAEFGLDSAQAGLLASSSFFGMVIGAALSGMLADRFGRKPVFQASIVLWGLASYLCSTAGDLGSLTFYRVLLGIGMGMEFPIAQSLLSEMIPASRRGKYIALMDGFWPLGFVAAGCLSYFLLPLTGWRSIFLVLALPAVFVLAIRFLIPESPRWLEQAGRREQADRVLRDIEARVMRSLGLTELPPPLRQPQRERSRPGFFSAFAELWSPAYRRRTLTVWGLWFFALLGFYGLTSWLSALLQQSGFAVTQSVYYTVLISLAGIPGFLCAAWLVESWGRKPSCVLMLLGGGAMAYAYGQTAVFGGSLALLIGFGLAMQFFLFGMWAVLYTYTPELYPTSARATGSGFASAVGRIGSLLGPLVTGLVLPLTGQGGVFTLGALCFGVAALVVWAFGIETRGRTLEELAG

SEQ ID NO: 19385 - protein, 912 aa, Arabidopsis thaliana
MDAVREEGTSFVTAVQEQSSNGYLLIAASGGLNQQRTGITDAVVVARILNATLVVPELDHHSYWKDDSDFSDIFDVNWFISSLAKDVTIVKRVPDRVMRAMEKPPYTTRVPRKSTLEYYLDQVLPILTRRHVLQLTKFDYRLANDLDEDMQKLRCRVNYHALRFTKRIQSVGMKVVKRMRKMAKRFIAVHLRFEPDMLAFSGCDFGGGEKERAELAEIRKRWDTLPDLDPLEERKRGKCPLTPHEVGLMLRALGFTNDTYIYVASGEIYGGEKTLKPLRELFPNFYTKEMLANDELKPLLPYSSRLAAIDYIVSDESDVFITNNNGNMAKILAGRRRYMGHKRTIRPNAKKLSALFMDREKMEWQTFAKKVKSCQRGFMGDPDEFKPGRGEFHEYPQSCICQRPFSYDKTSTDDEEEDMSEENHNSTSPGHIFSWLVVLLSLISLVPVPSESAVLSVDLGSEWVKVAVVNLKRGQSPISVAINEMSKRKSPALVAFQSGDRLLGEEAAGITARYPNKVYSQLRDMVGKPFKHVKDFIDSVYLPFDIVEDSRGAVGIKIDDGSTVYSVEELLAMILGYASNLAEFHAKIPVKDMVVSVPPYFGQAERRGLIQASQLAGVNVLSLVNEHSGAALQYGIDKDFANGSRHVIFYDMGSSSTYAALVYYSAYSEKEYGKTVSVNQFQVKDVRWDLGLGGQSMEMRLVEHFADEFNKQLGNGVDVRKFPKAMAKLKKQVKRTKEILSANTAAPISVESLHDDRDFRSTITREKFEELCKDLWERSLTPLKDVLKHSGLKIDDISAVELIGGATRVPKLQSTIQEFIGKQQLDKHLDADEAIVLGSALHAANLSDGIKLKRRLGIVDGSPYGFLVELEGPNVKKDESTKQQLVPRMKKLPSKVPHYIQNLFKLRNISVL

SEQ ID NO: 19386 - protein, 172 aa, Streptococcus pyogenes M49 591
MVTTVKMTSGYEIPVLGFGTYQAADGEEAYQSTLAAIKAGYRHIDTAAIYKNEESVGRALKDSGVLREDLFITTKLWNDAHSYEGAKDALAASLDRLGLDYVDLYLIHWPNPKALRNTWKEANAQAWQYMEEAVEAGLIKSIGVSNFMVHHLEALQETAKITPAINQIRLAP

SEQ ID NO: 19387 - protein, 204 aa, Hordeum vulgare
MADPAEDTSVHKVLGGGKTADVLLWKNKKTTAVVIGGTTVIWVLFEVLDYHLLTLLSHVMIGVLAILFVWSKAMTFIKKSPPDIPVVEIPEDLAVNVSRALRNDVNRSLHLFREIAMGHDLKKFLGVIAGLWVLSEVGSCCDFLTLIYIAVLMIHTVPILYDKYQDKVDHFAGKAHTEACKHYEVLDQKVLSKIPRGPAKTKKT

SEQ ID NO: 19388 - protein, 175 aa, Triticum aestivum
MAPTVMASSATSVAPFQGLKSTAGLPVCRRSNGASLGSVSNGGRIRCMQVWPIEGIKKCETLSYLPPLRTEALLKQVDYLIRSKWVPCLEFSKVGLIFREHNTSPGYYDGRYWTMWKLPMFGCTDATQVINEVEEVKKEYPDAYVRIIGFDNMRHVQCVSFIAFKPPGCEESGKA

SEQ ID NO: 19389 - protein, 656 aa, Mycoplasma penetrans HF-2
MDYSKYINSIRLLSLNAIKKAKQGHVGMSMSAATITYTLFTKHINISSVDPKWINRDRFILSAGHGSLSIYSILHFSGLISLEEFKKFKNNSEIVPGHPEYLKNNFIDASTGPLGQGIGMAVGNAIAQKYIVNKFKSISDLFDHYVYALVGDGDIQEGISYESMSLAGKLKLNKLIVLHDSNDYQLDSSVETVFNEDLQKRMESMGWFYLKVNNEVDEIDLAISLAKKQDKPTYIEVKTLIGYGTKNINSNKSHSMSLSEDDIEYAKTIFDLKNEEFSFGQNIYDHFKTEVLNRNRKYEKWLNKFKEYERENNSDFIKFNNYLKRNYKIEEILKNIKFSKTSVATRNYVKDLMDCLKNHNSDFIIAGCADLEAATNIKINDSDFNYDYSSNNIKYGIREFAMGAITNGILLHSCLKTISGTFLVFSDYLKSAIRLGTLMSLPNFYIFTHDSYQVGGDGPTHQPIEQLAMLRSIPRVNVFRPCDETEFLAASYKALKSTSETNILVLTRQPLKSKINTSLKGTINDGGYVLESDQNPDITIAGCGSEIDLLFDVKQDLNDLNYKVKIVSIPSLNIFLNNKESKIKEILNSKYGLFTIEPSSDAYWYKLSSYVKSHIHFEAKEYGKSMDGDALYKEKGFNKDNIKNLILRKLIKYDNN

SEQ ID NO: 19390 - protein, 315 aa, Polaromonas sp. JS666
MNQLESLKQFTTVVADTGDFRQLGQFKPQDATTNPSLILKAVQKADYQPLLKETVARFKGRALDEVMDRLLVRFGCEILSIIPGRVSTEVDARLSFDANASYTRGERIVELYQAEGIHIDRVLIKVAATWEGIQAAERLERRGIHTNLTLLFSFCQAVACGQARVQLISPFVGRIYDWYKKSAGAAWDEAANAGANDPGVKSVRQIYNHYKHFGIATEVMGASFRNAGQITALAGCDLLTISPELLAQLAASEAPLARSLDAGAARSLDLPAVNYDETGFRYALNEDAMATEKLAEGIRAFAADAIKLEQLMVAA

SEQ ID NO: 19391 - protein, 405 aa, Arabidopsis thaliana
MPLSLQSPPCATLSASIRKGRWKTLAAGFSVTPLPAVNFSLRRSIPRILASASSSSSPASSSLEAGENNELNAVSAFSEIVPDTVVFDDFERFPPTAATVSSALLLGICGLPDTIFRNAVDMALADSSCAGLETTESRLSCFFNKAIVNVGGDLVKLVPGRVSTEVDARLAYDTNGIIRKVHDLLRLYNEIDVPHDRLLFKIPATWQGIEAARLLESEGIQTHMTFVYSFAQAAAASQAGASVIQIFVGRLRDWARNHSGDTEIESAIKSGEDPGLALVKRSYNYIHKYGYKSKLMAAAVRNKQDLFSLLGVDYVIAPLKVLQSLKDSPAIPDDEKYSFVRKLTPETATHYHFTNKELVKWDQLSLASSMGPASVELLSAGVEGYANQAKRVEELFGKIWPPPNV

SEQ ID NO: 19392 - protein, 398 aa, Debaryomyces hansenii CBS767
MISRSITHQLARGAGVMGRRTMASASSDLVSIKLPESSFEGYNLEIPELSFETEKDTLLQMYKDMIIIRRMEMASDALYKAKKIRGFCHLSIGQEAVAVGIEAAINKKDSVITSYRCHGFTYMRGASVKEVLGELMGKRSGVSYGKGGSMHMYAQGFYGGNGIVGAQVPLGAGLAFAHKYRGEGNCTFNLYGDGASNQGQVFESYNMAKLWDLPCVFACENNKYGMGTSASRSSAMTEYYKRGQYIPGLKVNGMDILACYQASKFAKDWCTSGNGPLVLEYETYRYGGHSMSDPGTTYRTREEVQHMRSRNDPIAGLKATLLELDIATEEEIKSYDKAARKYVDEQVAEAEADAPPEAKMDILFEDVYVPGSEIKELRGRISDDTWNFEKGTFSNRVY

SEQ ID NO: 19393 - protein, 491 aa, Glycine max
MAGIAGTCPLGALLRNSVSENNGKISVVHYEGLRLQQRMQMPSPSQYISASSSAPRCRTIKAMASPTVGAPKREKDPKKRVVITGMGLVSVFGSDVDAFYNKLLEGESGISLIDRFDASNFSVRFGGQIRDFSSEGYIDGKNDRRLDNCWRYCIVAGKRALDDANLGKQVLDTMDKTRIGVLVGSGMGGITAFSNGVEALVQKGYKKITPFFIPYSITNMGSALLAIDTGLMGPNYSISTACATANYCFCAAANHIRKGEADIMVVGGTEAAIMPSGLGGFIACRALSHRNEDPKKASRPWDKDRDGFVMGEGSGVLVMESLESATKRGAKIIAEYLGGAITCDAHHMTDPRADGLGVSSCISKSLEDAGVSPEEVNYVNAHATSTLAGDLAEVNAIKKVFKDTSELKMNATKSMIGHGLGAAGGLEAIATIKAITTGWLHPSINLDNLEASVTIDTVPNVKKKHEVNVGISNSFGFGGHNSVVVFAPFRP

SEQ ID NO: 19394 - protein, 352 aa, Oryza sativa
RIFYEVQVEWCGGGGAGGKSVSTMASPSGAGKPPAVLLLRPVDQPFAVALRERYRVLDLLSSGQPLPAFLAAAAAAPDPPRAAVVMGGGSIRADAALFDAVPSLRCVVSTAAGVDHIDLAECARRGVVVANSGTVYSGDVADHAVGMVIDVMRRVSAAERYVRRGLWPVQGDYPLGSKVSGKRVGIIGLGNIGSLIAKRLEAFGCVISYNSRNPKRSLPYTYYADVRALAADSDVLVVSCALNSETRHIVGGEVLDALGEGGVVVNVGRGANVDEAALVRALREGRIAGAGLDVFEGEPKVSPELREMENVVLTPHVAVWTAESRSDLRDHTVANLDAFFSGDPLLTPVMLP

SEQ ID NO: 19395 - protein, 303 aa, Saccharomyces cerevisiae
MTVTDTFKLFILRHGQSELNSENIFCGWIDAQLTEKGKSQARHSAKLIKQFCDSNNISLPQIGYTSRLIRTQQTMDVILEELGLKHTNYVITTNTNIKEELQDTRFEGSMPVLQTWRLNERHYGAWQGQRKPDILKEYGKEKYMYIRRDYNGKPPKVNLNLEMVQEENDQGSSTGYDFKEPNRHLKYGPEEKANERLPESESLCEVVVRLKPFLNNVVLSTANKISQESCVIVGHGSSVRSLLKVLEGISDEDIKDVDIPNGIPLVIELDRDNYSFVRKFYLDPESAKVNAQMVRDEGFEKNP

SEQ ID NO: 19396 - protein, 140 aa, Brassica napus
  misc_feature (2)..(2): Xaa can be any naturally occurring amino acid
  misc_feature (44)..(44): Xaa can be any naturally occurring amino acid
  unsure (1)..(140): unsure at all Xaa locations
WXQDKWVGCFPVKWHIVKDIPNSSLRHITLENNENKPVTNSRDXQEVKIEQGVKVIKIFKEHESKTCILDDFVFYESREKIIKEGKKKHQEYKKQQALAASDKKATPKEEPKETKETSSMIPEVVEEISQNGVAEVASAC

SEQ ID NO: 19397 - protein, 716 aa, Cypripedium parviflorum var. pubescens
LSFHYMLPLSVPPWRHELKRSLWESYVLANKIFSQKVIEVINPEEDYVWIHDYHLMALPTFLRRRFNRLRMGFFLHSPFPSSEIYRTLPVREEILKALLNCDLIGFHTFDYARHFLSCCSRMLGMEYQSKRGYIGLDYFGRTVGIKIMPVGIQMAQLQLTLSLPDKAWRVSELQQRFLVKLFCLVLMTWTFSKASISSSLHLSRCSRYIPSGRGMRFLCRLLILLGAREGTLRRFKQRFGKAAKRINEQFGNANYNPVVFIDLPISLEERVAFYTIAECVVVTAVRDGMNLTPYEYIVCRQGIISGSDSSLEADGPKKSMLVVSEFLGCSPSLSGAIRINPWNTESTAEAMNEAISMSDAEKQLRHEKHYRYVSTHDVAYWSKSFMHDLERTCKDHFKRRCWGIGLGFGFRVVALDPNFRKLNIDAIVSAHERAKSRAILLDYDGTMMPQMPINKTPSAEIISIINTLCGDKKNVVFIVVVEEWCNLEKWFSPCRKLGLAAEHGYFTRWSRDESWEICSQSSDFEWMQIAEPVMKLYTESTDGSYIDKKESALVWHHHDADPDFGSAQAKEMLDHLESVLANEPVSVKSGQFIVEVKPQGVTKGIVVEKILSSMVNYNKQADFLLCIGDDRSHEDMFECISAILSKDLVAPNTTSVCFHKWDRNRAKARYYLDDTVEVTNMLGALADSSQPSSPISDVKLESLSFSEMAAKPNMST

SEQ ID NO: 19398 - protein, 344 aa, Shewanella oneidensis MR-1
MAVFNHVSFDEHEQVVFCHDKESGLKAIIAIHNTNLGPAVGGCRMWNYQSDDEALTDVLRLSRGMTYKNALAGLTMGGGKSVIIADPKRPDREALFRAFGRFINSLGGRYYSAEDVGTTTADIMIAHQETPYMAGLEGKSGDPSPFTALGTYLGIKAAVKHKLDLDSLKGLKIAVQGVGHVGYYLCKHLHEEGAQLIVTDIHQASLDKVATDFGATVVAPQDIYAQDVDVYAPCALGATLNDVTLPLLKAKIVAGCANNQLAEVRHGEQLKEMGILYAPDYVINAGGIINVSFEKDYDAAKSEAKVREIYNTLLKIFAKADAENRTTGAVADEMARAIYQAAKA

SEQ ID NO: 19399 - protein, 379 aa, Arabidopsis thaliana
MITKFTSPFRLIRFFNSLSSSSSICFCETLDFGVRKKTSMAEEVAENVNAVPVSEDELYGFKRSEMYSGTLAGSVGPYGRHVFLCYKSHETWLPRVETEGLPQRFAKLFKDRKADFAVETKLTVCGGGGESDGDVLIFPEMVRYKAIQDTDVDAFVEDVLVKGKTWTSGIQEELTGSFVFVCAHGSRDKRCGVCGPVLMEKFEQEISSRGLSDKIFVLPCSHIGGHKYAGNLIVFSPDSAGNVSGHWYGYVTPDDVPAMLDQHIAKGEIIQNLSRGQMRLRPEGEEAEKEDEHKIPNGNSVMVEEREPVEQKGFTGGCCQGANGVSCCQEQAAEPVKKEGCMKLNWLKSMGKEEVLLGAAVVSAVATVAVAYSIYRRSG

SEQ ID NO: 19400 - protein, 234 aa, Gloeobacter violaceus PCC 7421
MRGDLHDIDIRTLIEWLAARRSTGELLVGAPDDRFWSVFWDGGRLCSCAEQEPGLLQRQLDELVVLEEGWFCFDAAAVPPSGGQGVEAAVWLDRLAAGPPPLSPAPPAPTGRVVCIDDSTAVQRWVADCLEGACREIRACSDPLQGLAVLREAPADLVLLDSAMPGLDGRRLCRVLRRLPGLNRIPVLLMVDGDERTEQAHARLCGAAAVLAKPFSRGVLRSLVAHWLPGAPLG

SEQ ID NO: 19401 - protein, 421 aa, Bradyrhizobium japonicum USDA 110
MRRVVVTGLGMVSPLGCGVEPTWKRILNGESGARRIESFDVSDLQTKIACTVVRGDGSNDTFNPDKWMEPKDQRKVDDFIIFGMAAAGQALDDANWHPETEEDKCATGTMIGSGIGGLNGIAETAILLKERGPRRVSPFFIPGRLINLASGYVSIAHGLKGPNHSVVTACSTGAHAVGDAARLIALGDADVMVAGGAESPISRIGIAGFNAARALSTGFNDTPEKASRPYDKDRDGFVMGEGAGVLVLEELEHARRRGAKIYAEVIGYGLSGDAYHITSPSPDGDGGFRSMQAALKRAGLTASDLDYINAHGTSTPLGDEIELGAVERLLGNAASKVAMSSTKSSTGHLLGAAGAIEAIFAILAIRDNVVPPTINLDNPSVETTIDLVPHTAKKREVNVALSNSFGFGGTNASVIVRRLAN

SEQ ID NO: 19402 - protein, 320 aa, Triticum aestivum
MASAKATMGQEKQDHFVLKSGHAMPAVGLGTWRAGSDTAHSVQTAITEAGYRHVDTAAEYGVEKEVGKGLRAAMEAGIDRKDLFVTSKLWCTNLVPERVRPALESTLKDLQLDYIDLYHIHWPFRLKDGAHKPPEAGEVLEFDMEGVWKEMENLVKDGLVKDIGVCNYTVTKLDRLLRSAKIPPAVCQMEMHPGWKNDKMFEACKKRGIHVTAYSPLGSSEKNLAHDPVVEKVANKLNKTPGQVLIRWALQRGTSVIPKSSKDERIKENIQVFGWEIPEEDFKVLCSIKDEKRVLTGEELFVNKTHGPYKSASEVWDHEN

SEQ ID NO: 19403 - protein, 369 aa, Streptococcus agalactiae NEM316
MAEKKGNTTFNVQVADFIRNHKKQGTAIDDEVTEKLVIPFVLDADQIDDLLERLTDGGISITDKEGNPSTKYVVEGPKPEELTDEELIGSNSAKVNDPVRMYLKEIGVVPLLTNEEEKELAVAVAEGDLMAKQRLAEANLRLVVSIAKRYVGRGMQFLDLIQEGNMGLMKAVDKFDYSKGFKFSTYATWWIRQAITRAIADQARTIRIPVHMVETINKLVREQRNLLQELGQDPTPEQIAERMDMTPDKVREILKIAQEPVSLETPIGEEDDSHLGDFIEDEVIENPVDYTTRVVLREQLDEVLDTLTDREENVLRLRFGLDDGKMRTLEDVGKVFNVTRERIRQIEAKALRKLRHPSRSKQLKDFMED

SEQ ID NO: 19404 - protein, 550 aa, Caulobacter crescentus CB15
MTRYIFITGGVVSSLGKGLASAALGALLQARGYKVRLRKLDPYLNVDPGTMSPYQHGEVFVTDDGAETDLDLGHYERFTGVSATKADNITTGQIYKTIIEKERRGDYLGATVQVIPHVTNEIKDFVLSPAMDETGEKAVDFVLVEIGGTVGDIEGLPFFEAIRQLRQDLPRGQSCYVHLTLLPFIKTAGEMKTKPTQHSVKELRSIGIQPDILLCRCEQEIPPEEKRKIAQFCNVRPSAVIQAMDSSSIYAVPIDYHEQGLDAEVLDVFGMRDAPAPDLTRWKTIDDTVQHPDGEVTIAVVGKYTVLKDAYKSLIEALHHGGLANKVKVNLDWVESETFEGDEGAAAARLENAHAIMVPGGFGERGAEGKIRAAQFARERKVPYFGICFGMQMAVIETLRNVAGIKDASSSEFGPTERPVVGIMTEWIKGNETVQRRANDDLGGTMRLGAYDAVLTAGSKIAEIYGATEISERHRHRYEVNIGYVHLMEDAGLKLTGRSPNGVLPEIVERDDHPWFIGVQYHPELKSRPFAPHPLFASFIAAAKEHGRLV

SEQ ID NO: 19405 - protein, 406 aa, Glycine max
MESRVLSRAGTLFSLPHLRKLPREVGAGPSLVAVKAVGSVADGGNLIWGRQLRPELCSPALKKEAVLLRPCLAAASSPAEGSDSAGEAKVAPAGFFEKYPALVTGFFFFTWYFLNVIFNILNKKIYNYFPYPYFVSVIHLFVGVAYCLVSWAVGLPKRAPIDSNLLKLLIPVAVCHALGHVTSNVSFAAVAVSFTHTIKALEPFFNAAASQFILGQSIPITSWLSLAPVVIGVSMASLTELSFNWVGFISAMISNISFTYRSIYSKKAMTDMDSTNIYAYISIIALIVCIPPAVILEGPTLLKHGFNDAIAKVGLVKFVSDLFWVGMFYHLYNQVATNTLERVAPLTHAVGNVLKRVFVIGFSIIVFGNKISTQTGIGTAIAIAGVALYSFIKARMEEEKRQAKAA

SEQ ID NO: 19406 - protein, 322 aa, Malus x domestica
ILPFKLPAIGPNDVRIRIKAVGICGSDIHYLKTMKCGDFQVKDPMVIGHECAGIVDKVGSEVKHLVPGDRVAVEPGISCAHCQQCKGGRYNLCPDMKFFATPPVHGSLANQIVHPADLCFKLPENVSLEEGAMCEPLSVGVHACRRANVGPETTVLIVGAGPIGLVSVLAARAFGAPRIVIVDMDDRRLAMAKSLGADGTVKVSTKMEDLDDEVAKIKEAMGSEVDVTFDCVGFNKTMSTGLNATRPGGKVCLVGMGHGVMTVPLTPAAAREVDVVGVFRYKNTWPLCLEFLRSGKIDVKPLITHRFGFTEKEVEEALEPVL

SEQ ID NO: 19407 - protein, 178 aa, Brassica napus
  misc_feature (80)..(80): Xaa can be any naturally occurring amino acid
  misc_feature (116)..(116): Xaa can be any naturally occurring amino acid
  misc_feature (128)..(128): Xaa can be any naturally occurring amino acid
  misc_feature (135)..(135): Xaa can be any naturally occurring amino acid
  misc_feature (147)..(147): Xaa can be any naturally occurring amino acid
  unsure (1)..(178): unsure at all Xaa locations
MGSPTRKSGIEYTLKKLLQLTTNEEAFDALKTKTVDLVLTAHSTQFVPNTVIRIRDGLAQLYAKDTALIDKQELDEDLQXKIQVAFRTDEIQRTPPAQQDEMRAALSYYHETTWKXVLKFLKRVPTAXKNIGINXSVPYDAPLIQIXPWMGGGCDGTLLILSFLEHLLNPETGVMYAY

SEQ ID NO: 19408 - protein, 536 aa, Exiguobacterium sp. 255-15
MNRAWWKEAVVYQVYWRSFKDSNGDGMGDLRGVIEKLDYIASLDVDIIWLNPCYTSPDVDNGYDISDYYSIMPKAGTMSDLEELIASAHERGLKLILDLVVNHTSDQHTWFKESRSSRTNEKADWYIWRDGVKGTPPNNWRSYFAPSPWTWDETREQYYFHSFASEQPDLNWEHPAVRQAVYTMMRWWADKGIDGFRMDVINLIKKRATYDDVADPLELSYLGNQPGIHEFLQEMHQEVLAGTDLFTVGEIPFVGPEDGLLYVGEERNELRTLFHFEVADDMETMDLPRFKQIQKRWYEALYPSGVASQFLNNHDHTRQVTRFGSERYRVESAKLLGLMLHTLPGIPYIYQGEEIGMTGIRFSDPESYQDVAFRNQYAERIAAGESPGTVLSSMQLRARDNSRTPMQWNTDQSAGFTIGTPWMAVNPNYRDINVEAAEQDPHSVLAFYRQLIDLRKTHPVMVYGVYRDLAIQDPYLYVYERVLDGVVWRIVLNVHDEPVTTTFGLPEEQLILTNYETADINRLAPYEARLYQYEMP

SEQ ID NO: 19409 - protein, 140 aa, Mesorhizobium sp. BNC1
MAIERTFSMIKPDATKRNLTGAITKMLEDAGLKVVASKRVWMSRRQAEGFYAVHKDRPFFDELCEFMSSGPTVIQVLEGENAIAKNREVMGATNPANAAEGTIRKVFALSIGENSVHGSDAPETAEQEIRYWFSETEIVG

SEQ ID NO: 19410 - protein, 151 aa, Schizosaccharomyces pombe
MSTEQTFIAVKPDAVQRGLIGYIISKFELKGYKLRALKFLVPSRDLVEEHYAEHKGKPFYEKLVGFMASGPVCAMIWEGKQAVKTGRLMLGASNPLDSAPGTIRGDYGIDLGRNVCHGSDSIESANREIKLWFQPSEIQVYDRTIEPWIYE

SEQ ID NO: 19411 - protein, 265 aa, Zea mays
MGRGRIEIKRIENNTSRQVTFCKRRNGLLKKAYELSVLCDAEVALVVFSSRGRLYEYANNSVKATIERYKKAHAVGSSSGPPLLEHNAQQFYQQESAKLRNQIQMLQNTNRHLVGDSVGNLSLKELKQLESRLEKGISKIRARKSELLAAEINYMAKRETELQNDHMNLRTKIEEGEQQLQQVTVAQSVAAAAATDVELNPFLEMDTKCFFPGGPFATLDMKCFFPGSLQMLEAQQRQMLATELNLGYQLAPPDTDVANNNPQQF

SEQ ID NO: 19412 - protein, 484 aa, Staphylococcus aureus subsp. aureus Mu50
MEDNKMNRSLNSRHISMIAIGGAIGTGLFVATGNIISQAGPGGAILAYLVIGVMLYFLMSSIGELATFYPVSGSFSSYSTRFIDSSLGFTMGWLYWALWSLVTSVDVIVASNVLYFWDTFKFFHPITWSLIFITILLLLNIFSVKSFGETEFWLSLIKVLTIIVFVIFGFLMIFGILGGHTYGFENYTKGQAPFVGGISGFLGVLLVAGFSVGGTEVVAVTAGESDDPKKSMPKAIKQVFWRILLFYVLSIAVIGAIIPYTDPSLLRASSSISQSPFTIVFDRVGIAFAASVINAVILTSLLSAANSGVYTTGRMLYSLSSDKKAPQFLSKLNKTTKLPLRALLTTYAVVVIVIIYANFNSNAVFNLLEIIGSMIIVVWGSSIWSQIRLRQAIKKQGQDPNKVLPYKAPFYPLGPIIVITTLLFLLFGGSVEYILKDQWLNAFKNFLPLIILALIYFIHKIIHKTKFVKLETINLKPHDYDNQN

SEQ ID NO: 19413 - protein, 424 aa, Oryza sativa
MASGDGGDDAGVKRVADRYLKREVLGEGTYGVVFKAVDTKTGNTVAIKKIRLGKYKEGVNFTALREIKLLKELKDSNIIELIDAFPYKGNLHLVFEFMETDLEAVIRDRNIVLSPADTKSYIQMMLKGLAFCHKKWVLHRDMKPNNLLIGADGQLKLADFGLARIFGSPERNFTHQVFARWYRAPELLFGTKQYGSAVDIWAAGCIFAELLLRRPFLQGSSDIDQLGKIFAAFGTPKSSQWPDMVYLPDYVEYQFVSAPPLRSLFPMASDDALDLLSRMFTYDPKARITAQQALEHRYFLSVPAPTKPSQLPRPPPKGDSGNNKIPDLNLQDGPVVLSPPRKLRRVTAHEGMEVHMHRADRTEEHPSGARHMDDMSSQSSRIPMSVDVGAIFGTRPAPRPTLNSADKSRLKRKLDMDPEFGYTE

SEQ ID NO: 19414 - protein, 507 aa, Staphylococcus aureus subsp. aureus Mu50
MTMSQQDKKLTGVFGHPVSDRENSMTAGPRGPLLMQDIYFLEQMSQFDREVIPERRMHAKGSGAFGTFTVTKDITKYTNAKIFSEIGKQTEMFARFSTVAGERGAADAERDIRGFALKFYTEEGNWDLVGNNTPVFFFRDPKLFVSLNRAVKRDPRTNMRDAQNNWDFWTGLPEALHQVTILMSDRGIPKDLRHMHGFGSHTYSMYNDSGERVWVKFHFRTQQGIENLTDEEAAEIIATDRDSSQRDLFEAIEKGDYPKWTMYIQVMTEEQAKNHKDNPFDLTKVWYHDEYPLIEVGEFELNRNPDNYFMDVEQAAFAPTNIIPGLDFSPDKMLQGRLFSYGDAQRYRLGVNHWQIPVNQPKGVGIENICPFSRDGQMRVVDNNQGGGTHYYPNNHGKFDSQPEYKKPPFPTDGYGYEYNQRQDDDNYFEQPGKLFRLQSEDAKERIFTNTANAMEGVTDDVKRRHIRHCYKADPEYGKGVAKALGIDINSIDLETENDETYENFEK

SEQ ID NO: 19415 - protein, 621 aa, Listeria monocytogenes str. 4b F2365
MCGFVGCVHDRITEITGADKETFRQMNSMITHRGPDDEGYFTDDHVQFGFRRLSIIDVENGHQPLTYENERYWIIFNGEVYNYVELREQLVAEGMTFETESDTEVIIATYAKYKEKTAERLRGMFGFVIWDKQEELVYGARDPFGIKPFFYAEEDGKLFMGSEKKSILHALKEKELDEVSLQNYMTYQFVPEPDSLTKNVKRLEPGHQFTKKIGQPMEITTYWKASFAPVTKSEDAWIKEVRDVMYDSVKMHMRSDVPVGSFLSGGIDSSIIAAIAKEYHPAIKTFSVGFERDGFSEIDVAKETADKLGVENISYVISPEEYMKELPKIVWHMDDPLADPAAIPLYFLSREARKQVTVALSGEGADELFGGYNIYNEPNSLAMFNKMPSVFKSMLNSVARIMPEGMRGKSFLERGTTPMEERYIGNAKMFTEKEKQILLPKYQAGHDYTNITDPFYAETTNYHPVERMQYIDIHTWLRGDILLKADRMTMANSLEVRVPFLDKEVYNVARNIPDTMKTTNGTTKYILRKAAATFVPEHVLNRRKLGFPVPIRHWLKDEMNAWVKNIIKESPTDHLINKQYVLGLLDDHCAGKFDYSRKIWTVVIFMIWYDVYVADKYDFGK

SEQ ID NO: 19416 - protein, 390 aa, Glycine max
QSLILLTIGKAPARTVSYVGPPIIDFISIPKMNNPNGGICFLLFLFLFPFAAAQPATNQNQSYYNKFSPSMAIIIVILIAALFLMGFFSIYIRHCSDSPSASIRNLAAATGRSRRGTRGLEQAVIDTFPTLEYSAVKIHKLGKGTLECAVCLNEFEDTETLRLIPKCDHVFHPECIDEWLASHTTCPVCRANLVPQPGESVHGIPILNAPEDIEAQHEAQNDLVEPEQQQQDPKPPVPTEPQVLSLNQTLNRNRTRGSRSGRPRRFPRSHSTGHSLVLPGEDTERFTLRLPEEVRKQILQNPQLHRARSLVILPREGSSRRGYRTGEGSSRGRSSRRLDRGFKSDRWVFTMAPPFLVRASSIRSPRVANNGGEGTSAAASLPPPPAVESV

SEQ ID NO: 19417 - protein, 297 aa, Zea mays
REASEIGRHVAIARGARRPRPTMLARAPPPRPCSSGVCIARAHPRAAAVAARPGTTRTTTTVAAAAAEAASNGSAAAAVAGISSSSSALVTSTVGKSTNILWHECAIGQKERQGLLNQKGCVVWITGLSGSGKSTLACALSRELHGRGHLTYVLDGDNLRHGLNRDLSFGAEDRAENIRRVGEVAKLFADAGLVCIASLISPYRSDRSACRDLLPKHSFIEVFLDVPLQVCEARDPKGLYKLARAGKIKGFTGIDDPYEPPSDCEIVIQCKVGDCPSPESMAGHVVSYLETNGFLQD

SEQ ID NO: 19418 - protein, 378 aa, Brucella melitensis 16M
MKLDTYLTRLENLERKGRRRNLALADGLDFSSNDYLGLATHPGIKAAVEAALQRGVPLGATGSRLLRGNHAEHEALEAEAAAHFSAPRMIYFGSGYMANLAALSTLPQPGDLIVYDELIHASAHAGIRAGRAEAVGARHNDAQAFEDRIRAWRENGGRGTPWIVVESIYSMDGDQAPLKALHAIATRYDGVLYIDEAHATGVYGANGGGFAATLGDAEHIVTLHTCGKALGGSGALLGAHATLCDYLVNRASGFIFTTAPSPLQAAALREALRILRDQPERRARLFSRISHANERIATALGQPVSGTQIIPIIVGDNERAVRLAAQMQAQGFDIRAIRPPTVPHGTARLRISITLNVGLADIDRMVETLSYATFREAA

SEQ ID NO: 19419 - protein, 498 aa, Nostoc sp. PCC 7120
MKTPLNCQNYINGQWLNAATETTLNSHNPADKSEIVATFPRSQADDVDRAVAAARQAYGSWRKVPAPARAEYIFRVGELLLQHKEELAQLISREMGKPLTEARGDVQEGVDCAFYSAGEGRRLFGQTTPSEMPNKFAMTMRMPIGVCALITPWNFPVAIPCWKAMPALVCGNTVILKPAEDTPACATKLIEIFAAAGLPPGVINLVHGVGEEVGKALVEHPNIDLVSFTGSSATGAYVGETCGRTHKRVCLEMGGKNAQVVMEDADLELALDGALWGAFGTTGQRCTATSRLILHRDIKEKFTTMLRERTSQLRLGAGTEPETDIGPIINNRQLQRVHEYMNIAREEGAKILIGGEIATEGQLQQGYFFQPTILDNVTPQMRVAREEIFGPVVALIEVSTFEEAIAILNDTKYGLSSSVYTRDINRAFVAMRDIEAGITYINGPTIGAEVHLPFGGVKQTGNGHREAGTTALDVFTEWKSVYVDFSGSLQRAQIDNRS

SEQ ID NO: 19420 - protein, 347 aa, Streptococcus agalactiae NEM316
MFVKKGLFVFLLLCILSMWLMIFGVAFYYFGSLHQSLTSRIIYQFVLTVLLTTTAWFMGAYFLAFEGHFKTVFQFQEADGKQIVNCLFQLCFALYAVVMLIGSIIDRVQTKRLLLAVVSWLFLVYTPLAYLIWNSEGVFAKMGVLDFSGGMVVHLSAGLSSYILAHVIGKSEHQHNKVKNDSLFLGMILITFGWFGFNMGPVGEWNSQAIMILLNTIFAIIGGGLAWTLAAKWNGEEEKTGSLLNGIIVGLVTSTAGVGYLLTWQLLAVTFFASLFTYFVTDYVAKAFAIDDVVSSFGMNGIGGLLGSLGVGLFKLSHMPVQLLALATTILLSIIMTYIISKAIFRK

SEQ ID NO: 19421 - protein, 343 aa, Caulobacter crescentus CB15
MARTRKAEASEGKAPETGVNAFVGKDELLKFYQDMLLIRRFEERAGQLYGMGLIGGFCHLYIGQEAIAVGMQSISQKGDQIITGYRDHGHMLAAGMDPREVMAELTGRAGGSSKGKGGSMHMFDIATGFYGGHGIVGAQVALGTGLALANSYRNNGNVSYAYMGDGAANQGQVYESFNMAQLWKLPVVYVIENNQYAMGTAVERAASETAFHKRGVSFRIPGEEVDGMDVIAVREAGARATEHARSGQGPYILEMKTYRYRGHSMSDPAKYRTKEEVDEVKTTRDPIDHIKERLAKAGVTEDDLKGVDAEVKRIVAEAAEFARTSPEPDPSELYTDVYLEAAE

SEQ ID NO: 19422 - protein, 571 aa, Chlamydia muridarum
  misc_feature (169)..(169): Xaa can be any naturally occurring amino acid
  unsure (1)..(571): unsure at all Xaa locations
MRIHTLDSQRADAAQEEEIQRKLEELVTLAKDQGFITYEEINEILPPSFDSPEQIDQVLIFLAGMDVQVLNQADVERQKERKKEAKELEGLAKRSEGTPDDPVRMYLKEMGTVPLLTREEEVEISKRIEKAQVQIERIILRFRYSTKEAVSIAQYLINGKERFDKIVSXKEVEDKTHFLNLLPKLISLLKEEDSYLEERLLALKDPALSKQDQAKLNDELEKCRIRTQAYLRCFHCRHNVTEDFGEVVFKAYDSFLQLEQQINDLKVRAERNKFAAAKLAAARRKLYKREVAAGRTLEEFKKDVRMLQRWMDKSQEAKQEMVESNLRLVISIAKKYTNRGLSFLDLIQEGNMGLMKAVEKFEYRRGYKFSTYATWWIRQAVTRAIADQARTIRIPVHMIETINKVLRGAKKLMMETGKEPTPEELGEELGFTPDRVREIYKIAQHPISLQAEVGDSGESSFGDFLEDTAVESPAEATGYSMLKDKMKKVLKTLTDRERFVLIHRFGLLDGRPKTLEEVGSAFNVTRERIRQIEAKALRKMRHPIRSKQLRAFLDLLEEEKTGSGKIKSYKN

SEQ ID NO: 19423 - protein, 425 aa, Silicibacter sp. TM1040
MLNAEISIRRNAAISRGVGMQTQVYVSRAEGAEVWDVEGHRYIDFAAGIAVVNTGHCHPKVMEAVRSQSAAFTHTCHQVLPYESYIRLAERLNDKVPGNFDKKTAFVTTGAEAVENAIKIARAATGRSAILAFGGGFHGRTFMGMSLTGKVAPYKKGFGAMMPDVYHVPFPVDLHGISTADALGAIDRLFKADLDPDRLAAIILEPVQGEGGFYPAPKELMHALRELCDAHGILLIADEIQTGFARTGHLFAMEGYDVAPDLTTMAKGLAGGLPLAAVTGRAEVMDAAAPGGLGGTYGGNPLGIAAAHAVLDVIEEEDLCTRANALGARLKQRLSAIQERVPEIADIRGPGFMVAAEFNTTDGSAPNPEMANAIRTEALERGLVLLTCGVYGNVIRFLAPITIPDAVFSEALEILEASILAAKDA

SEQ ID NO: 19424 - protein, 489 aa, Silicibacter sp. TM1040
MSTPTSLSLRDPSLLETRAYVNGQWINGATTFDVIDPATGRLVAEVADLDVAAAAKAVDAAHAAGPSWAALAGKERSSILRRWHDLLVENADDLATILTAEMGKPWAEARGEILYGASFIEWFAEEAKRIYGDVIPGPQRDKRIMVLKQPIGVVGSITPWNFPNAMIARKVGPALAAGCTFVARPAELTPLSALAMAVLAERAGIPAGVFNVIPSNDAPGVGRELCTNPKVRKITFTGSTRVGRILMEQASGTIKKMSLELGGNAPFIVFDDADLDAAVEGAMIAKFRNNGQTCVCANRIYVQASVYDAFAEKLAGEVKSLQVGNGFDDATTAGPLINEAALRKVEAHISDAVGKGARIVTGGHRSDLGGTFFEPTVLRDVNPHMVVCHEETFGPLAALVRFDSEEEVIALANDSEFGLAAYFYARDLSRVWRVAESLESGMVGANTGLISTEVAPFGGIKQSGLGREGSKYGIDDFVELKNICLGGMS

SEQ ID NO: 19425 - protein, 329 aa, Arabidopsis thaliana
  misc_feature (34)..(34): Xaa can be any naturally occurring amino acid
  unsure (1)..(329): unsure at all Xaa locations
MAQLPPKIPTMTTPNWPDFSSQILPSIAATAAAXATAGPQQQNPSWMDEFLDFSATRRGTHRRSISDSIAFLEPPSSGVGNHHFDRFDDEQFMSMFNDDVHNNNHNHHHHHSINVNVGPTRSSSNTSTPSALFRLRDDDNYKDAPPSVHVLHLDNNVANQNNAAGHNYNESDGVQGPCKTEPQDGPSANQNSGGRSGNRIHAPKRVPRPFAHRPSAPRSRVRPLPYISALERGVTSLQTEVSVFSPRVAFLDHQRLLLNVDNSALTQRIAALAQDKIFKDAHQEALKREIERLRQVFHQQSLKKMENNVSDQSPADIKPSVEKEQLLNV

SEQ ID NO: 19426 - protein, 301 aa, Clostridium acetobutylicum ATCC 824
MNILVTGGAGFIGSHVVKSLLEHGHKVSVIDNMVHGNSSNLPDEVNIYKYDISEAEIENAFKIERPEVVIHNAAQISVADSVKDPLYDAKVNVLGSINILEMCRKYAVRKVIYPASAAIFGEPKYLPIDEKHPLNMISSYGVSKHTVEHYLNVYKKLYNINYTVLRYSNVYGPGQDSSGEGGVVSIFAEKLTKGEPLCIYGNGNQIRDFVYVKDVTEANILALNSLDNDIYNVSTNTKTTINDLAKLMCEAYGKEVEIMHKGERAGDIFESYMSYDKIYNACGWKPKYDLKLGIKETIQSF

SEQ ID NO: 19427 - protein, 344 aa, Bradyrhizobium sp. BTAi1
MTKYKLEYIWLDGYKPVPNLRGKTQIKEFSSFPTLEQLPLWGFDGSSTMQAEGHSSDCVLKPVAVYPDAARTNGVLVMCEVMMPDGKTPHPSNARATILDDPDAWFGFEQEYFFYKDGRPLGFPEYGYPAPQGPYYTGVGFKNVGDVARKIVEEHLDLCLAAGINHEGINAEVAKGQWEFQVFGKGSRTAADQMWMARYLMLRLTEKYGIDIEFHCKPLGDTDWNGSGMHCNFSTKYMREVGGKEYFEKLMDAFKEARADHIAVYGPDNHMRLTGKHETASIDTFSWGVADRGASIRVPHSFVNNGYKGYLEDRRPNSQGDPYQIASQVLKTISTVPTGAKAAA

SEQ ID NO: 19428 - protein, 160 aa, Caulobacter crescentus CB15
MAMSIYDYSAKTLDGQDVSLADYRGQVLLIVNTASKCGFTPQYEGLEALYKAHKDRGFTVLAFPCNQFGAQEPGNAEEIANFCSLTYDVSFPVMSKIDVNGADAHPLYKFLKKEQKGVLGTEAIKWNFTKFLIGKDGQVVDRFAPTVKPEDLKVAVEALL

SEQ ID NO: 19429 - protein, 466 aa, Caulobacter crescentus CB15
MSTEFDVVVIGAGPGGYVAAIRASQLGLNTAIIERENLGGICLNWGCIPTKALLKSGEVYEQLSHLGGYGLSVEKASFDFGKIIERSRGVAKNMSGGIAFLMKKHKIEVIEGEAKLEKGAPAPKVVVALKAGGSRTVQAKNVILASGARAREIPAIGAVSDGDKIWTYRDALAPKSMPKSLVVIGSGAIGIEFASFYRALGAEVTVVEAIDRIMPVEDEEVSKAAQKAFEKRGIKFRVGAKVSKIEKTKDGVAVTVEAGGKIEQLTAEKCIVAVGIAPNNDGLEALGVSLDRGHVVTDKHCRTNVPGLYAIGDIAGAPWLAHKASHEGIHAAEAIAGYKTPNVLSPIPGCTYANPQVASVGYTEAGAKAAGIEVKAGRFPFRVNGKAVASGETEGFVKTVFDAKTGALIGAHMIGHEVTEMIQGFVTAITLEATEEDLHGVVYAHPTMSEAMHEAALDAYGRVLHI

SEQ ID NO: 19430 - protein, 689 aa, Debaryomyces hansenii CBS767
MSHQKTHSRSRGYGSQSIYGHSEGIELNQGYAEPFGAGVEVKSEGIKNPFVKMEALNVQVGDGEAKRGILILMVGTLPVLVALPCMFLSGGLSYGHGTYDMGTSVSVVSILVMLAGVFMLVTHMLVRGNIISLTSEARGRDGVSTGEFVGAIAMVYVATHLLSVSRLAVLYLGLYVSPFNLYTAIVLVWDVYWSSSTENMVSTVVGYVVVVVSFKILYKKTVLSSLTAALANIDVRVAGGAATAGVVTLAVTGFENISPMMIGVNVCASLVCLISLQDCDLKASRFNPFIIGLVSFSLEYIVLSTDFSMTQLLLGVVVPFIIKADRSINITHSSQYAGINEASETRSNGSILTELLSHSDTRAIFNFLLLNSTFMFIQLLYSFRSKSLGLLSDSLHMALDCTSLALGLIAGILLKNAINPNGKFPFGLKNFEILAGFTNGTLLIGISGSIIFEAFGRLWNPVVLQKTNELIIVSFLGLLVNLVGIFAFNHGHDHSHGHSHGHSHEHGHSHSHDHSHDYADNGDLSGKAAMNDNMKGIFLHILADTLGSVGVVISTILTKFFSWDGFDPVASIIIAVLIFLSAIPLIKSTALSLLLKLKSDKEMKIRSVLNDIVQVKGIKSFTTPRFWPSSDNSDIFGYIHVQIYRGENSSYIKKQCEKIFQAESIDVMIQVENDFDTCWCRSDSAIMTI

SEQ ID NO: 19431 - protein, 1032 aa, Listeria innocua Clip11262
MFFTKDKLRGRLDEVALYRYEKTHPIQKFQAAEDMDGNIAARPQNVIYDNELTIGENWAGRDRYVWLKTTITFPSAKEGTRLIGYFDFGNTGDGHNSGFESLLFVNGEPFQGVDQNHQEVLFPDNFAGKTTELVFRLWSGLEGGGVPSIQTHQLKEAFIGYLNLVIDDLYFTSKATLKTLDQLEENNPTHAPLLQAINRAYLAIDWGTPGSNQNLSSMENANQILQAAIKEMPKNFPIKVAAVGHTHIDVAWLWRLKHTREKAARSFSTVLHLMEDYPEYLFLQSQPQLYAYIKEDYPEIYAKIKAKIEEGNWEADGGMWLEADCNIPSGESLVRQMLYGQKFLREEFGKPSSFLWLPDVFGYSWALPQILCKSGIKTFMTTKISWNQYNRMPHDTFQWRGIDGTEILTHFITAPEKNSRISTYNGKMTARELVGLWDKYQDKEINQELLLAYGYGDGGGGVNREMLEMRRRYDKMPGIPEVKPKSATDYFNNLHETIQSTDQYVHTWNGELYFEYHRGTYTSQAFTKKMNRKIELGLRNSEWLSVLANLKEGTTYPTEKLANIWQILLRNQFHDIIPGSSIKEVYDDALIEYTEALTENNTIISKQLEKLTQQASEKITLWNSSTWNRPRYIEIKADNPASNLVFYDQKNKRLPAQKLANGAWLIQHHNLPALGATSISVKETTSELTKSPFTYKDKQLETPYYQITWNENGQFTSIFDKKNNRQVLAENARGNVFQLFEDKPMWHDAWDIDLFYQEKQKEITTLDSFEVINNGPLELTIKQVLHSEKSQITQWIHFYHESPEIRFETEVDWRDRNQLLKVAFPVSVHASEASYDIQFGNVKRPTHWNTSWDYARFETVGHQWTDLSEKNYGVSLLNDSKYGYDIKDSTIRLTLLKAAGYPDPEADLGLHQFTYSLFPHQGDFLDGKTVQTAWELNNPIFTSNGEIEPFSLFQVTNPYVMIDSVKQAENGNGLIIRLHEFAGTHGEVTLTSDYAITSITECNLLEENETTLETATFAITPFEIKTYRIYLK

SEQ ID NO: 19432 - protein, 321 aa, Malus x domestica
ILPFKLPAIGLNDVQIRIKAVGICGSDVHYLKNMKLADFEVKEPMVIGHECAGIVEKVGSDVKHLVSGDRVAVEPGISCSRCQQCKGGRYNLCPDMKFFATPPVHGSLANQIVHPADLCFKLPENVSLEEGAMCEPLSVGVHACRRANVGPETTVLIVGAGPIGLVSVLAARAFGAPRIVIVDMDDKRLAVAKSLGADGTVKVSAKMEDLDDEVAKIKETMGAEVDVTFDCVGFNKTMSTGLNATRPGGKVCLVGMGHSMMTVPLTPAAAREVDVVGVFRYKNTWPLCLEFLRSGKIDVKPLITHRFGFTEKEVEEASLEF

SEQ ID NO: 19433 - protein, 480 aa, Arabidopsis thaliana
  misc_feature (255)..(255): Xaa can be any naturally occurring amino acid
  unsure (1)..(480): unsure at all Xaa locations
MVSETTKSSPLHFVLFPFMAQGHMIPMVDIARLLAQRGVIITIVTTPHNAARFKNVLNRAIESGLPINLVQVKFPYLEAGLQEGQENIDSLDTMERMIPFFKAVNFLEEPVQKLIEEMNPRPSCLISDFCLPYTSKIAKKFNIPKILFHGMGCFCLLCMHVLRKNREILDNLKSDKELFTVPDFPDRVEFTRTQVPVETYVPAGDWKDIFDGMVEANETSYGVIVNSFQELEPAYAKDYKEVRSGKAWTIGPVSXDIDQDECLKWLDSKKHGSVLYVCLGSICNLPLSQLKELGLGLEESQRPFIWVIRGWEKYKELVEWFSESGFEDRIQDRGLLIKGWSPQMLILSHPSVGGFLTHCGWNSTLEGITAGLPLLTWPLFADQFCNEKLVVEVLKAGVRSGVEQPMKWGEEEKIGVLVDKEGVKKAVEELMGESDDAKERRRRAKELGDSAHKAVEEGGSSHSNISFLLQDIMELAEPNN

SEQ ID NO: 19434 - protein, 226 aa, Arabidopsis thaliana
MTSGGGYGDPSQKIDYVFKVVLIGDSAVGKSQILARYARDEFSLDSKATIGVEFQTRTLVIDHKSVKAQIWDTAGQERYRAVTSAYYRGAVGAMLVYDITRRQTFDHIPRWLEELRAHADKNIVIILIGNKSDLVDQRAIPTEDAKEFAEKEGLFFLETSAFNATNVESAFSTVLTEIFNIVNKKSLAASEDQENGNPGSLAGKKIDIVPGPGQVIPNKSNMCCNS

SEQ ID NO: 19435 - protein, 142 aa, Zea mays
  misc_feature (134)..(134): Xaa can be any naturally occurring amino acid
  unsure (1)..(142): unsure at all Xaa locations
RERESASDLGQSVSVLGVSFSYPRPRRWVCAWPPPRQLRPACACSAGAGISICCLPIDGSRASDFGLMKIDDTGRVISFSEKPKGDELKAMQVDTTVLGLSKEEAENKPYIASMGIYIFKKDILLNLLRWRFPXANDFGEFH

SEQ ID NO: 19436 - protein, 505 aa, Limnanthes douglasii
MSETKPEKPLIATVKNTLPDLKLSINLKHVKLGYHYLITHGMYLCLPPLALVLFAQISTLSLKDFNDIWEQLQFNLISVVVSSTLLVSLLILYFMTRPRPVYLMDFACYKPDETRKSTREHFMKCGESLGSFTEDNIDFQRKLVARSGLGDATYLPEAIGTIPAHPSMKAARREAELVMFGAIDQLLEKTKVNPKDIGILVVNCSLFSPTPSLSSMIVNHYKLRGNIISYNLGGMGCSAGLISVDLAKRLLETNPNTYALVMSTENITLNWYMGNDRSKLVSNCLFRMGGAAVLLSNKTSDKKRSKYQLVTTVRSHKGADDNCYGCIFQEEDSNGKIGVSLSKNLMAVAGDALKTNITTLGPLVLPMSEQLLFFATLVARKVFKKKIKPYIPDFKLAFDHFCIHAGGRAVLDELEKNLQLSSWHLEPSRMTLYRFGNTSSSSLWYELAYSEAKGRIRKGERVWQIGFGSGFKCNSAVWKALKSVDPKKEKNPWMDEIHQFPVAVV

SEQ ID NO: 19437 - protein, 416 aa, Candidatus Rickettsia principis
DSEFAELKIRGKIFKLPILKASIGEDVIDISRVSVEADCFTYDPGFMSTASCQSTITYIGGDKGILRHRGYDIKDLAEKSDFLEVAYLLIYGELPSSEQYNNFTKQVAHHSLVHERLHYLFQTFCNSSHPMAMMLAAVGSLSAFYPDLLNFKDADYELTAIRMIAKIPTIATMSYKYSIGQPFIYPDNSLDFTENFLHMMFAMPCTKFKVNPIIKNALNKIFILHADHEQNASTSTVRIAGSSGANPFACISTGIASLWGPAHGGANEAVINMLKEIGSSEYIPKYIAKAKDKNDPFRLMGFGHRVYKNYDPRAAVLKETCKEVLKELGQLDNNPLLQIAIELEAIALKDEYFIERKLYPNVDFYSGIIYNAMGIPTQMFTVLFAIARTVGWMAQWKEMHEDPEQKISRPRQLYTG

SEQ ID NO: 19438 - protein, 416 aa, Candidatus Rickettsia principis
DSEFAELKIRGKIFKLPILKASIGEDVIDISRVSVEADCFTYDPGFMSTASCQSTITYIGGDKGILRHRGYDIKDLAEKSDFLEVAYLLIYGELPSSEQYNNFTKQVAHHSLVHERLHYLFQTFCNSSHPMAMMLAAVGSLSAFYPDLLNFKDADYELTAIRMIAKIPTIATMSYKYSIGQPFIYPDNSLDFTENFLHMMFAMPCTKYKVNPIIKNALNKIFILHADHEQNASTSTVRIAGSSGANPFACISTGIASLWGPAHGGANEAVINMLKEIGSSEYIPKYIAKAKDKNDPFRLMGFGHRVYKNYDPRAAVLKETCKEVLKELGQLDNNPLLQIAIELEAIALKDEYFIERKLYPNVDFYSGIIYNAMGIPTQMFTVLFAIARTVGWMAQWKEMHEDPEQKISRPRQLYTG

SEQ ID NO: 19439 - protein, 347 aa, Zea mays
MELDSIECVSYSDGMEDDDDTAAVTSSQLPRPFLKSSSTAGAAAAAAAAVNVVVVSDRAGAAGTVAGAGPLVISPATGVHELLECPVCTNSMYPPIHQCQNGHTLCSTCKTRVHNRCPTCRQELGDIRCLALEKVAESLELPCRYYSLGCPEVFPYYSKLSHESQCSFRPYNCPYAGSECSVVGDIPFLVAHLRDDHKVDMHSGCTFNHRYVKSNPREVENATWMLTVFHCFGQYFCLHFEAFQLGLAPVYMAFLRFMGDENDSRNYSYSLEVGANGRKMIWEGTPRSIRDSHRKVRDSHDGLIIQRNMALFFSGGDRKELKLRVTGRIWKEQQNPDSGACIPNLFS

SEQ ID NO: 19440 - protein, 591 aa, Populus trichocarpa
MESTLKEMRDGASVLDMDPKSTVGGGVEDVYGEDRATEDQLVTPWTISVASGYTLLRDPHHNKGLAFTEKERDAHYLRGLLPPTTISQQLQEKKLMNTIRQYQLPLQKYTAMMELEERNERLFYKLLIDNVEELLPVVYTPTVGEACQKYGSIFKRPQGLYISLKEKGKVLDVLKNWPQKSIQVIVVTDGERILGLGDLGCQGIGIPVGKLSLYTALGGVRPSACLPVTIDVGTNNEQLLKDEFYIGLRQRRATGQEYSELLHEFMTAVKQNYGEKVLIQFEDFANHNAFDLLAKYGTTHLVFNDDIQGTAAVVLAGLISALKLLGGSLADHTFLFLGAGEAGTGIAELIALEMSRRSKTPLEETRKKIWLTDSKGLIVSSRKESLQHFKKPWAHEHEPVKGLLEVVKAIKPIVLIGTSGVGKTFTKEVIEAMASFNEKPLILALSNPTSQSECTAQEAYTWTKGKAIFASGSPFDPVEYEGKVFVPGQSNNAYIFPGLGLGLVISGAIRVHDDMLLAAAEALAGQIKEEYLAKGLIYPPLSNIRKISVQIAANVAAKAYELGLATRLPRPENLVKHAESCMYSPAYRYYR

SEQ ID NO: 19441 - protein, 578 aa, Trichodesmium erythraeum IMS101
MNLKKTIVIIIISNLLNINTTNIRNFIVAITITNSLITQKIALGSTASEINKIAAEITVRIDGRNRSGSGVIVEKQGDTYYVLTNWHVVNTVGDYQVRTPDGKMHPVYYTLIKQLPNIDLAIIPFSSSQNYPIAETGDSTKLVSGTKVFVGGWPRSGSNLKQRIFLSTPGVVKGRQQPVAGYSLLYDNLVRAGMSGGPVLNEEGRLVAINGIVKLQENSDVIVSGGIEINTFWDWRQGVSLPIVSQIPENIQAPASPTETTNPVATNTATREDDTETVLDFTLAKAITDEISGIVNSIVVLNAYIVMGSSNGMISVWDIENREIIAIWKAHPESVNSVAVTPDEQFVISGSDDKTIKIWKLPKNKNINDISLVQTLTGHTDVVDGVAIAPNSKIFASGSWDGTIKIWNLASGELLQTIAGHSEIVNGIAISPDGQFLASGSKDNQIKLWNLQTGQLVRTINTNSVSILSVVFSPDSQILASSSSNGTINIWNLQTGKLIHNLKEHLDGVWSIVITPDGKTLISGSWDKTIKFWELSTGKLKGSLRGHNSYISVVAISPNGQIIVSGGWDRKINIWKAP

SEQ ID NO: 19442 - protein, 459 aa, Neisseria gonorrhoeae
MSQYDVVVIGAGPGGYVAAIRAAQLGFKTACVDAGVNKAGNAPALGGTCLNVGCIPSKALLQSSEHFHAAQHDFAEHGITVGDVKFDVAKMIERKDAIVTKLTGGVKFLFQKNKVTSLFGTASFAGKNGDAYQIEVDNKGEKTVIEAKHVIVATGSVPRPLPQVAIDNVNVLDNEGALNLTEVPAKLGVIGSGVIGLEMGSVWNRVGAEVTILEAAPTFLRAADQQIAKEAFKYFTKEQGLSIELGVKIGDIKSEGKGVSVAYETAAGEAKTEVFDKLIVAIGRIPNTKGLNAEAVGLEKDERGFIKVDGECRTNLPNVWAIGDVVRGPMLAHKASDEGVAVAERIAGQKPHIDFNNVPFVIYTDPEIAWVGKTEEQLKAEGVEYKKGTSGFGANGRALAMGKAKGTVKVLADAKTDRILGVHMIGPVVSELVTEGVTALELTKTGTALPRPGPKGTIP

SEQ ID NO: 19443 - protein, 337 aa, Trichodesmium erythraeum IMS101
MKIAIVGFGFSAEKSHLPAYKNRSDIHLTAVVDPVTARRAAALRQYPNIRVYEKFDDLLEENSDEIDIVDICLPNAFHLQSAKQALEADKHVLCEKPLVLKKDEYSELVNIANNRKRILYPCHNYKFAPSIVHAAYLINSGKIGKPLFASFNIFGADLQSEVSQYKPGLEENQELSGDGIMIDHGLDAISVAQTLFGGSPQRISAHIKNLNQTHNKLEDLAVFCLDWEEKLINISVSSLGSTPKAYYRIQGTEGEISIENNDIFLSVKNQPVQQIFVPTHFDNPGHANWFNGLIDNLLDCIKTEDTKPFPLIEAGLVLDIIEKANYSSHNEGIWITI

SEQ ID NO: 19444 - protein, 436 aa, GIBBERELLA ZEAE PH-1
MSSDLSHQIQSKLDAAIDRYVARNPRSKALHEEALKSMPGGNTRTVLHTSPFPVAIKSGQGYQVTSEDGHVYTDLAGEFTAALYGHSNPVITSAIRHVLDNVGMNVGGHTAQEQLFARELCSRFNLEHVRFCNSGTEANIHALAAARAFTKKRRVVTFSGGYHGAVIGFKGGKPEANNVDTDDWVVARYNDLGSARAAIKSDGVAAILIEGMQGSGGGLPAMPEFLQGVQDIAAKAGVLFIIDEVMTSRLSGGGISELRGLKPDLKTFGKYLGGGLAFGAFGGRADIMAAFDPRSPNALSHSGTFNNNTLVTHAGHAGLTKIYTPEVANQFTKSGHELRERLNAVTEGTRVLFTGLGTIMGVHFTTHGDRVIERSGEVEEIDALRDLFWFEMLEEGFWVVRRGFIALVLGTPTAEFDRFVNCVEAWVSKHADLVKI

SEQ ID NO: 19445 - protein, 376 aa, ASPERGILLUS NIDULANS FGSC A4
MAKTALITGANGITGSAILEYLVKNTTASEWERIIITSRSPLKTAVNDSRVEFIALDFSNPPEKLADQMRSQCADVTHAYFSSYVHKDDFAELNEANRSLFENFLNALVDVAKGLQNCTLQTGGKYYNVHVRPVPWPAHEGHPRLVRAEENFYYHQEDFLAEKQRGSNWTWNVIRPEAIIGYTTKPNGMNEALTIALYFLINKELGVEAPMPTNAAYFNGVDDVSDARLIADLTIYASTHKNCANEAFNVTNGDVFSWRYMWPRLADWFGAKASSNQSFNRTSFKEGETHLDLNLEQWAQDKREVWNRLCDKAGSPLSKASFDAGTWTFQDWVFQRTWSSPLSINKARKFGWTGHLDSFDSFVDAFKRFKELGQIP

SEQ ID NO: 19446 - protein, 255 aa, Klebsiella oxytoca
MNVTICTIGELLVEFLAKEESQGFSRPGEFWGPYPSGAPAIFADQVAKLGLGSVLFSCVGNDAFGEMNIARLESDGVNVNGIAMLQKATTGSAFVSYRSQAQRDFIFNMPNSACGLLTADHIDDRLLNQCNHFHIMGSSLFSFRMIDAMRKAIENIKARDGTVSFDPNIRKEMLNIPEMSQAFEYILDYTDIFLPSDGELDYFGLNPGRDEQVLVDKLKRGVKHVVIKRGPRGASYFSARETHHVTGFHVPVVDP

SEQ ID NO: 19447 - protein, 340 aa, Glycine max
MAQLPPKIPNMTPNWPDFSSPHQKMPSLKTMSPNQNPSWVDEFLEFSAARRGAHRRSVSDSITFLEAPLLDHHHCKGGSVGGGGGSGDNEFERFDDEQFMSMFSDEASGNNNNNNNNNNNNNNTMMENALSSSNPSTPSDHNSINDEKEMNNKEEEGKKQVKNESEEDEDESQCKQEITQLPNNDDSKNNSNANATCSSEKITDPKRVKRILANRQSAQRSRVRKLQYISELERSVTSLQAEVSVLSPRVAFLDHQRLLLNVDNSALKQRIAALAQDKIFKDAHQEALKREIERLRQVYHQQNIKKMDNAAGSPPSQSPPSPSPKPRCETHTEKEQLINV

SEQ ID NO: 19448 - protein, 402 aa, Cytophaga hutchinsonii
MSSRVLISGIGSVSSIGLNVTELTDSILESKTGVSRKTRLDSILARALPTAQIQLSDAALKSRVPGLPAKQVYSRTALLGMIAASEAVAMAGLTKEDCIRAGLVNSTSAGGMDKGEFFYADFIQSPSKGNLKLALTHDCGDAAEQMAALLGIEQYITTISTACSSAANAMIHAARLIKAGVCDIVVAGGSDAICKFTINGFNSLMILSEEPCKPFDKNRTGLNLGEAAGYFVLESEASVTRRGVKPLAVLSGYGNACDAYHQTASSPNGEGAYLAMMQAINVSGYAPSVIDYINAHGTGTQNNDMSESVALQRIFPADLPPVSSTKAMTGHTLAAAGGIEAVMSVLAIQNGWMFPNKNFKDPIEETGIIPVTELQTNKTIKHILSNSFGFGGNNSSLLISAC

SEQ ID NO: 19449 - protein, 863 aa, Zea mays
MSFGGMFDGAGSGVFSYDATGGGTGMHNPGRLVPAPPLPKPGGFGATGLSLGLQTNMEGAQLGDLGRMGLIGGGGSGSGGDGDSLGRGREDEIDSRSGSDNVDGASGDEIDPDNSNPRRKKKRYHRHTPQQIQELEAVFKECPHPDEKQRMELSKRLNLESRQVKFWFQNRRTQMKTQIERHENALLRQENDKLRAENMTIREAMRNPICANCGGAAVLGEVSLEEQHLRIENARLKDELDRVCALAGKFLGRPISSGSSMSSSLQGCSGLELGVGSNNGYGLGPLGASALQPLPDLLGAGLPGPVGSAAMRLPMGIGALDVALHGAAADGIDRTVLLELALAAMEELMKVAQMDEPLWLRSPDGSGLEALNLDEYHRAFARVFGPSPAGYVTEATREAGVAITSSVDLVDSLMDAARWSEMFPCIVARASTTDIISSGMGGTRSGSIQLMHAELQVLSPLVPIREVVFLRFCKQHAKGLWAVVDVSVDAILRPDGGHHHAQNGGGAGYMGCRLLPTGCIVQDMNNGYSKVTWVVHAEYDEAVVHQLYRPLLQSGQALGARRWLASLQRQCQYLAILCSNSLPARDHAAITPVGRRSMLKLAQRMTDNFCAGVCASAAQKWRRLDEWRSGEGGDAAGNGGSAAAGEGEEKVRMMARHSVGAPGDPPGVVLSATTSVRLPATSPQRVFDYLRDEQRRGEWDILANGEAMQEMDHIAKGQHHGNAVSLLRPNATSGNQNNMLILQETCTDPSGSLVVYAPVDVQSMHVVMNGGDSAYVSLLPSGFAILPDGHCQSPNPAHQGSPSCGGSGSSSSTGSLVTVAFQILVNNLPTAKLTVESVETVSNLLSCTIQKIKSALQASIVTP

SEQ ID NO: 19450 - protein, 327 aa, Propionibacterium acnes KPA171202
MTQTPVKIAVTGAAGQICYSLLFRIASGSLLGDTPIELRLLEITPALKALEGVVMELDDCAFGNLVNIEIGDDPKKVFDGVNAAFLVGAMPRKAGMERSDLLTKNGAIFTAQGKALNDVAADDVRVLVTGNPANTNALIAATNAVDIPNNHFAALTRLDHNRAKTQLARKTGKTVNDVRHMTIWGNHSSTQYPDVFHAEVAGQKATNLVNEAWIENEFIPTVAKRGAAIIDARGASSAASAANATVECMRDWMGSTPEGDWVSMAIPSDGSYGVPEGLISSFPVTITNGKVEIVQGLDIDDFSRAKIDASAKELADERDAVKELGLI

SEQ ID NO: 19451 - protein, 159 aa, Exiguobacterium sp. 255-15
MLQEQTFQRIDGTEATLKDYPGQAWLIVNTASKCGLTPQFEGLEQLHQDYRKQGLVVLGFPCNQFAGQDPGTDEEIQSFCQMNYGVTFPVFSKIEVNGKGTHPLFAELKALAPNTTGEQDVEWNFTKFLVTRDGEVTRFAPKTNPTDLVAAIERIVVPV

SEQ ID NO: 19452 - protein, 289 aa, Mycoplasma penetrans HF-2
MKTSNVKLITLNNGNKIPSIGFGVFQIPKEETADCVKKAISIGYRLIDTAQAYHNEKETGLGIKLSGVKREEIFLTTKVWVSNYERCYESVIESLKRLDTSYLDLILLHQPFGNYYKAYQDLERLYKENKVRNIGVSNFWDNRIIDLCFFNQIKPMVNQIEINPFHQRIEDRFYNDKYKVVSQAWAPFAEGKNGLFTNPTLVEIGKKYNKTPAQVILRWLVQSNVVALCKTVNESRMKENFDIFDFELSKQDLDKIVALNKQHSEFRYHHSAEGAEFYGEISNQIKIGD

SEQ ID NO: 19453 - protein, 417 aa, Oryza sativa
MAPKAEKKPAEKKPAAGEEKSAEKAPAGKKPKAEKRLPASKASSKEGGAGDKKGRKKAKKSVETYKIYIFKVLKQVHPDIGISSKAMSIMNSFINDIFEKLAQEAARLARYNKKPTITSREIQTSVRLVLPGELAKHAVSEGTKAGYHFTQQRKNLKMSSHHLALLRKVIGDGGDAVIGDGGGGLQRLPRRRPWSRGGGRAAPESTPPAKYARGRRPRRGSGGHAPHPESGGGGGGGGGAREWRDVGTTMRGGGGRGRGKSAQAADRCCRRMPMDGGPPTPTLAEVLSLSPPTTPRSRAPSSSRRRRMAAQTLATTAAGGQTAAEVARPPDSTPPAESGEEGGVGVHTGEEGKAAAAGEGSDPFFPIIAAPSLPSPTQPPLLLPRHRGALLVTEEIGRRRRCRWEAATARDGDGADR

SEQ ID NO: 19454 - protein, 447 aa, Desulfitobacterium hafniense DCB-2
MNRTYISEVIDQLGVSKYTYTMYILVGIALLFDGFDYMIVAYTMPQMAAEWGLSKVQTGSLTSWSLIGLIIGGLTAGIISDRIGRKKTLSIFVAMYSLLTLPIYFVHSFEVFAMLRILSGIGLGACIPIAVTMMTESAPTHKRGFFTSSIMAFYISGWVVAGIVAITIVPVFGWRVCYLLGGIPALYSLVLWFKMKESPYWLLSKGREKEAIDVVKTIEIAARGKAGEWPLGRLITPPAPPKVGVSMIFSKNYRKATLANWTIYFMGSVLIYGISGWLPTLLVESGFGVVKGYSFAVLQNIFAIIGAMSIGFFADIIGRRLNVSLSWFFTAVFAILLGFATTQWQVILFIIIVGFLMNGALSSTQPLLTESYPTEFRSTGVAWAQAFGRLGGFSGPIAAGFIQQMGAGFTGLFIFFAIPSFIAAAVAFFFVVETKDKAIEKIVSANV

SEQ ID NO: 19455 - protein, 1332 aa, Arabidopsis thaliana
MEVEGEVREKEARVKGRQPETEVLHGLPQEQSIFNNMQHNHQPDSDRRRLSLENLPGLYNMSCTQLLALANATVATGSSIGASSSSLSSQHPTDSWINSWKMDSNPWTLSKMQKQQYDVSTPQKFLCDLNLTPEELVSTSTQRTEPESPQITLKTPGKSLSETDHEPHDRIKKSVLGTGSPAAVKKRKIARNDEKSQLETPTLKRKKIRPKVVREGKTKKASSKAGIKKSSIAATATKTSEESNYVRPKRLTRRSIRFDFDLQEEDEEFCGIDFTSAGHVEGSSGEENLTDTTLGMFGHVPKGRRGQRRSNGFKKTDNDCLSSMLSLVNTGPGSFMESEEDRPSDSQISLGRQRSIMATRPRNFRSLKKLLQRIIPSKRDRKGCKLPRGLPKLTVASKLQLKVFRKKRSQRNRVASQFNARILDLQWRRQNPTGTSLADIWERSLTIDAITKLFEELDINKEGLCLPHNRETALILYKKSYEEQKAIVKYSKKQKPKVQLDPETSRVWKLLMSSIDCDGVDGSDEEKRKWWEEERNMFHGRANSFIARMRVVQGNRTFSPWKGSVVDSVVGVFLTQNVADHSSSSAYMDLAAEFPVEWNFNKGSCHEEWGSSVTQETILNLDPRTGVSTPRIRNPTRVIIEEIDDDENDIDAVCSQESSKTSDSSITSADQSKTMLLDPFNTVLMNEQVDSQMVKGKGHIPYTDDLNDLSQGISMVSSASTHCELNLNEVPPEVELCSHQQDPESTIQTQDQQESTRTEDVKKNRKKPTTSKPKKKSKESAKSTQKKSVDWDSLRKEAESGGRKRERTERTMDTVDWDALRCTDVHKIANIIIKRGMNNMLAERIKAFLNRLVKKHGSIDLEWLRDVPPDKAKEYLLSINGLGLKSVECVRLLSLHQIAFPVDTNVGRIAVRLGWVPLQPLPDELQMHLLELYPVLESVQKYLWPRLCKLDQKTLYELHYHMITFGKVFCTKVKPNCNACPMKAECRHYSSARASARLALPEPEESDRTSVMIHERRSKRKPVVVNFRPSLFLYQEKEQEAQRSQNCEPIIEEPASPEPEYIEHDIEDYPRDKNNVGTSEDPWENKDVIPTIILNKEAGTSHDLVVNKEAGTSHDLVVLSTYAAAIPRRKLKIKEKLRTEHHVFELPDHHSILEGFERREAEDIVPYLLAIWTPGETVNSIQPPKQRCALFESNNTLCNENKCFQCNKTREEESQTVRGTILIPCRTAMRGGFPLNGTYFQTNEVFADHDSSINPIDVPTELIWDLKRRVAYLGSSVSSICKGLSVEAIKYNFQEGYVCVRGFDRENRKPKSLVKRLHCSHVAIRTKEKTEE

SEQ ID NO: 19456 - protein, 609 aa, GIBBERELLA ZEAE PH-1
MDPNNSNNRLYLNFGNGNDRLTASDRTAYPTTPSTFPQPVFPSASSGQQSGGLQPQQQQQQQFAGGYAPQGYFNQNQYAQYGGQQPQQNDYQQGAGYQQRSNTPGTNDPNTGLAHQFSHQNLGGAARGQAYARGPSPGQRPRTAGSSGQQPDMAPTPTATRRNALSLLPTSSRIVSREHASATKEQSELEQKLQDPTQGAARREQLWSTAGRKEGQYLRFLRTKDKPENYNTVKIIGKGAFGEVKLVQKKGDGKVYAMKSLIKTEMFKKDQLAHVRSERDILAESDSPWVVKLYTTFQDSYFLYMLMEFLPGGDLMTMLIKYEIFSEDITRFYIAEIVLAIEAVHKLGFIHRDIKPDNILLDRGGHVKLTDFGLSTGFHRLHDNNYYQQLLQGRSNKPRDRNSVAIDQINLTVSNRSQINDWRRSRRLMAYSTVGTPDYIAPEIFTGHGYTFDCDWWSLGTIMFECLVGWPPFCAEDSHDTYRKIVNWRQTLYFPDDITLGTDAEHLIRSMVCNTENRLGRSGAHEIKSHAFFRGVEFDSLRRIRAPFEPRLTSNIDTTYFPTDEIDQTDNATVLKAQAIQSGRQVEESPEMSLPFIGYTFKRFDNNFR

SEQ ID NO: 19457 - protein, 363 aa, Nicotiana tabacum
MERLFLLSLLAFVLFSSAIAFSDEDPLIRQVVSETDDSHLLNAEHHFSLFKSKFGKIYASEEEHDHRFKVFKANLRRARRHQLLDPSAEHGITKFSDLTPSEFRRTYLGLHKPKPKLNAEKAPILPTSDLPADFDWRDHGAVTGVKNQGSCGSCWSFSTTGAVEGAHFLATGELVSLSEQQLVDCDHECDPEQQDACDAGCGGGLMTTAFEYTLKAGGLQLEKDYPYTGKDGKCHFDKSKIAAAVTNFSVIGLDEDQIAANLVKHGPLAVGINAAWMQTYVGGVSCPLICFKRQDHGVLLVGYGSHGFAPIRLKEKAYWIIKNSWGENWGEHGYYKICRGHNICGVDAMVSTVTAAHTTNPNL

SEQ ID NO: 19458 - protein, 497 aa, Chlamydophila pecorum
LAEAVKVTLGPKGRHVVIDKSFGSPQVTKDGVSVAKEIELEDKHENMGAQMVKEVASKTADKAGDGTTTATVLAEAIYSEGLKNVTAGANPMDLKRGIDKAVKLVVDELKNISKPVQHHREIAQVATISANNDSEIGNLIAEAMEKVGKNGSITVEEAKGFETVLDVVEGMNFNRGYLSSYFSTNPETQECVLEDAHILIYDKKISGIKDFLPVLQQVAESGRPLLIIAEDIEGEALATLVVNRIRAGFRVCAVKAPGFGDRRKAVLEDIAILTGGQLVSEELGMKLENTTLAMLGKARKVIVTKEDTTIVEGLGNKADLEARCENIKKQIEDSTSDYDKEKLQERLAKLSGGVAVIRVGAATEIEMKEKKDRVDDAQHATLAAVEEGILPGGGTALIRCIPALESFLSTLTNEDEKIGARIILKSLSAPLKQIAVNAGKEGAIIYQQVLERSANEGYDALKDTYTDMIEAGILDPTKVTRSALESAALLPGLLLTT

SEQ ID NO: 19459 - protein, 227 aa, Triticum aestivum
  misc_feature (150)..(150): Xaa can be any naturally occurring amino acid
  unsure (1)..(227): unsure at all Xaa locations
MRAMLARSPALPVPYLTATETAAASSAFFQPCHLSTSPSVTFSKKKHGTRLTVQPNTQHGKAKGASGIQGKWRTLSSDPAQAAAVVDAGDSKTWEECKQILTSLNFSAEDAEKMLKKAFGWLHSPYWTEERKKEVPSAEVVSGVLDYVRXLGLSDDDLYKLLKKFPEVLGCDLESEVKLNVGKLDSDWGINGKTLRSVLLRNPKVLGYNVDCRGDCAAQCTRCWVRF

SEQ ID NO: 19460 - protein, 426 aa, uncultured marine proteobacterium ANT8C10
MNKLMLFFVLIFSTHGFSDLKQDLDEQLDPLMERVISWRHDIHQNPELSNREYRTAKKIAVHLKSLGIKVETKIAYTGVVGLIEGGLPGPTIALRADMDALPVIEKTGLPFASKDKTKYLGQTVGIMHACGHDAHVAILMGVAEFLSKNKDQIKGNVVLIFQPAEEGPPEGENGGAKMMLEEGLFEKYDPEVIFGLHVGNGPHGYVSVVSGPAMAAASTYRIKVKGVQAHGSRPWDSIDPVMASVELIQGLNTIVSRRINIINNPAVVSVGIIRSGTRGNIIPEDAEIQGTIRTFDPELRAEIYDEIRQIASGVALGTGAQIDVEFDVGGFYPVTYNNPDLVAKLIPTLKEATDNKFFLSKTPSTGAEDFSFFSDRIPGMYFWLGVNAPGVETAPGNHSPYFVVDDGALDEGLKSLIYLVLEYPEK

SEQ ID NO: 19461 - protein, 446 aa, Picrophilus torridus DSM 9790
MKEYDVVTIGAGGAAYPAAFKLKRSGYNVIMIDKKGVMSGNCLSEGCVPSKAIIESVHKYNTLKGIFDFKVDYKKIVDHKDSVQRLRYSDHDRELGEADLKIIKGTGRLVDENTVEVDTGTGIERYHADNIIIATGADTFIPNIKGSELAVTSRDFYSMDPKIKSVPESITIIGGGYIGVETGSFLSILGSRVTIIEMLDRILESMETDIIDKLIPLLPRMDVKTSSEVKSIEKFNDKLKVLLNDGEVVSDMVMMAAGRHPVLPEGLDDLGIKYTKHGINVNMSMQTNIKNIYATGDVNGITPLFHAAKRQSIIAANNIMSGNVPVDYFDPISVPFTLYTIPQLAYVGILPAQAERLGIEHYEATYDMKKDSLAEINNEVYGEITLVFDKRMKIIGGYVIGNDAGNIINEIALCVSRGLSLRDLAEMSHQHPMSFEGLDSAARKFY

SEQ ID NO: 19462 - protein, 228 aa, Zea mays
MAGADVDVGTELRLGLPGGGAAAAKKDTIDLKLKLPTAGMEEAAAAARPEPAAEKAKRPAEAPAADAEKPPAPKAQAVGWPPVRSYRRNAMTVVQAVRSKKEEEPEKQQQPAAANAFVKVSMDGAPYLRKVDLKTYGSYKDLSAALKKMFGTFVTATGNSMNEGRLVDPAGDADDVVTTYEDKDGDWMLVGDVPWEMFVDSCKRLRIMKSSEAIGLAPRTKDKCKNKS

SEQ ID NO: 19463 - protein, 373 aa, Picrophilus torridus DSM 9790
MSISLGLEDVFIKYTSLTSIDGEKGELRYRGYDIKDLVEHCSFEEVAYLMFYGELPKRDELEHFKSNVMKNYKIPENVKNIIKNMPRDGDALAIMEAAFAALSTEEYTWEKERDREKAAEIMGRALGIVSAVFRYRDGREIKDPENKGYAEAFLNACFDSGIDEDKIKAMNAALILYIDHEVPASTTAALVASSTLSDMYSCVTAAIAALKGPLHGGAAEAAYKQFLAIKSPENVDSWFNENILNNKKRLMGFGHRVYKTYDPRMLIFKELARKNAKTDEQKKILELAERLEALGVKNFGQKKIFPNTDYYSGIVFNEIGFPLYMFTTLFALSRVVGWVAHISEYVESEERLIRPRAIYIGPEKRDVVPIDKR

SEQ ID NO: 19464 - protein, 346 aa, Klebsiella oxytoca
MQSVVIHAEGTVRVEERPIPTLQTENDVLVKVVSSGLCGSDIPRTFAKGAHYYPITLGHEFSGYVESYGSAVTDLQPGDGVACVPLLPCLICPDWLKGFYSQWAKYEFVGSRGDGAFTEYIVVNRKNVFVCADRMPIDDGALIEPMTVGLHAFHLAQAAKENVIIIGAGTMGLLALQCARELGAKSITAIDINPQRLALAKTLGATYVFNSKEMSSKEIQTALEEIQFDQLVLETAGTPQTVALGIEVAGPRAQLALVGTLHHDLTLLSATFGQILRKELTIVGSWMNYSGPWPGEEWQTAVRLLTEKRIQLVPLIAHIGNAESFAREVQALNGAPMQGKILLKLS

SEQ ID NO: 19465 - protein, 487 aa, Nocardia farcinica IFM 10152
MTDREGALLATAPHQLFIGGEWVDATGGATFAVHDPATGEIVREVADATAEDAVRALDAAVAAQESWAATAPRTRGEILRRAWELVQERAEDLALLMTLEMGKPLAEARGEVTYGGEFLRWFSEEAVRIHGRYGLNPEGTGQMIVSQRPVGPCYFITPWNFPFAMATRKIAPALAAGCTVVVKPPQLTPLTTLFFTGLLAEAGLPAGVVNVVTSTSSRRVSAPIIADSRLRKLSFTGSTEVGRQLIAQAADNVLRVSMELGGNAPFVVFEDADLDKAVEGALAAKFRNIGQACTAANRFIVHEQVAEEFAARVTERVAAMKIGRGTEDGVTIGPLIDDDAVAKAHELVTDATARGAVVRTGGERIDGPGSFYRPTVLTGVTEGSAILREEIFGPVLAIATFTTEDEAVRLANNTEYGLVSYVYTRDLARGHRMIDKLETGMMGLNAGVVSNAAAPFGGVKQSGVGREGGFEGIHEFLSTKYTLIPTS

SEQ ID NO: 19466 - protein, 460 aa, Arabidopsis thaliana
MQGHHQNHHQHLSSSSATSSHGNFMNKDGYDIGEIDPSLFLYLDGQGHHDPPSTAPSPLHHHHTTQNLAMRPPTSTLNIFPSQPMHIEPPPSSTHNTDNTRLVPAAQPSGSTRPASDPSMDLTNHSQFHQPPQGSKSIKKEGNRKGLASSDHDIPKSSDPKTLRRLAQNREAARKSRLRKKAYVQQLESCRIKLTQLEQEIQRARSQGVFFGGSLIGGDQQQGGLPIGPGNISSEAAVFDMEYARWLEEQQRLLNELRVATQEHLSENELRMFVDTCLAHYDHLINLKAMVAKTDVFHLISGAWKTPAERCFLWMGGFRPSEIIKVIVNQIEPLTEQQIVGICGLQQSTQEAEEALSQGLEALNQSLSDSIVSDSLPPASAPLPPHLSNFMSHMSLALNKLSALEGFVLQADNLRHQTIHRLNQLLTTRQEARCLLAVAEYFHRLQALSSLWLARPRQDG

SEQ ID NO: 19467 - protein, 357 aa, Thermosynechococcus elongatus BP-1
MTSSSTSFSLHGGNSFLRNIWYYGLPAADLKPGRCQAKVLLGEPILFCRTTSGKPFALRNLCPHRGMPLHYGRFDGKEVECPYHGWRFNAHGHCTLIPSLTSDSDVDLKNFGVLSYPVREVQGNLWIFFPANGRNVSEPTLEVPLVPGFSAETQPQAVQKFIFPGHLDQVFINFMDPSHAPFVHGAWWWRKRGKLFEKAKTFDPSPYGFTMRRHPLLRKSWAHHLLGGHPEVEIIYRLPGIRIETNYSDRHTFCFLITLTPINDQETELTATYYWTFPWLAPLKPLLAPLAREFLNQDLRIVAKQSEGLKYKPPLTLIKEADYQAKWYYQLKREYEKATQEEREFVNPLKTQVLRWR

SEQ ID NO: 19468 - protein, 446 aa, Desulfitobacterium hafniense DCB-2
MGKISISDVVDQIGVSKYTYKTYFLVGLTLIFCGFSYMIVSYTMPQMSAEWGLTKVQTGSLASWSLLGLMVGGMIAGIISDSIGRKKGLAIFTIWFSLLTFPIYFVNSFEAFAILRILGGVGFGACIPIAITLMAENVPTKNRGFFISSIMSFYVLGWVVAGVVAIYVVPTFGWRVCYLIGVLPVLYAFVLMAALQESPHWLLGKGREKEAIEVLKRIEMVSKGKANDYAPGSLFLPPRPKKVGVGALFSREYSRATMALWIIYFMGSVVIYGINGWLPTLLVDKGYGLVKGYSFAVLQNVFGAIGGLCTGYVADIIGRRTNVIIGWIATAVAILLLGVASNQWMVVICGMLVGLAMNWGLSGTQPLLAEGYPTEFRSTGVASAQAFGRVGGFLGPIVAGYVQQLGVGFTGTFVFFAVPAVIASFVALFFVVETKGKSIERISANA

SEQ ID NO: 19469 - protein, 134 aa, Corynebacterium efficiens YS-314
MPPKARSGARRTGRRVVKKNVAQGHAYIKSTFNNTIVSITDPNGAVISWASSGHVGFKGSRKSTPFAAQMAAENAARKAMDHGMKKVDVFVKGPGSGRETAIRSLQAAGLEVSSISDVTPQPHNGCRPPKRRRV

SEQ ID NO: 19470 - protein, 636 aa, Rhodopseudomonas palustris CGA009
MTIAVPPASLAADAVRPLVRIVIVGHVDHGKSTLVGRLLHETGSLPEGKLEMLKAVSARRGMPFEWSFLLDALQTERDQGITIDTTQIRFRTPSRDVVLIDAPGHAEFLRNMITGASQADGAVLIIDALEGVRDQTRRHGYLLQLLGIKQVAVVVNKMDRVEFSAARFGDISNEITAHLTSLGITPTAVIPISAREGDGVAERTDNIAWYDGPTVVEAIDKLTPAQPLDALPLRLAVQAIYKFDDRRIVAGRIESGHLRAGDDIVIMPAGKIAKIKTVEGWPVTPLAGAFGAGRSVGITLDRELFVERGDVIGHAGNAPRDTRRLRARIFWLHDQPLTAGASVLVRLGTRETRANVVAIEKAVDPGDLASEAATEIKRNHVGEIDLSLSQPVAADPADNNPRTGRLVIEINGRIAGGGLVLSVDSGQRAATADIVPVESALLPGERAARYRHNGAVLWFTGLPGSGKTTIARALERRLFDRGGSPILLDGDTLRAGLNSDLGFSPADRAENIRRLGEIAAHLAANGHIAIVAAVSPGLADRAAARRIAGDRFREIHVATSAEVCEQRDPKGHYAKARSGGLPNFTGIGNDYQPPTASELVLDTAGLSVGEAVAQVETMLAQTDVLIEDPADLAAHI

SEQ ID NO: 19471 - protein, 414 aa, Oryza sativa
MATLPGGPHPTGGGAAADPMQVDQPRSAAAAAAVAPAGEKHGASLMEGSDPVTGHIISTTIGGKNGEPKRTISYMAERVVGTGSFGIVFQAKCLETGETVAIKKVLQDKRYKNRELQIMRSMDHCNVVSLKHCFFSTTSRDELFLNLVMEFVPESLYRVLKHYSNMNQRMPLIYVKLYVYQIFRGLAYIHTVPGVCHRDVKPQNLLVDPLTHQVKICDFGSAKMLVKGEANISYICSRYYRAPELIFGATEYTTSIDIWSAGCVLAELLLGQPLFPGESAVDQLVEIIKVLGTPTREEIRCMNPNYTEFRFPQIKAHPWHKIFHKRMPPEAIDLASRLLQYAPNLRCTALEACAHSFFDELREPHARLPNGRPFPPLFNFKQELANISPELINRLIPEHARRHCGFNFLPAAGP

SEQ ID NO: 19472 - protein, 396 aa, Escherichia coli
MFENITAAPADPILGLADLFRADERPGKINLGIGVYKDETGKTPVLTSVKKAEQYLLENETTKNYLGIDGIPEFGRCTQELLFGKGSALINDKRARTAQTPGGTGALRVAADFLAKNTSVKRVWVSNPSWPTHKSVFNSAGLEVREYAYYDAENHTLDFDALINSLNEAQAGDVVLFHGCCHNPTGIDPTLEQWQTLAQLSVEKGWLPLFDFAYQGFARGLEEDAEGLRAFAAMHKELIVASSYSKNFGLYNERVGACTLVAADSETVDAAFCWMKAAIRANYSNPPAHGASVVATILSNDALRAIWEQELTDMRQRIQRMRQLFVNTLQEKGANRDFSFIIKQNGMFSFSGLTKEQVLRLREEFGVYAVASGRVNVAGMTPDNMAPLCEAIVAVL

SEQ ID NO: 19473 - protein, 475 aa, Solanum tuberosum
TTNSGAPVWNNNSSLTVGARGPVLLEDYHLVEKLANFDRERIAERVVHARGASAKGFFEVTHDIAHLTCADFLRAPGVQTPVIVRFSTVIHERGSPETLRDPRGFAVKFYTREGNFDLVGNNFPVFFIRDGMKFPDMVHALKPNPKSHIQENWRILDFFSHHPESLHMFTFLFDDIGIPQDYRHMDGSGVHTFTLINRAGKSTYVKFHWKPTCGVKSLLEEEAIRVGGANHSHATQDLYDSIAAGNYPEWKLFIQIMDPDHEDKFDFDPLDVTKTWPEDILPLQPVGRLVLNKNIDNFFNENEQLAFCPSIVVPGVYYSDDKMLQTRIFSYSDTQRYRLGPNYLQLPANAPKCAHHNNHYDGSMNFMHRDEEIDYFPSRYDQVRHAEVYPIPSTVCSGKREKCIIQKENNFKQPGERYRTFTPDRQERFIRRWVEALSDPRITYEIRSIWISYWSQADKSLGQKLASRLNVRPSI

SEQ ID NO: 19474 - protein, 511 aa, Burkholderia sp. 383
MSAIPKSDPSGSSANPPKLHRALKARHLTMIAIGGSIGTGLFVASGASISQAGPGGAMVAYMAIGLMVYFLMTSLGEMAAFMPVSGSFATYGAKYVDEGFGFALGWNYWYNWAVTIAVELVAAQLVMHYWFPDVPGVWWSAAFLGVMFLLNALTVRGFGEAEYWFALIKVVTVVAFIGVGLLMIFGILKGAPSNGWGNLTIGDAPFAGGLPALMGVAMIAGFSFQGTELIGVAAGESENPRTTIPRAVRQVFWRILLFYVFAIFVIGVLIPYTDPNLLKTDVTDIGVSPFTLVFRHAGLAFAAGVMNAVILTAVLSAGNSGMYASTRMLYNLATEGRAPKIFAKLSRGGVPRNALYATTAVGALCFFTSLYGDKTVYLWLLNTSGMTGFIAWLGIAVSHYRFRKGYVKQGYSLDQLPYQSKWFPFGPLFAFVLCLVIALGQDYQAFLANRIDWAGVAATYVGIPLFLVVWLGFRFLKKSRLVRYEDMEIAPWIAAGRGAQQQPVANRETAG

SEQ ID NO: 19475 - protein, 497 aa, Chlamydophila abortus
LAEAVKVTLGPKGRHVVIDKSFGSPQVTKDGVTVAKEIELEDKHENMGAQMVKEVASKTADKAGDGTTTATVLAEAIYSEGLRNVTAGANPMDLKRGIDKAVKVVVDQIKKISKPVQHHKEIAQVATISANNDAEIGNLIAEAMEKVGKNGSITVEEAKGFETVLDVVEGMNFNRGYLSSYFTTNPETQECVLEEALVLIYDKKISGIKDFLPVLQQVAESGRPLLIIAEDIEGEALATLVVNRLRAGFRVCAVKAPGFGDRRKAMLEDIAILTGGQLISEELGMKLENTTLSMLGKAKKVIVSKEDTTIVEGLGNKEDIEARCENIKKQIEDSTSDYDKEKLQERLAKLSGGIAVIRVGAATEIEMKEKKDRVDDAQHATLAAVEEGILPGGGTALVRCIPTLEAFIPVLTNEDEQIGARIVLKALSAPLKQIAANAGKEGAIICQQVLARSSNEGYDALRDAYTDMIEAGILDPTKVTRCALESAASVAGLLLTT

SEQ ID NO: 19476 - protein, 648 aa, Solibacter usitatus Ellin6076
MERNGRKGSLVMEPTERWTPQSANDLYDVASWGKGYFSVGENGHLRVHPEKDPARSIDLKQLIDTLVLRGINLPILIRFADILKHRLGEIHNAFQTAIAEHKYQGGYCCVYPIKVNQQRQVVEEVLEFGKPFRFGLEAGSKPELMAVMALADNETPIICNGFKDDEYIEMAMLAQKMGRKIIPVVEKYTELQLILKYSAKVGVRPAIGLRVKLASRGSGRWKSSGGYRSKFGLSATEAMRALQELKDLGMSDCLNLLHFHLGSQITNIRQIKGAVNEAVRVYVDLARAGAGLKFLDVGGGLGIDYDGSQTDFESSVNYTLQEYANDIIYHVQNVCDEVEVAHPTIITESGRAIAAYHSVLVFNVLGVSGMGETDVPAEPPTDAEQPLIDLSETNRGLTAKNLLESYHDAQQALDQALNLFSLGYLSLEQRCIAENLYWAILRRIQRLAGELDYFPEELEGIDAMLSDTYFCNFSLFQSMPDSWAINQLFPIMPIHRLEEQPSRPAVLGDITCDSDGKVDAFIDRRDVKRTLQLHTFDGGDYFLGAFLLGAYQEILGDLHNLFGDTNAVHVRLGPEGETMLDSVIKGDTVREVLNYVQFSSDHLVTQLRRDVEAALREGRLTYEESGALLRFYEEGLHGYTYLEDVHEQ

SEQ ID NO: 19477 - protein, 403 aa, Vibrio vulnificus YJ016
MKRVVITGMGIVSSIGNNVEEVLASLKAGKSGITSSEQFKEKGLRSQVWGDLKITPADHIDRKQMRFMGDAAAYAYLSMEQAIADAGLTEDQVSNDRTGIVAGSGGASSLNQAAAVDTLREKGVKRIGPYMVPRTMSSTVSACLATPFKIRGVNYTMSSACATSAHCIGHAAELIQLGKQDIVFAGGGEELDWTLTMMFDAMGALSTKYNETPEKASRTYDADRDGFVISGGGGMLVIEELEHALARGAKIYGEIVGYGATSDGYDMVAPSGEGAVRCMKMAMQDVEKIDYINTHGTSTPVGDVKELGAIQEVFAGNSPAISATKAMTGHALGAAGVHEAIYSTLMLHHNFIAPSINIENLDAAAEGLDIVTEMREAELNTVMSNSFGFGGTNATLVIKKYQG

SEQ ID NO: 19478 - protein, 467 aa, Zea mays
  misc_feature (154)..(154): Xaa can be any naturally occurring amino acid
  unsure (1)..(467): unsure at all Xaa locations
PPPRPGRHGSGQPTSSWFLGSVPQAALGSPALDTSRRGFCSVRRFSGESSAAAAAAAVVDEEPESGFAAGVLQAVDFPGGKVSFVGEMNFLPESTRERINCYRVLDDDGRTISGSRFQEVSRELALKMYSEMVTLQIMDTIFYEAQRQGRISFXHAVNGEEAINIASAAALSMDDIVLPQYREPGVLLWRGFTLQEFANQCFGNKLDYGKGRQMPIHYGSNRLNYFTVSSPIATQLPHAVGAAYSLKMDKKDACAITYFGDGGTSEGDFHAALNFAAVMEAPVIFFCRNNGWAISTPTTEQFRSDGVVIRGQAYGIRGIRVDGNDALAVYSAIHAAREMAVTEGRPILVEALTYRVGHHSTSDDSTKYRPVDEIEHWRTARDPISRYRKWVQGNDWWSDAEESDLRSRVRKELLQAIQVAERMPKPPVTELFTDVYDKIPSNLHEQEQLLRDTIMRHPADYPTDVPV

SEQ ID NO: 19479 - protein, 492 aa, Triticum aestivum
MDPYKYRPSSSFNAPMWSTNSGAPVWNNDNSLTVGSRGPILLEDYHLVEKIADFDRERIPERVVHARGATAKGFFEVTHDVSHLTCADFLRAPGVQTPVIVRFSTVIHERGSPETLRDPRGFAIKFYTREGNWDLVGNNFPVFFIRDGMKFPDMVHALKPNPKTHIQENWRILDFFSHHPESLHMFTFLFDDIGVPADYRHMDGSGVNTYTLVNRAGKAHYVKFHWKPTCGVKSLLEEEAVTVGGTNHSHATKDLTDSIAAGNYPEWTFYIQTIDPDYEERFDFDPLDVTKTWPEDVVPLQPVGRLVLNRNIDNFFSENEQLAFCPGIIVPGVYYSDDKLLQTRIFSYSDTQRHRLGPNYLLLPANAPKCSHHNNHYDGLMNFMHRDEEVDYFPSRFDPAKHAPRYPIPSRTLNGRREKMVIEKENNFKQPGERYRSMDPARQERFINRWIDALSDPRLTHEIKAIWLSYWSQADKSLGQKLASRLSSKPSM

SEQ ID NO: 19480 - protein, 211 aa, Dimocarpus longan
AWHSAGTFDLHSKTGGPFGTIRHPDELAHEANNGLDIAVRLLEPIKEQFPILSYADFYQLAGVVAVEITGGPEIPFHPGRPDKSDPPPEGRLPAATEGSDHLRDVFGHMGLSDKDIVALSGGHTLGRCHEERSGFEGPWTSNPLIFDNSYFKELLSGEKEGLIQLPSDKALLEDSVFRPLVERYAADEDAFFADYAESHLKLSELGFADAD

SEQ ID NO: 19481 - protein, 328 aa, Brassica napus
  misc_feature (306)..(306): Xaa can be any naturally occurring amino acid
  unsure (1)..(328): unsure at all Xaa locations
MASSSSSCFLRSILFSSPTNFPSRSDSLSPFFPKNLTCSSPSTPSPLLSVSSIGSGSIRRVGDSRRKLSEVRSMATTASQTGKEENKKRVEIFDTEENLAIDLAKYTADLSDKFCKERGAFTVVVSGGSLIKSLRKLVEVDSIDWSRWHFFWVDERVVPKHHEDSNYKLAYDSFLSKVPIPPGNVYAINDSLSAEAAADDYETCLKHLVKTNVLRVSDSTGFPKFDLMLLGMGPDGHVASLFPGHGLCSENKKWVASITDSPKPPSERITFTFPVINSSAHVALVVCGSGKAEPVQMALNKTGSVXAGSVSAEEELVWFLDKPASSKL

SEQ ID NO: 19482 - protein, 497 aa, Chlamydophila pneumoniae
LAEAVKVTLGPKGRHVVIDKSFGSPQVTKDGVTVAKEIELEDKHENMGAQMVKEVASKTADKAGDGTTTATVLAEAIYSEGLRNVTAGANPMDLKRGIDKAVKVVVDELKKISKPVQHHKEIAQVATISANNDSEIGNLIAEAMEKVGKNGSITVEEAKGFETVLDVVEGMNFNRGYLSSYFSTNPETQECVLEDALILIYDKKISGIKDFLPVLQQVAESGRPLLIIAEEIEGEALATLVVNRLRAGFRVCAVKAPGFGDRRKAMLEDIAILTGGQLVSEELGMKLENTTLAMLGKAKKVIVTKEDTTIVEGLGNKPDIQARCDNIKKQIEDSTSDYDKEKLQERLAKLSGGVAVIRVGAATEIEMKEKKDRVDDAQHATIAAVEEGILPGGGTALVRCIPTLEAFLPMLANEDEAIGTRIILKALTAPLKQIASNAGKEGAIICQQVLARSANEGYDALRDAYTDMIDAGILDPTKVTRSALESAASIAGLLLTT

SEQ ID NO: 19483 - protein, 360 aa, Triticum aestivum
MALVPSGSGGAPVIAEVEMNGGADQSATIVRATVVQASTVFYDTPATLDKAERLIAEAAGYGSQLVVFPEAFVGGYPRGSTFGFGISISITNPKDKGKREFQKYYAAAIDVPGPEVTRLAAMAGKYKVFLVMGVIEREGYTLYCSVLFFDPLGRYLGKHRKLMPTALERIIWGFGDGSTIPVYDTPLGKIGALICWENKMPLLRTALYGKGIEIYCAPTADSRPVWQASMTHIAMEGGCFVLSANQFCRRQDYPPPSEYAFAGLGEEPSPDTVVCPGGSVIISPSGEVLAGPNYDGEALITADLDMGEIVRAKFDFDVVGHYSRPEVLSLVVDDQPHRPVSFTSAAEKAPAAKSDGTAKP

SEQ ID NO: 19484 - protein, 396 aa, Escherichia coli
MFENITAAPADPILGLADLFRADERPGKINLGIGVYKDETGKTPVLTSVKKAEQYLLENETTKNYLGIDGIPEFGRCTQELLFGKGSALINDKRARTAQTPGGTGALRVAADFLAKNTSVKRVWVSNPSWPTHKSVFNSAGLEVREYAYYDAENHTLDFDALINSLNEAQAGDVVLFHGCCHNPTGIDPTLEQWQTLAQLSVEKGWLPLFDFAYQGFARGLEEDAEGLRAFAAMHKELIVASSYSKNFGLYNERVGACTLVAADSETVDRAFGIMKAAIRANYSNPPAHGASVVATILSNDALRAIWEQELTDMRQRIQRMRQLFVNTLQEKGANRDFSFIIKQNGMFSFSGLTKEQVLRLREEFGVYAVASGRVNVAGMTPDNMAPLCEAIVAVL

SEQ ID NO: 19485 - protein, 239 aa, Bacillus amyloliquefaciens
MKRVLLILVTGLFMSLCGITSSVSAQTGGSFFEPFNSYNSGLWQKADGYSNGDMFNCTWRANNVSMTSLGEMRLALTSPSYNKFDCGENRSVQTYGYGLYEVRMKPAKNTGIVSSFFTYTGPTEGTPWDEIDIEFLGKDTTKVQFNYYTNGAGNHEKFADLGFDAANAYHTYAFDWQPNSIKWYVDGQLKHTATTQIPAAPGKIMMNLWNGTGVDDWLGSYNGVNPIYAHYDWMRYRKK

SEQ ID NO: 19486 - protein, 396 aa, Escherichia coli
MFENITAAPADPILGLADLFRADERPGKINLGIGVYKDETGKTPVLTSVKKAEQYLLENETTKNYLGIDGIPEFGRCTQELLFGKGSALINDKRARTAQTPGGTGALRVAADFLAKNTSVKRVWVSNPSWPTHKSVFNSAGLEVREYAYYDAENHTLDFDALINSLNEAQAGDVVLFHGCCHNPTGIDPTLEQWQTLAQLSVEKGWLPLFDFAYQGFARGLEEDAEGLRAFAAMHKELIVASSYSKNFGLYNERVGACTLVAADSETVDCAFNLMKAAIRANYSNPPAHGASVVATILSNDALRAIWEQELTDMRQRIQRMRQLFVNTLQEKGANRDFSFIIKQNGMFSFSGLTKEQVLRLREEFGVYAVASGRVNVAGMTPDNMAPLCEAIVAVL

SEQ ID NO: 19487 - protein, 52 aa, Nostoc sp. PCC 7120; identical to SEQ ID NO: 1381

SEQ ID NO: 19488 - protein, 507 aa, Synechocystis sp. PCC 6803
MSNSILSKLNVGERSPVNRTHSSRTEAEKSSLFRFVRRKINSPWLACVPLTALIVAIWNAAAIAQDTEIVNITVETVNENVATLQGTLNAIWILIAAILVIFMNAGFGMLETGLCRQKNAVNILTKNLIVFALATIAYWAIGFSLMFGSSGNPFVGFGGFFLSGDHTNYGLSPFPEGLPVAVFFLFQVAFSATAATIVSGAVAERIKFNEFLIFSVLLVGIAYPITGHWVWDAGGWLYTMGFMDFAGSTVVHSVGGWAALAGAFLLGPRLGKFVDGRPGAIPGHNMGFAMLGCLILWIGWFGFNPGSQLAADQACAYIAVTTNLAASAGGLTATFTSWLKDGKPDLTMVINGVLAGLVGITAGCAGVSYWGSVIIGGIAGILVVYSVAFFDKIKIDDPVGAISVHLVNGVWGTLAVGFFNMEKGLFYGGGINQLIIQIVGILAIGAFTAIFSFVVWAILKQTMGIRVSGEEEMIGLDIGEHGMEAYTGFVKETDSFGSAVSGATVPE

SEQ ID NO: 19489 - protein, 766 aa, Arabidopsis thaliana
MLRSLGLGLLLFALLALVSGDNDYVSCNCDDEGFLSVHTILECQRVSDLLIAIAYFSIPLELLYFISFSNVPFKWVLVQFIAFIVLCGMTHLLNAWTYYGPHSFQLMLWLTIFKFLTALVSCATAITLLTLIPLLLKWKVRELYLKQNVLELNEEVGLMKRQKEMSVQVRMLTREIRKSLDKHMILRTTLVELSKILDLQNSAVWMPNENRTEMHLTHELRANPMRSFRVIPINDPDVVQVRETKVVTILRKNSVLAVESSGCGGSEEFGPVAAIRMPMLHGLNFKGGTPEFVDTPYAIMVLVLPSANSRVWTDKEIEIAEVVADQVAVAISHASVLEESQLMREKLGIQNRALLRAKQNAMMASQARNTCQKVMSHGMRRPMHTILGLLSMFQSESMSLDQKIIVDALMKTSTVLSALINDVIDISPKDNGKSALEVKRFQLHSLIREAACVAKCLSVYKGYGFEMDVQTRLPNLVVGDEKRTFQLVMYMLGYILDMTDGGKTVTFRVICEGTGTSQDKSKRETGMWKSHMSDDSLGVKFEVEINEIQNPPLDGSAMAMRHIPNRRYHSNGIKEGLSLGMCRNLAQMMQGHIWISPKSHGQTQSMQLVLRFQTRPSIRRSILAGNAPELQHPNSNSILRGLRITLADDDDVNRTVTKRLLEKLGCEVTAVSSGFECLNALSNVEMSYRVVILDLQMPEMDGFEVAMKIRKFCGHHWPLIIALTASTEDHVRERCLQMGMHGMIQKPVLLHVMASELRRALQTASE

SEQ ID NO: 19490 - protein, 477 aa, Agrobacterium tumefaciens str. C58
MASDIGDVWLDRSKAHIRVEPAGHSRRIMQGRGDADPYRMARSCVKGRNMSTNYLSAASVRTKNPAGVIATCGLMIMFDGYDLVVYGAVAPALLKESTWALNPAMVGRAAALTLVGMLLGALFAGTMADRIGRRKVVLLSLAGFSAMMIASAMTPNFLAFEITRFFAGLGLGALLPTVTALVLEFSPPQRRAQANSLSFLGYLIGGIISGILGMLLLESYGWRPLMLIGGLPLILLPIFMRFLPESPEWLASKGRQAEADGICDSYGLQRIVPHAKMQKGGVGALFSEGRLASTLNAWGIHFCSLLLTFGMVNWLPTIMNKMGYDISSALSFSVMLNVGAAIGILIGGRFADKGNVKVVVAILFAVGAASIFALTANKGPLLYVFVALAGAGTIGTQILANVLVGRLYPVHIRGTGLGFSLAVGRLGGIAGPMIGGLVLQRGLAPEWNFYIFGSVAVVGLMLTVLTLLYRTSGDARV

SEQ ID NO: 19491 - protein, 294 aa, Oryza sativa
MMMRDVCMEVLPPMDHYASRGNWFMARKWSPEENKQFERALAGLDLRCPDWDRVARAIPGRSALEVMNHFRDLELDVQQIENGMVPFPVYGAAAAGGAFTLQWDGAHGVGDFRNAYRFGGGGGGKRHFGRTPEQERKKGVPWTEEEHKLFLLGLKKYGKGDWRNISRNFVQTRTPTQVASHAQKYFIRLNSGGKDKRRSSIHDITTVNLTDDRPPSPSQSSLISNQSNTSTLTAAVAPFSSTADVKPQNAANASFNSPSRTLGMAGYGMGLQDQGLQCGGPLHDQLAASRSILF

SEQ ID NO: 19492 - protein, 470 aa, Silicibacter pomeroyi DSS-3
MADTSIGTPEQLRDPNYTPPLIKAVPLGIQHVLAMFVSNVTPAIIVAGAAGFGFGSNSPDFPELLYLIQMSMLFAGVATLLQTVTLGPVGAGLPIVQGTSFAFLPIMIPLVAGKGVDALAALFGGAILGGLFHFCLGFFIGRIRFALPPLVTGLVVTMIGLALVKVGIQYAAGGVPAIGTPEYGSALNWSAALVVILVTLGLKFFARGMLSVSAVLLGLIVGYVYALMVGMVTFEAIGTSWSRAAGFALPVPFKYGFEFSLAAVIGFAMMAVVSAIETVGDVSGITKGGAGREASDNEIAGATYADGLGTAVAGLFGGFPNTSFSQNVGLIAMTGVMSRHVVTIGALFLILCGLVPKVGAIIRTVPIEVLGGGVIVMFGMVVAAGVSMLSDVHWNRRNMVIFAIALSVGLGLQLEPGAVQHLPDTARILMTSGLLPAAVIAIVLNLILPQELGEEATEEVSGGMDGHGRR

SEQ ID NO: 19493 - protein, 364 aa, Arabidopsis thaliana
MSDLSPDLVGEILTRVPMTSLISVRCTCKMWNALSKEGIFFKAARKQFMGFTMMDSRVCSMKFDLQGIRNNEHDFVDPCIKQIAKLDQIEVSKVLQCDGLLLCVGQTRFIKPRKRFNKLEWYALGYDNNHNYKILMNYDTGHLFGYEIYDFSSDSWRVLDVSPDCHIPFHQQSVSLNGNTYFLAQEKIIVEGEEEEVVDEIEKFLLCFDFTTERFGPRLPLPFHSDVLETVAISCVRDDQLAVLYQRFETWEIWVTTKIDPTAVSWSMFLSVDMEPPTGCQFDDEAGSFFIDEENKVAVFFNSDLFNPRVENRNRRYPTAYIIGQDGYFKSATLREAPDLVKPDPYVYCCPLVWSSYAPSLVQL

SEQ ID NO: 19494 - protein, 149 aa, Blastocladiella emersonii
MADQLTEEQIAEFKEAFSLFDKDGDGTITTKELGTVMRSLGQNPTEAELLVMINEVDADGNGTIDFPEFLTMMARKMKDSDSEEEIKEAFKVFDKDGNGYISAAELRHVMTNLGEKLSEDEVEEMIREADVDGDGQINYEEFVKMMMSK

SEQ ID NO: 19495 - protein, 160 aa, Xylella fastidiosa 9a5c
MNVVRYTPWPGQAALQNEIKQVFDRFFEHNGDTDESAVVTAQWVPRVDIKEEPNQFVLYADLPGIDPADIEVQMDKGILSIKGERKTESSSQTEHFSRIERRYGSFHRRFALPDSADADGITASGSHGVLSIFIPKRAATTPRRIQVGNAVSNDVALQSM

SEQ ID NO: 19496 - protein, 396 aa, Escherichia coli
MFENMTAAPADPILGLADLFRADERPGKINLGIGVYKDETGKTPVLTSVKKAEQYLLENETTKNYLGIDGIPEFGRCTQELLFGKGSALINDKRARTAQTPGGTGALRVAADFLAKNTSVKRVWVSNPSWPTHKSVFNSAGLEVREYAYYDAENHTLDFDALINSLNEAQAGDVVLFHGCCHNPTGIDPTLEQWQTLAQLSVEKGWLPLFDFAYQGFARGLEEDAEGLRAFAAMHKELIVASSYSKNFGLYNERVGACTLVAADSETVDRAFSQMKAAIRANYSNPPAHGASVVATILSNDALRAIWEQELTDMRQRIQRMRQLFVNTLQEKGANRDFSFIIKQNGMFSFSGLTKEQVLRLREEFGVYAVASGRVNVAGMTPDNMAPLCEAIVAVL

SEQ ID NO: 19497 - protein, 211 aa, Methanosarcina barkeri str. fusaro
MKFPYSQKVLEHFKNPHNVGKIENPDGKGLEGSPACGDMVAVYIKVNPDTKIIEDIKFESYGCASNIATGSVITDIAKGKTLDEAKKITWKQASEELGGLPPIKAHCSVLAVEGLRAAIKDYEEKHGLITEREPTTEKVIRNRLKHVMNPLTGLDIIRTNLILKTSVEEGVVRVVVDLPANHQFAPAIKEDIMEKLGSLWDVERVDVVFTA

SEQ ID NO: 19498 - protein, 404 aa, Streptomyces coelicolor A3(2)
MTVTENVPAATASLPPLAARARSIGGSPVRDILAVTARPEVINFAGGLPAPELFDAEGIAAAYRDVLAETPARALQYSTTEGEPALRAALAARTSARGLATDADDILVTTGSQQALSLLATALLEPGDTVLVERPCYLAALQAFGFAGARVVAVPGDEHGIDPGALEELVVRERPKLLYTVPTFSNPTGRTVPAARRAAVAEVAGRCGLWIVEDDPYGELRFEGERVPWIASYEGARDRTVLLGSFSKVMAPGLRLGWLRAPAELRRACAVAKQAADLHTPTVNQLAAARYLADRDLDAHVARVAAVYGERRDAMLAGLADALPAGSVWTRPEGGMFLWARLPQGYDTTALLPEVVRHDVAYVPGAPFHAGEPDRATLRLCFVTQTPDEIAEGLRRLGEGLRAA

SEQ ID NO: 19499 - protein, 242 aa, Staphylococcus aureus subsp. aureus Mu50
MTKLFIPYIMGNKDLIENATLLSENGADIIEIGVPFSDPVADGPVIMEAGQQAIKQGITIDYIFNQLEKHGDQIKCNYVLMTYYNIICHYGEQAFFEKCRDTGVYGLIIPDLPYELSQRLKQQFSHYGVKIISLVAMTTDDKRIKDIVSHAEGFIYTVTMNATTGQNGAFHPELKRKIESIKAIANVPVVAGFGIRTPQHVADIKEVADGIVIGSEIVKRFKSNTREEIIRYLQSIQQTLNN

SEQ ID NO: 19500 - protein, 396 aa, Escherichia coli
MFENITAAPADPILGLADLFRADERPGKINLGIGVYKDETGKTPVLTSVKKAEQYLLENETTKNYLGIDGIPEFGRCTQELLFGKGSALINDKRARTAQTPGGTGALRVAADFLAKNTSVKRVWVSNPSWPTHKSVFNSAGLEVREYAYYDAENHTLDFDALINSLNEAQAGDVVLFHGCCHNPTGIDPTLEQWQTLAQLSVEKGWLPLFDFAYQGFARGLEEDAEGLRAFAAMHKELIVASSYSKNFGLYNERVGACTLVAADSETVDRAFKRMKAAIRANYSNPPAHGASVVATILSNDALRAIWEQELTDMRQRIQRMRQLFVNTLQEKGANRDFSFIIKQNGMFSFSGLTKEQVLRLREEFGVYAVASGRVNVAGMTPDNMAPLCEAIVAVL

SEQ ID NO: 19501 - protein, 180 aa, Petunia x hybrida
MASSVISSAAVATRTNVAQASMVAPFNGLKSAVSFPVSSKQNLDITSIASNGGRVQCMQVWPPYGKKKYETLSYLPDLTDEQLLKEIEYLLNKGWVPCLEFETEHGFVYREYHASPRYYDGRYWTMWKLPMFGCTDATQVLGELQEAKKAYPNAWIRIIGFDNVRQVQCISFIAYKPPGF

SEQ ID NO: 19502 - protein, 332 aa, Streptomyces griseus
MATRAVARRQPAASGETGAAGSVRATGEIADRDLVGMYLDEIARTPLLDAAKEVELSQTIEAGVYAGKILDGEVDSDSAGASREELEALVAEGERAKDVFIRSNLRLVVAVARRYPRSGLPLLDLIQEGNAGLVRAVEKFDYAKGFKFSTYATWWIRQAITRSIADQSRTIRLPVHLVEELGRIRRVQREFNRENGRDPEPAEIAAELSSTPERVTDVLDWARDPVSLNMSVDDEGETQFGDLLEDTSAVSPEQSVLTLLRSEELDDLIGQLDDRTASIIKMRYGIEDGRERTLTEVGKQHGLTRERIRQIEKHALLELKRMAHDTGFDAAA

SEQ ID NO: 19503 - protein, 180 aa, Petunia x hybrida
MASSVMSSAAVATSTNAAQASMVAPFTGLKSAASFPVSRKQNLDITSIASNGGRVQCMQVWPPYGKKKYETLSYLPDLTDEQLLKEIEYLLNKGWVPCLEFETEHGFVYREYHASPRYYDGRYWTMWKLPMFGCTDATQVLGELQEAKKAYPNAWIRIIGFDNVRQVQCISFIAYKPPGY

SEQ ID NO: 19504 - protein, 396 aa, Escherichia coli
MFENITAAPADPILGLADLFRADERPGKINLGIGVYKDETGKTPVLTSVKKAEQYLLENETTKNYLGIDGIPEFGRCTQELLFGKGSALINDKRARTAQTPGGTGALRVAADFLAKNTSVKRVWVSNPSWPTHKSVFNSAGLEVREYAYYDAENHTLDFDALINSLNEAQAGDVVLFHGCCHNPTGIDPTLEQWQTLAQLSVEKGWLPLFDFAYQGFARGLEEDAEGLRAFAAMHKELIVASSYSKNFGLYNERVGACTLVAADSETVDRAFSQMKAAIRANYSNPPAHGASVVATILSNDALRAIWEQELTDMRQRIQRMRQLFVNTLQEKGANRDFSFIIKQNGMFSFSGLTKEQVLRLREEFGVYAVASGRVNVAGMTPDNMAPLCEAIVAVL

SEQ ID NO: 19505 - protein, 355 aa, Schizosaccharomyces pombe
MTGVHEGTVLVTGGAGYIGSHTCVVLLEKGYDVVIVDNLCNSRVEAVHRIEKLTGKKVIFHQVDLLDEPALDKVFANQNISAVIHFAGLKAVGESVQVPLSYYKNNISGTINLIECMKKYNVRDFVFSSSATVYGDPTRPGGTIPIPESCPREGTSPYGRTKLFIENIIEDETKVNKSLNAALLRYFNPGGAHPSGELGEDPLGIPNNLLPYIAQVAVGRLDHLNVFGDDYPTSDGTPIRDYIHVCDLAEAHVAALDYLRQHFVSCRPWNLGSGTGSTVFQVLNAFSKAVGRDLPYKVTPRRAGDVVNLTANPTRANEELKWKTSRSIYEICVDTWRWQQKYPYGFDLTHTKTYK

SEQ ID NO: 19506 - protein, 278 aa, Triticum aestivum
  misc_feature (120)..(120): Xaa can be any naturally occurring amino acid
  misc_feature (172)..(172): Xaa can be any naturally occurring amino acid
  misc_feature (212)..(212): Xaa can be any naturally occurring amino acid
  unsure (1)..(278): unsure at all Xaa locations
MEDERSTQSYQGGEAAEQVEVTDRGLLGNLLRKKKRGGGPQGAKNGGGGLFTPAYGKRFSPGKEPQGSKRGGAPWMATKRRKPLFFPKLHPDPGSRSSFFLLTREKEGGFSRQRAEVFQXEEKKGLQGKAPGEAPRPHKDTRGWATDGLYPHRRPPASVQTHHEPDVVVEKXIDGDVKTEATPPVPEEEKKGFLEKIKEKLPGGHKKPEDAXSVPVTHAVPAPTPVHAPAPAPEEVSTPDPKEKKGLLGKIMDKLPGFHKTGEEDKAPPPTGEHKPSA

SEQ ID NO: 19507 - protein, 476 aa, Campylobacter upsaliensis RM3195
MGKFVNNIEEFFTYCKENEVVFVDFRFTDIIGTWHHITYNFHSINEETFELGIPFDGSSLKGWQPVNKSDMILKPDAPSAFLDPFTADQTIIVFCDVYDIYKGQMYEKCPRSIAKKALQFLQESGVADMAYFGPENEFFIFDSVKIVDNANCSKYEVDTEEGEWNDNKEFVDSYNTGHRPRNKGGYFPVAPIDSLVDIRAEMVQTLEKVGIKTFVHHHEVAQGQAEIGVHFGTLVEAADNVQIYKYIVKMVAHLNGKTATFMPKPLYGDNGSGMHVHMSLWKNGVNLFYDKEGYGELSQDAIHYIGGILKNARSVAAFTNPSSNSYKRIVPGFEAPCILTYSCQNRSASCRIPYGMGKNSARVEIRFPDSTANPYLAFVSLLMAGLDGIKNKHIPVGPMEENLFDLTLDEVREKGIEQLPHTLRGSLEALIRYNSFLKPVMSDLFIDDYQHLKFATQVWPVEARPTAYEFKTCYSC

SEQ ID NO: 19508 - protein, 393 aa, Synechocystis sp. PCC 6803
MELKNLAQTLLPRLVEIRRHLHAHPELSGQEYQTAAYVAGVLSSCGLHVEEAIGKTGVVGQLSGKGDDPRLLAIRTDMDALPIEEMVSLPFASRHPGVMHACGHDIHTTLGLGTAMVLSQMGHRLPGDVRFLFQPAEEIAQGASWMIQDGAMKGVSHILGVHVFPSIPAQQVGIRYGALTAAADDLEIFIQGESGHGARPHEAIDAIWIAAQVITALQQAISRTQNPLRPMVLSLGQISGGRAPNVIADQVRMAGTVRSLHPETHAQLPQWIEGIVANVCQTYGAKYEVNYRRGVPSVQNDAQLNKLLENAVREAWGESALQIIPEPSLGAEDFALYLEHAPGAMFRLGTGFGDRQMNHPLHHPRFEADEAAILTGVVTLSYAAWQYWQNIAI

SEQ ID NO: 19509 - protein, 356 aa, Halobacterium sp. NRC-1
MPSRRDVLRLGAGVLAAGTAGCTDTAPNRVAAAETAATTTRETTTDSRSESPYTAVYRDVIDSVVMIRTQSGQGTGWLYNDTTLVTNAHVVGRSETVNVRFNDGTWETGRVRGTDPNSDLAAVTVTDTPAAATPLALRTASPVAGTEVVAIGNPFALNGTVTTGIISGTNRAIPAPTGYRIPDAVQTDAAVNPGNSGGPLVSLDGDVVAVVNSGGGDNIAFGISAALTDRVVPSLIDTGDYEHAYLGVSFTPVTPTVADANGLTESRGLLVMSVDPSGPSAGRLVGSDATTIVDGGAVRVGGDIVLAVNGTRVHTLEDVLSLLALHTSPGDTVSVRLLRDGDRRTVDVELGARPSG

SEQ ID NO: 19510 - protein, 261 aa, Brassica napus
MAEAAISRTNLIFRGACVNQHKHVDDYSVSSPVSFGLRKSFPSLKVKPFNQFQSSRSSSSITAQTTLRIGTPQKWWEKGLKENMREISSAQELVDSLTNAGDKLVVVDFFSPGCGGCKALHPKICQLAEQNPDVQFLQVNYEEHKSMCYSLGVHVLPFFRFYRGAHGRVCSFSCTNATIKKFRDALAKHSPDRCSLGPTKGLEEKELVALAANKELNFSYTPRAVPVEEEEAPVPASNPGLPVAHPSMKANDGKTLVSSGR

SEQ ID NO: 19511 - protein, 266 aa, Triticum aestivum
  misc_feature (100)..(100): Xaa can be any naturally occurring amino acid
  unsure (1)..(266): unsure at all Xaa locations
MTFSVSPATGASQEYMIRFDGHFEDPSSAAASAEPPLPFAGRAFSPQQEQSAMVAALLHVVSGYTTPAPDLFFPARKEACTACGMDGCLGCEFFGAEARXAVAASDAPRAPAAGGPQRRRRNKKNQYRGVRQRPWGKWAAEIRDPRRAVRVWLGTFDTAEDAARAYDRAAVEFRGPRAKLNFSFPEQQQQQLGGSGNAAAKSDACSPSPSPRSADEDETGDLLWDGLVDLMKLDESDLCLLLPVDNTDKFHIEGKRRSGSGVPLCY

SEQ ID NO: 19512 - protein, 249 aa, Campylobacter upsaliensis RM3195
MVDFRKFYKDKANIAYIVMGYPNLDMSVQFIKRLDECNIDILEVGVPYSDPIADGEIIANAASKALENGTTIHKILEKLEKIETNKALVFMAYYNLIFAYGLKAFVKAAKKAGICGLIVPELSYEESSDLKKECDKEGLALITFISLTTPKERIAKLCKNANGFIYLLASIGLTGGKSSRNELLVNKIEEIRAYTKLPIFVGFGIKNYEDVEKIHKISDGAIVGTSIVNEFQNENIDEVIKNVKEIFKK

SEQ ID NO: 19513 - protein, 280 aa, Streptococcus agalactiae NEM316
METYTLSNTLNIPKIGFGTWQLTEGEEAYKAVTHALKVGYTHIDTAQIYGNEHSVGRAIRDSGLARESIFLTTKIWNDKHDYHLAKASIDESLQKLGVDYIDLLLIHWPNPKALRENDAWKAGNAGTWKAMEEAYKEGKVKAIGVSNFMKHHLEALFETAEIKPMVNQIILAPGCAQEDLVRFCKGNDILLEAYSPFGTGAIFENESIKAIAEKYGKSVAQVALRWSLDNGFLPLPKSATPKNIEANLDIFDFQLNEDDITTLIQLDSGIKPKDPDNVSF

SEQ ID NO: 19514 - protein, 74 aa, Arabidopsis thaliana
PTRPNGLQFMGGQAAGYAAADSVQALPLVSTFWGIVLFGEYRKSSKRTYALLVSMLAMFVAAVAILMASSGHRK

SEQ ID NO: 19515 - protein, 550 aa, Silicibacter sp. TM1040
MNAQTTINPASVLSNDPDWWRGAVIYQIYPRSYQDSNGDGIGDLQGITSRLDHIASLGVDAIWISPFFTSPMKDYGYDVSDYCDVDPMFGNLADFDALVARAHDLGLRVMIDLVLSHSSDQHPWFAESRQSRDNPKADWYVWADPQEDGTPPNNWLSIFGGSAWHWDARREQYYLHNFLVSQPDLNFHCPDVQNALLDVTRFWLERGVDGFRLDTINFYIHDKELRSNPALPKDQRNANIAPSVNPYNHQEHLYSKNQPENLDFLARFRALLDEYPAKTAVGEVGDAQRGLELLGQYTAGNTGVHMCYAFEFLAKDPLTAARVAEVFERTDEVAADGWACWAFSNHDVQRHVSRWGLSDAALRLHATLIMCLRGSVCIYQGEELGLPEADISFEDLQDPYGIEFWPEFKGRDGCRTPMVWRSDNTHGGFSEARPWLPVSLEHAALSVAEQEANPDALLHHYRRVIALRRAHAALSHGTHDKVVASGSVVHFLRSAESEDIFCAFNLGEAAAEVSLPAGTWEQLGADIGTAEINGDLVKLGPWQACLVRRV

SEQ ID NO: 19516 - protein, 264 aa, Arabidopsis thaliana
MDVYGLSSPDLLRIDDLLDFSNEDIFSASSSGGSTASTSSSSFPPPQNPSFHHHHLPSSADHHSFLHDICVPSDDAAHLEWLSQFVDDSFADFPANPLGGTMTSVKTETSFPGKPRSKRSRAPAPFAGTWSPMPLESEHQQLHSAAKFKPKKEQSGGGGGGGGRHQSSSSETTEGGGMRRCTHCASEKTPQWRTGPLGPKTLCNACGVRFKSGRLVPEYRPASSPTFVLTQHSNSHRKVMELRRQKEVMRQPQQVQLHHHHHPF

SEQ ID NO: 19517 - protein, 200 aa, Zea mays
MPSSASADAEGARSKRKRGSSAACASDGSDQQGPSSHWLTPRAQQAYSSKLLQALRLVRGGTGTPTCPASAPAVRDAAYRALAVAARGRSRWSRAILARSRRRRALLRARRPPPPTPRHRQRRHQQQQDERPAGGLAGRAKVLARLVPGCRSLSLPALLAEVSDYVAALEMQVRAMGQLTHDLASSSSAPTTASTMIAPP

SEQ ID NO: 19518 - protein, 462 aa, Streptococcus agalactiae NEM316
MSKNNNDHTQKSENGMVRGLENRHVQLIAIAGTIGTGLFLGAGRSISLTGPSIVLVYAITGAFMFFMMRAIGEMLYQDPNQHTFINFITKYLGPGWGFFSTLSYWISLIFIGMAEITAVGEYVQFWFPEWPSWIIQIVFLAILSSINLIAVKAFGETEFWFAMIKVIAILGLIATGIFMVLTNFDTGHGYHASISNITNHFEWFPKGKLNFFMAFQMVFFAYLAIEFVGVTTSETANPRKVLPKAIQEIPMRIILFYAGSLLAIMAIFPWQQLPVNESPFVTVFKLAGIKWAAALINFVVLTSAASALNSTLYSTGRHLFQLANESPNTLTKALKLDQLSRQSVPSRAIIASAVIVGASALISVLPGISDAFSLITASSSGVYISIYVLIMIAHWKYRKSPDFMEDGYKMPAYKILSPITLLFFLFVFVSLFLQDSTYIGAIGATIWIIGFGLYSHFKHKSH

SEQ ID NO: 19519 - protein, 359 aa, Mycoplasma penetrans HF-2
MLINKYTSKTETYSVLDIDGNVTQVGYRIPLSNEEIEKAYYTMVLTRRMDEKMIKWQRQGKMLTFPPNMGEEALQVATSISMDKQDWFAPAFRSAAVFLHSGVPMWKIMLVWKGNEAGNAMPEELNFLPFNIPIGTQYSHAAGIGIALNYQNKPNVAYTVIGDGGTAEGEFYEALNFASVRNAQTIFTVNNNQWAISTPTSKETGQMDIASKAIAAGLDFIKVDGNCLFASVDAIRAARAYVLENKKPILVEFVTYRKGPHTTSDNPRIYRSEEYECEQEKKDPILRLERWMAQNGLLDESKKAQIIEKADAEVEEAYKIMESKLSVSVDDVFDHTFKTLDESLQEQKNEALKIFGGNK

SEQ ID NO: 19520 - protein, 539 aa, Caulobacter crescentus CB15
MTQRKTYAEHRDALLARYPQGVTPGGVDVDDIIQLKLQNTFNTHLDIARAMAPVMRADMAEYDRDSSKFTQSLGCWSGFHAQQMIKAVKRLRGTTKGAYVYLSGWMVAGLRNRFGHLPDQSMHEKTSVVDLIEEIYVSLRQADEVAINDLFKALSAARKAGDQIAEQAAIKAIDNFETHVVPIIADIDAGFGNEHATYLLAKEMIKAGACCLQIENQVSDAKQCGHQDGKVTVPREDFIEKLRACRLAFEELGVDDGVIVARTDSLGAGLTQKIPVSQEPGDLASDYIKWLKTEPVTPENPLKDGELAIMKDGAFVKPVRMPNGLFAFQDGTGRQRVIEDCIANLTQGGADLLWIETDTPNVDEIASMVAEVRRVVPNAKLTYNNSPSFNWTLNLRKQVRDQWIAEGKIHKDSYPDGNALMSAEYDKSDLGREADERLARFQVDIAARAGVFHNLITLPTFHLTAKSVDELSRGYFGEDRMQAYVNTVQREEIRRGVSAVKHQHEVGSDLGDTFKEMVAGERALKAGGHANTMNQFAAE

SEQ ID NO: 19521 - protein, 531 aa, Propionibacterium acnes KPA171202
MAAKQLQFDEEARRSLERGVDTLADTVKVTLGPKGRYVVLDKKWGAPTITNDGVTVAKEVDLTDPYENLGAQLAKEVATKTNDVAGDGTTTATVLAQALVHEGLRAVASGANPVGLKRGIEKAVDAVVEELRSISRAIDTTSDMASVATISSRDETIGALIAEAFDKVGKDGVITVDESQTFGTELDFTEGMQFDKGYLSPYMVTDQDRMEAVIEDPYILIHSGKISSMNDLLPLLEKVIAAHGSLFIVAEDVDGEALSTLVVNKIRGTFSSVAVKAPAFGDRRKAMLQDIATLTGGQVVAPEVGLKLDQVGLEVLGRAKKVVVTKDNTTIVDGAGDKADVEGRVIQLRAEYDNSDSEWDREKLQERIAKLAGGVCVIRVGAATEVELNEKKHRIEDAVSATRAAIEEGIVAGGGSALIHAAHVLDGDLHLEGDEKAGVQIVAKAVREPLRWIAENGGEPGYVIVSKVAEMEPGHGYNGKTGQYVDLIADGVIDPLKVTRSALANAASIASLLLTTETLVVDKPEEDNEDK

SEQ ID NO: 19522 - protein, 98 aa, Propionibacterium acnes KPA171202
MATTIKPLEDRVLVQPLEAEQTTASGLVIPDTAKEKPQEGKVISAGPGRVDDKGTRVPMDVKEGDVVIFSKYGGTEVKYDGQEYLLLNARDILAVVEK

SEQ ID NO: 19523 - protein, 463 aa, Mycoplasma penetrans HF-2
MKKYDLVIIGSGPGGYVAAEHAAKHGLKTLCVEAKDFGGVCLNKGCIPTKALLNTSKIKQYVLKAEEFGVTGINIDNITLDWPKVIERKNSVVKKLQMGVQGLLKTAKADMLKGEAKIVDQNTISVNEELINFDNLIIATGSSPRKFNLPGFAQGYEEGKILTSDEVLNLPRIPDKFTVIGGGVIGIEFAILFAELGSKVTILQGVDRILEILDKDISAEVTKLLLSKGVTIHTDVQIQKYENGQVYYTKDGTEQSEDFDYCLVSVGRTPSTEIARNLPIEFAPNGSIITNDKMQTSIKHIYAIGDCTSKVMLAHSAYKNAVVAVDTILNKPSKMDLLKIPSCIYTHPQVATVGYTEEQLKEKNIPYYAAKYPFMHLGKALADGKTVGFIKILVSQDCGEILGCHIVGEQASNYISEIALAMENESTIYTLSQTIHPHPTYAEIIWEVARKIIIENFSDKDWG

SEQ ID NO: 19524 - protein, 164 aa, Mycoplasma penetrans HF-2
MFKMSDFYKFKVNKINGKEIELSEYKNKVVLVVNVASKCGFVKQYENLENMYQKYKDQGLVILGFPCNQFFFQEPKTNQEILSFCTTKYNVTFDMFEKINVNGKEANPLYTWLKEQMPWTARAKNVKWNFEKFLLDKNGNVKYRFESKKIPEEFEQEVVNLINE

SEQ ID NO: 19525 - protein, 514 aa, Xylella fastidiosa 9a5c
MNSRIHTRCFGLLAITLPLAACGAQHNNSPTPTAPSTPIVTPSTTPAPQLVAGLPDFTQLVDQVGPGVVNIETVITRKKVGKRRGIPLDNDIPEFFRRFFGPDFQMPNQPRGGQDDEGGIAGRGMGSGFIISKDGYILTNHHVITGASEVTIKLTDRREFKAKIIGSDEQYDVALLKIDAKNLPTVRIGDSSSLKSGQWVVAIGSPFGLDHSVTAGIVSALGRSTSDDQRYVPFIQTDVPINQGNSGGPLLNTRGEVIGINSQIFSASGGYMGISFAIPINLAINAAEQIRKTGKVQRSMLGVEIGPIDALKAQGLGLPDSRGALVNNIPPHSPAAKAGIEVGDVIRSVNGKVISSFSDLPPLIGMMPPGTKATLGIIRDGKPREIVVTLSALNQDATASEDEDDTAPSKPETSANVELLGLQVENLSAAERERLASSQNAKGGVRITAVTAPWARNANPPLVEGLVILRIGRTPVSNVAELNRVLGNYKKGDVIMLLVTNGRGTFYSALKAGG

SEQ ID NO: 19526 - protein, 614 aa, Shewanella violacea
MEHTPQSQLKLLLAKGKEQGYLTYAEVNDHLPADMVDADQIEDIVQMINDMGIRVYEQAPDADEIMMTEDSTDDDAAEEAAAALATVEAELGRTTDPVRMYMREMGTVELLTREGEIVIAKRIEEGIYTVQASVAEYPPAIASILDQFDRYEAEEVRLSDIISGFIDPNAADIAPTATHIGSDLSQSERDKDDSKDDSKDDDEDEEEEGPKGPDPEESKERFTQLREVHENTLKIIADKGRGHPEATVALFEIGELFKEFRLMPKQFDRLVKNMRATMDKVRVQERLIMKLCVEQAKMPKKNFVKGYTADESSIAWFDTELASKKPYAEGLKMIEPDVRRCRFKLDIIEKETGLAIASIKDINRRMSIGEAKARRAKKEMVEANLRLVISIAKKYTNRGLQFLDLIQEGNIGLMKAVDKFEYRRGYKFSTYATWWIRQAITRSIADQARTIRIPVHMIETINKLNRISRQMLQEMGREPTPEELAERMLMPEDKIRKVLKIAKEPISMETPIGDDEDSHLGDFIEDTTLELPLDSATGESLRNATHEVLAGLTAREAKVLRMRFGIDMNTDHTLEEVGKQFDVTRERIRQIEAKALRKLRHPSRSEILKSFLDE

SEQ ID NO: 19527 - protein, 487 aa, Methylobacillus flagellatus KT
MKPLYDLAQLREIEQRHAAEGLMEKAGLAAASMARKLLQEHEYSVLVLAGPGNNGGDALVAARHLRAAWYQVTVVFVGDSTRLPADAAAAYEAWIAAGGELLNEIPPHGRWQLVIDGLFGIGLSRELDARYCELIRQVNALGLPVLALDIPSGLCMSTGRVLGAAVKASHTLSFIGLKPGLFTLDGPDHAGEVHLETLGLAQANTIATGMLVDQPPALPLPRTRNSHKGSHGSVGVIGGAEHMTGAAILAARAALLLGAGRVYCGLLAHQPWVLDTAQAELMLHDAATVPALSSVLAVGPGMGTSSAAMAVLHEVLGQSQSLVLDADALNLVAAHHSLQQALKGRPLASTVLTPHPGEAARLLGCRNDEVQADRIASALKLARTYQAAVVLKGCGSIIALPDGRWFVNRSGNPGMASAGMGDTLCGIIAALLAQSMGMEQALLLGVYLHGAAADALVERGIGPIGLTAGEVAWAARDLLNAWVYAKT

SEQ ID NO: 19528 - protein, 387 aa, Bdellovibrio bacteriovorus HD100
MATQDDYSLLAPGPVNIHPEVRKALALPMIHHRTPEFDKILKKVLTQIKTVFQTEQDVYLLTSTGSGGMEALLVNTLSPGDKVIAIVSGKFGERWADMAAHFGASVLTINAPWGEAVKVSDVEELLQKNPDTRAVLCQACETSTAVAHPIEALGKITQKYPDTLFLVDAITALGAYPLPMDAWGIDGIVAGSQKAFMLPTGLSLLSFSKKAWRFIPDAKCPRYYFDIRKEKKANAAGETFYSSNVALIRALDVVLTLISQQGLEKLFHDIHRRAEFTRIFGLKLGFTLYAQSPSNSVTALLVPPQMDGQKIRLHLEEVHNITIMGGQDQAKGRIIRVGHMGYIQDHELIRLVECLGHTLRHFDSDFMSLEHISNITTEAKNWLEQNP

SEQ ID NO: 19529 - protein, 542 aa, Methylobacillus flagellatus KT
MTKFVFVTGGVVSSLGKGIAAASLGAILESRGIKVTMLKLDPYINVDPGTMSPFQHGEVFVTDDGAETDLDLGHYERFISARMGKRNNFTTGQIYETVIKKERRGEYLGKTVQVIPHITDEIKAHVKRGAEGADVAIVEVGGTVGDIESLPFLEAIRQMGIEEGRSNTCFMHLTLLPWIPTAGELKTKPTQHSVKELREIGIQPDILLCRADRAIPEDEKRKIALFTNVPHEAVISVVDADSIYSIPRMLHDQMLDEIVCHKLNLLARAADLSSWNRIVHALKNPKHEVNVAFVGKYVDLTESYKSLTEALIHAGIHNESKVNIHYIDSEEVEKHGTGELEKMDAILVPGGFGKRGTEGKIAAIRYARESKTPYLGICLGMQLAVIEFARNVAGLKDANSTEFDPHTPHPLVGLITEWKNADGKVEQRSEDSDLGGTMRLGAQKCPIVPDTKAFTIYGAEVNERHRHRYEVNNHYVDKLEKAGLVVSARTPTEQLCEMVELPSEVHPWFVACQFHPEFTSNPRTGHPLFNAYIAAALANRKA

SEQ ID NO: 19530 - protein, 95 aa, Silicibacter pomeroyi DSS-3
MALKPLHDRVLVRRTESEEKTAGGLIIPDSAKEKPSEGVVVACGEGARKDSGELIAMAVKSGDRVLFGKWSGTEVTVDGEELLMMKESDIMGIIE

SEQ ID NO: 19531 - protein, 230 aa, Triticum aestivum
  misc_feature (146)..(146): Xaa can be any naturally occurring amino acid
  unsure (1)..(230): unsure at all Xaa locations
GNSISVAAEVPRKKSNGDKVSEQEGVNGDDVNKEGGNGTNDKPKDGKEKKIRDLKKDPKQKSLNDAKEKKKSDEPPKHPGFILQTKKSKESKLRPISLSLDGLLDYTTNDTEESVFELSLFAESFSEMLQFRMGCIILSFLEKLHXTMLQRRTRRKRTREDDLTKEGTKSSEKRSKTTEGAHIESTPPGGRAPKNDKITEDDKKKMSIDQIPLPATRDEPVAAEKMEDED

SEQ ID NO: 19532 - protein, 324 aa, Candida tropicalis
MSTTPTIPTIKLNSGYEMPLVGFGCWKVTNATAADQIYNAIKTGYRLFDGAEDYGNEKEVGEGINRAIKEGLVKREELFITSKLWNNFHDPKNVETALNKTLSDLNLDYVDLFLIHFPIAFKFVPIEEKYPPGFYCGDGDNFHYEDVPLLDTWKALEKLVEAGKIKSIGISNFTGALIYDLIRGATIKPAVLQIEHHPYLQQPKLIEYVQKAGIAITGYSSFGPQSFLELESKRALNTPTLFEHETIKLIADKHGKSPAQVLLRWATQRNIAVIPKSNNPERLAQNLSVVDFDLTKDDLDNIAKLDIGLRFNDPWDWDNIPIFV

SEQ ID NO: 19533 - protein, 280 aa, Kineococcus radiotolerans SRS30216
MVSAVGPSTTGAAPRTGTAGAAIDRAKADGRAALVAYLPVGFPDVDASVEAAKAAVAGGADVVELGLPYSDPTMDGATIQRAVDVALARRTRPVDVLRAVEAVASTGAAVLVMTYFPPIDRYGVDRWAADLANAGGAGLITPDLVPDEAADWIAASDEHDLERVFLVAPSSTDARLRSTSAACRGFVYAASLMGVTGTRASVGAGAAELVRRTRAAGTERVCVGLGVSTPAQATEVAAYADGVIVGSAFVQRLLEADSTAAGARAVGEFAQSLAEAVRTG

SEQ ID NO: 19534 - protein, 546 aa, Silicibacter pomeroyi DSS-3
MAAKDVKFNTEARNKMLKGVNILADAVKVTLGPKGRNVVLDKSFGAPRITKDGVSVAKEIELEDKFENMGAQMVKEVASRTNDEAGDGTTTATVLAQAIVREGMKSVAAGMNPMDLKRGIDLATAKVVEAIKAASRPVNDSAEVAQVGTISANGESEIGRQIAEAMQKVGNEGVITVEENKGLETETDVVEGMQFDRGYLSPYFVTNADKMIAELEDCMILLHEKKLSSLQPMVPLLEQVIQSQKPLLIIAEDVEGEALATLVVNKLRGGLKIAAVKAPGFGDRRKAMLQDIAILTGGQVISEDLGMKLESVTMDMLGTAKKISITKDETTIVDGAGEKAEIEARVAQIRTQIEETTSDYDREKLQERVAKLAGGVAVIRVGGMTEVEVKERKDRVDDALNATRAAVQEGVVVGGGVALVQAGKVLADLEGANADQTAGINIVRKAIEAPLRQIAENAGVDGAVVAGKVRESGDASFGFNAQTEEYGDMFKFGVIDPAKVVRTALEDASSVAGLLITTEAMVADKPQKDAPAGGGMPDMGGMGGMM

SEQ ID NO: 19535 - protein, 396 aa, Escherichia coli
MFENITAAPADPILGLADLFRADERPGKINLGIGVYKDETGKTPVLTSVKKAEQYLLENETTKNYLGIDGIPEFGRCTQELLFGKGSALINDKRARTAQTPGGTGALRVAADFLAKNTSVKRVWVSNPSWPTHKSVFNSAGLEVREYAYYDAENHTLDFDALINSLNEAQAGDVVLFHGCCHNPTGIDPTLEQWQTLAQLSVEKGWLPLFDFAYQGFARGLEEDAEGLRAFAAMHKELIVASSYSKNFGLYNERVGACTLVAADSETVDCAFGQMKAAIRANYSNPPAHGASVVATILSNDALRAIWEQELTDMRQRIQRMRQLFVNTLQEKGANRDFSFIIKQNGMFSFSGLTKEQVLRLREEFGVYAVASGRVNVAGMTPDNMAPLCEAIVAVL

SEQ ID NO: 19536 - protein, 528 aa, Bartonella henselae str. Houston-1
MVQISTYFQLIRTGWVLAREGVLSALPHDDLQGFPALCHRIASMLARRKTKKKRRSEKLSYAINRLGPSYIKLGQFLATRPDIVGRDIAEDLAQLQDRVQTFSCTAAIDQIESSLGRSINDLFANFYPPIAAASIAQVHPAEYYDEVGHKKKCAVKVIRPNIRTRFAKDLRSFYLIAHLQERYIPAARRLRPVCVVDTLAQTTRIEMDLRLEAAAISEMAENIQHDTGFRVPKIDWERTGRNVLTMEWIDGIRISEISALKEAGFDLQALAITLIQSFLRHTLRDGFFHADMHPGNLFVDPQGCIVAVDLGITGRLGKKEKHFLAEILYGFITRDYHRVARAHFEAGYVPPHHNIESFAQANRAIGEPIHGQSAQSISMAKLLTLLFEVTELFDMQTRPELLLLQKTMVVVEGVARNLDPNFNMWKASEPVVKEWISKNLGPVGIAKDFSEGAQALFSLVRNTPQLIQNFQRMEEDLNQMIKTGFNLSPTTLKKLAVEQSRSNRYGRYSLFIIALCCICLTFYLFHFF

SEQ ID NO: 19537 - protein, 266 aa, Alkaliphilus metalliredigenes QYMF
MISRITNKLQALKEYDEKALITYVTAGDPDLETTFDLVLAMEKAGADIIELGIPYSDPLADGPVIQRASQRALNAGANMEAIFELVIKLREKTQIPLVFLVYYNCVFKYGLETFLNRCQEIGIDGLIIPDLPLEERRELQVMMQQYPMDLIPLVAPTSEDRMKEIVQDAEGFIYCVSSTGVTGKRNSLAGNLEGFMQQLRTYTEIPLVIGFGISNSEMMDKLKNICDGFIIGSAVIEKIEAGLEDRSSVERVSKFIEKLYEFKNLG

SEQ ID NO: 19538 - protein, 147 aa, Lactococcus lactis subsp. lactis Il1403
MNGETVSMSDFKGKVVIVVNTASKCGFTPQFEGLEKLYENYKDQGLEILGFPCNQFVNQDAGENSEINEFCQLNYGVTFPMFQKIKVNGKEAHPLYQFLKKEAKGALSGTIKWNFTKFLIDREGNVIERFAPKTEPKEMEEEIQKLL

SEQ ID NO: 19539 - protein, 222 aa, Burkholderia sp. 383
MNQDHWNQVDAYFSATLVPSDDVLDAALAASDAAGLPAINVAPNQGKLLQLLATIRGARRILEVGTLGGYSTIWLARALPPGGTLVTLELNPAHAKVATQNIARAGFAEVVTVVVGSAKDSLARLIDTGEAPFDFIFIDADKDNNPVYLDAALKLSRPGTVIVVDNVVRGGRVADPDNREPDVVGVRDGFARLVAAPNLTTTAVQTVGQKGWDGFSISIVGA

SEQ ID NO: 19540 - protein, 201 aa, Saccharomyces cerevisiae
MSSEDKKPVVDKKEEAAPKPPSSAVFSMFGGKKAEKPETKKDEEDTKEETKKEGDDAPESPDIHFEPVVHLEKVDVKTMEEDEEVLYKVRAKLFRFDADAKEWKERGTGDCKFLKNKKTNKVRILMRRDKTLKICANHIIAPEYTLKPNVGSDRSWVYACTADIAEGEAEAFTFAIRFGSKENADKFKEEFEKAQEINKKA

SEQ ID NO: 19541 - protein, 165 aa, Campylobacter jejuni subsp. jejuni NCTC 11168
MKNIVLGGGCFWCVEAVFERLKGVINTEVGYSGGKPNPSYESVCNGDGNIEVVKINYDEKQISLLEILTLFFKIHDPTSIDKQGGDIGIQYRSIIFYENEEDKILAQNFIEEQQKIFSKKIVTKISRLQTYYKAENYHQHYFINNPDQGYCQAVIAPKLQKIQSD

SEQ ID NO: 19542 - protein, 333 aa, Frankia sp. EAN1pec
MVGTHLVMGASGFLGSHVTRQLAERGDDVRVWIRRSSSTRAFDDLPVQRCYGELVDDAAIREAMHGVDTVYYCIVDTRAWLRDPAPLFATNVDGLRHALDAALEAQVRRFVFCSTVGTIGLSPDGRPADESVPHTWEHLGGPYIQTRVAAENLVLRYCREHGLPGIVMCVSTTYGAPDHGSPHGRMVSDAAKGRLPFYFGNAAMEVVGISDAARAFLLAAEKGRVGERYIISERYMTWKELVTTAADAGGAKPPRVGIPLPVMKAVGRLGDVAGRVLRRDVVMNSVSTRLMHFMPPLDHSKATRELGWDPSPTPDAVRAAAKFYLEQQHQTGR

SEQ ID NO: 19543 - protein, 529 aa, Pleurotus ostreatus
MFPGARILATLTLALHLLHGTHAAIGPTGDMYIVNEDVSPDGFTRSAVVARSDPTTNGTSETLTGVLVQGNKGDNFQLNVLNQLSDTTMLKTTSIHWHGFFQSGSTWADGPAFVNQCPIASGNSFLYDFNVPDQAGTFWYHSHLSTQYCDGLRGPFIVYDPSDPHLSLYDVDNADTIITLEDWYHVVAPQNAVLPTADSTLINGKGRFAGGPTSALAVINVESNKRYRFRLISMSCDPNFTFSIDGHSLQVIEADAVNIVPIVVDSIQIFAGQRYSFVLNANQTVDNYWIRADPNLGSTGFDGDINSAILRYAGATEDDPTTTSSTSTPLEETNLVPPENPGAPGPAVPGGADININLAMAFDVTNFELTINGSPFKAPTAPVLLQILSGATTAASLLPSGSIYSLEASKVVEISIPALAVGGPHPFHLHGHTFDVIRSAGSTTYNFDTPARRDVVNTGTDANDNVTIRFVTDNPGPWFLHCHIDWHLEIGLAVVFAEDVTSITAPPAAWDDLCPIYDALSDSDKGGIA

SEQ ID NO: 19544 - protein, 329 aa, Pseudomonas sp. ATCC19151
MICNERMVIYRGAGQRVAALEDFCPHRGAPLSLGSIQDGKLVCGYHGLVMDCDGRTASMPAQRVQAFPCIRAFPAQERHGFIWVWPGDAALADPALIPHLEWAENPAWAYGGGLYHIACDYRLMIDNLMDLTHETYVHASSIGQKEIDEAPVSTRVEGDRLITGRFMEGILAPPFWRAALRGNGLADDVPVDRWQICRFTPPSHVLIEVGVAHAGRGGYDAPADCKASSIVVDFITPETDTSIWYFWGMARSFRPEDNELTARIREGQGTIFAEDLEMLEQQQRNLLAWPERPLLKLNIDAGGVQSRRIIERLVSAERAAEAQLIGRQA

SEQ ID NO: 19545 - protein, 426 aa, Candida albicans SC5314
MNKGTLLELGLLPIITSAFIWQIAAGLRLINVNFKLRIDRELFQTGQKLTSFIFSLIFAIGLIYSGYYDNAIRGYNPLQDGIPYGSYALILLQITAWSWIVTLLVEIFDKGYSFGSGILCFLAIQSSTNFIANLLGLENFPVVNSNKFESYGALMNLIKNFSIFNPKQTVYQIWHSFFRIQLPNLTQFYISLASILIVVALQNFRIELPIRSTKVRGMNNVFPIRLLYTGGLPVLFAFTVVANIQVVGYLIHSVLSKLGTSPIVISIIGNYVYNPSSNELDLNSGILNYFTSSSSLVESIISPIKTTVYSITIIVLAVWFANKWSYISGSSPKDISKQFKDQGISLAGKRDISITKELSRVIPVASVSGAFILSVVALIGDFFGGLGYGVASIIGVTASFAVLEEFMTEYQQNGGGQFSNALASFQ

SEQ ID NO: 19546 - protein, 340 aa, Prosthecochloris aestuarii DSM 271
MDSQTLSSVAKAIVAPGKGVLAADESTPTIRKRFDSIQVESTEENRQQYREILFTAQNIERSIGGVILFDETLRQSAKDGTPFPTLLSKRGIVPGIKVDKGAKALALYAGEKITEGLDGLRERLLEYKELGAQFAKWRAVIGIDERDIPSPFGIRANAHALARYAALCQELDIVPIVEPEVLMDGSHDIERCEVVTSQVLEAVFAELDAHHVLFEGMLLKPNMVIAGMQCSRQAGVEEVAEATMRCMTRYVPAAVPGIVFLSGGQSAEKATAHLNAMNATGPYPWEVSFSYGRALQAPVLAAWKGEENNAFAAQHALSKRCRLNGLARDGAYAQEMEQEA

SEQ ID NO: 19547 - protein, 163 aa, Chlamydomonas sp. W80
MASPFYALAATDIAGKEFPFAQLQGKVVLVVNVASQCGFTPQYKGLQELYDKYKDEGLVIIGFPCDQFGHQEPGQESEIASFCQKNFGVTFPMMAKIEVNGDNTHPVYQFLKSEKKQLFMERIKWNFEKFLINKQGEVVERFSSAGDPMRNIAPAVAKLLAEA

SEQ ID NO: 19548 - protein, 242 aa, Nostoc sp. PCC 7120
MESHKEKILVVDDEASIRRILETRLSMIGYDVVTAGDGEEALDTFRKSDPDLVVLDVMMPKLDGYGVCQELRKESDVPIIMLTALGDVADRITGLELGADDYVVKPFSPKELEARIRSVLRRVDKTGASGIPSSGVIHVGNIKIDTNKRQVYKGDERIRLTGMEFSLLELLVSRSGEAFSRSEILQEVWGYTPERHVDTRVVDVHISRLRAKLEDDPSNPELILTARGTGYLFQRIIEPGEE

SEQ ID NO: 19549 - protein, 354 aa, Thermosynechococcus elongatus BP-1
MVAIAPNPHSGQSVKTIRENLLTPRFYTTDFEQAAKLDLSRQQEQLEAMLAEMRADYNRHHFVRDDSFKGTWDLLDAQTRKAFIDYLERSCVSEFSGFLLFKELSRKLKDRNPLLAEIFHLMARDEARHAGFLNKAMMDFGHAMDLGYLSKTRTYTFFPLPWVLYTVYLSEKIGYWRYIIIYRHLEKHPEHSFYPLFNYFERWCQDENRHGDIFKALIHSQPQLIQGWGAKLWMRFFLLTVFATHTLTVHERAKFYEALGLDATAFDREVIAKTNETAARTFSVVLNVDHPEFYSRLQRCVEISNKLQAIEATHQPKWLKALRKLPHQLAIAGHLLRIYLLPPVNAQQEWGTVH

SEQ ID NO: 19550 - protein, 123 aa, Symphoricarpos orbiculatus
VMSAKPVIKEALQAEVGLPIDRDIPVIGFIGRLEEQKGSDILVEAISQFIGDKVQIIVLGTGKKVMEKQLEQLEVDYPDKARGVAKFNVPLAHMIIAGADFILVPSRFEPCGLIQLHGMRYGT

SEQ ID NO: 19551 - protein, 104 aa, Corynebacterium efficiens YS-314
MEGFIVANVNIKPLEDKILVQINEAETTTASGLVIPDSAKEKPQEATVIAVGPGRFDEKGERIPLDIKEDDVVIFSRYGGTEIKFDGVEYLLLSARDILAIVEK

SEQ ID NO: 19552 - protein, 407 aa, Methylobacillus flagellatus KT
MRRVVVTGMGIISSLGNNKSEVLDSLKAGRSGIRFQQEYVDQGLRSHVAGSIENLDLEALIDRKLMRFMGKGHAYAWLAMQEAIADAGLPPQLVSNIRTGLIVGQGGASHESILSGVDTLRAKGVRRVGPYMVTKAMASGVSACLATGAEIKGINYGISSACATSAHCIGAAVEQIQLGKQDIVFAGGGEEEHWTLSFMFDAMGALSSKYNATPEKASRTYDVDRDGFVISGGGGILVVEEYEHAKARGAKIYAEIVGYGATSDGYDMVAPSGEGAERCMRLALQGVEGPVDYINTHGTSTPVGDVKELEAIRAVFGDSGVAIASTKSLSGHALGAAGVNEAIYTLLMMEHQFIAASANIDNLDPAAEGLNIVRERIDNANIQTAVSNSFGFGGTNATLTFSRRQLA

SEQ ID NO: 19553 - protein, 537 aa, Corynebacterium efficiens YS-314
MAKLIAFDQDAREGILRGVDALANTVKVTLGPRGRNVVLDKAFGGPLVTNDGVTIARDIDVEDPFENLGAQLVKSVAVKTNDIAGDGTTTATLLAQALIAEGLRNVAAGANPIELNKGIEAATQKTLDELRARATPISAPQEVASVATVSSRDEVVGKIVAEAMEKVGKDGVVTVEESQSLETTLDITEGISFDKGYLSPYFINDTDTQTAVLENPAILLVRNKISSLPDFLPLLEKIVESNRPVLIIAEDIEGEPLQTLVVNSIRKTIKAVAVKSPYFGDRRKAFMDDLAVVTNATVVDPEVGINLSEAGVEVLGTARRVTVSKDETILVDGAGDAEAVEARRQQIRREIETTDSTWDREKAEERLAKLSGGVAVIRVGAATETEVNERKLRVEDAINAARAAAQEGIIAGGGSALVQIAETLKAYAEEFEGDQKVGIRALAAALSKPAYWIAANAGLDGAVIVARIADLPNNEGFNAATLEYGNLVDQGVIDPVKVTHSAVVNASSVARMVLTTEASIVDKPAEETADHGHGHHH

SEQ ID NO: 19554 - protein, 280 aa, Rhodopseudomonas palustris CGA009
MGRLDGKVAVITGATSGIGWRTAEVFVAEGARIVVAGRRMAEGEALAAQLGSSCVFKQTDVTDEAQVKALIDTALDTFGRLDCLFNNAGGPAQTGGIEGLEVDRFDAAMATLVRSVMLGMKHAAPAMKKQGAGSIINNGSIAGRLAGFSSSLVYGAAKAAVNHLTKCVAMELGESGIRVNSISPGAIATGIFGKALGLTTDAAEKTAATMREIYKTAQPIPRAGIPDDIAQAAVFLASDESTFINGHDLVVDGGITGGRNWTAQQQGYVALRKAFDHGEG

SEQ ID NO: 19555 - protein, 459 aa, Rhodopseudomonas palustris CGA009
MSIQVADSSLVARLSPPKPSALAHVPGDEGWPIIGRTLAVLADPKGEVEKMARTYGPVYRSRVLGETSITLLGPEANELVLFDNTKLFSSTHGWGPILGRLFPRGLMMLDFDEHRLHRRTLSVAFKAGPMQSYLAELNAGIAHRVAEWRARPGEMLCYPAMKQLTLDLAATSFLGTAIGAETEEVNRAFIDMVAASVAPIRKPWPGTAMARGVKGRQRIVAYFAEQIPIRRAKGGDDLFSQLCRATHDDGALLSNQAIIDHMSFLMMAAHDTLTSSLTSFVAALAAHPEWQQKLREEIAGLGLKPGEPISFEQLDALPLTEMAFKEAMRLRPPVPSLPRRATRAFSFKGYTIPAGTMVAVNPLFTHHMPEIWPNPDQFDPLRFTDEASRGRHRFAWIPYGGGAHMCLGLNFAYMQAKCFAVHLLQHLDLSLPPNYQASWQMWPIPKPKDGLRVNVAPLN

SEQ ID NO: 19556 - protein, 477 aa, Methylobacillus flagellatus KT
MKRYEKLVHDIATAIRSGVLAPGEKLPSVRQACLNHKLSPATVFRAYYELENLGLIRAQPKSGYYVSNHAIKQLASKTTPVPEQASTVVSISDMVFSILSSIKDPETVPLGSAFPWPDLFPLARLSRSLAHATRDMGPAAIVESLPPGNHDLRRQIARRYLMQGVEADVDNILITNGAFEALNLCLEAVTQPGDLVAIESPTFHGCLQALERLQLKAVEIPVDPVLGMDLDYLESVLEKCPVRACWSMTSFQNPMGVSMPAERKQVLVELLTRYRIPLIEDDVYGELYFGMQEHRPAKAYDSEGYVMHCSSFSKTLAPGYRIGWALLPKRFERKVERLKVITSLSTSTIAQAAIADFLQHGGYDRHLRRLRTKFELQQHQYLHLIARYFPAETQVTRPHGGYFLWVDLPERVDALVLFQRALEQGVSVAPGPIFSARHQCCNCIRINYSKPVDAEVEQAFKTLGRLMSSIEAAAPGH

SEQ ID NO: 19557 - protein, 441 aa, Mesorhizobium sp. BNC1
MLERPKRPNDLSAFWMPFTANRQFKQAPRMLVSAKDMHYTTDDGRKLLDGTAGLWCVNAGHCRPKITEAIRHQAGELDYAPAFQMGHPIVFEFASRLVDIAPEGMDHVFFTNSGSESVETALKIALAYHRAKGDGSRTRLIGRERGYHGVNFGGISVGGIVNNRKMFGTLLAGVDHLPHTYLPGKNAFSRGVPEHGVELADELERIVALHDASTIAAVIVEPVAGSAGVILPPKGYLKRLREICDKHGILLIFDEVITGFGRLGTPFAADYFGVVPDIMTTAKGITNGVIPMGAVFVKKEIHDAFMNGPEHMIEFFHGYTYSGNPIACAAGLATLETYREEGLLTRGEELGQHWEDALHSLKGEPHVIDIRNIGLVGAIEMEPIQGQPTKRAFSAFLKGFEKGLLIRTTGDIIALSPPLIITKGQIDEIVDHVREILRSID

SEQ ID NO: 19558 - protein, 578 aa, Staphylococcus epidermidis RP62A
MIKRYLKFVKPYRYRIIATIIVGIIKFGIPMLIPLLIKYAIDGVINNHSLTNQEKFSHLGVAIGIALFIFLIVRPPIEFIRQYLAQWTSNKILYDIRKQLYNHLQALSVRFYANNQVGQVISRVINDVEQTKDFILTGLMNIWLDCITIIIALSIMFFLDVKLTFAAIFIFPFYILTVYFFFGRLRKLTRVRSQALAEVQGFLHERVQGMSVIKSFAIEDNEAKNFDNHNKNFLQRAFQHTRWNAYSFAAINTVTDLGPIIVIGVGSYLAITGSITVGTLAAFVGYLEQLFGPLRRLVSSFTTLTQSFASMDRVFQLMDEDYDIKNGIGAQPIKISKGQIDLKHVSFKYNENEKEVLHDINLTINKGETVAFVGMSGGGKSTLINLIPRFYDVTQGEILIDHHNVKDFLTGSLRNQIGLVQQDNILFSDTVKENILLGRPDATDDEVVEAAKMANAHDFISNLPNGYDTEVGERGVKLSGGQKQRLSIARIFLNNPPVLILDEATSALDLESEAIIQEALDVLSKDRTTLIVAHRLSTITHADRIVVMENGRIVETGTHQQLINKRGAYEHLYSIQNL

SEQ ID NO: 19559 - protein, 395 aa, Rhodopseudomonas palustris CGA009
MAVSAGREFLAIPGPTTTPDEVLQAMHRPALDIYSNEMVALSEGLHTDLSRLFATKGKSYIYIANGHGAWEAVISNVLSRGDKVLVLESGRFAVGWGNAARAMGCDVEVLQGDWRRAVRVDEVEARLRRDTEHSIKAIVVVQVDTASSARNDLEAIGRAIRTAGHPALFMVDAVASLGCMPFEMDAWGIDVAMSASQKGLMSPPGLSFVAVGDRARAAHQRAGLRTPYWDWTERDGPEHYQKYAGTAPVHLLFALRKALDILFAEGLDNTFRRHHLLAGAVRRAVDVWSEGNMLGFNIEHPDERADTVTTVRAAEGHDIAALHRYCKDKCGVVLGVGIGELQNKAFRIAHMGHVNAPMVLGTLGVIEMALSALGIPHSRGGVDAAVAYLAENVPA

SEQ ID NO: 19560 - protein, 588 aa, Bartonella henselae str. Houston-1
MVKKQISTFDKHLIIRLLRENFHKHARWYSAAIFSMIIISCTTAASAWIMRDVVNYIIDAQNFGMIIVISIIIAFIFILKGIATFAQTYFLNKAGNSIVAEQQRKIYARMMEQSVSFYHNNTSSDLLVRVTHNATAVRNIIDIIITTFVRDLLSVSGLLLVMFIQNFTLITLTLIVGPLAFLGVRMALKRVRRLVEKELLSLGEIIKIVQESTIGIRVIKAFSLEELMRKRMNKAICNVEKQANNIATLQAITNPIMETLTGVAIAGIICFSGYLATQRAGVQGEFMSFIVALLLAYEPAKRLANVRVKIESGLVNIRTMFEVLDHPLTVIEHEKAKDLHKTQGAIRFEDVSFAYTDNQMVLKDVNLEIEPGKMTALVGPSGSGKSTFINLIMRLYDPTKGRILINNQDIRYTTFRSLRNLMTYVGQDTFLFQGTVKYNIGLGKEGASDDDIIKAAKTANAHDFIMDLPNGYDTQVGDNGCNLSGGQKQRLAIARAMLHDSEILILDEATSALDSHTEAQISESLYHLTKGRTTIIIAHRLSTIARAHKIVVIKNGELIEQGTQKELLAKEHSFYKKLHNIQFKKQKS

SEQ ID NO: 19561 - protein, 569 aa, Silicibacter pomeroyi DSS-3
MTMLSNLAPIPELYVSYDSAQKLKMEAAELKSHDLSPRQICDLELLMNGGFSPLKGFLSEADYNNVVDNMRLADGTLWPMPITLDVKEGFADTIELGQDIALRDQEGVILATMTVTDKWVPNKAHEAEKVFGADDQAHPAVNYLHNVAGKVYLGGPVTGIQQPVHYDFRARRDTPNELRAYFRKVGWRRIVAFQTRNPLHRAHQELTFRAAREAQANLLIHPVVGMTKPGDVDHFTRVRCYEAVLDKYPAATTSMSLLNLAMRMAGPREAVWHGLIRKNHGCTHFIVGRDHAGPGKNSQGQDFYGPYDAQELFKKHQDEIGLEMVDFKHMVYVQEKAQYYPVSEVPEGDTVLDISGTELRRRLREGLEIPEWFSFPEVVKELRRTSPPRSKQGFTVFFTGFSGSGKSTIANALMVKLMEMGGRPVTLLDGDIVRKNLSSELGFSKEHRDLNIRRIGYVASEITKNGGIAICAPIAPYATTRRAVREEIEQFGAFVEVHVATTIEECERRDRKGLYKLAREGKIKEFTGISDPYDVPEAPELRVETENVEVDNCAHQVLLKLENMGLIAG

SEQ ID NO: 19562 - protein, 595 aa, Auricularia auricula-judae
MAPAQRSKHAHTIVILLVAGVALLALVLGLGLGLGLRNRNKDASAASGATSNLSSQLTAQNGSHAFFIRGAAAMAKDPPQTREYNFTISNVRGAPAGVEKDMVVVNNIWPGPTIEVNQHDRVVIRVMNRAQNATAIHWHGLYQRGTPFYDGTHGITQCGIPPGQDLVYNFTLGDFSGTTWWHSHYMTQYTDGVTGAFIVHPTNATVSAPTYDTDSLIQVGDMYHTISDKLLAAFTSPSGIDGTPGDEPVPDTGTINGMGQYGVNGSQVGTCYKLTLAPNATHRLRIINSGSFADVRFSVDGHPLTVVETDGVEVAPYVVEAVQVSVAQRYSVLLTTNNTAGVYWMRAVVQEDMFTYDQPGFNGNALGVLQYTGVDNSTMPDPGLVDNNPGTGKNLTLMDTALLRPASKQHPPKATLTYKITVSFQVTADNGFFAFINSTSWTPLSGSPTLFSHLGADTVGANTFDNSQLILTSPNSEVIDLIIDNLDDGDHPFHLHGYKFWIMGTGDGRYQGQDVDDVVNPLLRDTHLIPSFTWTVLRFVANNPGAWAFHCHISWHMAIGLLVQFYTMPTEAAGLLLPQDMVDQCSTEGASARVR

SEQ ID NO: 19563 - protein, 182 aa, Chaetosphaeridium globosum
MFTGVQNYTQEVIKAAKYIGQGFTITLDHMNRLPVTIQYPYEKLIPSERFRGRIHFEFDKCIACEVCVRVCPINLPVVDWEFQKSIKKKQLKSYSIDFGVCIFCGNCVEYCPTNCLSMTEEYELSVYDRHELNYDHIALGRLPISSIKDPMVYGVNGLSYLEKNIIQDNTNKDTVTGPYNKE

SEQ ID NO: 19564 - protein, 521 aa, Ganoderma lucidum
  misc_feature (12)..(12): Xaa can be any naturally occurring amino acid
  unsure (1)..(521): unsure at all Xaa locations
MARLQSFVPDLXLLFAASAYAAIGPVANLTISDADIAPDGFTRAAVVVNGVSPGPLITGNKGDNFQINVINQMTNHTMNKTTSIHWHGLFQEGTNWADGPAFVTQCPIVSGNSFLYNFHVPDQAGTFWYHSHLSTQYCDGLRGPLVVYDPHDPLAHMYDVDDDSTVITLTEWYWTASHLGTRFPAGLANSRDNGLGRTTATSNAELAVVNVTQGKRYRFRLVSMACDPSFNFSIDGHDLTVIEADGVETQPVTVNSINIFAAQRYSFVLTANQTIDNYWIRANPSLGVMGFDAGINSAILRYDGAAPVEPVTSPQSTQILLNETDRPPSLRPEEDAWKPEKGGVDLPLNMAFGFDGTDFFINNATFVPPTVPVLLQILSGTQAAQDLLPAGSVYTLPKNASIEITFPANANAAGSPHPFHLHGHTFAVIRSAGSTAYNYDNPVWRDTVSTGFATNNDNVTIRFQTDNAGPWFLHCHIDFHLNAGFAVVLAEDVPDIARANPVPQAWKNLCPTYDALSPNDQ

SEQ ID NO: 19565 - protein, 152 aa, Saccharomyces cerevisiae
MQIFVKTLTGKTITLEVESSDTIDNVKSKIQDKEGIPPDQQRLIFAGKQLEDGRTLSDYNIQKESTLHLVLRLRGGGKKRKKKVYTTPKKIKHKHKKVKLAVLSYYKVDAEGKVTKLRRECSNPTCGAGVFLANHKDRLYCGKCHSVYKVNA

SEQ ID NO: 19566 - protein, 167 aa, Legionella pneumophila subsp. pneumophila str. Philadelphia 1
MTKLISVVFYLFIIPNVMAYTPQFNKSEQLKKLTPLQYQVTQNGATEKSFDNAYWNNKEEGIYVDIVSGEPLFSSNDKYDSGTGWPSFTKPIDTSYLVFHTDRSYFFIVRTEVRSKYANSHLGHVFKDGPEPTGLRYCMNSAALKFIPKKEMEQAGYGEYLYLFNKK

SEQ ID NO: 19567 - protein, 367 aa, Streptomyces coelicolor A3(2)
MDPVRLALTRSLVGALGLDREVEVVAARPAGESTLRLVHREDYIDAVRAASADPRSADGSYGLGTVDDPAFAGMHEVSALIAGQSVGAAEAVWRGDALHAVNFAGGLHHAMPGAASGFCVYNDAALAIARLLELGAERVAYVDVDVHHGDGVQAAFWEDPRVLTVSLHEHPATLFPQTGWPEETGADCAEGSAVNVALPAGTGDAGWLRAFHAVVPEVLADFRPQVLVTQHGADTHFEDPLAHLAVSLDAQRAVQVACHELAHEYAGGRWVALGGGGYAVVEVVPRSWAHLVGVAAGRPVEPETVIPEGWRQEVYARTRQLGPMRMTDGRWPVSYASWEAGYDPADRLDQAVRAARRAVFPLRGLLA

SEQ ID NO: 19568 - protein, 302 aa, Bradyrhizobium japonicum USDA 110
MGRVYVAGSINMDVVATADRHPKVGETVAGKQVLYFPGGKGANQAVAASRLGARTTLIGRLGKDSFGTELRAFLAGQGIDLGYVQETAEAHTGTAIITVAAADNTIVVIPGSNALVGADDVSVVPLVKGDVAISQFEIPLPTIAAFFLRARAAEATTLLNPAPAQKFGHELLELVDILVLNETELGFLAGTELSDNDEAARIIQVARQLQAREDQTICVTLGKRGVLALAGDQEFAVPGRVVKAVDTTGAGDCFVGALAAQLADEVPLRTALAFANAAASISVQRMGAGPSMPTAAEVAAVL

SEQ ID NO: 19569 - protein, 383 aa, Staphylococcus aureus subsp. aureus Mu50
MNELEFVTKHRRHLHQHPELSLHEFETTAYIKAFLDSLNIKYDCPLETGVIAYLEGNGSHTIAYRADIDALPILEENDVPYRSQSDHVMHACGHDGHTTALMLFVQRCKDMQDAGQLPQNVVFIFQPAEETGGGANRLIKAGAFDKYPIEAVFGIHVNPFADEGIAVIRDEEITASATEYRFFLTGLSSHVADKEQAHSCGEALQHVLTQISQIQQFHLNGLKRNIVHIGHFKAGEAINTVPSNGYLEGTIRTYDIDDLTIVKNQMHKIAESVKLLFNVECEVKFAEGYPPTINSPKLRTQIEDALIKADLNVYDKPTPFLFGEDFSFYGQQLAPAYFVFIGTRNEDKGFVTGLHTSHLNFDEKALINVVNFYENLLNNYKEV

SEQ ID NO: 19570 - protein, 102 aa, Streptomyces albus
VTTASSKVAIKPLEDRIVVQPLDAEQTTASGLVIPDTAKEKPQEGVVLAVGPGRFENGERLPLDVKTGDVVLYSKYGGTEVKYNGEEYLVLSARDVLAIIEK

SEQ ID NO: 19571 - protein, 224 aa, Zea mays
HSIIDNNVACESPQQQRVGHLDPFSLDLWWDPFDMFRSIVPSAASSGGGSETAAFANARVDWKETPEAHVFKADLPGVKKEEVKVEVEDGNVLVISGKRSREEEEEDKNGKWHRVERSSGQFMRRFRLPENAKLDEVKAGLENGVLTVTVPKTEVKKPEVKAIEISGWPSVGRRLELRCTATGPWMSCMLHCSGGCSLRLLRIICSVCVVFVFPVYGLCIVPYR

SEQ ID NO: 19572 - protein, 267 aa, Shigella flexneri 2a str. 301
MAIPAFGLGTFRLKDDVVISSVKTALELGYRAIDTAQIYDNEAAVGQAIAESGVPRHELYITTKIWIENLSKDKLIPSLKESLQKLRTDYVDLTLIHWPSPNDEVSVEEFMQALLEAKKQGLTREIGISNFTIPLMEKAIAAVGAENIATNQIELSPYLQNRKVVAWAKQHGIHITSYMTLAYGKALKDEVIARIAAKHNAIPAQVILAWAMGEGYSVIPSSTKRKNLESNLKAQNLQLDAEDKKAIAALDCNDRLVSPEGLAPEWD

SEQ ID NO: 19573 - protein, 192 aa, Glycine max; identical to SEQ ID NO: 1151

SEQ ID NO: 19574 - protein, 400 aa, Zea mays
MEAPPGPGPMELDAPPPAAAAAIPPAGSDKHKVDGEGGDAVTGHIISTTIGGKNGEPKRTISYMAERVVGTGSFGIVFQAKCLETGETFAIKKVLQDRRYKNRELQLMRAMEHPNVICLKHCFFSTTSRDELFLNLVMEFVPETLYRVLKHYSNANQRMPLIYVKLYMYQLFRGLAYIHNVPGVCHRDVKPQNVLVDPLTHQVKLCDFGSAKVLIPGEPNISYICSRYYRAPELIFGATEYTSSIDIWSAGCVLAELLLGQPLFPGESAVDQLVEIIKVLGTPTREEIRCMNPNYTEFRFPQIKAHPWHKIFHKRMPPEAIDLASRLLQYSPSLRCSALDACAHPFFDELRTPNARLPNGRPFPPLFNFKHELANASPDLVSRLVPEHIRRQIGVNFGSS

SEQ ID NO: 19575 - protein, 403 aa, Oryza sativa
MHASRMEQTTGVSGHEHIIDIPRDSGPSTSTSHSVARENHGEPNPVDRSATRALVPALQAPSAVGAPSAGHTSGARRSDNYVRRHRSPLNSGLWISIEVLVNVSQIVAAIVVLSLSRKEHPQAPLFEWVIGYTVGCFATLPHLYWRYIHRNIVNGENEPAHTLQGSSQNNSTEPSASASERRRNAARNAVLANPRINALFDHFKMALDCFFAVWFVVGNVWIFGGRSSAADAPNLYRLCIVFLTFSCIGYAMPFILCAMICCCLPCIISVMGFREDTNNTRGATSESINSLPTYKFKTKKRRHSSGNEAEGQDGGIVAAGTDKERSLSAEDAVCCICLAKYAHNDELRELPCTHCFHKECVDKWLKINALCPLCKSEIASSSGTSDTRRSDHTDIPVQEIEMH

SEQ ID NO: 19576 - protein, 580 aa, ASPERGILLUS NIDULANS FGSC A4
METTTTTLAEYLFKRLHQLGVDSIFGLPGDYNLQLLDYVAPSRLHWIGSCNELNAGYAADAYSRVKGIGALVTTFGVGELSAVNAIAGAYAERAPVVHVVGTPVRESQESRALIHHTFNDGEYKRFDRMQEHITVAQAILTDHRSAPAEIDRVLQQCLLHSRPVRIAIPLDMVSLRVPKMALEHKICVPLPCRQPQLEDKALKAILDRMYSAKKPVILVDGEVRSAKIMEEVEHIVKSTEWPTFTSGFGKSLVDETLPNVYGVFTPRYKDFIDSSDLVLCFGPHFSNTNSYLYQTVPQQHKTIFFHPTSVQIDSEIIRDLPANHFLPQLIGHLEVAKLNRYTCNFDHPSSVAPPDVQASDLVTQAGGFWHRMSSFFQEGDIILAETGTASYGANEFRLPPKTRLFKAVTWLSIGYMLPATLGASLAQHDLIARSEYHDFLEARSILFIGDGSFQLTAQELATIIHRKLNVIIFLINNDGYTIERAIHGRNQGYNNITPWRYLKGLEFFGAPTEGEYAAHTWQVRTWGDLEKVLTDERMIKGKGVRMVEVFMDRLDVPPPLDRILEMQIERENGVQCDKPQ

SEQ ID NO: 19577 - protein, 582 aa, Thermoproteus tenax
MEILRHDLLIIGSGIAGLRAALQAAYVGGNLDIAIISKVQVMRSHSVSAEGGMSAVLYPDKTGDSLELHAYDTIKGADFLADQDAVELLVQSAPSEVRFLERIGVPWSRLPDGRMYQRAFGGMSIPRTTFAADKTGFFIMSTLYQNILRFSNIKQYHEHFVTKLIIENNEFKGATAIDLKTGELRLFLAKAAIIATGGAGRLYRFTTTAHSTTGEMLGYALRAGLALKDMEFVQWHPTALVPSGILVSEAARGEGGYLVNKEGERFMKRYAPQKMELAPRDIVSRAILTEIAEGRGFVHEESGMGYVGLDLRHLGEDVLNQKIPFIRELAHKYVGIDPLTELIPVRPAVHYTMGGINADTYGRALTADGQWVRGLWVAGEAAAISVHGANRLGSNSLSECSVWGRLTGEAAAKYALEKPSPALDGHYKEVAQSEESRIFDRLLHTETGGISVYELKGRLQDTMEQHFGPFRHESVMKEGIPKLLKIKEDIAKVRIEDRSRVYNQNLKDALELDGMIEVALAIAYGALSRQESRGAHYRLDYPKRDDANWLKHTIAYLDGGQIRLTYAPVRITKWTKLEERKY

SEQ ID NO: 19578 - protein, 199 aa, Oryza sativa (japonica cultivar-group)
MALDCFFAVWFVVGNVWIFGGRSSAADAPNLYRLCIVFLTFSCIGYAMPFILCAMICCCLPCIISVMGFREDTNNTRGATSESINSLPTYKFKTKKRRHSSGNEAEGQDGGIVAAGTDKERSLSAEDAVCCICLAKYAHNDELRELPCTHCFHKECVDKWLKINALCPLCKSEIASSSGTSDTRRSDHTDIPVQEIEMH

SEQ ID NO: 19579 - protein, 489 aa, Spinacia oleracea
EDNHSTVEDDAANYDFDLFVIGAGSGGVRAARFSANLGAKVGICELPFHPISSEVIGGVGGTCVIRGCVPKKILVYGASFGGELEDAKNYGWELNEKIDFNWKKLLQKKTDEIIRLNNIYKRLLSNAGVKLYEGEGKIVGPNEVQVTQLDGTKLSYSAKHILIATGSRAQRPNIPGQELAITSDEALSLEEFPKRVVILGGGYISVEFASIWRGMGADVNLCFRKELPLRGFDDEMRAAVARNLEGRGVNVHPRTTLTELVKTDGGVVARTDHGEEIEADVVLFATGRSPNTKRLNLEALGVELDRTGAVKVDEYSRTSVPSIWAIGDVTNRMNLTPVALMEGTCFAKTVFGGQNSKPDYSNIACAVFSIPPLAVVGLSEEQAIEQASGDILVFTSSFNPMKNTISGRQEKTIMKLVVDAETDKVLGASMCGPDAAEIMQGIAIALKFGATKAQFDSTVGIHPSAAEEFVTMREPSRRVPGAGKPKTNL

SEQ ID NO: 19580 - protein, 171 aa, Solanum demissum
MTCTNYEMAFFPTNFMLQTPHHEDEHQPSTSLNPILPSCSPQDFHGIASFLGKRSMSFSGMDGNNACEENHGEDDLSDDGSQAGEKKRRLNMEQVKTLEKNFELGNKLEPERKMQLARALGLQPRQIAIWFQNRRARWKTKQLEKDYEVLKRQFDAIKAENDALQTQNQKL

SEQ ID NO: 19581 - protein, 143 aa, Narcissus pseudonarcissus
KIEMDLEGKPSLMGYRMPAEWEPHQQCWMGWPERPDNWRENARFGQHAFVEVASAISQFEPVTICVSSAQYTTACHLLQNKPNIRIVEMSMNDSWFRDSGPTFVVLDRESSSGYEVHPVAGIDWIFNSWGGTEEGCYSDWSLD

SEQ ID NO: 19582 - protein, 211 aa, Zea mays
  misc_feature (66)..(66): Xaa can be any naturally occurring amino acid
  misc_feature (132)..(133): Xaa can be any naturally occurring amino acid
  misc_feature (200)..(200): Xaa can be any naturally occurring amino acid
  unsure (1)..(211): unsure at all Xaa locations
MERYEVIKDIGSGNFGVAKLVRDVRTKELFAVKFIERGMKIDENVQREIMNHRSLRHPNIVKFKEXMEYAAGGELFERICNAGRFSEDEARFFFQQLISGVSYCHSMQICHRDLKLENTLLDDSIAPRLKIXXDFGYSKSSVLHSQPKSTVGTPAYIAPEVLARKEYDGKVPDVWSCGVTLYVMLVGAYPFEDPDEPKIXADATRISASIR

SEQ ID NO: 19583 - protein, 254 aa, Glycine max
MEKSRVLIVGGTGYIGKRLVKASLAQGHETFVLHRPEIGVDIEKVQLLLSFKRFLPSEFGTDPARMAHALEPGRVTFDDKMVVRKAIQEAHIPFTYISANCFAGYFLGGLCQPGFIIPPMDSVILFGDGNVKAIYVDEDDIAMYTIKTIDDPRTRNKTVYIRPPENILSQREVVQIWEKLIGKELHKSSISAQQFLSSMEGQPYEQQVGMGHYYHVCFEGCLTNFEIGEEGVEACGLYPQIKYTTVQDFMKRYV

SEQ ID NO: 19584 - protein, 1194 aa, Sporothrix schenckii
MAEEQQMQQILKKIDIEKVFLGKAIEMRKAANSDNADVLSKLDSAVHSARRHLEYYEDMLRQVQVRRLGQGVDNMSLGSGGSNSPAPGSLRPRSTDLRNEAGGAPPTPPPKDSASSWGDTSTLNSQNYAASTYSQHGVQSPSNYSDSPADTAVVKTRPNYTKLDLIKYDTPYMGPRIQHMLSQIQFKLDVEEQYLKGIEKMVQLYQMEGDKKSKADAASKKVESKQKIVLLKQALKRYEELHIDVDSGDTPDDDSVNVPNMRKPLSGNLSIRIMAVKDVDHAPTGRFSRGPDTFVAVKVEDNVAARTRLSRTDRWESEFHSVDVDKANEIELTVYDKPGEYAIPIGMLWVRISDIAEEIRRKRIEAEINSSGWVSADKMSAAPNRVPPAQFPMNPQGQFGAQQNAQGGPLSPQNPHGGGFDGVGAHAAHLSPEPITGWFNLEPTGQIQLNLNFVRQNKDRRPLDLGLGRKGAIRQKKEEVHEMYGHKFVQRQFYNIMRCALCGDFLKGGAGMQCEDCKYTCHIKCYSSVVTKCISKSNAETDPDEEKINHRIPHRFQPFGNYTANWCCHCGYLLPFGKKSCRKCSECGLTAHSGCAHLVPDFCGMSMAVANQILEGIRTQKQRQKQSTNLGDRTLRPGKPNLISQQGGYGSQSAAPSPYGPGVASTQATEAAKVMYANQPPPQRPQHPDRTASASSSAAAAAAAASMAMSGSGAKAGTGPQAQASQDSWRHDPGNYGDSYDPQSVQQQQQSYGNAPQQRKYNPADYINVGQYPATRQQPGQMQHAQQQPVTIQQQQQQQQQIYQQPQPQPLQQQPPQAPVQVKTQQSEPPVSLPPVSSTAVDVTGPGVKKPLPSATDPGTGQRIGLDNFNFLAVLGKGNFGKVMLAETKRSNRLYAIKVLKKEFIIENDEVESIRSEKRVLLVANRERHPFLTNLHACFQTETRVYFVMEYISGGDLMLHIQRGQFGTRRAQFYASEVCLALKYLHENGVIYRDLKLDNILLTLDGHIKIADYGLCKEDMWYGSTTSTFCGTPEFMAPEILLDKKYGRAVDWWAFGVLIYQMLLQQSPFRGEDEDEIYDAILGDEPLYPIHMPRDSVSILQKLLTRDPDQRLGSGPTDAQEIMSQPFFRNINWDDIYHKRVQPPFLPTIKNPTDTSNFDSEFTSVTPVLTPVQSVLSQAMQEEFRGFSYTADFV

SEQ ID NO: 19585 - protein, 290 aa, Coxiella burnetii RSA 493
MSNQTLKRNFAFVDLFELPPKPRHTGQVEIRGPYYEAFTVQQFEALLETWGYYIDGLKFAGGIQALLDAKTVKAFTDLAHKYNVYVNTGGFIERIVIQNPNNVDRYLEETKALGFDVVEVSSGMFERAGDFSLDFQIDVVKRIQKIGLKPKPEITIMSGVGGGVKEISYQEKLKQSKTVDQFIEEGERFFEAGAHTLMIESEGITEGIADPKNWRKDVIFALVEKFGHEKLMFEVSPEDDEARQTFKWYLKEVSRDINLMMNSKNIVEFNAWRLKLCGDKDIWKQERKEG

SEQ ID NO: 19586 - protein, 504 aa, Triticum aestivum
  misc_feature (204)..(204): Xaa can be any naturally occurring amino acid
  misc_feature (219)..(219): Xaa can be any naturally occurring amino acid
  unsure (1)..(504): unsure at all Xaa locations
MSTCAASLAPLLGTAAANATDYLCNQFADTTTAIDSTYLLFSAYLVFAMQLGFAMLCAGSVRAKNTMNIMLTNVLDAAAGALFYYLFGFAFAFGTPSNGFIGKHFFGLRDVPQVGFDYSFFLFQWAFAIAAAGITSGSIAERTQFVAYLIYSAFLTGFVYPVVSHWIWSADGWASASRTSGPLLFNSGVIDFAGSGVVHMVGGXGRALGRAHRGPPHWXRFDHAGRAVALRGHSASLVVLGTFLLWFGWYGFNPGSFLTILKSYGPPGSIHGQWSAVGRAAVTTTLAGSTAALTTLFGKRLQTGHWNVLDVCNGLLGGFAAVTAGCSVVDPWAAIICGFVSAWVLIGLNKLAARFKFDDPLEAAQLHGGCGAWGVIFTALFARREYVEQIYGAPGRPYGLFMGGGGRLLGAHVVLILVIAAWVSCTMGPLFLALNKLGLLRISAEDQMAGMDQTRHGGFAYAYTDEDSSSRPGRGAGGSVGGFMLKSAQTSQVAADATSPSSSV

SEQ ID NO: 19587 - protein, 472 aa, Oryza sativa (japonica cultivar-group)
MEGGRLGGAAASASAAAAADARGGMSGFAAPQHAIHTNLNNVQPTQVTDFGALAQSAGFRIEDLANLSTNGLFNLKSNAHTIINDPLQFENYVKSISPSNITTTATVTVVDPQTLVPQKGAQLNLVTIRTGNVENWGESTIADTSPRTDTSTDPDTDERNQMFEQGQLAAPTASDSSDRSKDKLDHKTLRRLAQNREAARKSRLRKKAYIQNLESSRLKLTQIEQELQRARQQGIFISTSSDQSHSASGNGALAFDMEYARWLEEHNKHINELRAAVNAHAGDNDLKSTVDSIMAHYNEIFKLKGVAAKADVFHVLSGMWKTPAERCFMWLGGFRSSELLKLLAGQLEPLTEQQLAGIANLQQSSQQAEDALSQGMEALQQSLAETLASGSLGPAGSSGNVANYMGQMAMAMGKLGTLENFLRQADNLRLQTLQQMQRILTTRQSARALLAISDYFSRLRALSSLWLARPRE

SEQ ID NO: 19588 - protein, 275 aa, Xylella fastidiosa 9a5c
MNQKMFGELISEAVAMFIIIALGESAAAMYILYDPSPYQNAYWGLCICWGLAVTIAIYVTASVSGTHANPAVTLALALYRGFPWKKVLPYWAAQIIGAFIGAMIVYQLYSPVIDYYNHIHQLTRDAGGAAGVFFTSTGMAITPIHALGDEIILTAFLVFGIFAITERFNEAAPTANSGALVIGFLVATIGACMGYLEGWAINPARDLGPRLFAFLAGWGESAFPGKDHYWWIPILGPLIGGVMGATAFQCLIYPFLPARVQAKQQAAILLNRQHP

SEQ ID NO: 19589 - protein, 457 aa, Yarrowia lipolytica CLIB122
MKFSLVTLTTLCASALAAPTAKKSLKIDFQKQLADSGTTSQDPNQLGGAQGKVPHEVELTNHVVYYLAEVALGTPPQKFQIDIDTGSSDLWVKADGSPGAYSRNSSSTWSHYADNFYIAYGDQTSASGDWATETLGFADAQIPKFIFGEATSATSQPVFGIGYSGIEASIHQPNAFTYDNFPIRLAKEGFVNTPAYSLYLNDFAAKTGSVLFGAVDKSKIDGSLTILPTIKDQTTDSKPKEFLVTLNSIDINVNGTTTNALDKTRHVLLDSGTSLTYLPPQTTRTIAQKFQLLQVSGGWGLTKKQVDALPDTATLDYNLQGAHVGVKVKDLFTLGKNYLNQQLYIEYNGVREPFYQILIADGGDRGPGNDEPVELAKFIFGDSFLRSAYVVYDIGADKIAVSQAKFGSGSAEDLADIQIEDKGGIPAATAASDPVWTQNAPIETSVNYNPQIYRLST

SEQ ID NO: 19590 - protein, 294 aa, Arabidopsis thaliana
MILTDKQISPRPTTTGFLYSGAGDYSQMFDALEDDGSLEDLGGVGHASSTAAEKKRRLGVEQVKALEKNFEIDNKLEPERKVKLAQELGLQPRQVAIWFQNRRARWKTKQLERDYGVLKSNFDALKRNRDSLQRDNDSLLGQIKELKAKLNVEGVKGIEENGALKAVEANQSVMANNEVLELSHRSPSPPPHIPTDAPTSELAFEMFSIFPRTENFRDDPADSSDSSAVLNEEYSPNTVEAAGAVAATTVEMSTMGCFSQFVKMEEHEDLFSGEEACKLFADNEQWYCSDQWNS

SEQ ID NO: 19591 - protein, 349 aa, Alkaliphilus metalliredigenes QYMF
MKMKIRVGIVGCGSIAKFRHAPEYHENPNVEIEGFYDHNVERAEALAKIYGGKVYSDYLDLIQDKTIDAISDCSTNETHHIVTSAALKNNKSVLCEKPMTTTVENANMILETKKNSKGILMIDHNQRLTSAHIRAKAILKSGELGKVITFTTTFGHKGPEYWGADKSKNTWFFNKNRSVLGVTGDLGIHKVDLLRFLLEDEIVEVSAMAGSLNKRNANNDLIDVPDNMVCLLRTEKGNIGTAAFSWSYYGDEDNSTKIYCEKGTMMIYDNPDYQIVINKMGKEKICYELEQIQSNDNQTSTGVIDEFIDAIISNREPVVTGEDGIMALKIVEAAMLAAETNQTIKIDLR

SEQ ID NO: 19592 - protein, 214 aa, Burkholderia sp. 383
MSAASKPASPIRVYSFLLSGHAHRVRLFLSLLGLPSETVDVDLAAGAQREPAFLALNPLGQVPVIDDGGTVIADSNAILVYLAKRYGDAHWLPDDPAGAAVVQRWLSYAAGPIASGPAAARLVTVFGATLDQEAAKRTAAKVLDVIDRELAGKPFAAGAQPTIADIAAYSYIAHAPEGGVSLEPYPHVRAWLARIEALPGFVAMPTTRAGLLAA

SEQ ID NO: 19593 - protein, 372 aa, Zea mays
MEAMDVKYKPVMFPNGAGLKKPKPAAAVALAGEPLYRECLKNHAASLGGHAVDGCGEFMPSPGANPADPTSLKCAACGCHRNFHRRTLEGSPPPPAPAPLALPPPPSVMHGQPHRAREETPEDRHPGVVDADDSDSDSEGSEYDEERSVSPPPPPHHLLPAPVAQQPPPPSYFPTAPHMVLSLGSGVPGPAVAVSPAQRLAPTQLTPSSAPPHAGGAMPMPRKRFRTKFTAEQKQRMQELSERLGWRLQKRDEAIVDEWCRDIGVGKGVFKVWMHNNKHNFLGGHSARRSASSPAPAPAAASLQTPAAGAGSGAAAAPSFNPSRITPPPPVLTSSPTAATGFNINGAASSAPTVATDYTTDNANGASSPHSA

SEQ ID NO: 19594 - protein, 273 aa, Zea mays
  misc_feature (215)..(215): Xaa can be any naturally occurring amino acid
  unsure (1)..(273): unsure at all Xaa locations
MVEMSVVELRTLPLGFRFHPTDEELVTHYLKGKITGRINSESEVIPEIDVCKCEPWDLPDKSLIRSDDPEWFFFAPKDRKYPNGSRSNRATEAGYWKATGKDRIIKSKGDKRKQHTIGMKKTLVFHRGRAPKGERTGWIMHEYRTTEPEFESGEQGGYVLYRLFRKQEEKTERSSPEEGDRSGYSPTPSRFSPDNLEANEEANTPLNKESPESAXLHESPIELPKSGETNGGSMTRWLADRNGNLMANAPDVSHIPFHGHAAGVAKQVDPSVG

SEQ ID NO: 19595 - protein, 419 aa, Pseudomonas chlororaphis
MIEGAQAGRLPVTVLSGFLGAGKTTLLNAILRNRQGLRVAVIVNDMSEVNLDAESVQRDVSLHRGRDELIEMSNGCICCTLRADLLEQISDLARQQRFDYLLIESTGISEPMPVAETFAFLDTEGFSLSELARLDTLVTVVDGSQFQALLESTDTVARADTEAHTSTRHLADLLIEQVEYANVILVNKRDLIDEPGYQAVHAILAGLNPSARIMPMAHGNVALSSLLDTHLFDLPSLAASPGWMRKMEATDTPASESDTYGVTSWVYRERAPFHPQRLLEFLQKPWHNGRLLRSKGYFWLASRHLEIGLLAQSGKQFQWDYVGRWWNFIEPSQWPRDEYRLQGIMAKWDSVVGDCRQELVFIGQGLDTRVLQRELDHCLLSAQEIAAGPLAWQALPAATAFDTEALSARPTPPMAVQPT

SEQ ID NO: 19596 - protein, 420 aa, Solanum demissum
MGNCVGSSARVEATLSSTTPSAYEASRFPDRKSNSSVPSSLSIPSYGRKSSSESLPTPRSESEILFSPNVKSFSFNELKNATRNFRPDSLLGEGGFGCVFKGWIDAQTLTASKPGSGIVIAVKKLKPEGFQGHKEWLTEVNYLGQLRHPNLVKLIGYCIDGDNHLLVYEFMPKGSLENHLFRRGPQPLNWATRIKVAIGAARGLAFLHDAKEQVIYRDFKASNILLDAEFNSKLSDFGLAKAGPTGDRTHVSTQVMGTQGYAAPEYVATGRLTAKSDVYSFGVVLLELLSGRRAVDNAKVGIEQNLVDWAKPYLGDKRKLFRIMDTKLEGQYPQKGAYTAANLAWQCLSNEPKLRPKMSEVLTALEELQSPKGVSKLSHTEHRAIPSPVAVSPMRHHRSPLHMTPSASPLQAYQKSPRGR

SEQ ID NO: 19597 - protein, 141 aa, Rubrivivax gelatinosus PM1
MNEALTQEGQEGGEAATAEAIRVLVIDDSNTIRRSAEIFLKQGGYVVVLAEDGFDALAKVNDHQPHLIFCDILMPRLDGYQTCAIIKRNPKFSGVPVIMLSSKDGLFDKARGRMVGSEDYLTKPFTKDQLLRAVEQHRRVA

SEQ ID NO: 19598 - protein, 148 aa, Hevea brasiliensis
MADPLTDDQISEFKEAFSLFDKDGDGCITTKELGTVMRSLGQNPTEAELQDMINEVDADGNGTIDFPEFLNLMARKMKDTDSEEELKEAFRVFDKDQNGFISAAELRHVMTNLGEKLTDEEVDEMIREADVDGDGQINYEEFVKVMMA

SEQ ID NO: 19599 - protein, 514 aa, Xylella fastidiosa Ann-1
MNSRIHTRCFGLLAITLPLAACGAQHNNSPTPTAHSTPIVTPSTTPAPQLVAGLPDFTQLVDQVGPGVVNIETVITRKKVGKRRGIPLDNDIPEFFRRFFGPDFQMPNQPRGGQDDEGGIAGRGMGSGFIISKDGYILTNHHVITGASEVTIKLTDRREFKAKVIGSDEQYDVALLKIDAKNLPTVRIGDSSSLKPGQWVVAIGSPFGLDHSVTAGIVSALGRSTSDDQRYVPFIQTDVPINQGNSGGPLLNTRGEVIGINSQIFSASGGYMGISFAIPINLAINAAEQIRKTGKVQRSMLGVEIGPIDALKAQGLGLPDSRGALVNNIPPHSPAAKAGIEVGDVIRSVNGKVISSFSDLPPLIGMMPPGTKATLGIIRDGKPREIVVTLSALNQDATASEDEDDTAPSKQETSANVELLGLQVENLSAAERERLASSQNAKGGVRITAVTAPWARNASPPLVEGLVILRIGRTPVSNVAELNRVLGNYKKGDVIMLLVINDRGTFHSALKAGG

SEQ ID NO: 19600 - protein, 225 aa, Triticum aestivum
  misc_feature (38)..(38): Xaa can be any naturally occurring amino acid
  unsure (1)..(225): unsure at all Xaa locations
VTILNKFVQKSRLVPVRNSRDIVDPRVRAMLLWVLDPXGRDTTILNQALNGDITDLTAATEVICSRTPLQLQIMKQTYRARFGCYLEHDITERTYGDHQKLLLAYLGVPRNEGPEVDPSAVTDDARDLYHEKRAGTDERAFIRIFSERTWAHLVSVANAYQHMYARSLEKAVKSETTGNFQFGLLTILRCADTPAKYFAKVLHKAMKGLGTSNAALIRAAVTRTE

SEQ ID NO: 19601 - protein, 317 aa, Silicibacter pomeroyi DSS-3
MKLLIARPMTAAVEARARAEFETEIRTSTTPLSEAEMLRALREFDIVMPTLGDMFSADVFAQVPEPRCRLLANFGVGYNHIAVAAARAAGVAVTNTPGAVTDATADIAMTLLLMTARRAGEGERLVRSGAWEGWHPTQMLGHHVTGKHVGIVGLGRIGQAIARRCHFGFGMQVSYVARSDKDVDFPVSRMESLAALAGAVDFLVIAVPGGGETRHLIDAQILAAMKPSGILVNIARGEVVDEAALIAALSERQIAGAGLDVYEFEPKVPEALRAMEQVTLLPHLGTATEEVRSSMGHMALDNVAAFAAGRDLPNPVS

SEQ ID NO: 19602 - protein, 513 aa, Populus trichocarpa
MDSLLQSLQTLPMSFFLIIISSIFFLGLISRLRRRSPYPPGPKGFPLIGSMHLMDQLTDRGLAKLAKQYGGLFHMRMGYLHMVAGSSPEVARQVLQVQDNMFSNRPANIAISYLTYDRADMAFAHYGPFWRQMRKLCVMKLFSRKRAESWESVRDEVDSMVKTVESNIGKPVNVGELIFTLTMNITYRAAFGAKNEGQDEFIKILQEFSKLFGAFNISDFIPWLGWIDPQGLTARLVKARKALDKFIDHIIDDHIQKRKQNNYSEEAETDMVDDMLTFYSEETKVNESDDLQNAIKLTRDNIKAIIMDVMFGGTETVASAIEWAMAELLKSPEDIKRVQQELADVVGLERRVEESDFDKLTFFKCTLKETLRLHPPIPLLLHETSEDAEVAGYYVPKKTRVMINAYAIGRDKNSWEDPDSFKPSRFLEPGVPDFKGNHFEFIPFGSGRRSCPGMQLGLYALDLAVAHLLHCFTWELPDGMKPSELDMTDMFGLTAPRATRLVAVPRKRVVCPL

SEQ ID NO: 19603 - protein, 758 aa, Xylella fastidiosa 9a5c
MTIVTNLSFPRIGARRELKRALESHWRGETDATQLQHTARELRARHWQLQRDTGVDLPPSNDFSLYDHVLDTAFLFDAIPQRYRALADADPLAGYFAMARGRQADGIDLHALEMTKWFDTNYHYLVPELHRDQHFALRGNKPIAEFEEALALGITTRPVLLGPVSFLLLSKTVDGSNRLDLLERLLPVYTQLLRQLQASGAEWVQIDEPTLVLDLDAQTQQAFRKAYAALNQGPRPKLLLTSYFGPLGDNLELALQLPADGLHIDLVRGTEQLDAVLNTLPAGRVLSAGLVNGRNIWRTALDNALTLARYAQGRIGKDHVWLAPSCSLLHVPVDLEQEKNLDADVRNWLAFAKQKLSELRVLADALDNKPEAETALTQTRQALEARRQSPKVHRPEVAQRLAALTPDTTQRNTAYPQRSQAQQQTLNLPAYPTTTIGSFPQTLEVREARAQFKSGKLSESDYETFLKAETERCIRTQEEIGLDVLVHGEFERNDMVEYFGEQLDGFIFTKLGWVQSYGSRCVKPPIIYGDVVRPAPMTVTWSAYAQSLTDKPMKGMLTGPVTMLQWSFVRDDQERAQTCRQIALALRDEVQDLEKAGIKVIQIDEPAIREGLPLRRGEWADYLNWAVESFRIASSNVRDTTQIHTHMCYSEFNDIIEAVAALDADVISIETSRSRMELLDAFVKFRYPNAIGPGVYDIHSPRVPQEEEMVLLLKKARAVLPPEQLWVNPDCGLKTRGWKETRAALQTMVHAAQRLRAE

SEQ ID NO: 19604 - protein, 192 aa, Triticum aestivum
  misc_feature (106)..(106): Xaa can be any naturally occurring amino acid
  unsure (1)..(192): unsure at all Xaa locations
MSKYGTIPTSSSAAAGAPHLGGASPLDFISRAKARGATALATRRPWRELADVHAVGLPPSLGDAYLRVRANLAHFAMNYAIVVLVVVFLSLLWQPISLIVFLVCMXVGWLRGGEGLRHKPIVLFGRVVGDGVVLAVLAAVTLILLLLTGATSNILTSLLIGFVLVVVHAALHKAEDNVDEEVGRWYAPVPAQ

SEQ ID NO: 19605 - protein, 804 aa, Bacteroides thetaiotaomicron VPI-5482
MKKQRHIQTTRSLLSRFRYWGRKNYAAFASMGREFQIGHLHTNVVDVALRKQNAKVTIPYHTFMTLQEIKDQVLAGFDISSAQATWLANMADSEALYAAAHEITITCASHEFDMCSIINAKSGRCPENCKWCAQSSHYKTQAEIYDLLPAEECLRQAKYNESQDVNRFSLVTSGRKPSPKQISQLCDAARLMRKHSSIQLCASLGLLNEEELRALHTAGITRYHCNLETAPSYFPTLCSTHTQEQKLATLDAARRVGMDICCGGIIGMGETMEQRIEFAFTLAELNVQSIPINLLSPIPGTPLENEKALSEEEILRTIALFRFINPTAFLRFAGGRSQLTPEAMRKALFVGINSAIVGDLLTTLGSKVSDDKKMILEEGYHFADSQFDREHLWHPYTSTTDPLPVYKVKRADGATITLEDGRTLIEGMSSWWCAVHGYNHPVLNQAAKDQLDKMSHVMFGGLTHDPAIELGKLLLPLVPPSMQKIFYADSGSVAVEVALKMAVQYWYAAGKPDKNNFVTIRSGYHGDTWNAMSVCDPVTGMHSLFGSSLPVRYFVPAPSSRFDGEWNPDEIIPLRETIEKHSKELAALILEPIVQGAGGMWFYHPQYLREAEKLCKEHDILLIFDEIATGFGRTGKLFAWEHAGVEPDIMCIGKALTGGYMTLSAVLASNQIADTISNHAPKAFMHGPTFMGNPLACAVACASVRLLLDSGWAENVKRIEAQLKEELAPARKFPQVADVRILGAIGVIQTERSVSMAYMQRRFVEEGIWVRPFGKLVYLMPPFIISPEQLSKLTSGVLKIVREM

SEQ ID NO: 19606 - protein, 713 aa, Bacillus circulans
MKKFLKSTAALALGLSLTFGLFSPAQAAPDTSVSNKQNFSTDVIYQIFTDRFSDGNPANNPTGAAFDGTCTNLRLYCGGDWQGIINKINDGYLTGMGVTAIWISQPVENIYSIINYSGVNNTAYHGYWARDFKKTNPAYGTIADFQNLIAAAHAKNIKVIIDFAPNHTSPASSDQPSFAENGRLYDNGTLLGGYTNDTQNLFHHNGGTDFSTTENGIYKNLYDLADLNHNNSTVDVYLKDAIKMWLDLGIDGIRMDAVKHMPFGWQKSFMAAVNNYKPVFTFGEWFLGVNEVSPENHKFANESGMSLLDFRFAQKVRQVFRDNTDNMYGLKAMLEGSAADYAQVDDQVTFIDNHDMERFHASNANRRKLEQALAFTLTSRGVPAIYYGTEQYMSGGTDPDNRARIPSFSTSTTAYQVIQKLAPLRKCNPAIAYGSTQERWINNDVLIYERKFGSNVAVVAVNRNLNAPASISGLVTSLPQGSYNDVLGGLLNGNTLSVGSGGAASNFTLAAGGTAVWQYTAATATPTIGHVGPMMAKPGVTITIDGRGFGSSKGTVYFGTTAVSGADITSWEDTQIKVKIPAVAGGNYNIKVANAAGTASNVYDNFEVLSGDQVSVRFVVNNATTALGQNVYLTGSVSELGNWDPAKAIGPMYNQVVYQYPNWYYDVSVPAGKTIEFKFLKKQGSTVTWEGGSNHTFTAPSSGTATINVNWQP

SEQ ID NO: 19607 - protein, 465 aa, Yersinia pseudotuberculosis IP 32953
MSDQQEGAELKRGLKNRHIQLIALGGAIGTGLFLGIAQTIKMAGPSVLLGYAIGGFIAFLIMRQLGEMVVEEPVAGSFSHFAYKYWGHFAGFASGWNYWVLYVLVAMAELTAVGIYVQYWWPEIPTWVSAAVFFLAINAINLANVKVYGEMEFWFAIIKVIAIIAMILFGGYLLISGRGGPEATVTNLWAQGGFFPNGIMGLVMAMAVIMFSFGGLELVGITAAEAEDPAKSIPKATNQVIYRILLFYIGSLAILLSLYPWGKVVEGGSPFVLIFDALDSNSVATVLNIVVLTAALSVYNSCVYCNSRMLFGLAKQGNGPKILLKVDGRGVPVIAIAVSAFATAFCVLINYLLPGRAFELLMALVVSALVINWAMISLAHLKFRAAKNRQGVIPKFKAFWYPFGNCLCLLFLTGILVIMFLTPSIRISVILIPVWVVVLAIGYILKNQSQRQNQQLSASSRKATK

SEQ ID NO: 19608 - protein, 616 aa, Zea mays
MALSASRVQQAEELLQRPAERQLMRSQLAAAARSINWSYALFWSISDTQPGVLTWTDGFYNGEVKTRKISNSVELTSDQLVMQRSDQLRELYEALLSGEGDRRAAPARPAGSLSPEDLGDTEWYYVVSMTYAFRPGQGLPGRSFASDEHVWLCNAHLAGSKAFPRALLAKSASIQSILCIPVMGGVLELGTTDTVPEAPDLVSRATAAFWEPQCPTYSEEPSSSPSGRANETGEAAADDGTFAFEELDHNNGMDDIEAMTAAGGHGQEEELRLREAEALSDDASLEHITKEIEEFYSLCDEMDLQALPLPLEDGWTVDASNFEVPCSSPQPAPPPVDRATANVAADASRAPVYGSRATSFMAWTRSSQQSSCSDDAAPAAVVPAIEEPQRLLKKVVAGGGAWESCGGATGAAQEMSGTGTKNHVMSERKRREKLNEMFLVLKSLLPSIHRVNKASILAETIAYLKELQRRVQELESSREPASRPSETTTRLITRPSRGNNESVRKEVCAGSKRKSPELGRDDVERPPVLTMDAGTSNVTVTVSDKDVLLEVQCRWEELLMTRVFDAIKSLHLDVLSVQASAPDGFMGLKIRAQFAGSGAVVPWMISEALRKAIGKR

SEQ ID NO: 19609 - protein, 184 aa, Oryza sativa (japonica cultivar-group)
MDRQRQQSSRGNATATRGGGSSGKGGGGGVGKAAGKKPIKVVYISNPMRVKTSAAGFRALVQELTGRNADPSKYSPRASADDDDGGGGGGGGELAAASDGAGEPGPGAAAASPDTGAAAASDAADALVAAGHPAAATFDDEGGGGGGGYYDDDDDDIFRSQLLDTSYSVFSPPTLLYDHPHSKV

SEQ ID NO: 19610 - protein, 276 aa, Arabidopsis thaliana
MTLGCKQAIELAVDILAKPKANVLLPSPGFPWDLVRSIYKNLEVRHYNFLPEKNFEIDFDSVRALVDENTFAIFIINPHNPNGNTYSEAHLKQLAELAKELKIMVVSDEVFRWTLFGSNPFVPMGKFSSIVPVVTLGSISKGWKVPGWRTGWLTLHDLDGVFRNTKVLQAAQDFLQINNNPPTVIQAAIPDILEKTPQEFFDKRQSFLKDKVEFGYSKLKYIPSLTCYMKPEACTFLWTELDLSSFVDIEDDQDFCNKLAKEENLVVLPGHVVCWI

SEQ ID NO: 19611 - protein, 541 aa, Corynebacterium pseudotuberculosis
MAKLIAFNQEAREGILKGVDTLANAVKVTLGPRGRNVVLEKAFGSPTVTNDGVTIAREIDVEDRFENLGVQLVKSVAVKTNDIAGDGTTTATLLAQAVITEGLRNVAAGANPVELNRGILAAADKAVEKLGERAAEVASAADIANVATVSSRDAEIGDMVAAAMEKVGKDGVVTVEESQSIESYLDVTEGVSFDKGYLSPYFITDTDSQRAELDDPYILLVRNKISSLPDFLPLLEKTVEANKPVLIIAEDVEGEPLQTLVVNSIRKTLRAVAVKSPYFGERRKAFMDDLAVVTNATVVDPEVGINLNEAGVEVFGTARRVTVTKDETIIVDGAGTSEAVENRRQQIRREIENTDSSWDREKAEERLAKLSGGVAVIKVGAATETEVSERKLRVEDAINAARAAAQEGVIAGGGSALVQIAKELRVYAEEFEGDAKVGVNALANALSKPAYWIADNAGLDGAVVVSKIADLPNGEGFNAATLEYGNLIEQGIIDPVKVTHSAVVNATSVARMVLTTEASVVEKPVEAKPQAGGHHHHHHHH

SEQ ID NO: 19612 - protein, 134 aa, Cryptococcus neoformans var. neoformans JEC21
MGRTYRIYLAGESVLMCRHCGNHLAVSEGIISKQFTGQHGRAILVHTVVNAYSGEAEDREMRTGRHTVRDIYCRVCHTTLGWKYDFAFEHDQKYKEGKYILEREMITEKPERRDIISGKPRIEEIPIREILARV

SEQ ID NO: 19613 - protein, 404 aa, Bradyrhizobium japonicum USDA 110
MSSSVIDYLATETRLGAHNYEPIGVVLSRGEGVWVWDTDGNRYLDCLSAYSAVSQGHCHPKILAAMVEQAHRLTLTSRAFHNDQLAPFYEEIAALTGSHKVLPMNSGAEAVESAIKSVRKWGYEVKGVPDDQAEIIVCADNFHGRTLGIVGFSTDPETRGHFGPFAPGFRIIPFGDAAALEQAITPNTVAFLVEPIQGEAGVIIPPAGYFTKVRELCTANNVMLVLDEIQTGLGRTGKLLAEQHEGIEADVTLLGKALAGGFYPVSAVLSNNEVLGTLRPGQHGSTFGGNPLACAVARAAMRVLVEEGMIENAARQGARLLEGLKDIRANTVREVRGRGLMLAVELHPEAGRARRYCEALQGKGILAKDTHGHTIRIAPPLVITSDEVDWALEQFATTLTQDFS

SEQ ID NO: 19614 - protein, 317 aa, Cryptococcus neoformans var. neoformans JEC21
MQVEYESSPAVEQPSFEEGMSFRPGSPQAGGAESEEEQDEEDVDAGEGTSLFSFAYDEASFHSSEKGGIRADDASFSGSGAKKPARKRIIKQRQSLAEKQPGTTMFPAARVKKIVKADRDIDIMSSEAVFMVSVAAEYFIKHFMEEGYTKARLEKRKLINYRDMANVVARSEEFDFLKDVIPTPMPLSEAIEKRKRKVVAEENLDEDAPASSHLNDEDLPPLVPSTNPAFPNAIVKKPSNTHAKGASAAKMKADAPTSEKEELRSVVSNAQGTRKSARRSTMGAEDEADKSYLNELREEGADEEAITSDGDEKMDEE

SEQ ID NO: 19615 - protein, 637 aa, Pseudomonas syringae pv. syringae B728a
MSVRRTRKDDGSQWTVADSRSVYGIRHWGAGYFAINEAGRVEVRPNGPDSSPIDLYEQVDNLRKSGLSLPLLVRFPDILQDRVRQLTGAFDSNIARLEYQSKYTALYPIKVNQQEAVVENIIATQNVSIGLEAGSKPELMAVLALAPKGGTIVCNGYKDREFIRLALMGQKLGHNVFIVIEKESEVELVIEEAAELKVAPQVGLRVRLSSLASSKWADTGGEKSKFGLSAAQLLSVVERFRKAGLDQGIRLLHFHMGSQIANLADYQHGFKEAIRYYGELRKLGLPVDYIDVGGGLGVDYDGTHSRNASSINYDMDDYAGVVVGMLKEFCDAQSLPHPHIFSESGRSLTAHHAMLVVQVTDVEKHNDEVPEIADKASLPETVQWLVDLLGPTDIEMVTETYWRATHYMSDIAAQYADGKISLSEKALGEQCYFAVCRRLYNSLKARQRSHRQVLDELNDKLADKYICNFSVFQSLPDTWAIGQVLPILPLHRLNEEPVRRAVLQDLTCDSDGKIKQYVDEQSIETSMPVHSLNEGEDYLLGIFLVGAYQEILGDMHNLFGDTDSVNIYQNPDGSVYHAGIETHDTIEDMLRYVHLSPEELMTHYRDKVASAKITPRERTYFLDALRLGLTRSSYLSS

SEQ ID NO: 19616 - protein, 547 aa, Caulobacter crescentus CB15
MAAKDVYFSSDARDKMLRGVNILANAVKVTLGPKGRNVVIEKSFGAPRTTKDGVSVAKEIELADKFENLGAQMIREVASKTNDKAGDGTTTATVLAQAIVQEGLKSVAAGMNPMDLKRGIDKAVAIAIEDIKTSSKKVTTNAEIAQVGTISANGDKEVGEMIAKAMDKVGNEGVITVEEAKTAETELDVVEGMQFDRGYLSPYFITNADKMEVQLEEPLILLFEKKLSSLQPLLPVLEAVVQSGRPLLIIAEDVEGEALATLVVNKLRGGLRVAAVKAPGFGDRRKAMLEDIAILTGAQVVSEDIGIKLENVSLEMLGRAKKVSITKDDTTIVDGVGEKADIEARIAQIKRQIEDTTSDYDKEKLQERLAKLAGGVAVIRVGGSTEVEVKEKKDRVDDALNATRAAADEGIVPGGGTALLKASKALAGVVGDNDDQTAGIAIVRRALQAPIRQIAENAGVEGSIVVGKILENDNSAFGFNAQTEQYVDLVVDGVIDPAKVVRTALQNAASVAGLLITTEAAIVEAPKKGGGAPAGGGMPGGMGDMDF

SEQ ID NO: 19617 - protein, 96 aa, Caulobacter crescentus CB15
MKFRPLGDRVLVKRVEEETKTKGGIIIPDTAKEKPQEGEVVAVGPGARNDKGDVVALDVKAGDRILFGKWSGTEVKVDGQDLLIMKESDVLGVVEA

SEQ ID NO: 19618 - protein, 581 aa, Thermoproteus tenax
MDFIYCDVVVVGSGLAGLRAAIAAAESKPDLEVCVVTKVSGPRSHSIAAEGGMAGVLYPEKTGDSAELHAYDTVKGGDFLVDQDAALMLAQEAPKEIFYLEKLGVPWNRDADGRIALRLFGGMSKPRTAFARDKTGFFVMSALYRAARSLPIKFYEEHLVTKLFIKRGQFAGLIALDLRRGELRLFRAKAGVIATGGGGRMFKLTTMGFANTGEMWGIALREGIALKDMEFVQWHPTALVPSGILISEAARAEGAYLVNKLGERFMARYAPQRMELAPRDVVARAIATECMAGRGFIHEESKMCYVGLDLRHIDPQRMKERLPLLMEVVRTYAGLDPTKDLIPVAPAVHYFMGGIHTDLHGRVLDANGRWIIGLWAAGEAASVSVHGANRLGSNSLAECAVWGRLTGIQAAEFASSTQQPPALDLEAKTVYGAEERRIFDKLLHRESGGISLGQVKSAIQEALHSGAGIFRHKSTIEEALTKVTRTAAKVMQVNVHDVGRTYNMELKELLELDGAVLAAQVILMGAYFRQESRGSHYRLDHPSRDDSRWLVHTIAYRYGDGVVLKWEPVRILKWPPEVRSY

SEQ ID NO: 19619 - protein, 436 aa, Rubrivivax gelatinosus PM1
MADSRNASLFERARRSIPGGVNSPVRAFRAVGGTPRFIARADGAYLWDADGKRYIDYIGSWGPMILGHGHPAVLEAVQKAATEGFSFGAPTEREVELAEEILKLVPSAEQVRLVSSGTEAAMSALRLARGATGRSKIVKFEGCYHGHADALLVKAGSGLATFGHPTSAGVPTEVVQHTLVLTYNDVTGLEAAFSAHGAEIACVMIEPIAGNMNFVRAGLPFMKRLRELCTQHGALLVFDEVMTGFRVALGGAQSLYAKAIPGFKPDLSVFGKVIGGGMPLAAFAGPRAIMEQLAPLGPVYQAGTLSGNPVATACGLATLREIQKPGFFESLAAGTRDLLDGLLHAATAAGVPMVGDCEGGMFGFFFPKTAQAALPQNYVEVMATDGERFNRYFHGMLDRGVYLAPALYEAGFVSAAHTPADIEATLAAARATLAAA

SEQ ID NO: 19620 - protein, 192 aa, Lilium longiflorum
ELSVLCDAEVALIVFSTRGRLYEYANNSVKATIERYKKASTDISNTRSVSEANAQYYQQESTKLRQQINSLQNSNRNLLGESLSNMNLRDLKQLENRLEKAINKIRTKKNELLYAEIEYMQKREMELQSDNMYLRNKVAENEREQQQQMNMMPSTSEYEVMPHFDSRNFLQVNIVDPNQHYSCQQQTALQLG

SEQ ID NO: 19621 - protein, 381 aa, Arabidopsis thaliana
MVVMSRVSFYSSFLLLLLEVVVASSEFDDEGRTSFSPTTAIIMIVLVSVFFALGCISVYMRRCLQHALGMDSGGGPGNWLNVRQTTEPGLDASVIETFPTFPYSTVKTLRIGKEALECPVCLNEFEDDETLRLIPQCCHVFHPGCIDAWLRSQTTCPLCRANLVPVPGESVSSEIPGLARETGQNSLRTPIDDNRKRVLTSPDERLIDSVAWTGNQSMPRKSMSTGWKLAELYSPASSPGQPEENLDRYTLRLPQEIHDQLVNSSLGKQGSKGQLALPQERSSVRGFRTGSLGTEKNYFYFERFDQDGRLDRRPFSITPPYHTRSIQSPDEIINASGNYQDRAGAPKGLLLAIRSPFDRLFTGKKNAGERSYLQSGDASPV

SEQ ID NO: 19622 - protein, 393 aa, Streptomyces galilaeus
LGVIAPGGIGTKAFWERIVSGVSATRTITAFDASGFRSRMAAECNFDGVRSGLTVRDTARLDRATQFAVVAAREALADSGIEIDERNAHRTGVSLGSAVGCTQKLEEEYVARSDGGQRWLVDHAAGTPYLYDYFVPSSMAAEVAWEAGAEGPAALVSAGCTSGLDSLGHALDLIREGAVDIMIAGGSDAPIAPITVACFDAIKATSPRNDTPEHASRPFDRTRSGFVLGEGAAVLVLEERESALRRGAQIYAEIAGYAGRANAHHMTGLRPDGLEMSAAITGALDDARIDREAVGYVNAHGTATRQNDIHETAAIKHSLGEHAHRVPVSSIKAVIGHSLGAVGSIEAVASALVIRHGVVPPTAGLHEPDPQLDLDYVPLTARDQATDTVLTVG

SEQ ID NO: 19623 - protein, 157 aa, Spiroplasma citri
MDKFNINEKMKRTKIITTIGPSTHSPGAIEELFKTGMTTIRLNFSHGDHAEQGARIVWAREVSAKIGKPISVLLDTKGPEIRAGIMKGGKQEIVAGATVTIYSLPTEYQNREGTGTEITVSYDMSQDLKVGDVVLVDDGKLQLNVTGIKPGIIETKA

SEQ ID NO: 19624 - protein, 294 aa, Zymomonas mobilis subsp. mobilis ZM4
MGRLFIWVPVLISDIFYAVQKSRITNKGVFPLKVALGQFAVQPDWHENLDICFDLIKRAAGKEADLLVLPEGILAQDMADPDLIPKTAQPLDGAFITRLAAETLKYPTLTIAGCLPIPDGKDRFYNTLLVIKNGQIIAQYRKLHLYDAFSHQESRSITAGDSLPPLVEIAGFKVGLMICYDLRFPELARRLVLEGADALILPAAWVKGSGKEAHWDILVKARALENTCYMIAVGECGQRNIGNSMVVDPLGVAIARAGEEPALIMAELFHKRIAHARDILPVLHNRRFLPPKFI

SEQ ID NO: 19625 - protein, 457 aa, Erwinia amylovora
MQKYLSEARQLLALAIPVILAQVAQTSMSFVDTVMAGAVSATDMAAVAVGTSIWLPAILFGHGLLLALTPVVAQLNGSGRRDLIAHQVRQAYWLAGMVSVLVMIVLYNAGYLIGSLHNVDPLLSQKAIGYLHALLWGAPGYLFFQVARDRCEGLSKTKPAMVVGFLGLLVNIPLNYVFIHGHLGMPALGGVGCGVATASVYWVMFIVIRAWTNRAKSMRDIQLPQRFSAPDWKAIGRLTGLGLPVALALFFEVTLFAVVALLVSPLGIVNVAGHQIALNFSSLMFVVPLSLGVATTIRVGHRLGQGSAEQAKVAAWTAQGIGICMACITALFTIAFRERIAQLYADDPEVITMAAQLMLLAAVYQLSDSVQVIGSGVLRGYKDTRAIFFITFIAYWILGLPIGYLLGMTNLLLPAMGPAGFWIGFIIGLTSSAIMMIWRMRRLQRQPNATVLARAAR

SEQ ID NO: 19626 - protein, 424 aa, Zea mays
MAGGGFVEDMNMMREQSLLEATCGDLFDHIDDLLDFPNEDSAAAVLLLDAPAPGSPLSARIIDVGRAGNALAPPAAPAQHDASASAFFAAAGNDVFDTKDVVGAHIGSCDDIDMDMAQLEWLSGLFDDASIPHEPVFPGATAGGAAPIMKSSALAAGALLPPDKMEDALLFRSSSPISVLEHGSGGSGSASATGSASSSSSSASSSSESFSGSGSGSGGGHVWSAPVSPRPAPPPVLVIPARARSKRSRSSAFTGAAARAGAETPTILVPTPMYSSGSAHSDPESIAESSPHPAPPMKKKKKAKKPAPPAPAASSDDNDGDADYEEGGEQAEPQGGAVRRCTHCQIEKTPQWRAGPLGPKTLCNACGVRYKSGRLFPEYRPAASPTFVPSIHSNSHKRVVEMRQKAVRSGDPSCDLLQFIRRRD

SEQ ID NO: 19627 - protein, 103 aa, Erwinia amylovora
  misc_feature (83)..(83): Xaa can be any naturally occurring amino acid
  unsure (1)..(103): unsure at all Xaa locations
MKKTKIVCTIGPKTESEEMLTNLLDAGMNVMRLNFSHGDYQEHGKRISNLRNVMNKSGHQAAILLDTKGPEIRTMKLEGGQDXSLKAGQTFTFTTDQSVIGNA

SEQ ID NO: 19628 - protein, 345 aa, Candida albicans
MSTDHHSHPVEGHQFKKIFNRLSGQPESYSRKQNYTFGKTLGAGSFGIVRYARDNSTDEEVAVKIILKKALKGNESMIIDEMQLLEQLNNPHIVGFRDWFESKDKFYLVTQLATGGELFDRIVQKGRFTEHDASLVVLQMLEALEYLHNKDIVHRDIKPENILYLTSKDDSPIVLADFGIAKRLQNPNEKLTSSAGSFGYAAPEVILGTGHGKPCDIWSLGVVTYTLLCGYSPFRSENVQDFINEVKHNNAVIFHADYWKDVSKDARRFIIKALQFNPDNRPTATELLNDPWLVSIAKEYKETDLLPNFKQGFDAKKKFRQAIELVKLNNRIKKLKEWQTDEDDD

SEQ ID NO: 19629 - protein, 177 aa, Staphylococcus aureus subsp. aureus Mu50
MTKEYATLAGGCFWCMVKPFTSYPGIKSVVSGYSGGHVDNPTYEQVCTNKTGHVEAVQITFDPEVTSFENILDIYFKTFDPTDDQGQFFDRGESYQPVIFYHDEHQKKAAEFKKQQLNEQGIFKKPVITPIKPYKNFYPAEDYHQDYYKKNPVHYYQYQRGSGRKAFIESHWGNQNA

SEQ ID NO: 19630 - protein, 255 aa, Medicago truncatula
MAMTRESWAFVFGIIGNIISFAVFLSPLPTFYVIFKKKSAEGFQALPYVVALFSAMLWIYYAFVKRESALLLITINTFGIVVESAYIIMFLIYAPKKQRLSTIKLLLLLNVFGFGAMLLSTLYLSKGAKRLAIIGWICLVFNISVFAAPLFVISKVIRSRSVEYMPFFLSFFLTINAVMWFFYGLLLRDYYVALPNTLGFVFGIIQMVVYLIYRNATPVVEAPMKGQELSGGHIIDVVKIGTDSNRAGGGAGSKV

SEQ ID NO: 19631 - protein, 220 aa, Yersinia pseudotuberculosis IP 32953
MKEIEKLIANNRTWSNTICKDDPGFFEHLAQSQKPRFLWIGCSDSRVPAEQLTGLKSGELFVHRNVANLVIHTDLNCLSVVQYAIDVLQVEHIIICGHLGCGGVEAAIKGEEMGLIDNWLLHIRDLWYKHSSLLGELPQEERSNVLCQINVVEQVYNLGHSTIVRSAWKRGQKAMIHGWVYGIENGLLRDLEVSATSLGSLEMVYRKAMAELLQNNKEDH

SEQ ID NO: 19632 - protein, 80 aa, Glycine max
VKQLNDLLTEKNKDTGWDVPIHVDAAIGGFIAPFLYPELEWDFRLPLVKSINVSGHKYGLVYPGVGWVIWRSKDDLPEEL

SEQ ID NO: 19633 - protein, 446 aa, Euglena gracilis
TKFLDGLRAEGRYRVFAEVERHAGSFPKATRYDADGAQEVTVWCSNDYLGMGQEPAVMDACKDAVDRWGTGAGGTRNISGTVRSHVLLEKELAGLHGKEAALVFGSGYIANDAALGALGTVLKDVTYFSDEENHASMIAGMRQRGTKKVIFRHNDVAHLEELLRASAAANPNGARIVAFESVYSMSGTIAPIQEICDVSKKYGAITYLDEVHAVGMYGHHGAGVAERDDCMHEVDIIQGTLGKAFGCIGGYVSGSAEVVDCIRSKAPGFIFTTSMPPHVAAAAAASIRFLRGEQGVLRRRVFHSNVAKLKSLMRAAGLPLMEGESHITPLFIGDAVLCKQASDLLLKRFQIYVQPINYPTVDVGTERLRITVSPVHTNEHMATLITALLQVWEELGLPLRPPVFDTEGYPEVEAAEWLPNSAMWRDASPHHKLATEAVDAGPGRAH

SEQ ID NO: 19634 - protein, 152 aa, Kluyveromyces lactis NRRL Y-1140
MSNTERTFIAIKPDGVQRGLISKILARFEDRGYKLVGIKLVTPTEALLKEHYADLVSKPFFPSLLSYMTSGPVLATVWEGKDVVKQGRAILGATNPLQSAPGTIRGDFAIEVGRNVCHGSDSVESAEKEIGLWFKKEELIDYKLNQLSWIYE

SEQ ID NO: 19635 - protein, 572 aa, GIBBERELLA ZEAE PH-1
MVGLGPRRPPSRKAVACSRYCHGGAEPAKMSCNDDVGSINPDRGVRRQKQDEALHDFTEITILGKPAVQDREPMSLTFRACPNAGFYYGGSQRGSMADVPKDLAEEINKLENLFTVQPSKLKEITNHFVSELAKGLSVEGGSIPMNPTWVMSYPDGYETGTYLALDMGGTNLRVCQITLTDEKSEFDIIQSKYRMPEELKSGTSEELWEYIAECLYQFLETHHGDCTKLEKIPLGFTFSYPATQNYIDEGILQRWTKGFDIDGVEGQNIVPMFEEALKTRGVPIKLAAIINDTTGTLIASAYTDTAMKIGCIFGTGCNAAYMEDCGSIPKIADLNLPADLPMAINCEWGAFDNEHKVLPRTPYDVIIDKESPRPGQQAFEKMIAGLYLGEIFRLILVDLHDNKSIHIFENQDIALLRKPYSLDASFLSAIEEDPWENLSETSDLFSKKLNLKCTQPELELIRRTAELIGTRAARLSACGVAAICKKKNYQSCHVGADGSVFNKYPHFKERGAKALRDILDWPEKTNKKEEDPIEVLTAEDGSGVGAALIAALTLKRINEGNMAGILHPENFK

SEQ ID NO: 19636 - protein, 393 aa, Streptomyces capoamus
LGVIAPGGIGTKAFWERIVSGVSATRTITAFDPAPFRSRMAAECDFDGARLGLSPRDTARLDRATQFALVATREALADSGIEIDETNAHRTGVSLGSAVGCTQKLEEEYVARSGGGQQWLVDHAAGTPHLYDYFVPSSMAAEVAWEAGAEGPTALISAGCTSGLDSLGHAVELIREGSADIVIAGGSDAPIAPITVACFDAIKATSPRNDTPDHASRPFDRTRSGFVLGEGAAVLVLEERESALRRGADVYAEIAGFAARANAHHMTGLRPDGLEMAAAITGALDDARIDRTSVGYVNAHGTATRQNDIHETAAIKHSLGEHAHRVPVSSIKAVIGHSLGAVGSIEAAASALVIRHGVVPPTAGLYEPDPQLDLDYVPLTARDQRTDTVLTVG

SEQ ID NO: 19637 - protein, 592 aa, Oryza sativa
MGTSSGANFHQQQPPPPTSSAAPAAGAAAVAQGMLPPRRPTGLQTSLSLASSEQVGSPEMQEPGSNSDQGHDSATESASSRETWPAEPNHGSAAAEKEVGNGIPKLQVIRGSSRLDRMSLREVARERVDLVAEKMKVMPEEHLEDMKNELRSILEGTGGSHHIEEFLYLQKFVQSRGDLTQTMLSMAHHVQLEILVAIKTGIQAFLHPSVTIPQNRLVEVFLYKRCRNIACQSALPAEECRCNVCSNRNGFCNLCMCVICNKFDFEVNTCRWIGCDFCSHWTHTDCAIRDGQIGMGQSIKSGTGHAEMLFRCQACQKTSELLGWVKDVFQQCAPGWDRDALLRQLEFVCKIFRLSEDSKGRKLFRKCADLIERLRNSPADAINPRMILQVLQELELDSPKSTENEEIGRLITPQEACNRIAEVVHEAVKKMELVAEEKMRLYKKARIAVEACDRELDEKARELQELKAERLRKKQQVDELESIVRLKQAEAEMFQLKANEARQEADRLQSIALAKSERAEQDYASLYLKRRLEEAEAEKQFLFEKIKYQETQRPMQASGSGAGDSSQTPMLSKIHDLLKNVRSIPPKTEGHQ

SEQ ID NO: 19638 - protein, 357 aa, Neurospora crassa
MVGIALLGAGIFAREQHLPAIESVPSLSLKAIYSRSESSANTLASAASSPVDVYYDVPTAGSGSGEAANVEKTLDALLARTDIDAVVIALPILAQPAVIEKALKAGKHVLSEKPVAKDVEEAKRLVGFYEALDLDNNKKKPLWAVAENFRYTPSLLKAAEKVKEIGGKLTTFRLNMNGWVEEGNKYFKTEWRKVPSYQGGFLLDGGVHFIAGLRLLLSELNQEITHVAGFSALLEERLLPVDTVHAVALTNDGKSGTISISFGTQFKTGLEVEVVTTQGSVYWNPTQIKTKTKEGEETEEFEKSTGVKEEMAAFAKAIEKGQTEKEQTPEEALKDLEVVQRLLESGEGKGIVKAVEA

SEQ ID NO: 19639 - protein, 325 aa, Thermoproteus tenax
MAEGRCSQGKEPAEAMISLVALGEPLIQLNAVTPGPLRYVAYFEKHVAGSEANFCIAATMAGARCSLIARVGDDEFGRNIVEYLRGRGVDVSHVKVDPGAPTGIYFVQRHFPVPGRSRLIYYRKGSAGSRVGPDDVDSSLISSADAVHSTGITLALSDSANRAVHKAFGEAKRRTFDTNIRPALWPDLAAARRAILDVLNYGVDVLVTDPDDTQILLGVRDPEEAYRKYRELGVQTLVYKLGAEGAYVFWNGGSYFRDALKVAVEDPTGAGDAVAGYFVALYLSGVDPRRALDLAVAASALVVGVRGDNEALPSPREAEELLKAL

SEQ ID NO: 19640 - protein, 515 aa, Arabidopsis thaliana
MSDTKISAVAVAAAVVVVTTVTVWIWKGLNVAWLRPKKNEAYLKRQGLSGTPFTFLVGDIKREASMVEQEKSRPINLTDDYTHRVMPLIQQTVKDHGKTSYMWMGPIASVIVTKPEHIKDVLNRVYDFPKPPVHPIVELFATGVALYEGEKWSKHRKIINPSFHLEKLKIMIPAFYESCSEMISKWEKLVTEQGSSNEIDVWPYLGDLTSDVISRTAFGSSYEEGKRIFELQEEQGRRVLKALELAFIPGMRFLPTKNNLRMRQINKEVKSRLREIIMKRQRGMDTGEAPKNDLLGILLESNSGDHGMSIEDVVEECRLFHFAGQETTAVLLVWTMIMLSHHQKWQDQAREEILKVIGKNNKPNFDALSRLKTMSMILNEVLRLYPPGILLGRTVEKETKLGEDMTLPGGAQVVIPVLMVHRDPELWGEDVHEFNPERFADGISKATKNQVSFLPFGWGPRFCPGQNFALMEAKMALVLILQRFSFELSPSYTHAPHTVLTLHPQFGAPLIFHML

SEQ ID NO: 19641 - protein, 719 aa, Geobacillus stearothermophilus
MKKKTLSLFVGLMLLIGLLFSGSLPYNPNAAEASSSASVKGDVIYQIIIDRFYDGDTTNNNPAKSYGLYDPTKSKWKMYWGGDLEGVRQKLPYLKQLGVTTIWLSPVLDNLDTLAGTDNTGYHGYWTRDFKQIEEHFGNWTTFDTLVNDAHQNGIKVIVDFVPNHSTPFKANDSTFAEGGALYNNGTYMGNYFDDATKGYFHHNGDISNWDDRYEAQWKNFTDPAGFSLADLSQENGTIAQYLTDAAVQLVAHGADGLRIDAVKHFNSGFSKSLADKLYQKKDIFLVGEWYGDDPGTANHLEKVRYANNSGVNVLDFDLNTVIRNVFGTFTQTMYDLNNMVNQTGNEYKYKENLITFIDNHDMSRFLSVNSNKANLHQALAFILTSRGTPSIYYGTEQYMAGGNDPYNRGMMPAFDTTTTAFKEVSTLAGLRRNNAAIQYGTTTQRWINNDVYIYERKFFNDVVLVAINRNTQSSYSISGLQTALPNGSYADYLSGLLGGNGISVSNGSVASFTLAPGAVSVWQYSTSASAPQIGSVAPNMGIPGNVVTIDGKGFGTTQGTVTFGGVTATVKSWTSNRIEVYVPNMAAGLTDVKVTAGGVSSNLYSYNILSGTQTSVVFTVKSAPPTNLGDKIYLTGNIPELGNWSTDTSGAVNNAQGPLLAPNYPDWFYVFSVPAGKTIQFKFFIKRADGTIQWENGSNHVATTPTGATGNITVTWQN

SEQ ID NO: 19642 - protein, 393 aa, Streptomyces tauricus
LGVIAPGGIGTKAFWERIVSGVSATRTITAFDPAPFRSRMAAECDFDGARHGLSARDTARLDRASQFALVAAREAIADSGVEIDAGNAHRTGVSLGSAVGCTLKLEEEYVARSDGGKQWLVDHAAGTPYLYDYFVPSSMAAEVAWEAGAEGPAALVSAGCTSGLDSLGHAVELIREGSADIMIAGGSDAPIAPITVACFDAIKATSPRNDTPDHASRPFDRTRSGFVLGEGAAVLVLEERESALRRGAQVYAEIAGFAARANAHHMTGLRPDGLEMAAAITGALDDARIDREAVGYVNAHGTATRQNDIHETAAIKHSLGEHAHRVPVSSIKAVIGHSLGAVGSIEAAASALVIRHGVIPPTAGLHEPDPQLDLDYVPLTARDQPTDTVLTVG

SEQ ID NO: 19643 - protein, 395 aa, Bacteroides fragilis NCTC 9343
MYGKMKEHLSNTIAEIKEAGLYKEERLIESAQQAAITVKGKEVLNFCANNYLGLSNHPRLIEGAKKMMDRRGYGMSSVRFICGTQDIHKELEAAISDYFKTEDTILYAACFDANGGVFEPLFTDEDAIISDSLNHASIIDGVRLCKAKRYRYANADMADLERCLQEAQAQRFRIIVTDGVFSMDGNVAPMDKICDLAEKYDALVMVDESHSAGVVGATGHGVSEQYNTYGRVDIYTGTLGKAFGGALGGFTTGRKEIIDLLRQRSRPYLFSNSLAPGIIGASLEVFKMLKESNEIHDKLVDNVNYFRDKMTAAGFDIKPTQSAICAVMLYDAKLSQIYAARMQEEGIYVTGFYYPVVPKDQARIRVQISAGHEKEHLDKCIAAFIKVGKELGVLK

SEQ ID NO: 19644 - protein, 393 aa, Streptomyces purpurascens
IGVVAPGGIGTKQFWQTITGGRTATRTISLFDPAPFRSRIAAECDFDAAEQGLSAEDAERLDRAAQFALVALREAVTDSGLEPDPETAHRTGVSLGSAVGCTQKLEQEYLALSGGGQEWLVDHTAASAQLYDHFVPSSMAAELAWEAGAEGPCTVVSAGCTSGLDSVGHAVALIREGLADVMIAGATDAPISPITVACFDAIRATSPRNDDPATALRPFDRTRNGFVLGEGAAVLVLEELTAARARGAHVYAEIAGYASRGNAYHMTGLRTDGRELAAAVDAALDEARLGPDALGYVNAHGTATKQNDVHETAALKRSLGAAAHRVPVSSIKSMIGHSLGAIGSIEVAATALALEHGVIPPTANLTDPDPELDLDYVPLHARERDMSAALTVG

SEQ ID NO: 19645 - protein, 453 aa, Burkholderia vietnamiensis G4
MSAAPANARVLEVERVIDDTHRPGFHWMLLVLCGLCLVVDGFDAQAMGYVAPSVIAEWHVPKQALGPVFSASLFGMLLGALGLSVLADRIGRRPVLIGSTLFFAVTMLATPFASSIPVLIALRFVTGLGLGCIMPNAMALVGEFSPAAHGVKRMMIVSCGFTLGAALGGFISAALIPALGWRAVFFVGGAVPLVLAIAMLARLPESLQFLVLKGRVAQARDWLARFAPHAGIDADTRLVVRERAASGAPVAELFRAGRLPVTLLLWAISFMNLIDLYFLSNWLPTVMRDAGYTPGTAVIVGTVLQTGGVIGTLSLGWFIERYGFVRVLFACFACAAVSVGLIGSVAHALPWLLVVVFAGGFCVVGGQPAVNALAGQYYPTSLRSTGIGWSLGIGRIGSVLGPLVGGQLIALNWSNGALFHAAALPVLCSALFVLGLAGVARRDGAHAANAAMN

SEQ ID NO: 19646 - protein, 433 aa, Corynebacterium efficiens YS-314
MCGGDTRKFYPLFYCRSAHAGLNCDSQHQLSMSLDSSLDSHSSRLTFPQKAEAPMTTTSAASSTASSTTTAKILPHPLNAWYVAAWDHEVTSKGIISRTIANKPLALYRTQDGRAVALADACWHRLAPLSKGKLTGRDGIQCPYHGLVYNSAGRCMSMPAQETLNPSAAVASFPVVEQYRYIWVWLGDPTLADPTTVPDMHQMTHPEWTGDGKTIAAACNYQLVLDNLMDLTHEEFVHSSSIGQDELSEADFEVTHTEDSVTVSRWMRDIDPPPFWQKNMNDKFPGYEGKVDRWQIIHYYYPSTICIDVGVAKAGTGAPEGDRSQGVNGYVMNTITPETDRSSHYFWSFQRNYRLDSQLITTQLRDGVHGVFGEDEEMLTAQQEAIDANPDYEFYNLNIDAGGMWVRRILEKALEAENRLHIPTTSAPVRKES

SEQ ID NO: 19647 - protein, 392 aa, Streptomyces albofaciens
IGVVAPGDVGTKPFWEMLTAGRTATRPISSFDASPFRSQVAAECDFDPAAEGLSQRQVRAWDRTMQFAYVAAREALADSGVTGEADPLRTGVMAGTACGMTMSLDREYAVVSDEGRLWQVDDAHGVPYLYDYFVPSSMAAEIAWLAEAEGPAGVVSAGCTSGIDVLTHAADLVRDGAADVMVAGASDAAISPITVACFDAIKATTPRNDEPATASRPFDRTRNGFVLGEGAAFFVLEEYAHARRRGARAYAEIAGYAGRCNAYSMTGLRSDGRELAEAVSRALDIARLDPSDVDYVNAHGSATKQNDLHETAAFKRSLGPHAYSVPISSIKSMIGHSLGAICALEVAASALTIEHGVIPPTANLREPDPDCDLDYVPLVAREAAVSTVVSVA

SEQ ID NO: 19648 - protein, 413 aa, Salmonella typhimurium LT2
MSKRRVVVTGLGMLSPVGNTVESTWKALLAGQSGISLIDHFDTSAYATKFAGLVKDFNCDDIISRKEQRKMDAFIQYGIVAGVQAMQDSGLEVTEENASRIGAAIGSGIGGLGLIEENHSSLVKGGPRKISPFFVPSTIVNMVAGHLTIMYGLRGPSISIATACTSGVHNIGHAARIIAYGDADAMVAGGAEKASTPLGVGGFGAARALSTRNDNPQAASRPWDKERDGFVLGDGAGMLVLEEYEHAKARGAKIYAEIVGFGMSSDAYHMTSPPENGAGAALAMVNALRDAAIEPAQIGYVNAHGTSTPAGDKAETQAVKSVFGDAASRVMVSSTKSMTGHLLGAAGAVESIFSILALRDQAIPPTINLDNPDEGCDLDFVPHEARQVSDLEYALCNSFGFGGTNGSLIFKKI

SEQ ID NO: 19649 - protein, 202 aa, Pseudomonas putida KT2440
MCVRRYPASSRIVMREKRVMRAHWLTVPVLALLASTSSWAADCPALLQGSLPELRGKGQVDLCERFAGKPLVVVNTASYCGFAPQFEGLEATYKEYHEQGLEMLGVPSNDFKQEDADSEKTAKVCYANYGVTFTMTKTQAVRGKDAIPLFAELASQSSAPKWNFYKYVVDRKGKVIGNFSSLTKPDDPAFRAAIEKAIASQP

SEQ ID NO: 19650 - protein, 392 aa, Streptomyces aureofaciens
IGVVAPGEVGTKAFWELLTAGRTATRTISTFDPSPFRSRVAAECDFDPQAAGLTQRQIRQWDRTAQFAVVAAREALDDSGVSGVNDPIRTGVMAGTACGMTISLDREFAVVSDEGRKRLVDDAHGVPYLYDYFVPSSMATELAWLVEAEGPVGVVSTGCTSGIDVIAHACDLIRDDAADVMLAGASDAAISPITVACFDAIKATTPRNDEPESASRPFDLTRNGFALGEGAAMFVLEEREHAIRRGAHIYAEVTGYAGRCNSYSMTGLRVDGNEMAEAIRVALDRSRMNPEDVGYVNAHGSATKQNDRHETAAFKKSLGDHAYRVPVSSIKSMIGHSLGAVCALEFAASALAIEHSVVPPTANLHVPDPECDLDYVPLVAREQRVRTVLSVA

SEQ ID NO: 19651 - protein, 330 aa, Nostoc punctiforme PCC 73102
MTAAGSPEVLQVQEVPNPAVPVGNTELLVRLVAAGINPIDTKLRSRGTFYPDRTPTILGCDGAGVVEAAGAGVQRFRPGDEVYFCYGGLGAHQGNYAEYSVVDERFVARKPASISFTEAAAAPLVLITAWEALYERGRLLPGERVFIHAGAGGVGHVAIQLAKLKGATVATTVSSEEKANFVKELGADHVIFYKQTDFVQAVLDWTGGEGVDLAFDTVGGETFHKTFPAVRVYGDIVTILEPDANTVWKTARLRNLRIGLELMLTPALLGLEDILQHHAEILEQCATWIDEGKLKIHVSHEFPLKEAAKAHQLIESGSVTGKIVLLISDK

SEQ ID NO: 19652 - protein, 311 aa, Zea mays
MHHSPPGLPSLAVHFFLHHSHLISGVILFVLASLVVVGWVLASWEYRPRGGAAMKIQCDACEGAAATVVCCADEAALCARCDVEIHAANKLASKHQRLPLEALSAKLPRCDVCQEKAAFIFCVEDRALFCRDCDEPIHVPGTLSGNHQRYLATGIRVGLASASACSDACDAHDSDHHAPPKATIEPPHAAVSAAVQQVPSPPQFLPQGWAVDELLQFSDYESSDKLHKEPTLGFKELEWFADIDLFHEQAPKASRTLAEVPELFGYQAANDAAYYRPAKAAGGGGAGVRQSKKARIEVTDDEDYLIVPDLG

SEQ ID NO: 19653 - protein, 654 aa, Cryptococcus neoformans var. neoformans B-3501A
MEDVKMSGPVGVGVPMGVVEPREKELPREPGSAAMGGRSRSGTGRSSKDKKSMFGFVSDLLGKDKPPVISKPYDPVHVTHVGFDFQTGKYTGMPPKWQQVLDDNGITQDEQERNPNGVMAVVQYLKHQDEGEDEEEEVWAKMKNAQPPAFPPPSAAPSQPTTPGGGVGSREMSREPSNEALGAAGTQVVDFTCPRMAPAPPTKPSLNRMLSERHAPASHRPAELTTPAPLAAAPRVTQAYSSALSHSPHLPPPHPTSSAPPTAPAPHLDRSYSQRAPVSGTKTKVLDRANTTRSPGSSAGIAQGAGTGTGLTKSQSQSGHKSRDPSREPKDSASSSGGLSRNQTTTRQQQGATPRRREKEKKENEEVIRQLRMICTPGDPNLVYKNFRKIGQGASGGVYTAIDRQTLPVAIKQMNLEKQPKQDLIINEILVMRESAHPNIVNFKDSYLWQGDLWVVMEYMEGGSLTDVVTAHCMSEAQIASVSREVCEGLRHLHSKGVIHRDIKSDNILLSLNGDVKLTDFGFCARIADPTTTKRTTMVGTPYWMAPEVVLRKEYGPNVDIWSLGILAIEMLEGEPPYLTENPVRALYLIATNGTPKIKDWDKLSTVFRDYFKVTLQVDPAKRPTAAAILKHEFFKHTAPLISLAPMIRSSRKS

SEQ ID NO: 19654 - protein, 332 aa, Burkholderia vietnamiensis G4
MRVILFSSRQYDEESFTAANRQFGYRLHFQPSHLDAETAILAHGYDVVCPFVNDTVDAAVLQRLADGGTRLIALRSAGFNHVDLAAAERLGIAVVRVPAYSPHAVAEHAVALILALNRRLPRAVARTREGDFSLNGLLGFDLHGKTVGVVGTGLIGSVFAKIMMGFGMRVLAHSLPPHDDELIAFGARYVELDELLHQSDIVSLHCPLLPSTHHLINAQTLARMKHGAMLINTGRGGLVDAQALVEALKSGQLGHLGLDVYEEESGLFFEDHSDLPLQDDVLARLLTFPNVIVTSHQAFFTREALAEIAHTTLLNVDAWRAGAPTNVVTGGR

SEQ ID NO: 19655 - protein, 97 aa, Yersinia pestis KIM
MKIRPLHDRVIVKRKEVESKSAGGIVLTGTAAGKSTRGEVLAVGNGRILDNGEIKPLDVKVGDVVIFNDGYGVKAEKIDNEEVLIMSESDILAIVEA

SEQ ID NO: 19656 - protein, 491 aa, Medicago sativa
MATRVIPPRILRKLRYNTATKPFQPALTSPALAPTSNILDQKPPSSTTTLLPPDAELNFHDVEKLFSHVPTTKLLKSTAILHATAVEPMVDLGTWMLRSDLMQTNNPLRNIAMATTRATFFDHFCAGEDAITAGKSIAGLNEAGLRGMLVYGVEDAHDNAGCDRNLKGFLHTVDVSRSLPPSSVSFVIVKITAICPMSLLERMSDLLRWQKKDPSFVLPWKQDSLPIFSESSPLYHTRKRPEPLTAEEESDLDLANKRFLELCQKCVQANIPLLVDAEHTSVQPAIDYFTYSSAIMHNKGENPIVFGTLQTYLKDAKERMLLASKAAEKMGIPMGFKLVRGAYMSSERKLAADLGYASPIHNTIKDTHKCFNDCSNYMLEKIANGPGGVVLATHNIESGKLAAAKAHELGIGKVNHKMEFAQLYGMSEALSFGLSNAGFQVSKYMPFGPVETVMPYLLRRAEENRGVLAASGFDRQLMRKELVRRVKASVL

SEQ ID NO: 19657 - protein, 548 aa, Yersinia pestis KIM
MAAKDVKFGNDARIKMLRGVNILADAVKVTLGPKGRNVVLDKSFGSPTITKDGVSVAREIELEDKFENMGAQMVKEVASKANDAAGDGTTTATVLAQSIITEGLKAVAAGMNPMDLKRGIDKAVIAAVEELKKLSVPCSDSKAIAQVGTISANSDSTVGELIAQAMEKVGKEGVITVEEGSGLQDELDVVEGMQFDRGYLSPYFINKPETGSIELESPFILLADKKISNIREMLPVLEAVAKAGKPLLIIAEDVEGEALATLVVNTMRGIVKVAAVKAPGFGDRRKAMLQDIATLTAGTVISEEIGLELEKTTLEDLGQAKRVVINKDTTIIIDGVGDEAAIQGRVAQIRQQIEDATSDYDKEKLQERVAKLAGGVAVIKVGAATEVEMKEKKARVEDALHATRAAVEEGVVAGGGVALIRAAHAIAGLKGDNEDQNVGIKVALRAMESPLRQIVVNAGEEASVIANKVKAGEGSFGYNAYTEEYGDMIAMGILDPTKVTRSALQYAASIAGLMITTECMVTDLPRDDKGADMGAGGMGGMGGMGGMM

SEQ ID NO: 19658 - protein, 331 aa, Candida albicans
MSITVFVAGAGGYIGKHIVSQLLSKGYTVIGSVRNDEKGERLVSLFENDNFTYVVVEEAEAKGAFDKPLKDHPHIKVFIDTASPLPIGVNYEKQLIRRTSKGIKYILSSIKDHGPNITKVVVTSSIASCMNEKQSHDPNFVVDESKWNPDKHSVGKNNPTSAYFYAKASAEHEAWDFMKKKTHFTLATILPGYTFGPQCFDEDVSDLLETSVEIVTKIFELNKNDPIPKESGLFVDVRDVAAAHIRAFELNEAQNKRLMLVSEPFSAQEIVDILHEMYPAVQLPLGHPGDKPNYKFNNIETKKILNTDFRSLRSSIKDDYDQYLRTHGIIS

SEQ ID NO: 19659 - protein, 251 aa, Vitis vinifera
MATAPTISTRSLPSFEGLRPSTVRISSMGLPLKAGGLTQRSFRSLVVRAATVVTPKYTSLKPLGDRVLVKIKTAEEKTVGGILLPTTAQTKPQGGEVVAVGEGKTIGKNKLDICVKTGAQVVYSKYAGTEVEFNGSNHLILKEDDIVGILETDDVKDLKPLNDRVLIKVAEAEEKTAGGLLLTEASKEKPSIGTVVAVGPGPLDEDGKRKPLSVSPGNTVLYSKYAGNDFKGSDGSDYIALKASDIMAVLS

SEQ ID NO: 19660 - protein, 192 aa, Cryptococcus neoformans var. neoformans JEC21
MVNFKNPPAPTVPSAIKAKESLKPGEGVEQAIFASGCFWGTEHLFTKHYGNLPQFSAISGYIGGHAESPSYRQVCTGATGHAEAVKVTYQTGSVAYAELVEFFYRTHDPTTVDRQGPDTGTQYRSAIFYTTPEQEETAKKVTAEVQEKYLKGRPIVTQIAKAGTFYQAEDYHQNYLDNNPGGYECPTHRFYW

SEQ ID NO: 19661 - protein, 242 aa, Petunia x hybrida
MEFQSDLTREISPQRKLGRGKIEIKRIENTTNRQVTFCKRRNGLLKKAYELSVLCDAEVALIVFSSRGRLYEYANNSVKATIERYKKACSDSSNTGSIAEANAQYYQQEASKLRAQIGNLQNQNRNFLGESLAALNLRDLRNLEQKIEKGISKIRAKKNELLFAEIEYMQKREIDLHNNNQYLRAKIAETERSQQMNLMPGSSSYDLVPPQQSFDARNYLQVNGLQTNNHYPRQDQPPLQLV

SEQ ID NO: 19662 - protein, 354 aa, Triticum aestivum
  misc_feature (217)..(217): Xaa can be any naturally occurring amino acid
  misc_feature (291)..(291): Xaa can be any naturally occurring amino acid
  unsure (1)..(354): unsure at all Xaa locations
MVSAVLRTILVTGGAGYIGSHTVLQLLLQGFRVLVVDSLDNASEEAIRRVRQLANAPQNSLDFRKVDLRDKEALDEIFSTQRFEAVIHFAGLKAVGESVQKPLLYYDNNLIGTITLLQVMAAHGCNKLVFSSSATVYGWPKEVPCTEEFPLSATNPYGRTKLVIEDICRDLQRSDPDWKIILLRYFNPVGAHPSGYIGEDPLGVPNNLMPYVQQVGXGRRPALTVYGTDYNTKDGTGVRDYIHVVDLADGHIAALRKLYEDSDRIGCEVYNLGTGKGTSVLEMVAAFEKAXGKNPPLVYAGRRAGDAETVYAATAKAEKELKWKAKYGVEEMCRDLWNWASKNPYGYGSSDNGH

SEQ ID NO: 19663 - protein, 165 aa, Triticum aestivum
RRPRKRGRKPANGREEPLNHVEAERQRREKLNQRFYALRAVVPKISKMDKASLLSDAIAYIQELEERLRGGAPARAEAGPSVEVKAMQDEVVLRVSTPLDAHPISGPLSAMRDSQLNVVASSMAVADDTVTHTLVVRSAGPERLTAEAVLAAISRGVMMSATPSP

SEQ ID NO: 19664 - protein, 125 aa, Vitis vinifera
AGTEVEFNGSNHLILKEDDIVGILETDDVKDLKPLNDRVLIKVAEAEEKTAGGLLLTEASKEKPSIGTVVAVGPGPLDEDGKRKPLSVSPGNTVLYSKYAGNDFKGSDGSDYIALKASDIMAVLS

SEQ ID NO: 19665 - protein, 692 aa, Yarrowia lipolytica CLIB122
MSAHLAATFEQCKKEGRPALVTFVTAGFPSVEKTVPILEGLQTGGADVIELGIPFTDPVADGPAIQAANNVALANGVTVHSCLDLVKQARAKGVHVPIVLMGYYNPIHHFGDEKFVKAARDAGANGFIIVDLPPEEAVAFRGLCTREGLSYVPLVAPTTPNDRLEVLASITDSFMYVVSRMGVTGATGKLSTDIDELVAKVRKYTGGKPLAVGFGVSTQEHFNQLAPLADGIVIGSKIIATIEESNGSPEAVAKYLQSVTGGRAASAAVSNENKSDTTQAVNTDEVLRKSVYPARFGVHGGQYVPESLHRCLLELETCVEEAFADESFWEEFRSYFAYMNRPSSFHEAERLTEHCGGAKIWLKREDLNHTGSHKINNAVGQVILAKRLGKKELIAETGAGQHGVATATVAAKFGMKCKVFMGAEDARRQSLNVFRMRMLGAEVVKVEEGSKTLRDAVNEALRFWVTNLESTHYVIGSAIGPHPYPTLVRTLQSVIGRETKEQFAALNNGALPDAVVACVGGGSNSSGMFAPFENDKSVRLVGVEAGGDGIDTPAHSATLTKGQVGVFQGVKTYVLQNADGQIQDTHSISAGLDYPGVGPELSYWKDTGRVEFVAASDADALNAFRQLTQLEGIIPALESSHAIHGAMELAKKLPKDKNVVICLSGRGDKDVQNVAEQLPKLGPKIDWDLRFE

SEQ ID NO: 19666 - protein, 256 aa, Picrophilus torridus DSM 9790
MIRIALTQIHSSMDKESNLEKLRKYTEIAASNGADLIVFPEYFMFYSNDKKYLNENAEPINGIWVKNVIKIFNENSISGIVCINELNDNNVFDTAVYISGDVKGYYRKKMLYDAFGYRESDIYKSGNGPFNLYRINDISFGILICYEIRFPELFRNYSKNGADMIIIPSGWFSGPVKEEQWLSLLRARALENTVYIASSNQIYGDFTGISAVADPIGIISERAGESETMIFYDVKKERINDVRQKMPLLEQLNNLR

SEQ ID NO: 19667 - protein, 420 aa, Escherichia coli CFT073
MAWSQFPVILGITLTHRCPVNMNRIPVIIINGFLGAGKTTLMKNLLTQANRNHLAVSVIVNDMSDLDVDGVLIANTEIVNIANNNFVSITSDSISSQSGIKTVDKAIKNMLRHYLPDVIFVETSGGSHPLPLIKYLQTHERLQLKSLLSLVDTVMLNDDYNGGKALIPAFQENLFHGKRRIENLLAEQIMFCSTLLLTKKDRLSFDIVTDVAKAIHPLNPYVNVIAVSWGNLKLAELLTLPDYDFNRVGLLIRELEDTITVEEAKISAQNGEIISRVIKDDRPFHPQRLWETYHYFMGMGIYRSKGFFWLPGRPDMALLWNQAAGSINLEFISYWNSGVLADPDNHLTHEERSVLQKKVNKTMGRFGDRRCHLTIIGRSDEVHDFTSALINCFLSEEEIVWWQSGGVFADPWPVNISRLN

SEQ ID NO: 19668 - protein, 840 aa, Xanthomonas oryzae pv. oryzae KACC10331
MASAPSGTIDTGRPLARPFAAIVLRNAGGELFGSAGHFHPQLHVIGHPLRIQQVGLDCRAHRTAWLGDMRAIVEAALRRQRLHIRKTAFGQILFAGRLELAHAGRVDQTRTGRQRNQRAVRGGVTAARIVFAHPIGLHLLGAQQGVGQGRFARTGRAHQYRRTAIAQPRPQRSHAGRILGIDRAQRNVLRLQLFQHRQRILGMFGLIGLGQHHHRLRTAAAHQQQIALDATRIEVRIQPAHDEHRIDIGRDHLLVVMRAGRPPLDRSAPRQQRHDALALHQHPIAHRRPLMAGEARPLPLRQRLGLEAGLRRIGHHIAGAVLLHHPRRQRLRMRGEDCLPGRLFRRPRPGPADGLEGGVIGGDVAHGAILAGWPQRLVQSGPAGRLTRHLTSLPMQACPLVIFPIPCQVSRLQPARRMSTAPQKPLAIRERLSEVRYEIRGELARRARELEAQGRKLIKLNIGNPGAFGFRAPEHLQRAIADDMGRTDPYTHQQGLLEAREAVAKAYARRQHPDAHPDRIFIGNGVSELIDLSLRALLNPGDEVLVPSPDYPLWSAATILNDGRPVYYRCAPENGFQPDPVEIETLVSSRTRAIVLINPNNPSGASYSRALLERIVAIATKHNLLLLVDEIYDQVLYDGAAFVPVAPLAGAHPCITFSGLSKVHRACGWRVGWALLSGDQARINDLRNAMDLLGALRLCANVPGQYAIDAAVNGPDTISALCAPGGRLYETRRAVIEACAASEHLSLVAPAGALYAFPAVVGAAARNFDDHAFALDLMNKEGVLVVPGSSFNVPYRHHFRVTLMPEASVMRDVFARIDRALARRAEAVTKVVPLKSRSVA

SEQ ID NO: 19669 - protein, 130 aa, Chaetosphaeridium globosum
MPKPSKKINLRKIKKKVPKGVIHIQASFNNTIVTITDVRGQVISWSSAGACGFKGAKKSTPFAAQTAAEKALRPLIDQGMRQAEVMISGPGRGRDTALRIIRKSGITLNFVRDVTPIPHNGCRPPSKRRV

SEQ ID NO: 19670 - protein, 476 aa, Campylobacter jejuni subsp. jejuni NCTC 11168
MGKFVNNIDDFFKFCKQNEVLFVDFRFTDMIGTWHHITYNLHAINEETFQTGIPFDGSSIHGWQPIEKSDMILKPDAQSAFLDPFTADPTIIVFCDVYDIYKGQMYEKCPRSIAKKAIEHLKNSGIADTAYFGPENEFFVFDSVKIVDTTHCSKYEVDTEEGEWNDDREFTDSYNTGHRPRNKGGYFPVQPIDSLVDIRSEMVQTLEKVGLKTFVHHHEVAQGQAEIGVNFGTLVEAADNVQIYKYVVKMVAHLNGKTATFMPKPLYGDNGNGMHVHMSLWKNGVNLFYDKDGYSGLSQTAINYIGGILKNARSVAAFTNPSSNSYKRIVPGFEAPCILTYSCQNRSASCRVPYGIGKNSARIEIRFPDSTANPYLAFVSLLMAGLDGIKNKTIPVGPMDENLFDLTLDEIREKGIEQLPHTLRGSLEALIRHNSYLKPVMSDIFIDDYQHLKFETQVWPVEARPTAYEFKTCYSC

SEQ ID NO: 19671 - protein, 475 aa, Erwinia carotovora subsp. atroseptica SCRI1043
MMSTEIKAQVVVLGAGPAGYSAAFRAADLGLETVLVERYSTLGGVCLNVGCIPSKALLHVAKVIEEAKALAEHGIVFGEPKTDIDKIRLWKEKVINQLTGGLAGMAKGRKVKVVNGLGKFTGANTLEVDGENGKTTINFDNAIIAAGSRPIQLPFIPHDDPRVWDSTDALELKSVPERLLVMGGGIIGLEMGTVYHALGSQIDVVEMFDQVIPAADKDVVKVFTKRISKQFNLMLETKVTAVEAKEDGIYVTMEGKKAPAEPQRYDAVLVAIGRVPNGKNLDAGKAGVEVDDRGFIHVDKQMRTNVPHIYAIGDIVGQPMLAHKGVHEGHVAAEVISGKKHYFDPKVIPSIAYTEPEVAWVGLTEKEAKEKGISYETAIFPWAASGRAIASDCAEGMTKLIFDKETHRVIGGAIVGTNGGELLGEIGLAIEMGCDAEDIALTIHAHPTLHESVGLAAEIFEGSITDLPNPKAKKK

SEQ ID NO: 19672 - protein, 337 aa, Yarrowia lipolytica CLIB122
MPTTLVTGATGFLAGHCVDQLLKAGHTVIGTIRSPQKAERLAEAFKNEVESGKFELETLKDVQDEVEFQVIFEKHPEIDYILHTASPFNMKAEDPEKDMLQPAVKGTTAVLKMAKTHAPNVKKIVITSSLAAIMDVSKYNDPTHTLTEKDWNPMTREQAAEKGNPFANYVGSKLYAEKAGLEFLNNEKPHFSITWINPSYIFGPGIALDMSALNTSNELIAAVLQSKKGQNPEGSAGWFVDVRDCAEAHVIALKPELDRRRLLLGTSAFCTQDIEDIANKIPQLEGNIATGNPANRDKELKTVCQLDCSETDKLLGIKWIPLQKSVTDFAEQWIKSQ

SEQ ID NO: 19673 - protein, 247 aa, Prosthecochloris aestuarii DSM 271
MIKLVLLRHGESQWNRENRFTGWRDIDLSEKGLAEAANAGVLMKEEGLTFDIAYTSVLKRAIRTLWNALDTMDLLWVPVEKTWRLNERHYGSLQGLNKTETAQLHGEEQVLVWRRSYDTPPPPLEKTDERYPGNDPRYASLSSEEIPVAECLKDTVARFLPYWHETIAPQIKAGKKVLIVAHGNSLRALVKYLDNISEEDIVGINIPTGIPLVYELDDDLKPIRHYYLGDQEAAAKAAAAVANQAKG

SEQ ID NO: 19674 - protein, 361 aa, Dehalococcoides sp. CBDB1
MKAIILVGGQGTRLRPLSINTPKSMVPVLNVPFLSHVLRHLSSYGIKDIILTQGHLAAPIEQYFGNGQSLGVNLVYSVEHEALGTAGAIKNAERFLDDTFFTLNGDIFTHLDLDAMLQSHRDRKALVSIALTPVDDPTKYGLVETTPDGRVSRFLEKPSPSQITTNMINAGTYLIEPEVLKYIPEDENHSFERQLFPRLLNECQAVYAYPSSAYWIDIGSPEKYSQLNRDLLCGEGGDFGFSRGNEIIIGRGCQLHPTAQISGPVLVGENCVIGANARITGPVVIGAECRIEDEATLTESVIWRNVTIGTECKVVSSIIANHCHLKAGGKYENVVLGDNVTAECGCAPEPGSKVCPGILMI

SEQ ID NO: 19675 - protein, 672 aa, Xanthomonas oryzae pv. oryzae KACC10331
MASSARVRLPAAPPASACVTTFKDPAPGPARRFLMSTSPINSTILRAAFAAPLDPQRAAIVMARYDQHAPRLLDALQTLYGQRAHYAPWLTQWLGELGDLARQRPQALQTLDSTRHAGWFGEQHMLGYSAYADRFAGTLQGVAERVPYLQELGVRYLHLLPFLRARAGDNDGGFAVSDYGQVEPSLGSNDDLIALTTRLREADISLCADFVLNHTADDHAWAQAARAGDTRYLDYYHHFADRSLPDQYESALGQVFPHTAPGNFTWVDDTAQWMWTTFYPYQWDLNWSNPAVFGDMALAMLRLANLGVEAFRLDSTAYLWKRTGTDCMNQPEAHTLLVALRAVTDIVAPSVVMKAEAIVPMTQLPPYFGSGAGQGHECHLAYHSTLMAAGWSALALQRGDILHNVIAHSPPLPRNCAWLSYVRCHDDIGWNVLQHEAAGNAAQPPFSLRDVARFYANAVPGSYARGESFQSSGDGVHGTNGMAAALAGIQAAQEAGDAAGLAVAVNRLMLLYAIALAMPGVPLIYMGDELAMLNDTSYRDDPHRQHEGRWLHRPAMDWRLAAQRHDAESLSGTVYRRLRGLIQQRAALGALAADHALGSIALDDPRLFALSRGESFLAVHNFSDQPLEVELAAIGDGWELLAIGDDVDAAAPSDNVSLVLPAYGVRWLQRGA

SEQ ID NO: 19676 - protein, 117 aa, Oryza sativa
  misc_feature (53)..(53): Xaa can be any naturally occurring amino acid
  unsure (1)..(117): unsure at all Xaa locations
SLMSRNQEMVVKTQGPAEGFTLPFILLETNPHAVVEIEISEDMQLVHLDFNSXPFSVHDDAYILKLMQEQKQEQNRVSSSSSTHHQSQHSSAHSSSSSCIASGTSGPVCWNSGSIDT

SEQ ID NO: 19677 - protein, 363 aa, Caulobacter crescentus CB15
MLKGRKYHHFARARRPVAPRRHEILAYPDGAQFVFDTGKAVEVEGGYCALPDGDLLDAYSNAVVRAVEHVGPSVVRIHPMLADPRMSGVGSGFAIAEGGLILTNSHVVQGANRFIVITAEGRSLTARCVGDDPDTDLALIKVDQAVEIPTARLGDSKKLRRGQLVIAIGAPLGFEATVTTGVVSALGRSLRAERGRLIEDLIQTDAALNPGNSGGPLVSSTGEVVGIATAIIAGYQGLCFAVAANTAKFVIGELLAHGHVRRGSIGLVAQQAPIPPALARATGVNQPYAVYVAHVDAGGPAAKAGIKEGDLLIAAGEMLLTGLDDLLRALDNHSIGKPTVFTLIRHARLMQVTVTPRLRKPGA

SEQ ID NO: 19678 - protein, 492 aa, Xanthomonas oryzae pv. oryzae KACC10331
MHCSMRMAPIGRRFGDRKSAAAQRYNRLQRWQGTVRCGHWEPHRCPGLCMSSTVPPLSFARILALNAGFFGVQYSFGLQQSNMSPIYNYLGADHANLPYLWLAGPMTGLVLQPFVGAWSDRSVTRWGRRMPYMVLGALVCSLCLLAMPFSTVLWMAVCLLWMLDAANNVAMEPYRALVSDVLAPPQRPLGYLMQSAFTGLAQTLAYLTPPLLVWMGMNQDAANAHHIPYVTIAAFAIGAGFSAASILLTARSVREPAIPPAQIARLRQTGAGLGATVREIGSAVREMPPTMRQLAPVMLFQWYAIFCYWQYIVLSLSTTLFGTTDATSHGFREAGLVNGQIGGFYNFVAFLAAFAMVPVVRRFGPKFTHAACLVAAGIGMWLLPGIESRWLMLLPMIGIGLAWASMMGNPYLMLADSIPPERTGVYMGLFNLFIVLPMLIQIVTLPLYYDRLLHGDPRNVIRLAGALMLAAAVAMVCVRLRKPKAVLVESRS

SEQ ID NO: 19679 - protein, 452 aa, Erwinia carotovora subsp. atroseptica SCRI1043
MDNQQTDGTLKRGLKNRHIQLIALGGAVGTGLFLGIAQTIKMAGPSVLLGYAIGGLIAFLIMRQLGEMVVEEPVAGSFSHFAYKYWGDFAGFASGWNYWVLYVLVAMAELSAVGIYVQYWWPDIPTWVSAAVFFLLINAINLANVKVYGEMEFWFAIIKVAAIIGMIAFGGWLLISGTGGPEATVTNLWAQGGFFPNGGLGLVMAMAVIMFSFGGLELVGITAAEADDPEKSIPRATNQVIYRILIFYIGSLAILLSLYPWGKVVEGGSPFVMIFHELNSNVVATILNVVVLTAALSVYNSCVYCNSRMLFGLAKQGNGPKVLETIDSRGVPVVAIGISALATALCVLINYLIPGKAFELLMALVVSALVINWAMISLAHLKFRAQKDKEGTVTKFKALLYPLGNYICLLFLAGILVIMFLTPGIQISVMLIPVWLIILGVGYFIKKKNQAK

SEQ ID NO: 19680 - protein, 392 aa, Streptomyces platensis
IGVVAPGDVGTKPFWEMLTAGRTATGTISSFDASPFRSQVAAECNFDPAAEGLSQRQIRAWDRTTQFAYVAAREALEDSGISGETDPLRTGVMVGTACGMTMSLDREYAVVSDEGRLWEVDPAHGAPYLYDYFLPSSMVKEIAWLAGAEGPAGVVSAGCTSGIDVVTHATDLIRDGAAEVMVTGASDAAISPITVACFDAIKATTPRNDEPETASRPFDRTRNGFVLGEGAAFFVLEELGHAQRRGARPYAEIAGHAARCNAYSMTGLRSDGKEMADAIRAALDRARMDPTDIDYVNAHGSATKQNDLHETAALKRSLGEHAYATPVSSIKSMIGHSLGAICALEVAASALTIEHSVIPPTANLHEPDPALDLDYVPLRAREAQVDSVLSVA

SEQ ID NO: 19681 - protein, 393 aa, Streptomyces albus
MEVLAPGGVGTKNFWSLLSEGRTATRGITFFDPAPFRSRVAAEIDFDPYAHGLSPHEVRRMDRAAQLAVVAARGALADSGLETAALEPHRTGVTVGSAVGATMGLDEEYRVVSDGGRLDLVDHAYAVPHLYNHLVPSSFAAEVAWAVGAEGPSTVVSTGCTSGIDALGYALELVREGSVDVMVAGASDAPISPITMACFDAIKATTPRHDDPEHASRPFDGTRNGFVLGEGSAFFVLEEWESARRRGAHVYAELAGYATRSNAYHMTGLRTDGAEMAEAIRLALDEARLAPEAIDYVNAHGSGTKQNDRHETAAFKKSLGAHAYATPVSSIKSMVGHSLGAIGSIEIAASALAMEHHTVPPTANLTTPDPECDLDYVPLHAREQRTDAVLSVG

SEQ ID NO: 19682 - protein, 179 aa, Triticum aestivum
  misc_feature (119)..(119): Xaa can be any naturally occurring amino acid
  misc_feature (134)..(134): Xaa can be any naturally occurring amino acid
  misc_feature (156)..(156): Xaa can be any naturally occurring amino acid
  misc_feature (163)..(163): Xaa can be any naturally occurring amino acid
  misc_feature (173)..(173): Xaa can be any naturally occurring amino acid
  unsure (1)..(179): unsure at all Xaa locations
MAPTVMASSATSVAPFQGLKSTAGLPVSRRSNGASLGSVSNGGRIRCMQVWPIEGIKNFETLSYLPPLSTEALLTQVDYLIRSKWVPCLEFSKVGFIFREHNASPGYYDGRYWTMWKLXPMFGCTDATQVINEXVQEVKNEYPDAYVRIIGFDNMXRQVQGVXPFIAFKPPGXKESGKA

SEQ ID NO: 19683 - protein, 471 aa, Pyrococcus furiosus DSM 3638
MCLITGGINLTKEEIVKMIITGKHRGPDSFGVWSDGLVIKSEDFSEIKEIRGGNVVLAQCRLAMTGSKNYTQPFYNDIVLVHNGEIYNHESLRKWLIERGASFESDVDSEVILRLLEYFIFDKKMKVEEAVKKAMLMLRGDYAVAFALNGKIYLFRDPIGVRPLYYSPRGRFGSEKKVLWSVGEEAIPVNPGELVKLPEEEKMKLLSPWDIKGSGKGYYDGLKNLLQDAVRIRTAKKVGVLFSGGLDSSLIALLASKYSKVVLYTAGTEDSKDVEWARKVSDELRLELREYIFTREEVEREIKNVMFAIEEPNPMNLAIAIPLYFATKLARKDDVKVLLSGQGADELFGGYAKYLENPSLMRKDIEEIAERNLGRDDKVGMLNGVEVRYPYLDLPFVSLALRVPLEEKIREGVRKAILRRIALDFGLPEEVAFREKKAAQYGSNAQKILSKIAKKSLREFAQKLFSEVFST

SEQ ID NO: 19684 - protein, 394 aa, Streptomyces steffisburgensis
IGVVAPGGTGAKKFWDLISAGRTATRRITFFDPAPFRSQVAAECGFDPRDEGLSPQQIRRTDRSAQLALVSARECVEDSGLDLAALDPARTGAVVGSAVGCTMGLEEEYVVVSDGGRTWQVSEEYAVPHLLNYYVPSSLAAEVAWDVGAEGPVATVSTGCTSGLDSVGQAVELIAEGSADVMVAGAADAPIYPITMACFDAIKATTFRRNDDPSTASRPFDRTRNGFVLGEGSAMFVLEDLDHALRRGAYVYAEIAGFASRCNAFHMTGLRPDGKEMAEAIRVALARSGTAPEDIDYINAHGSGTLQNDRHETAAFKRSLGAHAYRTPVSSIKSMIGHSLGAIGSLEIAACALAMRNGMVPPTANLHTPDPDCDLDYVPLVARERRVDTVLSVG

SEQ ID NO: 19685 - protein, 615 aa, Burkholderia vietnamiensis G4
MCVVRFSFVSKKRLSIPQTIVHYGGDIRQPEKMGGLRKIEIAAIGFMRRSRWFPGSIETGSSVSECCSVKSTRYVFCSMLRSGNFRTLSLIDAAIIDVFPAYRHLVDPFGPRGFYPDAAYFRLIGSSITEAGASARAAIWPGKSPVPGRGGAAGVLARDARPAGPVVRPSQRRAVRPRAPLARGRGTRNHRSIRHALWRATLVRLSSSFLPAMSLDHSPIPCPVVVPLDAILPEEPLLMMGAGPVPIPAAVAKANTIVINHLGATMAKIIEQVKEMARYVFQTRTKWVLGVAGPGSAAMEMAISNLAWRGTRVLSIRNGFFSARMAEMATRVGADVATLEVADRSVASLDEIADAIARERPEIVTIVQGETSNTVWNRDLREIAALAKAAGALVVVDAVCTLSTMPLEMDAWGIDAVITGGQKGLSSIPGVSLIAFSDAAWDRMKQRPEPNAHWCLDMALAENFWHNAGYHYTAPVSGVLALHEALRLVCAETLESRFARHLRCTLALQAGIEAMGLELYTPKECRLNSVVGIETPAGLTPGMVCGHISKQYQVEISGSFGLPIVRIGQMGEQCREHNLFRTLHAFGRTMVDLKVPVDLPAGVAALEQELSRRGM

SEQ ID NO: 19686 - protein, 2761 aa, Ustilago maydis 521
MHPRQPSGPGSTDAMEIYDHLHTPKHEIDVADAFAAAMPSAIDPNQPSLRSVPEDAQLDTQQLSSLNASPLASSLQPSSQVAQQESPTSRRSDKLATSSYGLVQPGGRPDLASRRSSDVLKSLPGLPLALTNAEQTFLPATLNGGTSSAIPHPSAAIGSLVDHRAPPADTLPPQHIPRPLPGSATPSASASPSAMQTPPKKTPYDAIAAGVQTLAMPNSISVGPLSPPESDPHRSMMDSNRKSIDDIRRNHAARAAQRQSNNSSPIETRPGNGLVPDSAYTPTRAHAQYQSEFASSPDPTQRQRRAMASEPPRPASVLDTRAAQMQAVQRRQHDSRLGQGSSDTFDATDTLGSSRDTQLDRASQQHLQLRAAREQELERERLQHQQLQEQQREKEQQRQREKLKEREREKEREREREKERGERDRDRDRERRSRRLLGDYALGKTLGAGSMGKVKLGVKMGNGEKVAIKIIPRHTSMAAAQSPRAAVDENGKPQPPPPPPTASFLAKAAAKDQSKEIRTIREGSLQILLHHPYVCGMREMIIHTNHYYMVFEYVNGGQMLDYIISHGRLRERSARKFARQIGSALEYCHRNSIVHRDLKIENILISKTGNIKIIDFGLSNLFSPHSHLSTFCGSLYFAAPELLNAKVYTGPEVDVWSFGIVLYVLVCGKVPFDDQSMPALHAKIKRGQVEYPAWLSGECKHLLSRMLVTNPANRATLAEVLAHPWMVKGYEGVPDPHLPDRTPLRPHNIDQEVIKGMTGFEFGSPEAITAKLIEVLNSEAYQTSLYHWELKNLPASLTGLSTVSNSGSSIDSPGLNRPSTRGSFTATSGSDTVKSKAGSRRFSGIDFYKKKLTTNPLAAAFGSKDDSAVGSANGSSNGLGSGTGLLPFGKEPLDPTRGFHPLISIYFLVKEKMERERLYGHSFFASSNLSLNGPPVPSTGAVAGAGTGARAAAAGAMPTAADIPQEALRVPEVPHVSHRAYDPSRQQEAALASPAPPRPAAAMIPVPASPTPVFESREKSRPSGLMAGPPRARANADEMEAALREKCLPSPKDAGFAPGIGGMAPVPAASTPGMRQSFSVVPPGPEVAIGHNHRHSMMAPDISMAITNNHKRSVSLTARRPPGAAAAGRTPVGAMVEPSTPDAFSMDTRRMSTMSPARLPARASYIATPSKSEAGSAEPSSSPAATAHNTSSTLGYGATLARRFSSFMGRSPSQPLDTEARERKKQSRMSMPLGGLPQQQQQQHQQRRGSAHMPLSEVDEADTGTDVDAYDYDEVEEHLVTHDEDMPLGSGTTVRRSGTMGDMPASHANTRVSEASMGALSVGRAAGLSMSPKSTAAAKSGRRPSTGISPSTSMPLNVLDAGGAARQKEDALQQVSPSNARTGWMGPSTPGQAEVLPALVTRRRFGGGSNATGGQQNGSSASEGGSKPIFLKGLFSVQTTSTKPRTVIHASLVKVLDRIGIQYRELRGGYECVHLPSLDFSGSDSLGRGNARIPLETMAAAAAADAEASERSPTSEENNRQPKRKPSRLSFVSGRSKDKDRANRKEGSVAESIGALTGAGGTVRSRTPSLTSNAAFANADSTTLPPLPPKTPSKPSLLIRSPRQRADSMGAASMLGPSGSRDSNLMLDTTVAAGSGGDACALSPASAAGTVTARTMNAAQATELAVRFEIFVVKVPLLLGVNGLQFRRVGGNPWQYQMLAKRILQELKLPVLWNDRGSWIRMVAFHVWKHSRFTIHDSRFGVSKEAGEIHREWSRSRVGRIVCETRHAAVEPVLGTTFYHTFILTIKNAADDHKQVWQRYISPARIRNETCSISKMHKDYTTLHSVAPDKARIDNLCCDIERCCFTDTIHTQGSFHSSSSAHKTLLSDIPSISPRSLVKYLDSYVVGQTRAKKVLAVGVWNHYLRVASNQRMKHEAEARLEAQQQQQQQQQQQQQLSEEETETQLQRNCTIPDHGVSEAASRSLRLGKYKARSEEAAGPISNPTAMQEKDEAMASLQDSWRSQHQIEQERNAERARDPHGEATRSLMFGRSEREWLVNAGGPSAIIEDDSKVAIQNGSGYAGRIAPKFGDDLKPPEKPEKPEKPMKRVSAQTPAEEASWKLEQRKWSSTTAAQENALAEAASRMHNAVLSDYTRDFHQKDHVVEGTSRIGVFGADEPLYFSSNTMRGSQHAGVRGPGSQSQMSRTDETENKWESSQERAAYAAGIAQERTKRALRLARERLSTSRNSDHPSERASTVDVCHVSDCTPRTHDAGKETASTSNPGIAFLSTQPGSLPFFEKSNILLLGPSGSGKTLLLRTLAQALDVPFVHVDATPLTMAGYVGEDVESIIQRLLVEAGWDVDRAQRGIVCIDEIDKLRKTGLGGGGGGAGGAGGGGGKDVGGEGVQQALLRILEGTTIQIANKAGANAGASAAGTATAASKVPKSYPRQAATGDVNGVETAGGLGPWYNHRRAQADSADAKWNSNSLSSSQTQAASLSVDTSSILFVLSGAFVGIDHVIRNRLDRLSGDPTTLNVSSEDQNEKPHAATLSQCDLLSRLEPSDLEQYGMIPEFIGRVPVSVVLNPLSHQDLIRVMTEPRNSLVDQYTSLFKLNGIELHISRGAIEEVVHRAMGTCSAANSKALVRNSADRGGGGGGARSLRRIMEDVLLDAFYESYGSSSVKYILVDRQSVRDTSEVKLFSRGQKLDFEARVKTEAQDWCTRQQQQKQTRHQGANPAKAIRKDGGALGDMDAARTAMARHKARALIRSRLRRTNRLVDPVIYV

SEQ ID NO: 19687 - protein, 393 aa, Streptomyces venezuelae
IGVVAPGGIGSRAFWDLLAAGRTATRGITLFDPVGLRSRIAAECDFDPAEHGLDPDLSRHADRYIQFAVVAAGEAVRDSGLDTDAEDPWRVAVSLGSAVGGTTRLEHDYVLVSEGGRRWDVDHRAADPKLHMAFSPSTLSSVVAEQFGARGPVQTVSTGCTSGLDAVGYAFHTIAEGRADVCISSASDSPISPITMACFDAIKATSPDNDDPEHASRPFDNNRNGFVMGEGAAVLVLEEYEHARARGAHIYCEIGGYATFGNAYHMTGLTGEGLEMSRAIDSTLDQARLDPTRIDYVNAHGSGTRQNDRHETAAVKRSLGSHAYDTPMSSIKSMVGHSLGAIGAIEVAACVLALKHQVVPPTANYETPDPECDLDYVPRDARPRKLRNVLSVG

SEQ ID NO: 19688 - protein, 469 aa, Zymomonas mobilis subsp. mobilis ZM4
MSDTRPILIWFRHDFRLRDNAAITAAIQSRNPVICFYIQESADAKTESAADWWVAESLLALNRQLKEKGGQLHLFEGDAEKIIPEIVQQSHACKLFWNRRYDFKGKETDQILKKSIRAMGLEVQSFPNNLLNEPWTVKNDKGQPFRIFSAYWRAVQRHMNIQAVLPCPENWVFSTREIRHCLGYKDIAILAKETQDSSWKIKLKQSHRFGENEAHKQLKSFIENDLAHYAKERDFPAKDGTSLLSAFLRSGQISSKQIWHEVTKNGSGEGTSKFLEELGWREFAWSVLWEHPDLNQHNLRPEFDKMPWKKASDNLQRWKEGQTGYPFIDAGMRALWQTGFMPNRLRMVTASFLVKHLLIDWREGKKWFAQTLVDYDPACNATNWQWVAGSGIESAPYFRIMNPILQSQKFDPDGQYIREWVKELADVSTAFIHTPWKADKQPANYPLPIIAHEEGRNRALRAWKEIRHA

SEQ ID NO: 19689 - protein, 286 aa, Triticum aestivum
  misc_feature (119)..(119): Xaa can be any naturally occurring amino acid
  misc_feature (167)..(167): Xaa can be any naturally occurring amino acid
  misc_feature (195)..(195): Xaa can be any naturally occurring amino acid
  misc_feature (212)..(212): Xaa can be any naturally occurring amino acid
  misc_feature (215)..(215): Xaa can be any naturally occurring amino acid
  misc_feature (226)..(226): Xaa can be any naturally occurring amino acid
  misc_feature (236)..(236): Xaa can be any naturally occurring amino acid
  misc_feature (259)..(259): Xaa can be any naturally occurring amino acid
  misc_feature (262)..(263): Xaa can be any naturally occurring amino acid
  misc_feature (265)..(265): Xaa can be any naturally occurring amino acid
  misc_feature (271)..(271): Xaa can be any naturally occurring amino acid
  misc_feature (274)..(274): Xaa can be any naturally occurring amino acid
  unsure (1)..(286): unsure at all Xaa locations
MQIFVKTLTGKTITLEVESSDTIDNVKAKIQDKQGIPPDQQRLIFAGKQLEDGRTLADYNIQKESTLHLVLRLRGGMQIFVKTLTGKTITLEVESSDTIDNVKAKIQDKEGIPPDQQRXFAGKQLEDGRTLADYNIQKESTLHLVLRLRGGMQIFVKTLTGKTITLXEVESSDTIDNVKAKIQDKEGIPPDQQRXFAGKQLEDGRTLADYNXQKXESTLHLVLRLXGGACKIFVKXTLTGRTITSGRVGALDTIGQCQXPRXXDXEGIPPXTSXRLIFAGKQLGGW

SEQ ID NO: 19690 - protein, 393 aa, Streptomyces nogalater
IGVVAPGGIGVKAFWDLLTAGRTATRGITFFDPAGLRSRIAAECDFDPAAHGLDAEQVQRADRYIQFALVAGEEAVRDSGLDLAREDPWRVGVSLGTAVGGTTRLEHDCVLVSHRGQRWDVDHGEAEPQLHRAFSPSTVASAVAERFGARGPVQTVSTGCTSGLDAVGYAFHTVQEGRADICVAGASDSPISPITMACFDAIKATSPNNDDPAHASRPFDNNRDGFVMGEGGAVLVLEELEHARARGAHVYCEFGGYATFGNAYHMTGLTKEGLEMARAIETALGQARLDPTAIDYVNAHGSGTRQNDRHETAAVKRALGHHAYDTPMSSIKSMVGHSLGAIGAIELVACVLALAKQVVPPTANYEIPDPECDLDYVPRVARERKLTSVLSVG

SEQ ID NO: 19691 - protein, 186 aa, Nicotiana tabacum
IYVISKDVMLNLLRDKFPGANDFGSEVIPGATSLGMRVQAYLYDGYWEDIGTIEAFYNANLGITKKPVPDFSFYDRSAPIYTQPRYLPPSKMLDADVTDSVIGEGCVIKNRKIHHSVVGLRSCISEGAIIEDSLLMGADYYETDADRRFLAAKGSVPIGIGKNSHIKRAIIDKNARIGDNVKIINS

SEQ ID NO: 19692 - protein, 492 aa, Corynebacterium efficiens YS-314
MGAAGVPARFILDSVSMSLSTASPTIVWFRDDLRIRDNAALAWAADRGPVIGLFIDEDQPRALGGAARWWRDRSLTLLVDALATHGVPLLRRSGDPVVLLTEVVRETGAAAVTWNRRYHGPLRERDAEIKTQLREQGLEVHSHAGFLLTEPWEVTSGAGTGYKVYTPFSKAAFPLADESAARLGDPMPAQLTGPDTPVADTGGIDAPDPFWAAEMATHCRPGEQAALDRLGDFLDRMRERGGYADGRDEMARAVTSGLSPHLRFGEISVHRVWEEITAAADAGDIDATDAQVFRKELLWRDFAWHRLYALPDMATTNVREQFNRFGWAWDEHEAARLVDGRHPLSPTSSDEFHVALAAWRAGRTGIPLVDAGMRELWATGSMHNRSRMVVASFLTKNLQIHWRHGEEWFWETLVDADPASNAFNWQWAAGSGDDASPYFRIFNPETQARKFDPDETYIRRWIPEYGTPEYPAPIVDLKESRREALDAYEAVK

SEQ ID NO: 19693 - protein, 291 aa, Solanum demissum
MELTCSTNPTPTSTKTPDSEVDTPPLIKPLSFSNGNNRHNHHHQPPPCTAVIYKECLKNHAASLGGHAVDGCGEFMLSPESTPSDPISLKCAACGCHRNFHRREPSDDSSPPAHFIDFRHHMFPQIKRFSPSPSPSPSLSPPPLPSLFQPQPVTPTGLKSENPNGRKRFRTKFTAEQKEKMHSFSEKLGWKLQKCDETAVDEFCNEIGVGKSVLRVWMHNNKNTIGKKDYQISNNSSRDHSFENKNGFNINGTASSNEEEDHHKSNNNDNSTTSNCELHLHISTNGSSSSS

SEQ ID NO: 19694 - protein, 607 aa, Yersinia pestis KIM
MQTFNADLAIIGAGGAGLRAAIAAAEANPQLKIALISKVYPMRSHTVAAEGGSAAVTQDHDTFDYHFHDTVAGGDWLCEQDVVDHFVHSCPEEMAQLEIWGCPWSRKEDGSVNVRRFGGMKIERTWFAADKTGFHMLHTLFQTSLKYPQIQRFDEHFVLDILVDEGQARGVVAMNMMEGTRVQIRANAVIMATGGAGRVYRYNTNGGIVTGDGMGMAFHHGVPLRDMEFVQYHPTGLPGSGILMTEGCRGEGGILVNKDGYRYLQDYGMGPETPLGEPKNKYMELGPRDKVSQAFWHEWRAGRTVATPRGDVVYLDLRHLGEKKLLERLPFICELAKAYVGVDPVKEPIPVRPTAHYTMGGIETNPQCETRIKGLFAVGECSSVGLHGANRLGSNSLAELVVFGRVAGEQAALRAMESGPANGSALDAQTRDVETRLSNLMKQEGTENWSKIRDEMGLSMEEGCGIYRTPELMQKTVDKLAELKERFKRVKITDHSSVFNTDLLYTIELGYGLDVAECMAHSALNRKESRGAHQRLDEGCTERDDVNFLKHTLAFHTPGGAPRIEYSDVKITKLVPAKRVYGGEATAQDAKDAKDAQDLKDKEQAND

SEQ ID NO: 19695 - protein, 223 aa, Arabidopsis thaliana
MVSTNPPVLPISTTATDTTNQPPIVTAVVESQPPVVRAFVNGVTETVCGGLSRSRPWSELLDRSAFTKPDSLSEAGTRFRKNSSYFRVNYVCIVALILGFSLLAHPFSLILLLCLAASWLFLYLFRPSDRPLILFGRSFSEYETLGGLILSTIAVIFFTSVGSVLISALMIGIATICVHGAFRAPDDLFLDEQDHAASGFLSFIGVPAIPSVAPSASSAASPV

SEQ ID NO: 19696 - protein, 609 aa, Emericella nidulans
MYLSTVLFPLLALNLGLSHARFVRETLELTWEYGSPNGGTAREMVFTNGEYPGPDLIFDEDDDVEVLVINNLPFNTTVHWHGLEMRETPEADGVPGLTQTPIEPGATFTYRFRAYPAGTFWYHSHYKGLMQDGQVGAMYIRRKPDALRPYAVITEDPRELAEIQYAEDNPYLMLATDWTYLTSAEYHNIEVESGYNVFCVDSLLINGRGSVYCPGYQYLEEVSDTALLSVLEGTHLTEKGCLQPDLHNVQGDYGPWNLSAVPTEVVFNCTPSSVEPPVIYVDPEFNGWVSLNFIGGAAQKAITFSVDNHPMWVYEVDGQFVEPREVEMVGVYSGARYAVMIKLDQTPGDYAIRIAVNGADQVMSVYAILSYVNQDWIHRENVPKAAIGPHTDTVGYMNYGGGNTSADVRQLLFTENLPAFAVPPPPPSSEVSTTLRTGMIRVNNSYSWSLGNNVLYEPEMTSSTPLLFEPDPLAVIAPKYALTTENNTWVDIVLEITADPRDLIHPPHPIHKHGNRAYIIGNGVGKFRWENVSAAEAEVPDLFYVNETAALRDTFVTDFFDSRLMDGAWIVIRYFVQDKFPSILHCHIASHQMGGMALALLDGVDVWDS

SEQ ID NO: 19697 - protein, 547 aa, Staphylococcus epidermidis ATCC 12228
MTQNSYKIPIQGMTCTGCEEHVTEALEQAGAKDVSADFRRGEAIFELSDDQIEKAKQNISAAGYQPGEEESQPSENSVDFNRDGDYDLLIIGSGGAAFSAAIKANENGAKVAMVERGTVGGTCVNIGCVPSKTMLRAGEINGLAQNNPFTGLQTSTGAADLAQLTEQKDGLVSQMRQEKYIDLIEEYGFDLIRGEASFIDDKTIQVNGQNITSKSFLIATGASPAVPEIPGMNEVDYLTSTSALELKEVPQRLAVIGSGYIAAELGQMFHNLGTEVTLMQRSERLFKTYDPEISEAIDESLTEQGLNLITGVTYQKVEQNGKSTSIYIEVNGQEQVIEADQVLVATGRKPNTETLNLESAGVKTGKKGEVLTNEYLQTSNNRIYAAGDVTLGPQFVYVAAYEGGIVANNALGLAKRKIDLRFVPGVTFTNPSIATVGLTEQQAKEKGYDVKTSVLPLDAVPRALVNHETTGVYKLVVNAQTQKLIGAHIVSENAGDVIYAATLAVQFGLTIEDLTDSFAPYLTMAEGLKLAALTFDKDVSKLSCCAG

SEQ ID NO: 19698 - protein, 444 aa, Xylella fastidiosa 9a5c
MNHSRSHTLFVQAQTRIPGGVNSPVRAFRSVGGEPFFVARADGPYLFDVDGHRYIDYVGSWGPMIVGHNHPAVREAVQVAISNGLSYGAPCAAEVTMAETIARLVPSCDMVRMVNSGTEATLSAIRLARGATGRNHIVKFEGCYHGHGDSFLVKGGSGMLTLGMPSSPGVPAELSKLTITLTYNDFDAATALFEEMGHHIAAVIVEPVIGNANCIPPRPGYLQHLRTLCTQYAVLLIFDEVMTGFRVALGGAQALYGVTPDLTTFGKIIGGGMPVGAYGGCRDLMQHIAPAGPIYQAGTLSGNPVAMAAGLAMLELIQAPDFYTHLSNAAAALCTGLQQAASQAGIAMTTQQIGGMFGLFFTDQQVETYAQATACNTDRFNRFFHAMLQRGVFFAPSAYEAGFISSAHSPDIIEATLEAARAAFQTIANEAAILSESEAPLKMP

SEQ ID NO: 19699 - protein, 362 aa, Zea mays
  misc_feature (194)..(194): Xaa can be any naturally occurring amino acid
  misc_feature (215)..(215): Xaa can be any naturally occurring amino acid
  unsure (1)..(362): unsure at all Xaa locations
MAILGELGTEILIPVCGVVGIVFAVAQWFIVSKVKVTPGAASAAGGSKNGYGDYLIEEEEGLNDHNVVVKCAEIQTAISEGATSFLFTMYQYVGMFMVVFAAVIFVFLGSIEGFSTKGQPCTYSTGTCKPALYTALFSTASFLLGAITSLVSGFLGMKIATYANARTTLEARKGVGKAFITAFRSGAVMGLLVXSQVGFVVLYITINVFKMYYGXDWEGLFESITGYGLGGSSMALFGRVGGGIYTKAADVGADLVGKVERNIPEDDPRNPAVIADNVRDNVGEIAGMGTDLFGSYAKPSWAALVVGFISSFENTLDFPGNGLTPLAVEVLSDFFFLVGSPPFFFNWFFFLKKKGGGRRKIE

SEQ ID NO: 19700 - protein, 325 aa, Arabidopsis thaliana
MTTMSDLSVDLVGEILSRVPLTSLSAVRCTCKSWNTLSKHQIFGKAELAATKQFLGFTVMDYKVCSLRFDLQGIRNDGDDFVDHGKSGLKIRNKAVKKNHGNGLHRKTGRCHIVERTCPQYSEIYDFNSSSWRLVEINPVWFLHSDRVSLKGNTYFFAQDLLKDAKIENYLLCFDFTAERFGPHLPLPVHSYDDVTLSCVRQEQLALLYGNNETDDSLEIWITNQIDPNAVSWSIFLKVDIKPLIGFPKDFDPGSFFIDEEKKVVVVYDLDGHLYSTKKNCAYQRLYIIGEDGYFTSVKIKCSDSPEFSAYAPSLVTYKPTNYAK

SEQ ID NO: 19701 - protein, 235 aa, Antirrhinum hispanicum
MATVQKSQHSHFFLLVGCIVHLSNFCSTTTAQFDYFKLVLQWPNSYCSLKTTHCPRTRLPSQFTIHGLWPDNKSWPLSNCRDTSADVLKITDKGLIQDLAVHWPDLTRRQRKVPGQKFWVTQWKKHGACALPMYSFNDYFVKALELKKRNNVLDMLSRKSLTPGDQRVDVSDVNGAITKVTGGIAILKCPEGYLTEVIICFDPSGFPVIDCPGPFPCKDDPLEFQVLSRRKFQDL

SEQ ID NO: 19702 - protein, 461 aa, Burkholderia pseudomallei K96243
MTSRDERLHRGLEERHINLMALGATIGVGLFLGSATAIRAAGPAILLTYILGGVAIFLIMRALGEMAIDNPVAGAFSRYARDYIGPLAGYLTGWTYWFMWIVTCMAEITAVGVYMHMWFPDVPNWIWTFAALIVMGAVNFIAVKLYGEFEFWFALIKIVTIVLMIAGGALMIVAGVGNGGVPTGVSNLWAHGGFLPNGWPGVVDALPIVMFAYLGVEMLGLTAGEARNPEKSLAKAVNSVFWRVVIFYVGALFVIMSVYPWNQIGTQGSPFVMTFSRLGIPAAAGIINFVVLTAALSSCNSGIFSTARMLFNLAEQGQAPERLASVNRRGVPVHGVLISVALLFVGVVLNYFAPQKVFVWLTSVSTFGAIWTWCVILIAQLRFRRRVSAERLARLPLRVPCYPLSSFVALAFLAFVVVLMAFSPDTRVALVIGPLWIAALTVYYYASQAGRRSPLGAPTDG

SEQ ID NO: 19703 - protein, 290 aa, Oryza sativa
MGKDEVMESGGAAGEFAAKDYTDPPPAPLIDAAELGSWSLYRAVIAEFIATLLFLYITVATVIGYKHQTDASASGADAACGGVGVLGISWAFGGMIFILVYCTAGISGGHINPAVTFGLFLARKVSLVRAILYIVAQCLGAICGVGLVNAFPNAYFNRYGGGANTLAAGYSKGTGLAAEIIGTFVLVYTVFSATDPKRNARDSHVPVLAPLPIGFAVFMVHLATIPITGTGINPARSIGAAVIFNNEKAWHNHWIFWVGPFVGAAIAAFYHQYILRAGAIKALGSFRSNA

SEQ ID NO: 19704 - protein, 342 aa, Candida albicans
MTTGTSKPKVLLVGEFIYSKQKWSELEEIAEVIQSESTTREQFIQDLKTKYNDITCIARTFYSINETGRFDADLAQHMPKTLKSVSHCGAGYDQVDVEPFTRLGVQVSNVTEPVERPTADVAVFLVLACMRNFLQGRQILMNGEWPSNGDKEAAGAPLGHTPQGKVVGILGMGGIGRAIRDRLKPFGFDRIVYYNRKQLSSELEKGAEYVTMDELFKQSDVIIIGVPLNAKTRHLIDKEAIQKMKDGVVLVNIARGAIIDEKHLPELIKSGKIGAFGADVFEHEPEVSPELVNLPNVVALPHMGTHSVEALTNMEEWVVCNVETFIKTGKLKTIVPEQQGIF

SEQ ID NO: 19705 - protein, 150 aa, Glycine max
REDDRRAWILDEYSEFHGHSPAVVTGKPVELGGSLGRDAATGRGVLFATEALLKEHGMSVSGQRFIIQGFGNVGSWAAQLISEKGGKVVAVSDITGAIKNTNGLDIPSLLKHSREHRGVKGFHGGDAIDPNSILVEDCDVLVPAALWGVI

SEQ ID NO: 19706 - protein, 269 aa, Oryza sativa
MSSASSMEALHAAVLKEEQQQHEVEEATVVTSSSATSGEEGGHLPQGWAKRKRSRRQRSEEENLALCLLMLARGGHHRVQAPPPLSASAPPPAGAEFKCSVCGKSFSSYQALGGHKTSHRVKLPTPPAAPVLAPAPVAALLPSAEDREPATSSTAASSDGMTNRVHRCSICQKEFPTGQALGGHKRKHYDGGVGAGAGASSTELLATVAAESEVGSSGNGQSATRAFDLNLPAVPEFVWRPCSKGKKMWDEEEEVQSPLAFKKPRLLTA

SEQ ID NO: 19707 - protein, 559 aa, Legionella pneumophila subsp. pneumophila str. Philadelphia 1
MCSIGEYLAKRLEELNISEYFAIPGDYNLILLDEVLKNEKIKMINCCNELNAGYAADGYARVKGVSALFVTYSVGGLSVVNAVAGAYAENLPILVISGGPNTNSIQDAEILHHTLATEDNLYVRDIFSRITAHVVCIRKPEQAAMQIDEAIAIAIAKKKPVYIEIACNIANYPISKPTQRAFNTYKISDSSSLAAAVEHAAEKLNSALKPSLIVGSKVRHCNAINSVSELAKCTGYAMAAMPDAKGFISEQHPNFIGIYWGPVSSSGCAEIIDSSDAYLLIGPNENDYTTVGYVWGINPHKSIKTTKGGVIIGETVYTNIFMNDFLRELSKKLKFNDASYKAYKRIAEETVVYPELDQPDAPLSSRYLFGQIQKMLSDKKALLAETGDSWFNCMRLSLPEGCPFEIQMQYGSIGWSVGALLGMQAALHNQKRVIACIGDGSFQMTAQEISTMIRYGYKPIIFLMNNACYTIEVQIHDGPYNVINNWRYAELVNVFRGEQSNAKSFVVKTNKELLTAIKQAEKTDALCFIEVFLDKDDCNKNLLEWGSRVANYNSRPPRR

SEQ ID NO: 19708 - protein, 426 aa, Yersinia pseudotuberculosis IP 32953
MSKSENLYAQAQQLIPGGVNSPVRAFTGVGGIPLFIERADGAYLFDVDGKAYIDYVGSWGPMILGHNHPAIRQAVIEAVERGLSFGAPTEMEVKMAQLVTDLVPTMDMVRMVNSGTEATMSAIRLARGYTGRDKIIKFEGCYHGHADCLLVKAGSGALTLGQPNSPGVPADFAKHTLTCTYNDLASVRQAFEQYPQEVACIIVEPVAGNMNCIPPLPEFLPGLRALCDEFGALLIIDEVMTGFRVALAGAQDYYHVIPDLTCLGKIIGGGMPVGAFGGRREVMNALAPTGPVYQAGTLSGNPIAMAAGFACLTEISQVGVYETLTELTDSLATGLRHAAKEENIPLVVNHVGGMFGLFFTNADTVTCYQDVMNCDVERFKRFFHLMLEEGVYLAPSAFEAGFMSLAHSNEDIQKTVNAARRCFAKL

SEQ ID NO: 19709 - protein, 1078 aa, Bradyrhizobium japonicum USDA 110
MSSKNRLDPIPQPPTKPVVGNMLSLDSAAPVQHLTRLAKELGPIFWLDMMGSPIVVVSGHDLVDELSDEKRFDKTVRGALRRVRAVGGDGLFTADTREPNWSKAHNILLQPFGNRAMQSYHPSMVDIAEQLVQKWERLNADDEIDVVHDMTALTLDTIGLCGFDYRFNSFYRRDYHPFVESLVRSLETIMMTRGLPFEQIWMQKRRKTLAEDVAFMNKMVDEIIAERRKSAEGIDDKKDMLAAMMTGVDRSTGEQLDDVNIRYQINTFLIAGHETTSGLLSYTLYALLKHPDILKKAYDEVDRVFGPDVNAKPTYQQVTQLTYITQILKEALRLWPPAPAYGISPLADETIGGGKYKLRKGTFITILVTALHRDPSVWGPNPDAFDPENFSREAEAKRPINAWKPFGNGQRACIGRGFAMHEAALALGMILQRFKLIDHQRYQMHLKETLTMKPEGFKIKVRPRADRERGAYGGPVAAVSSAPRAPRQPTARPGHNTPMLVLYGSNLGTAEELATRMADLAEINGFAVHLGALDEYVGKLPQEGGVLIICASYNGAPPDNATQFVKWLGSDLPKDAFANVRYAVFGCGNSDWAATYQSVPRFIDEQLSGHGARAVYPRGEGDARSDLDGQFQKWFPAAAQVATKEFGIDWNFTRTAEDDPLYAIEPVAVTAVNTIVAQGGAVAMKVLVNDELQNKSGSNPSERSTRHIEVQLPSNITYRVGDHLSVVPRNDPTLVDSVARRFGFLPADQIRLQVAEGRRAQLPVGEAVSVGRLLSEFVELQQVATRKQIQIMAEHTRCPVTKPKLLAFVGEEAEPAERYRTEILAMRKSVYDLLLEYPACELPFHVYLEMLSLLAPRYYSISSSPSVDPARCSITVGVVEGPAASGRGVYKGICSNYLANRRASDAIYATVRETKAGFRLPDDSSVPIIMIGPGTGLAPFRGFLQERAARKAKGASLGPAMLFFGCRHPDQDFLYADELKALAASGVTELFTAFSRADGPKTYVQHVLAAQKDKVWPLIEQGAIIYVCGDGGQMEPDVKAALVAIRHEKSGSDTATAARWIEEMGATNRYVLDVWAGG

SEQ ID NO: 19710 - protein, 168 aa, Kluyveromyces lactis NRRL Y-1140
MSDDFYSYSCETKDGSEYHMSELRGKVVLIVNVASKCGFRGQYGELQELYKEFHAKGFEILAFPCNQFMNQEPGSDEEIGKFCQEHYGVSFKIMKKCKVNGVNALPLYKYLKDQQPRMFGFTFVRWNFEKFLIDRSGRVHGRYSTLTKPKSMKEDIEQLLKQKSQLQS

SEQ ID NO: 19711 - protein, 481 aa, Yersinia pseudotuberculosis IP 32953
MKKTTLVLSALALSIGFAMGPVSSVVAAETAASSSQQLPSLAPMLEKVMPSVVSINVEGSAPVSSAGARGMPPQFQQFFGDNSPFCQDGSPFQGSPMCQGDLGGLGQGMPSKREFRSLGSGVIIDAGKGYVVTNNHVVDNANKISVKLSDGRSFDAKVIGKDPRTDIALLQLKDAKNLTAIKIANSDQLRVGDYTVAIGNPYGLGETVTSGIVSALGRSGLNVENYENFIQTDAAINRGNSGGALINLNGELIGINTAILAPDGGNIGIGFAIPSNMVKNLTSQMVEFGQVKRGELGIMGTELNSELAKAMKVDAQKGAFISQVVPKSAAAKAGIKAGDIIVSMNGKAINSFAGFRAEIGTLPVGSKMTLGLLRDGKPINVNVVLEQSSHSQVESGNLYTGIEGAELSNSNVSGKKGVKVDSVKPGTAAARIGLKKGDIIMGINQQPVQNLGELRKILDAKPPVLALNIQRGDTSLYLLMQ

SEQ ID NO: 19712 - protein, 579 aa, Halobacterium sp. NRC-1
MRNAKIVCTLGPATNDDASVRALADAGMTVARINASHGDAAARRELIETTRAVDAQTDKPLAVMLDTQGPEVRTAPIDDDGTIHIETGSDVAFVEGDTATPDRIGISTSIAAAEPGDTVLLDDGRIEADVDRVAGDTVHATVVSGGSLGSRKGVNVPGVELDVDVVTEKDRRDLALAAELDVDYVAASFVRDADDVLAVNRVLESHGADIPIVAKIERAGAVENLDGIIDAAQGVMVARGDLGVECPMEDVPMIQKRIIAQCRDAGVPVITATEMLDSMVHARRPTRAEASDVANAVLDGTDGVMLSAETAVGDNPTRVVETMDRIVREVEGSAEYSERQEQAVPTADGTAKTDALARSARYLARDIDASAVVVASESGYTARKAAKFRPSVPVVCATPSHDVRRQLALNWGVHANYAAVAEGDATTVVERAVQAAVDSGVVASGDTVVVLVGMMTELEGASTTNTLKVHVAAETLSTGRAVVDGRTTGRTYRADSGDLSDAPENAVVLLAHGFDGEFDGDLSKIGAIVSADAGLTGYPAVIARELDVPMVGDVDVDAVPAGDLVTVDGERGVVYEADQ

SEQ ID NO: 19713 - protein, 271 aa, Zea mays
MDVIATTTTIVSDLDSRQPEIEAPIRIQPAKPISFSNGKRCHHHHLASEAVAVATYKECLKNHAAGIGGHALDGCGEFMPSPSFNSNDPASLTCAACGCHRNFHRREEDPSSLSAIVPAIEFRPHNRHQLPPPPPPHLAGIRSPDDDDSASPPPISSSYMLLALSGGRGGANTAVPMSRKRFRTKFSQYQKEKMFEFSERVGWRMPKADDVVVKEFCREIAVDKSVFKVWMHNNKISGRSGARRANGGVVVGGVGDSRQSVVPTNGSFSST

SEQ ID NO: 19714 - protein, 373 aa, Glycine max
QLRRPPPSMNMDELLKNIWAAEETQAMAFSAGAAGGEGHNNNPISGGLQRQGSLTLPRTLSQKTVDEVWRDLIKDSSGGAKDGGSGNGGSSIPQRQATLGEMTLEEFLARAGVVREDVPQQQQQQQIGKPNNNGWFGDFPRPDNNNTGLLFGFQQPNRSNGNLGENTNLVPKQPPPPLSLNSNHSQRQAQQHQQQPPPLFPKPANVTFAAAPMHLLNNAQLASPGRRRGLIGVAEHSMNVGMVGLATANVTASASSKISPDVITRSNNVDNSPISPHYVINRGRKFSAIEKVVERRQRRMIKNRESAARSRARKQAYTFELEAEVAKLKELNRELQRKQEEIMEMQKNKDLDPACRPRVSKIHCLRRTLTGPW

SEQ ID NO: 19715 - protein, 658 aa, Xanthomonas axonopodis pv. citri str. 306
MGSEWGIGNGESEQQIAADAVREGTTVAIPDSRFPIPGTIGAYLHQHESKPLLRFITCGSVDDGKSTLIGRLLYDSKRLFDDQLAALESDSRRHGTQGGRIDYALLMDGLAAEREQGITIDVAYRYFDTDRRKFIVADCPGHEQYTRNMATGASTADVAVVLVDARKGLLTQTRRHSYIVSLLGIGHVVLAVNKMDLVDYDAQVFADIAEGYAALAAQLGIGQVQCIPLSALAGENLSSASMRMPWYSGPHLLQHLDTVQLEPPDAASGLRLPVQWVNRPNAQFRGYAGTIAAGQVRAGDAVVVVPSGRRTQVASVRDANGEVDSARAGQAVTLTLRDEIDISRGDIIAAIDDPPEVADQFAAHLLWMDDAASLPGRPYWLKIGTRTVAVSVSDIKHKVDVNTQERLAAKRLELNEVGYCNLALDEPIAFSPYARNRVLGGFILIDRQSNATVAAGTLEFALRRAGNVHWQHLDVDRGARARIKGQAPRVLWFTGLSGAGKSTVANLVDKRLHALGYHTFILDGDNVRHGLNRDLGFTDEDRVENIRRVAEVARLMADAGLIVLVSFISPFRAERQLARERFDQGEFIEVFVDVPLAVAEARDVKGLYRKARAGQIPNFTGIDSPYEAPQTPEIHLHADGENVEALAHHVLEYLGLER

SEQ ID NO: 19716 - protein, 531 aa, Novosphingobium aromaticivorans DSM 12444
MTYHSKIVEAGKAIAPFSQTWDGIEPESVARMRLQNRFHTGLDIARYTAKIMRADMAAYDADPANYTQSLGCWHGFIGQQKMISIKKHFGTTKGRYLYLSGWMVAALRSEFGPLPDQSMHEKTSVPALIEELYTFLKQADARELGMLFRDLDAAKAAGDAVNTHRLLHKIDEFETHVVPIIADIDAGFGNAEATYLLAKKFIEAGACCIQIENQVSDEKQCGHQDGKVTVPHEDFLAKIRAVRYAFMELGVDDGVIVARTDSLGAGLTKQIAFVKEPGDIGDQYNSFLDCEEVDAANLGHGDVLISRDGKLMRPRRLPSNLYQFRAGTGEDRCVLDCITSLQNGADLLWIETEKPHIGQIGGMVDRIREVIPNAKLVYNNSPSFNWTLNFRQQVFDAWQAEGRDTSAYDRAKLMSVDYDGTELGVEADERIRTFQRDAAAQAGIFHHLITLPTYHTAALSTDNLAKRYFGEEGMLGYVKQVQREEIRQGIACVKHQNMAGSDIGDDHKEYFAGEAALKAGGAHNTMNQFAA

SEQ ID NO: 19717 - protein, 264 aa, Crocosphaera watsonii WH 8501
MTSVSDCFQSLRDRGQCALIPFITAGDPDLDTTAKALRVLDASGADIIELGVPYSDPLADGPVIQAAATRALGRGVKLEDVLKIVKEVQPEIKAPIILFTYYNPIFYRGVEPFLQQIKAAGVQGLVVPDLPLEEAETLLKPAAAMGIEVTLLVAPTSPIERIQAIATQSQGFIYLVSVTGVTGMRTQVGSRVEELLKNLRSTTNKPIGVGFGISEPEHALQVKNWGSDAVIVGSACVKRLAQGTPEEGLNSLATFCQSLKQALL

SEQ ID NO: 19718 - protein, 441 aa, Kineococcus radiotolerans SRS30216
MLGTVDGGGYGRDMADSVTLKHAGGELDLPVTPATEGAAGFGIGSLLKETGLVTLDSGFTNTASCTSAVTYIDGDAGVLRYRGYPIEQLAEKSTFVETSYLLIYGHLPSAAELSAFTERIQRHTLLHEDLKRFFDGFPRDAHPMPVLSSAVSALSTFYPNSLNPFDEEQVELSTIRLLAKLPTIAAYAHRKSLGQPLLYPDNRLGLVENFTRLAFGNPAEDYEIDPVMVKALDQLLVLHADHEQNCSTSTVRLVGSGQANLFASVSAGIHALSGPLHGGANSAVLDMLEAIRNSDDDVDTFMTKVKNKEKGVRLMGFGHRVYKNYDPRAAIVKKTADQILSGLGKRDELLDIAMRLEEIALHDDYFVERKLYPNVDFYTGLIYKAMGFPTKMFTVLFALGRLPGWIAQWREMINDPATKIGRPRQVYIGEGARDYTEIGAR

SEQ ID NO: 19719 - protein, 571 aa, Candida albicans
MPEDYEKYRMGSSNESHQKLVQPISSSISKSNKKTKHQTDFVQDSDIIEASSINDEFGEVKRDLKARHVSMIAIGGTIGTGLFISTGSLLHTTGPVMSLISFLFVTTICFSVTQSLGEMATYIPISGSFAQFVTRWVSKSCGAANGWLYWFSWAVTFGLELSVVGQVIQFWTDAVPLAAWISIFFVILTIFNFFPVKFYGEVEFWIASIKIIAVFGWIIYAFIMVCGAGKTGPVGFRYWRNGYAWGDGILVNNNGKYVAAFVSGLINSIFTFQGSELVAVTAGEASPRALRSAIRKVMFRILVFYVLCMLFMGLLVPYNDPKLTQDGGFTRNSPFLIAMENSGTKVLPHIFNAVIVTTIISAGNSNIYSGSRILYGLAQAGVAPKFFLRTNKGGVPFFAVAFTAAFGALGYLACSSQGNKAFTWLLNITATAGLISWGFISVSHIRFMKTLQRRGISRDTLPFKAFFMPFSAYYGMVVCFIVVLIQGFTVFWDFNASDFFTAYISVILFVVLWVGFHFFFYGFGKDSFKMSNILVPLDECDIDSGVRDINDAEFDIPPPKNAWDKFWANVA

SEQ ID NO: 19720 - protein, 432 aa, Phytophthora infestans
VIGHVDAGKSTTTGHLIYKCGGIDKRTIEKFEKEAAELGKTSFKYAWVLDNLKAERERGITIDIALWKFESPKYFFTVIDAPGHRDFIKNMITGTSQADCAILVVASGVGEFEAGISKEGQTREHALLAFTLGVKQMVVAINKMDDSSVMYGQARYEEIKSEVTTYLKKVGYKPAKIPFVPISGWEGDNMIDRSTNMPWYKGPFLLEALDNLNAPKRPSDKPLRLPLQDVYKIGGIGTVPVGRVETGVIKPGMVATFGPVGLSTEVKSVEMHHESLPEAVPGDNVGFNVKNVSVKELRRGFVASDSKNDPAKATQDFTAQVIVLNHPGQIGNGYSPVLDCHTAHVACKFKEITEKMDRRSGKVLETAPKFVKSGDACMVILEPSKPMTVESFQEYPPLGRFAVRDMRQTVAVGVIKSVNKKEASGKGGAKKK

SEQ ID NO: 19721 - protein, 244 aa, Arabidopsis thaliana
MEQPMSPGTKSVDLRECMESLLRFSLRSHLNESVPSFDLDLTRDFCLHLLGEATDSTEKSAVYKLLATALSECLASEGDKNSNLEKYSKLIHGLGYDLINMLKEVNFELHVQEPYFTQLKDGLKTVEGRCAVGDYMRISSGAFLLFNKCLLLEVQDVHRYTSFSEMLKVEGLSKVLPGVESIEEGVQVYRNFYSEEKERMNGVVAIRVAKPANQPSAALAGVLSELKSSGIKSLLDEYTAGVTS

SEQ ID NO: 19722 - protein, 465 aa, Candida albicans
MFPNSPDAFHQVRMMQSLIKASNFKLQSMEFRCHSNNVCEYQMEMLHHLLSVEAKTLPSLSLIEQQPEIKLGMRPLLLDFLMEVITILNLSRSTFPLTVNLIDRYCSTRIVKKQHYQLLGLTSLWISCKNLDSKFKVPTLNDLRKICVDSYYKELFVEMEKHILKSLEWVVNAPTFDAFIDLYSNLLISNSSNFEVANIIKKSSHKIKLFSNYIGELFQFYPNIYYDYTSSQIALIAILITVLTLKIPVDLISLLNFYNGLVKTEMFKSNVEQGAEDQFEEILSVDSFKSLFNKSFFKNLIKIIDNPPSSLKIKYFAENGKYSVLMKQLVTTASNTLKCILDPVPTTPKANSFVKHQQQQHHYHPRPPMSINTSMIPLTPVSNSTSPNRFSPDQIFSENESTPGIAFGTMTPDSQSTSPGEKRSYECIDELEIGTSTIAGYTLKNHDTLKRSKSANYGTLFYLQQ

SEQ ID NO: 19723 - protein, 212 aa, Candida albicans
MSAEDTKPKTEESSSIPKPPTSNVFSMFGAKKEKKPEQEDSDNKKESDKKEEKDTSKSTGDDNEVAEEEEADVEFTPVVQLDKKVDVKTNEEDEEVLYKVRAKLFRFHGDSKEWKERGTGDVKFLKHKTTGKVRILMRRDKTLKICANHLISADYELKPNIGSDRSWVYTVTADVSEGEPEAQTLAIRFGNKENADLFKEHFDNAKKEAKKD

SEQ ID NO: 19724 - protein, 236 aa, Lactobacillus sakei subsp. sakei 23K
MKAITTTNAKPLEHHFHLSERLNNIRAGVLGANDGIISVAGIVVGVASAHQSQYTLFLAGISGMLAGAFSMGGGEYVSVSTQRDTQKSMMRLQKEAIQNEYDAEVASLQRTYESKGLPTPLANQVATAFMQKDSLDITLREKYNIELHHYFNPWHAAFSSFFSFILGSLLPILTILAIPYPYKVSGTVASIVVALIITGYTSATLGHANRFKGILRNVLTGVLTMVVTYLIGGSIG

SEQ ID NO: 19725 - protein, 698 aa, Candida albicans
MTSLQQQQQQQRVKYGPPHHIKRRPYHPILESLEFQTNQHLIQEYSLDIVNTLSQLESLTLVNPAMIDLQPEIQWFMRPFLLDFLIELHSSFKLQPTTLFLCLNIIDRYCAKRIVFKRHYQLVGCTALWIASKYEDKKLRVPTLKELTIMCRNAYDEEMFVQMEMHILSTLDWSIGHPTLEDCLQLAIDLNNLSNNTTNDIENKSVRPNRKSSISSAVTAVARFLCELSLYDKYFLSVPPSLIAITANLLSCSMLQIPHASITLKNLIEQEIINPQQKKQKKAFSSNSSRTTTASYTHQNQLDVRHSSFDEDIDLDSGDEGDDDEDYIDEFYETNNYDDTNATTFDESINKSTTINDENQPPQIHTPFLSGLDEDSILSIKKICLMLIIQLSKVTEVLSKKYENLGVIQVINNFHSNYKFIIQSIYENQELLLNTINDSTNNNEIDYKLIQSSEILLQFPKFDEYLTEDEDENVSTDDEANSQPQGYDGSGSDGNNQLFTPKSPNAFSSNSSLTLNNHPQSMVPVTPPSATSQYSLFSNKNNRTHESTSGLNSTCNTPTHISISSFAPPQPPPGSILKPKLTSINSTNSLKIKKLTSNSNSSNINIHHGHHNTKQEKRYSHISIGSNSSSKYDGFSPIKSISTNGSLITNNGSFTNIVNNTNSSSPLMNQQQQYYHQQQHQQQVTQSSLYQHHHQYHQ

SEQ ID NO: 19726 - protein, 267 aa, Thermoanaerobacter tengcongensis MB4
MEKGKETKDILVVDDSVLIRLMVKDILGGEGYNVVAAATSEEAVRKIKSRKELFDLIIVDINLPDQNGFEFIRNLKSEEKYRHIPVIILSIDATVPSIKRAVEAGAVDYLVKPFKAEELVKRVVKLVGSVKKEDRYPELKDLLKKEVNRARRSNTNLSLILAHCEGKIAGEISKIAGKIRSKLRDIDAVFEINENTLALVLPVTGREGAEVVVKKIQGELRGSWRYAISIYPDNGKDEEELIGFAKESLMKEESNSSQEDDKEKEEK

SEQ ID NO: 19727 - protein, 917 aa, Pseudomonas syringae pv. phaseolicola 1448A
MLTKLGIKGRVLLLTILPASLMAAMLGGYFTWMQLSELQSQLLQRGEMIAQDLAPLAANALGRKDKVLLSRIATQTLEQTDVRAVSFLDTDRTELAHAGPTMISPSPIGSGSQLLSSTGTDATRYLLPVFGSQRHLTSPIIPAEADTLLGWVELEISHNGTLLRGYRSLFASLLLILTGLACTATLAVRMSRTINGPMSQIKQAVSQLKDGNLETRLPPLGSRELDELASGINRMAATLQNAQEELQLSIDQATEDVRQNLETIEIQNIELDLARKEALEASRIKSEFLANMSHEIRTPLNGILGFTHLLQKSELTPRQFDYLGTIEKSADNLLSIINEILDFSKIEAGKLVLDNIPFNLRDLLQDTLTILAPAAHAKQLELVSLVYRDTPLALSGDPLRLRQILTNLVSNAIKFTREGTIVARAMLEDETEEHAQLRISVQDTGIGLSSQDVRALFQAFSQADNSLSRQPGGTGLGLVISKRLIEQMGGEIGVDSTPGEGSEFWISLKLPKAREDKEESLNIPLGGLRAAVLEHHDLARQALEHQLEDCGLQTIVFNNLENLLNGVTAAHETPAAIDLAVLGVTALEISPERLRQHIWDLENLNCKVMVLCPTTEHALFQLAVHDVYTQLQAKPACTRKLQKALSELIAPRAVRADIGPPLSSHAPRVLCVDDNPANLLLVQTLLEDMGAEVVAVEGGYAAVNAVQQEAFDLVLMDMQMPGMDGRQATEAIRTWEAERNQSSLPIVALTAHAMANEKRSLLQSGMDDYLTKPISERQLAQVVLKWTGLALRNPAPERQNEAPEVHVGPLVLDHEEGLRLAAGKADLAADMLAMLLASLDADREAIRVARASQDVHALIERIHRLHGATRYCGVPQLRTACQRAETLLKQNAAHTEEALDDLDKAIIRLESEARVTA

SEQ ID NO: 19728 - protein, 563 aa, Triticum aestivum
  misc_feature (488)..(488): Xaa can be any naturally occurring amino acid
  misc_feature (521)..(521): Xaa can be any naturally occurring amino acid
  unsure (1)..(563): unsure at all Xaa locations
MVGRSSLPDGALFLGLDSSTQSVKATVLSNELIIVASETVNFDSELPHYKTEGGVYRDPTDDGRIYSPTIMWVEALELLLEKLKPKINFSKVVAVSGSGQQHGSVYWKKGSQAVLSSLDPGKSLVSQLKDAFSTMDSPIWMDSSTTKQCREIENAVGGALELSKLTGSRAYERFTGPQIRKIYQTAPHIYENTERISLVSSFMASILAGCYASIDETDGAGMNLMDINQRTWSKAVLEATAPDLEQKLGNLAPAYAAAGRISSYFVERHQFDKNCLVIQWSGDNPNSLAGLTLNTPGDLAISLGTSDTVFGITAEAKPSLEGHVFPNPVEPDGYMVMLCYKNGSLTREDVRNQCAEKSWDVFNNYIEKTPPLNDGKLGFYYKDHEILPPLPVGFHRYIVKNFNDASSDNLTEHEVQEFDPRSEVRAIVEGQMLSMRGHAERFGMPNPPKRIIATGGASSNESILKLIAQIFGCPVFTVERPDSASLGXAALRAAHGWLCKEEGGFVPISRMYTGNLEKTSXLGAKLAVPAPGEEGRELLKKYTLLMKKRMEIERRLVEKIGRA

SEQ ID NO: 19729 - protein, 107 aa, Lilium longiflorum
RAAPAQASMVAPFVGLKSSSAFPVTQKPATGLPTLPSNGGRVQCMKVWPIVGKKKFETLSYLPTLPVEALLKQIEYLIRSGWVPCLEFSLVGFVSRDYHQSPGYYDG

SEQ ID NO: 19730 - protein, 337 aa, Lactobacillus sakei subsp. sakei 23K
MTKEQHKLLWAAGGAWLFDAMDVGLLSFVIAALAKEWHLNSGQMGLIGSVGSIGMAIGAVFFGALADKIGRRNSLLFSLLLFSIGNGLSALSPSLIVFMALRLLVGIGLGGELPVASTLISENTPDATRGRAVVLLESFWAAGWLAASLLAYFVIPNWGWRVVLLITSLPAIYTLVLREHVKDSHEPATIQKPLPFRQRVTKLWQPAYRQKTALLWFVWFLVVFSYYGMFLWLPSVMVLKGFSLVNSFGYVLIMTLAQLPGYFSAAWLIEKWGRKWVLGSFLIGTAISAYFFGTAQSVALLISAGPCYPFSTWVRGARFMPTHRNNIQPLFVVAVVG

SEQ ID NO: 19731 - protein, 619 aa, Shewanella sp. ANA-3
MISMDHTPQSQLKLLLAKGKEQGYLTYAEVNDHLPADMVDSDQIEDIIQMINDMGIRVFEEAPDADDMMMSEDNTDEDAAEEAAAALATVESELGRTTDPVRMYMREMGTVELLTREGEIVIAKRIEEGINTVQSSVAEYPQAIAMILEQYDQYEADELRLSDIISGFVNPDEEDLGPTATHIGSELSEEDLDDEDDDEDDEDEDGDGEGDDDGNKGPDPEEARERFSQLRTAYENALKIIDAKGREHPESIQALFEIGEIFKEFRLVPKQFDRLVKSMRSMMDRVRVQERLLMKLCVEQAKMPKKNFVKFFTGNETNLDWFDAEKNSTKPYAEGLRMVEEDVQRCRSKLAAIEEETGLVIAAIKDINRRMSIGEAKARRAKKEMVEANLRLVISIAKKYTNRGLQFLDLIQEGNIGLMKAVDKFEYRRGYKFSTYATWWIRQAITRSIADQARTIRIPVHMIETINKLNRISRQMLQEMGREPSPEELAERMMMPEDKIRKVLKIAKEPISMETPIGDDEDSHLGDFIEDTTLELPLDSATSESLKSATHEVLAGLTAREAKVLRMRFGIDMNTDHTLEEVGKQFDVTRERIRQIEAKALRKLRHPSRSEILKSFLDE

SEQ ID NO: 19732 - protein, 400 aa, Frankia sp. EAN1pec
MGRSFRGHEDAPPTDLSAPDEAAEEKIRSLIARGKENGFVTPDDIAAALLAAELPPESSDVVLRLLAEDGIEVLDEVGGDASDMPSRRREGEELALTTPPSDPVRMYLKAIGRVRLLTAEEEVDLAKRIEAGLFASEKLAAIRRTSPRLRRDLEAIEQDGQIAKRKLVEANLRLVVSIAKRYVGRGMLLLDLIQEGNLGLIRAVEKFDYTKGYKFSTYATWWIRQAVTRAIADQGRTIRIPVHMVETINKVTRIQRQLLQDLGREPSPEEIATQVDLAPHRVEEILKVGQTPVALETPIGEEQDSQLGDFIEDNDAIVPFEAASFVLLQEQIDSVLHTLSEREKKVIQLRFGLTDGQPRTLEQVGREFGVTRERIRQIESRTLAKLSHPARSQRLRDYLV

SEQ ID NO: 19733 - protein, 578 aa, Cryptococcus neoformans var. neoformans JEC21
MRLTAKLAVFSLVAAVSAQLDGLGSSSKAAFALKQKPDSRVARNVLEGKSEGYCSPSGPIESTHCLYETVESLNQQLFPVLHELVETPFFKHYKVDLYKECPFWYENGFCMNRNCGVEEMDENEIPEKWRARALSEVKVSSESDGVSSCYFKEQDFCYVEDDADANGQYVDLTLNPERFTGYAGDSAHNVWRAIYEENCFGLSEASLSEMSKASVGISGLGSKGKSELASAVVGAGGVSKPSRGINAAPGWGFSKLSEGWGTEMVKAPLNGEEMCEEKKIYYRVISGLHASISIHICADYLDQTTGKWAPNLECFISRLATHPERLSNVYFNAVLLLRAVARAAPYLEAYDISTSPAGLLKEGDKKAKARLGEVLSLAGGQSMEKGFDEADFFAGEDSGILKEQFKSHFRNVSRIMDCVGCDKCRLWGKLQVSGIGTALKILFELDDRALDPKVNPDLLQRSEVVALFNTLHRISESLASVEQFRQIYAATQKAETEASRAKALKSARKKHVPSPVAPPPAFSLTNMERIGARIWEKLKGNCKGCLEMCLQTLERRKLGELATSFRRWVGSIGQDRDL

SEQ ID NO: 19734 - protein, 181 aa, Cucumis sativus
MEMFHKISPSDFKTIDVNKYTFSLNGRKPLAVGQVSKLGGYNPFLQTSLPDEYRYYNAEKETAESSHRAFTATFLRGFALEIIQVYSGPPNIVFKFRHWGYMEGPFKNHAPTGEIIEFYGVAIFKVNEKDKIEGVEFFFDPAELVGKLLKGPDLDGSVEKAMSSCPVLRNTGLYYCVFLEL

SEQ ID NO: 19735 - protein, 1356 aa, Ustilago maydis 521
MAATLSAQSALPNQPTLMSRQTSSPLPDLASLPTDFLDHLLLVTQTLVNSKPPPAVLRAMSRDPTRKEQSSSNGDLFEAHLADDVASIDLDDPTSHAEGIVSLPLPQFNSAHSDERTKAIEENLAKLAERLWRAEDHLEVVARSQEIVRTPGAEEQPDDPNHARNLFFGKPFPYPLSHAQPQSSTYPLSYPLGMGLNGPVLLGGQHSRTDDPISSFERYNDESGLSAQEELRLLKAQVQDIARVCKAVAFGDLSQHITVPVQGHVMVELKDIINQMVDRLSHFAAEVTRVSLEVGTQGKLGGQAEVHGVEGTWKELKDVVNRLAANLTNQVRGVALVTKAVARGDLSQKIEVEADGEILELKVTINVMVDQLRHFSTEVTRVSREVGSKGQLGGQANVPGVQGVWKELTDNVNRMCSNLTGQVRSIGVVTTAVAKGDLTKTIDIDAEGEMAQLKDTVNSMVGQLRIFASEVIRMSMEVGTYGKLGGQAHVPNVEGTWKDLTENVNKMADNLTSQVREIARVTKCVAEGVLTEFINVDVKGEILDLKLTVNNMVRQLKTLSDEIIRVSVEVGTEGRLGGQAKVNDVKGQWQVLTERVNMMASNLTTQVRSIATVTTAVARGDLSKTINVEVRGEFLDLKLTVNNMVESLRTFSFEVTRVAKEVGTEGKLGGRATVLGVGGTWKDLTDSVNTMAANLTLQVRAIAYATTAVARGDLTQKVTIPVSGEMLDLVNTINNMIDQLSFFASEVTRVAREVGTEGKLGVQAQKKDIEGTWGEITDNVNIMANNLTSQVRAFAQITAAATDGDFTRFVTVEASGEMDSLKTKINQMVYSLRDSIQKNTAAREAAELANRSKSEFLANMSHEIRTPMNGIIGMTALTLETELSRSQRENLVTVSTLAGNLLAIIDDILDISKIEAGRMNVEEIPFSLRGIVFSVLKTLSVRATQKKLNLMYEVAPDCPDPLIGDALRLKQIITNLIGNAVKFTDAGGRVALKCKLSKMVGSNQAMLEFCASDSGIGIKQDKLDVIFDTFCQADGSTTRKYGGTGLGLSISRRLVNLMGGDLWVRSNYGKGSDFFFTMVVKLDQISPDQVKEKIRPYTGRNIFYLDTLHDKTGVQAMIEDLGLKPFTVHSVDEASHRKRGMPRIDAIIADSLAVVEDLRNVEHLRYIPINLVSPAQLTLNLTYCLDHGISSYINTPTSVADLYYALLPSLESSAATPTEGSNEVTYDILLAEDNVVNQKLACKILTNQGHKVDIVDNGHLAVMAVKKRQYDVILMDVSMPVMGGIEATMAIREFEKTLGDEQVPIVALTAHAMLGDKEKCLQAGMSAYVSKPIRRVELISTLHSLLSQKKSVGGKV

SEQ ID NO: 19736 - protein, 351 aa, Arabidopsis thaliana
MEKKKVTIPQVCHGHSRPVVDLFYSPITPDGFFLISASKEYSCLDGLDSHPMLRNGETGDWIGTFEGHKGAVWSSCLDNNALRAASASADFSAKLWDALTGDVLHSFEHKHIVRACAFSEDTKSLLTGGFEKILRVFDMNRLDAPPTEVDKSPGSIRTLTWLHSDQTILSSCTDIGGVRLWDVRSGKIVQTLETKSPVTSAEVSQDGRYITTADGSTVKFWDANHFGLVKSYDMPCNIESASLEPKSGEKFVAGGEDMWVRVFDFYTGEEIGCNKGHHGPVHCVRFTPTGLSYASGSEDGTIRIWQTTPANPEENETSSRRVKHSVDEVSKKIEGFHINKEGKTAEKPSDT

SEQ ID NO: 19737 - protein, 233 aa, Caulobacter crescentus CB15
MTRLKVHVERHAVSRIGWLRAAVLGANDGIVSTASLVVGVAAAEATRGPILLAAGAGLVAGAMSMAAGEYVSVASQADSEAADLARERAELATQPEEELEEMTAIYVARGLTPDLARQVAEQLNAGDALAAHARDELGISEHVTARPVQAALTSAATFAVGAAMPLVVSLLAPLPVIIPTISVATLVFLAVLGWLGARTGGASPWKPMLRVTFWGALALLVTAVIGKLFGAVV

SEQ ID NO: 19738 - protein, 209 aa, Zea mays
MAARCGTAASVVRTGSRDLSPSFSFTAAALPSARLRPVGAWVRGGGYTCRLRAVRAMGSAPSSSQSPSPHTPSGQTQGKADYKSLSEEEWKKRLTEEQYYVTRQKGTERAFTGEYWNTKTPGIYQCVCCDTPLFQSSTKFDSGTGWPSYYKPIGENVKSKLDMSIIFMPRTEVLCATCDAHLGHVFDDGPPPTGKRYCINSASLKLKPQ

SEQ ID NO: 19739 - protein, 425 aa, Shewanella sp. ANA-3
MSTTNDSLMARRQAAVAGGVGQIHPVFTARAENATVWDVEGREFIDFAGGIAVLNTGHLHPKVKAAVAAQLEDFSHTCFMVLGYESYIQVCEKLNQLVPGDFAKKTALFTSGSEAVENAVKVARAYTKRAGVIAFTSGYHGRTMAALALTGKVAPYSKGMGLMSANVFRAEFPCALHGVSDDDAMASIERIFKNDAEPSNIAAIILEPVQGEGGFYAASPEFMQRLRALCDREGIMLIADEVQTGAGRTGTFFAMEQMGVSADITTFAKSIAGGFPLSGITGKAEVMDAIGPGGLGGTYGGNPLACAAALAVLEVFEEEKLLERANAIGERIKSALNTMQVEHPQIADVRGLGAMIAIELMEEGKPAPQYCAQILAEARNRGLILLSCGTYGNVLRILVPLTVPDEQLAAGLGILKSCFDAVLKG

SEQ ID NO: 19740 - protein, 350 aa, Ustilago maydis 521
MSTSAAPGKLATTLGANVSSLASKVRSTSSTQQSLMQSVKRIIPPLSSAKHKGQAGRIGIVGGSRDYTGAPFFASMSSMRFGCDMSYTICTPEAGNVIKTYSPDLIVNRLLDASVEWSQVERSVDELFARFHAVVIGPGLGRDEFMQKCAKLCIGLARKHDMYLVVDADGLWLLQNEPDLIKGYKKAILTPNVAEFGRLCDTLGIDCKQEPDSAAKKLAQALEGPTVLEKGPVDRITNGKEVLYVDLQGGLKRCGGQGDVLAGCLGTLAGWAKIYQDENPTLPARSTTTDGDLIAEDRLLLLAGYAASVTARTCSRLAFAKSKRAMLADDLLPEVGRAYEELWGDVQALL

SEQ ID NO: 19741 - protein, 482 aa, Shewanella sp. ANA-3
MLLKDPSLLRQQCYINGQWCDAQSKETVAIANPATGAVIASVPVMGQAETQAAIAAAEAALPAWRALTAKERGVKLRRWFELLNENSDDLALMMTSEQGKPLAEAKGEVTYAASFIEWFAEEAKRVYGDTIPGHQGDKRIMVIKQPVGVTAAITPWNFPAAMITRKAAPALAAGCTMVVKPAPQTPFTALALAVLAERAGIPAGVFSVITGDAIGIGNEMCSNPVVRKLSFTGSTQVGIKLMEQCAPTLKKLSLELGGNAPFIVFDDANIDAAVEGAMIAKYRNAGQTCVCANRIYVQAGVYDEFARKLSIAVGKLKVGEGIGEGVTTGPLINCAAVEKVQSHLEDALSKGATVVAGGKPHSLGGNFFEPTVLTNVDSSMRVAREETFGPLAPLFKFTDVDDVIKQANDTEFGLAAYFYGRDISLVWKVTEALEYGMVGVNTGLISTEVAPFGGMKSSGLGREGSKFGIEEYLEIKYICMSV

SEQ ID NO: 19742 - protein, 326 aa, Zea mays
MAASAGTVYEADAEAVVRRITPALDRARHKGQAGKIAVIGGCREYTGAPYFAAISALKVGADLSHVFCTKDAATVIKSYSPELIVHPILEESYSVRVDERASVSSKILTEVAKWMERFDCIVVGPGLGRDPFLLECVSNIMRHARQANIPTVVDGDGLFLVNNNLNLVEGNPLAILTPNVYEYKRLVQKVLNCDVDEETASEQLIALCQKIGDVTIMQKGKADVISDGKTVTQVSTFGSPRRCGGQGDILSGSVAVFASWARHFVLTNEEPTEKRVNPMTLGCIAASLLLRKAASHAFEKNKRSTVTSDIIEFLGKSLEDICPAEH

SEQ ID NO: 19743 - protein, 308 aa, Triticum aestivum
  misc_feature (101)..(101): Xaa can be any naturally occurring amino acid
  misc_feature (127)..(127): Xaa can be any naturally occurring amino acid
  misc_feature (290)..(290): Xaa can be any naturally occurring amino acid
  unsure (1)..(308): unsure at all Xaa locations
KRGPPPLPKSTGGGGRGLCHFFDFRAPETRFPATHPRVVRGPEKIGPFVDSPALFTKPLKALSPGGQRFPFNTAFSAHPKFRPASGHLLPALHGNRHFPSXASPGESHPHLLDDILKGLAPSVTDIXGACTWPPRAPEPYVTKCLAKDRGSTSVLLGFRVSGVMVSDASGAVWRPDRSELKGTDIPGVRRMLRRYVSSAGGDGGGEDCALAAAVYGGEGGVLAQLRELKAWFEVQTLFHFYSASVLLSYDANAVTAPGGAPRVKLVDFAHVVESEGVIDHNFLGGLCSLXIKFIDDIVSSDKAPPVQS

SEQ ID NO: 19744 - protein, 127 aa, Wolbachia endosymbiont of Drosophila ananassae
MSYNEKILDHYENPRNVGSLDKNDPNVGTGLVGAPSCGDVMKLQIKVNDKGVIEDAKFKTFGCGSAIASSSLLTEMIKGRTISDVTQIKNTQIVEELSLPPVKIHCSVLAEDAIKAAIHDYQSKQKN

SEQ ID NO: 19745 - protein, 593 aa, Bacteroides thetaiotaomicron VPI-5482
MNLPVKQKHFLSFSRKLFLSVISLFLVFAFCFIAYQYQREREYKVELLNTQLQNYNSRLYERLNSNPAIEETTEKYIRDHALEDLRVTLIDLQGNVIYDSYQTTDQQLENHLNRPEVQKALKDGTGFDVRRTSETTGLPYFYSATRYGDYIIRSALPYNVSLINNLQADPHYLWFTVIVSLLLMVIFYKFTNKLGTSISQLREFAMRADRNEPIEMAMQSAFPHNELGEISQHIIQIYKRLHETKEALYIEREKLITHLQISHEGLGIFTKDKKEILVNNLFTQYSNLISDSNLETTEEVFAISELKDIIHFINKNQQQRSRGKDEKRMSVTINKNGRTFIVECIIFQDASFEISINDVTQEEEQVRLKRQLTQNIAHELKTPVSSIQGYLETIVNNENISRDKINTFLERCYAQSNRLSRLLRDISVLTRMDEAANMIDMERVDISVLVGNIINEVSLELEEKHISIVDSLKKGIQIKGNYSLLYSIFRNLMDNAIAYAGTNIQININCFREDENYYYFSFADTGIGVSPEHLNRLFERFYRVDKGRSRKLGGTGLGLAIVKNAVIIHGGNISAKNNQGGGLEFVFTLAKEK

SEQ ID NO: 19746 - protein, 250 aa, Zymomonas mobilis subsp. mobilis ZM4
MPIVLNVWQVSMEKKMTEAEWWEFENVEAMAKQIADDIEFIIKQAIEKKGRALIIVPGGSTPKLVFPTLAARDLDWSKVTLMLTDDRLVAKDNPLSNFGLLTKHFGSSGAELVSLIDENYLDDRAAAGRAADQKLASYKWPADLVWLGMGNDGHTASIFPGPNFDEAVNGPRERRALGLLPVPLPPEAPVARVTLSLSTLASAHTVMVVITGDHKRTVLTDALKEGASSRLPVGRVLGETEASIDVYWSK

SEQ ID NO: 19747 - protein, 368 aa, Oryza sativa
MAVLAKIKLHNKVLLVQPGHRQLGRQRRGGSGRAASRLLRGFAVARAALQAWSGSLCCCVAARAEGERETGGIGVVARGGGFGLAAAGCEVSAWARQGIGQGSTSLASALPAGIAGRGCLVYDGIGCDAKVVAHAQGLHVYAGNWHNSFTLVFEDERFKGSTLEVMGIVVEQGEWAIVGGTGQFAMANGVIFKKFHEQKKEGNIMELTIKGFCPVLKGSPSQGLVTKIGPWGGIDGGRAQDITATPKRLESITIHSGWTIDSISFIYFDQAGEKHRAGPWGGPGGDPCTIEFGSSEFLKEVSGTFGPYEGWKVIRSIKFVTNKKTYGPFGRQEGTPFSVPVQNNSTIVGFFGRSGKYLDIVGIYVHPR

SEQ ID NO: 19748 - protein, 334 aa, Xanthomonas axonopodis pv. citri str. 306
MSIEQLAETAQAMVAPGKGIIAIDESTSTIAKRFASVGIENIEENRRAYRELLLTTPKLSDYISGAILFDETIRQKTKDGVPFAEYMTAHGIIPGIKVDKGAQPLAGMPGELVTEGLDGLRARLEEYYTLGARFAKWRAVINIGEDIPSGTCIEANSHALARYAALCQEQGLVPMVEPEVIMDGSHDIETCYEVTEATLRSLFGALYEQNVVLEGTILKASMVISGKSCEEQASIEEVAESTVMCLKSTVPAILPGIVFLSGGQTDEQSTAHLNEMHQLGNLPWPLSFSYGRAMQQAALKLWAKDMTGNFAKAQQVIYERAKENGLAALGKWKG

SEQ ID NO: 19749 - protein, 425 aa, Nostoc punctiforme PCC 73102
MISKNIRRVVVTGMGAITPLGNTIKEYWEGLIAGRSGIDLITQFDASLHICRIAGEVRDFNPYDYLERKDVKHISRFAQFGISASLQAIADAGFEINDSNATQVGVIVGNGMGGLYTVEEQEKVLLTQGSKRCSPFTVPMTIANMAAGLIAIYTGAKGPNFCTVSACAAGGNAIGEAFRSIQLGHALGMICGGTEAVITPLSIAAFGSAKTLSTANEEPTRASRPFDRDRNGFVMGEGAGILFLEELEHALGRGAKIYAEIVGYGLTCDAYHMTAPTPSGEGVMRAMELALKDGGIFPNEVSYINAHGTSTLANDAIETLAIKKALGDRAFQIPISSTKSMTGHLLGAAGGIEAVATVKSVALDLIPPTINLEQPDPNCDLDYVPHKSRTQRVDVALSNSFGFGGHNVSLAFKKFELGVRSIQRG

SEQ ID NO: 19750 - protein, 366 aa, Bacillus subtilis subsp. subtilis str. 168
MVHYGLKGITCVETSISHIDGEKGRLIYRGHHAKDIALNHSFEEAAYLILFGKLPSTEELQVFKDKLAAERNLPEHIERLIQSLPNNMDDMSVVRTVVSALGENTYTFHPKTEEAIRLIAITPSIIAYRKRWTRGEQAIAPSSQYGHVENYYYMLTGEQPSEAKKKALETYMILATEHGMNASTFSARVTLSTESDLVSAVTAALGTMKGPLHGGAPSAVTKMLEDIGEKEHAEAYLKEKLEKGERLMGFGHRVYKTKDPRAEALRQKAEEVAGNDRDLDLALHVEAEAIRLLEIYKPGRKLYTNVEFYAAAVMRAIDFDDELFTPTFSASRMVGWCAHVLEQAENNMIFRPSAQYTGAIPEEVLS

SEQ ID NO: 19751 - protein, 539 aa, Coprinopsis cinerea
MFKNLLSFALLAISVANAQIVNSVDTMTLTNANVSPDGFTRAGILVNGVHGPLIRGGKNDNFELNVVNDLDNPTMLRPTSIHWHGLFQRGTNWADGADGVNQCPISPGHAFLYKFTPAGHAGTFWYHSHFGTQYCDGLRGPMVVYDDNDPHAALYDEDDENTIITLADWYHIPAPSIQGAAQPDATLINGKGRYVGGPAAELSIVNVEQGKKYRMRLISLSCDPNWQFSIDGHELTIIEVDGRLTEPHTVDRLQIFTGQRYSFVLDANQPVDNYWIRAQPNKGRNGLAGTFANGVNSAILRYAGAANADPTTSANPNPVQLNEADLHALIDPAAPGIPTPGAADVNLRFQLGFSGGRFTINGTAYESPSVPTLLQIMSGAQSVNDLLPAGSVYELPRNQVVELVVPAGVLGGPHPFHLHGHAFSVVRSAGSSTYNFVNPVKRDVVSLGVTGDEVTIRFVTDNPGPWFFHCHIEFHLMNGLAIVFAEDMANTVDANNPPVEWAQLCEIYDDLPPEATSIQTVVRRAEPTGFSAKFRREGL

SEQ ID NO: 19752 - protein, 52 aa, Saccharum spontaneum
MAAKLTRLHSLRERLGATFSSHPNELIALFSRYVNQGKGMLQRHQLLAEFDA

SEQ ID NO: 19753 - protein, 579 aa, Yarrowia lipolytica CLIB122
MATEHVEHAENAKQSPQPSFSGSESGRIGRYQIIKTLGEGSFGKVKLAYHLATHEKVALKIINRKTLAKSDMQGRVEREISYLRLLRHPHIIKLYDVIKSKDEIIMVIEFAGKELFDYIVQRGKMPEDEARRFFQQIISAVEYCHRHKIVHRDLKPENLLLDENLNVKIADFGLSNIMTDGNFLKTSCGSPNYAAPEVISGKLYAGPEVDVWSCGVILYVMLCGRLPFDDEFIPNLFKKISNGVYTIPPYLSAGAKHLLQQMLVVNPLNRITVQGIMEDPWFKQGIAEYLVPRDLKPDQVEIDDKVVGALSDTMGYDRDQVYEALKAPKSDGTEIRDAYDLMKENRQQLEKDSTVFDKVDESGKPKHQFSRKNPPALTFDSHHMPTIVDHSDLRTPNTTIAVLPSSLPAYHRANMMAHGPATLRKLNPISSRKSKTRWHFGIRSKSYPLDVMGELYRALKNLGAEWAKPSENDLWTIRVRWRYTPEKDESDSTTKPDSGLLKMQIQLYLLEQNSYLVDFKFDGWECETESGEIKTRDVAQVSNSKSANETFTFSAYPFLHLATRLIMELAVSSQKESEK

SEQ ID NO: 19754 - protein, 52 aa, Saccharum spontaneum
MAAKLTRLHSLRERLGATFSSHPNELIALFSRYVNQGKGMLQRHRLLAEFDA

SEQ ID NO: 19755 - protein, 411 aa, Medicago sativa
MASVGVAPTSGFREVLGDGEIGVDDILPEEMSDMKIRDDREMEATVVDGNGTETGHIIVTTIGGRNGQPKQTISYMAERVVGHGSFGVVFQAKCLETGETVAIKKVLQDKRYKNRELQTMRLLDHPNVVSLKHCFFSTTEKDELYLNLVLEYVPETVHRVIKHYSKLNQRMPMIYVKLYTYQIFRALSYIHRCIGVCHRDIKPQNLLVNPHTHQVKLCDFGSAKVLVKGEPNISYICSRYYRAPELIFGATEYTTAIDVWSVGCVLAELLLGQPLFPGERGVDQLVEIIKVLGTPTREEIKCMNPNYTEFKFPQIKAHPWHKIFHKRMPAEAVDLVSRLLQYSPNLRCQALDCLTHPFFDELRDPNARLPTGRFLPPLFNFKPHELKGVPVETLMKLVPEHARKQCPFLGL

SEQ ID NO: 19756 - protein, 630 aa, Mesorhizobium loti MAFF303099
MCGIFGIVLKNEGTPVCAAAVERCADALAHRGPDASGLYINQSVAFAHRRLSIVDAHSRANQPYRDANTGVVVTYNGEIFNYREIRTELRDMGFFFSTVSDTEVLILSYIAWGKSFLNRLDGIFAFALFDPRNSLVLIARDRLGVKPLYYTICDVGLLFASQPNALIRWPGVMRGPDMIGALSFLSYRAVVGARTLFAGISKLEPGHLLEIRNGRHTSERWWNLSERISRCKPDYSDIRRLLGSAVERQLVADVPVAALLSGGLDSSILAYEASARSQIRPICYTGKVETADYDETAYAMEVAAEFGLTHRVVPIGEPSDIYAVSELVRLRGHPLGMHNEIAMFTLAKAISKEHKVVLTGEGADEIFAGYSRLFRTPYDYNRSKIIAALPRALAQVARRRLGLDVHGSQLQFFLARYSYFPTDEIRSLVIDGRVRREHEMALFDHFSTQFAEAGGDFFSKISYVLVSTHLPALLEMVDNTTMAAGLEARVPYTDHQLVTAAMAMPGSQRLRWRSPIASVQALWHPVASFSERLDVSKFPLRREYRSVLPRSVLSRKKMGFPLPLGQWAVGEGATEYRRLLFDKDSPLGDLFDPAALRRWFEAGRRNPSDSFGRKFWLLANLGIFFKEVFS

SEQ ID NO: 19757 - protein, 480 aa, Oryza sativa
METYTTDEALEFMGFGKFQLLVLAYAGMGWVVESMEIMLLSFVGPLVREEWNISAENESLLSSVVFAGMLIGASGWGFVSDKYGRRICLLFSTLFASGMGFLSAFSPNYSCLLALRFLVGIGVGGAHVFTSWFLEFVPAQNRGTWMVIFSCFWTIGTILEASLAWVVISVLSWRWLLALTALPCSLLIPFFGTTPESPRYLCGQNRTSDAMLVLERIAITNQAALPPGVLIYHQEAKVDHSDLTSEKEDLLPVSEKECTFDNAMSFKYGGGIAALLRLLSRKLLRSTLLLWFAFFANSFAYYGLVLLTAQLSDANRSCTSGQTNVVPQKDVNLYKDTFITSLAEVPGLILSAVLVDWFGRKASMWFMLFTCCAFIGPLVLQQNELLTTVLLFGARAVAMGSFTVLCLYAPEVYPTSARSTGVGIATAIGRIGGVVCPLVAVGMLRSCHQMEAILVFELVLFLAGVACFLFPIETKGRGMD

SEQ ID NO: 19758 - protein, 411 aa, Medicago sativa
MATAGVAPASGIVDVNASSAIAVDKLPDEILGMRIKDDKEMEAHVVDGNSTEAGHVIVTTIGGKNGQPKQTISYMAERAVGQGSFGVVFQAKCLETGETVAIKKVLQDKRYKNRELQTMRLLDHPNVVTLKHCFFSTTEKDELYLNLVLEFVPETVHRVIRHYSKMNQRMPLIYVKLYSYQICRSLAYIHNCVGVSHRDIKPQNLLVNPHTHQLKLCDFGSAKVLVKGEPNISYICSRYYRAPELIFGATEYTSAIDIWSAGCVLGELLLGQPLFPGASGVDQLVEIIKVLGTPTREEIKCMNPNYTEFKFPQIKAHPWHKIFRKRMPPEAVDLVSRLLQYSPNLRSTALEALVHPFFDELRDPNTRLPNGRHLPPLFNFKANELKGVPAEMLVKLVPSHARKQCSLFASS

SEQ ID NO: 19759 - protein, 412 aa, Medicago sativa
MMASGGVAPASGFIDKNASSVGVEKLPEEMNDMKIRDDKEMEAATIVDGNGTETGHIIVTTIGGKNGQPKQTISYMAERVVGHGSFGVVFQAKCLETGETVAIKKVLQDKRYKNRELQTMRLLDHPNVVSLKHCFFSTTEKDELYLNLVLEYVPETVSRVIRHYNKMNQRMPMIYVKLYSYQICRALAYIHNSIGVCHRDIKPQNLLVNPHTHQLKICDFGSAKVLVKGEPNISYICSRYYRAPELIFGATEYTTAIDIWSAGCVLGELLLGQPLFPGESGVDQLVEIIKVLGTPTREEIKCMNPNYTEFKFPQIKAHPWHKIFHKRMPPEAVDLVSRLLQYSPNLRSTALEALVHPFYDDVRDPNTRLPNGRFLPPLFNFKVNELKGVPAEMLVKLVPPHARKQCALFGSS

SEQ ID NO: 19760 - protein, 251 aa, Glycine max
MATSQITASLRNLPAFERFQPSALRFSSAGHVRIGTLTQPSFPSFVVKAATVVAPKHTTVKPLGDRVLVKIKDAEEKTAGGILLPANAQGKPQGGEVVAVGEGKSVGKCKVDVSVKTGAQVVHSKYAGTEVEFNGSKHLILKDDDIVGILETDEVKDLKPLNDRVLIKVAEAEEKTAGGLLLTEATKEKPSIGTVIAVGPGPLDEEGNRKPLSVMPGNTVLYSRYAGNDFKGKDGSDYIALRASDVMAILS

SEQ ID NO: 19761 - protein, 596 aa, Arabidopsis thaliana
MSLMFSSPVVTPALGSFTFSSRPRSNYIVMSAVRSNSASTCPILTKFQKDCATPTPYLRNVANAIADDMRDGLAVEGGGDLEMILTFVDALPSGNEEGLFYALDLGGTNFRVRSVQLGGKKERVLATESEQISISQKLMIGTSEELFGFIASKLANFVAKEKPGRFLLEEGRKRELGFTFSFPVKQTSIDSGTLSKWTKGFKVSGMEGKNVVACLNEAMEAHGLDMRVSALVNDGVGTLAGARYWDEDVMVGVILGTGTNACYVEQKHAIPKLRSKSSSGTTIINTEWGGFSKILPQTIFDLEMDETSLNPGEHLYEKMISGMYLGEIVRRVLLHMCETSDLFGHFAPAKLSTPLALRTEHLCKMQEDNTDDLRDVGSILYDFLDANMNARRRVVEVCDTVVKRGGRLAGAGIVAILEKIEKDTKRMGSGKRTVVAMDGALYEKYPQYRQYMQDALVELLGHKLASHNRQGKTRLAKYYVPLEESEKHKVEYEVHRLVVNRDAKFTNFVEVIYRRYAGLFFSVCVDITDNELAYLESIHLFVEILDHFFSNVCELDLVFNFHKVYLILDEFILAGELQETSKRAIIERMSELEKLQ

SEQ ID NO: 19762 - protein, 174 aa, Dehalococcoides sp. CBDB1
MNEIAVFGGGCFWCMEAVFSSLSGVTKVEPGYAGGNLPNPTYQQVCAGDTGHAEVIRLEFDAALISYTALLDIFFQMHDPSTLNRQGEDLGSQYRSVIFYTTPSQKAQAEKTIKTLDENGAFAKRIVTEVLPLTEFYPAEDYHHNYYAFNSSQPYCRFVIQPKLAKLKEHLPKL

SEQ ID NO: 19763 - protein, 242 aa, Lactobacillus plantarum WCFS1
MTMDKILVVDDEPAIVTLLSYNLKQAGYEVVTATDGADALSLGLAQSFTCILLDLMLPKLDGMEVTKKLRQEKVQTPIIIVTAKNDEFDKVFGLELGADDYITKPFSPREVLARIKAVIRRTTPDEPVTPPAPMPPANRAVMLVGDLQIDQNKYRVARNGKNISLTPKEFELLVYFVEREGRVLSRDAILNHVWGYDYASETRIVDIHISHLREKIEADPKQPRLIRTVRGFGYEFVGDGHA

SEQ ID NO: 19764 - protein, 124 aa, Dehalococcoides sp. CBDB1
MKYNELSPQEEAVIVRKGTEPAFSGEYVNLFKDGTYVCRRCDAPLYRAKDKFHSGCGWPSFDEELSGAVKRQTDPDGRRTEILCAACGGHLGHVFEGESFTPKDTRHCVNSLSIKLVPDNGGNK

SEQ ID NO: 19765 - protein, 144 aa, Prunus armeniaca
TIWLDSSSGSGFKSLHPYRSGYFGAAVKLQPGYTAGVITSFYLSNNEEHPGNHDEIDIEFLGTIPGKPYTLQTNVYIRGSGDGNIIGREKKFHLWFDPTQDFHNYAIVWNPTEIIFLVDDVPIRRYQRKSDATLPLRPMWAYGS

SEQ ID NO: 19766 - protein, 446 aa, Shewanella sp. ANA-3
MADSPYNTTHEHPSLEHYWMPFTANRQFKASPRLLAQAEGMYYTDINGNKVLDSTAGLWCCNAGHGRREISEAVSKQIREMDYAPSFQMGHPLAFELAERLTELSPEGLNKVFFTNSGSESVDTALKMALCYHRANGQASRTRFIGRELGYHGVGFGGISVGGLSNNRKAFSGQLLQGVDHLPHTLDIQNSAFSRGLPSLGAEKAEVLEQLVTLHGAENIAAVIVEPMSGSAGVILPPQGYLKRLREITQKYGILLIFDEVITAFGRVGAAFASQRWGVIPDIITTAKAINNGAIPMGAVFVQDFIHDTCMQGPTELIEFFHGYTYSGHPVAAAAALATLSIYENEQLFERSFELERYFEDAVHSLKGLPNVIDIRNTGLVAGFQLAPNSQGAGKRGYSVFEHCFHQGTLVRATGDIIAISPPLIVEKHQIDQIVNSLSDAIHAVG

SEQ ID NO: 19767 - protein, 443 aa, Vibrio sp. Ex25
MSYVFHRHCHATLPIIDKGEGVYLFDKQGKQYLDACGGAAVSNLGHSHQAVKKAMLEQLERVPFAHTGFFTSDSGERLAELICQYMPEQFNHVYLVSGGSEAVESALKMARQHFVESGKPEKKQFIARQQSYHGNTLGALAVGGNEWRREPFKPILHPSHHIAPCYAYRYQQTHESELDYSLRTANELEAKILELGAENVMAFVAEPIVGATAGAVPATQGYFKRIREICDQYDVLLILDEVMCGVGRSGSFFAFEQEEAEPDLVCMAKGLGAGYQPIGAVVANDRVYQAIADGSGFFQHGHTFMAHPVACAAAVATIETIFQDDLLTAVNQHSVLLRNELTSALAHLPYIGDIRGKGLFVGIELVADKESKSPLSKATLADKRIKQRAMENGLMCYPMGGTIDGVNGHHILLAPPFIVQPHHIDELVGKLSLTLKEVAETWK

SEQ ID NO: 19768 - protein, 182 aa, Burkholderia sp. 383
MSTIYDIPVNAIDGAQTTLRPYEGKVLLVVNVASKCGLTPQYEGLEALYEGKRAEGLEVLAFPANNFKGQEPGTDAEIQSFCTGTFGVKFPLFSKISVIGDDKHPLYRSLTQAQPQATGDGPFRTRLEGYGIQPNPAPEVLWNFEKFLVSRTGEVVARFSPDTTADDPKLVAAIDAELAKAA

SEQ ID NO: 19769 - protein, 502 aa, Kineococcus radiotolerans SRS30216
MSSVPTSRPLPPEFASAPFQELLQHGTTHGYVDAHSVRVACEDAQLPVQRMKAVLRALDDAGVTVKVPEAAPKRAVAAASARRTTSTATATKTARPAAKRAAAAADGDAAPAKPAARTATRTAAKSAAKTAAKPTAKAAGKGAEPAEDVEDVKDEDLITEDDVVVEEPVEETAAKKTTGGFVLRDDDDDDAPAQQVSTAGATADPVKDYLKQIGKVALLNAEQEVELAKRIEAGLFAEEKLHSGEDIDSIFKRELWWISEDGRRAKNHLLEANLRLVVSLAKRYTGRGMLFLDLIQEGNLGLIRAVEKFDYTKGYKFSTYATWWIRQAITRAMADQARTIRIPVHMVEVINKLARVQRQMLQDLGREPTPEELAKELDMTPEKVVEVQKYGREPISLHTPLGEDGDSEFGDLIEDSEAVVPADAVSFTLLQEQLHSVLDTLSEREAGVVSMRFGLTDGQPKTLDEIGKVYGVTRERIRQIESKTMSKLRHPSRSQVLRDYLD

SEQ ID NO: 19770 - protein, 318 aa, Triticum aestivum
WIPRAAGIRHQPSMASVVAATVAAASAWWATQGLLPLFAPPMAFPFVPVPTASFPTTDVQRATENCPVDNAPKECQVVQEQGQPEAMIVVASSGSDKSGKGEVSPHTELNISPADKVETTPPTGAETSDAFGNKKKQDRSSCGSNTPSSSDVEAEHVPENQDQANDKTQQACCSNSSAGDMNHRRFRNISSTNDSWKEVSEEGRMAFDKLFSRGKLPQSFSPPQAEGLKVVPRGEQDEATTVTVDLNKSAAVMDHELDTLVGPRAATFPIELSHLNMKSRRTGFKPYKRCSVEAKENRVPAADEVGTKRIRLDSEPST

SEQ ID NO: 19771 - protein, 203 aa, Solanum demissum
MDILGNLYIDPLPLVIPTTTSSTTFDNNSNEKVMLLLASKIPKRRGDRKKFHETRHPVYRGVRWKNFEKWVSEVRVPAKKSRIWLGTFPNAEMAAKAHDVAVMALKGRSACLNFADSTWRLPVPASAAVKDIQKAAAEAAEAFRVSESLERENSEEVVINNDDHYVVDSGWRLVIPASAVARDIQKAVAEAFCPSESSKGEYF

SEQ ID NO: 19772 - protein, 501 aa, Xanthomonas axonopodis pv. citri str. 306
MCVKFRGFYREAIMKERQRRTKILATLGPATDAPGVLDTLFKAGVNVVRLNFSHGDPSGQAKRAAEVRAAAARVGAEVGILADLPGPKIRIERFAEGKIKLTMGDRFDLVADANAPAGDQTQVGVSYLGLPQDVTAGDVLLLDDGLMQLQVTDVQGARIVTKVLNDGVLSDRKGLNKQGGGLSLGALTERDKELIGIVAKIGVDFIAVSFCRNAQDMHDARQIAQQHGCDAQLVSKIERTEAIENLVEIVEASDVVMVARGDLGVEIGDAELPGLQKKIIRESLAQNKVVITATQMLQSMVESPIPTRAEVLDVANAVIDGTDAVMLSAETAAGAYPVRAVEAMARICLGAEHQFEFDTDFEAAQRNLQRADQAIAMATMFLSEHIGLGGVVALTESGGTPRFLSRFRSNMPIYAFTRHDGARRQMAMMRGVFPISFDSRGLTPREAARAAIRLLVENERMGPGDRVVFTSGEHMETHGATNTLRLLEVGEDGRATGLGEL

SEQ ID NO: 19773 - protein, 340 aa, Arabidopsis thaliana
MAEEVAENVNAVPVSEDELYGFKRSEMYSGTLAGSVGPYGRHVFLCYKSHETWLPRVETEGLPQRFAKLFKDRKADFAVETKLTVCGGGGESDGDVLIFPEMVRYKAIQDTDVDAFVEDVLVKGKTWTSGIQEELTGSFVFVCAHGSRDKRCGVCGPVLMEKFEQEISSRGLSDKIFVLPCSHIGGHKYAGNLIVFSPDSAGNVSGHWYGYVTPDDVPAMLDQHIAKGEIIQNLSRGQMRLRPEGEEAEKEDEHKIPNGNSVMVEEREPVEQKGFTGGCCQGANGVSCCQEQAAEPVKKEGCMKLNWLKSMGKEEVLLGAAVVSAVATVAVAYSIYRRSG

SEQ ID NO: 19774 - protein, 333 aa, Xanthomonas axonopodis pv. citri str. 306
MAIKVGINGFGRIGRNVLRSAVQNFANDIEIVAINDLLEPDYLAYMLQYDSVHGRFKADVSVDGNTLIVNGKKIRLTQERDPANLKWDAVGADVVIESTGLFLTKETAQKHIDAGAKKVILSAPSKDDTPMFVYGVNDKTYKGEAIISNASCTTNCLAPLAKVINDKWGIKRGLMTTVHAATATQKTVDGPSNKDWRGGRGILENIIPSSTGAAKAVGVVIPELNKKLTGMSFRVPTSDVSVVDLTVELEKPATYAEICAEVKAQSEGALKGVLGYTEDKVVATDFRGETCTSVFDADAGIALDSTFVKLVSWYDNEWGYSNKCLEMVRVVAK

SEQ ID NO: 19775 - protein, 435 aa, Thermoanaerobacter tengcongensis MB4
MIKAKNRLGIVFFPAFDWAISPTHPEREERLLYTQDQIFEEGIEDIEGIKFYNPIIAEEKDINRVHFVVPDVKSVVTQSHLISAGGAIKALQAVMEKEVDKAFALVRPPGHHAQRVVYGDRGFCIINVEAVMLERIRQEYGNLRVAIVDTDCHHGDGTQDIYWNDKDTLFISLHQDGRTLYPGTGFIEEFGGPAAYGYNINIPLPPGTGEEGFLYVLDNVVIPILEEYKPDIIINSAGQDNHYTDPLTNMNFTAQGYAKLNERLNPDIAVLEGGYSIEGALPYVNLGIILAMAGIDYSRVREPDYDEEKLKQPKDITEYIKKLSEIVYNRWRNKDDLRLKEFKDVNYVKRPRRVYYDTDGILETQVQNFKICNKCSGVNTIESKSDRGYHIFAITIPRDACPNCIDEGYKLYKNASSHYTNVYLQDRVNDEYYSK

SEQ ID NO: 19776 - protein, 356 aa, Glycine max
  misc_feature (144)..(144): Xaa can be any naturally occurring amino acid
  unsure (1)..(356): unsure at all Xaa locations
MHSKAALLSFLANKCSKIQTHTLSPMALNNGVPATGTGLIVSFGEMLIDFVPTVSGVSLAEAPGFLKAPGGAPANVAIAVSRLGGKAAFVGKLGDDEFGHMLAGILKENGVRADGITFDQGARTALAFVTLRADGEREFMFYRXNPSADMLLKPEELNLELIRSAKVFHYGSISLIVEPCRSAHLKAMEVAKEAGCLLSYDPNLRLPLWPSPEEARKQILSIWEKADLIKVSDVELEFLTGSDKIDDESALSLWHPNLKLLLVTLGEHGSRYYTENFKGSVDAFHVNTVDTTGAGDSFVGALLSKIVDDQSILEDEPRLREVLKYANACGAITTTQKGAIPALPKEEDALKLIKGA

SEQ ID NO: 19777 - protein, 416 aa, Staphylococcus epidermidis RP62A
MNMNDTIFLFLCTLLVWLMTPGLSLFYGGLVQSKNALNTVMQSMVAIVIVTFIWIMIGFSLSFDGGNQWIGGLKFLGLHHVGFETSKTLSPHIPLSLFMLFQMMFCTIAVSILSGSIAEKMRFIPYLIFVSLWVLLIYSPVAHWVWGGGWISKIGAIDYAGGTVVHITSGVSGLVLGIMIGIGKKKEKHTPHNLLITLIGGILVWLGWYGFNVGSAFTFDHIAMISFVNTVIGASAGAFGWLIFEYILKKTTSLLGLLSGALSGLVAITPAAGYVSYMSAMIIAIMGGIGCYIVINLIKVKLQYNDALDAFGIHGVGGILGAVFTGVFQSHQINSAVENGFIYTGDFKIVGIQLGAAIATVVFSAIVTFLIARFIKIFTPLATTQEEDKTGLDVIVHGEKAYFYGELNKFNRHIKF

SEQ ID NO: 19778 - protein, 202 aa, Prunus mume
LTHEIRGTLDRHTILKTTLVELGRTLALEECALWMPTRTGLELQLSYTLRQQNPVGYTVPIHLPVINQVFSSNRALKISPNSPVARMRPLAGKHMPGEVVAVRVPLLHLSNFQINDWPELSTKRYALMVLMLPSDSARQWHVHELELVEVVADQVAVALSHAAILEESMRARDLLMEQNIALDLARREAETAIRARNDFLAV

SEQ ID NO: 19779 - protein, 106 aa, Arabidopsis thaliana
MAQAIGPRLYSCCNCRNHVGLHDDIISKAFQGRTGRAFLFSHAMNIVVGPKEDRNLLTGLHTVADISCVDCNEPLGWKYERAYETSQKYKEGKFIFEKAKIVKEDW

SEQ ID NO: 19780 - protein, 202 aa, Prunus mume
LTHEIRSTLDRHTILKTTLVELGRTLGLQECALWMPSRAGMNLQLSHTLNYQIQVGSTVPINLPVVNEVFTSSRAIRIPYTCPLARIRPLVGRYVPPEVVALRVPLLNLSNFQINDWPDLSAKSYAIMVLILPTDSTRKWRDHELELVDVVADQVAVALSHAAILEESMRARDQLMEQNIALDLARREAEMAIHARNDFLAV

SEQ ID NO: 19781 - protein, 359 aa, Arabidopsis thaliana
MEISKYKAVLALVMLQFTSAGVALFTKAAFMEGLNPTVFVVYRQAIATLFICPISFISAWRKENKPSLGVRGFWWVALTAVIGVTVNQNAYFKGIDLSSSSMACAMTNLIPAVTFIISIIVGFESIKRRSMKSVAKVIGTGVCVGGAMAMTFLRGPKLLNALLNQDNTAWLLGCFFLLISTFAWSLWLILQVPIASHCPDHLYTSACTCFIATIASFLVALALGNTHLPPWKLDSFLKLSCCIYSGFQLAISFFLQAWIVSQKGPVFSALFNPLSAVIVTFFGALYLKEQTYLGSLLGALAIILGLYIVLWGKSEDYQEESTDLKLENEHNTSSQSDIVSIMIGDKAFRSSELLEPLLM

SEQ ID NO: 19782 - protein, 411 aa, Arabidopsis thaliana
MALLLNSTITVAMKQNPLVAVSFPRTTCLGSSFSPPRLLRVSCVATNPSKTSEETDKKKFRPIKEVPNQVTHTITQEKLEIFKSMENWAQENLLSYLKPVEASWQPQDFLPETNDEDRFYEQVKELRDRTKEIPDDYFVVLVGDMITEEALPTYQTTLNTLDGVKDETGGSLTSWAVWVRAWTAEENRHGDLLNKYLYLSGRVDMRHVEKTIQYLIGFGMDSKFENNPYNGFIYTSFQERATFISHGNTAKLATTYGDTTLAKICGTIAADEKRHETAYTRIVEKLFEIDPDGTVQALASMMRKRITMPAHLMHDGRDDDLFDHYAAVAQRIGVYTATDYAGILEFLLRRWEVEKLGMGLSGEGRRAQDYLCTLPQRIRRLEERANDRVKLASKSKPSVSFSWIYGREVEL

SEQ ID NO: 19783 - protein, 347 aa, Yarrowia lipolytica CLIB122
MPPFTLADTTAIQVLMSATQDTRSDFTHKLAPLLHLLYTRFVQCNHMNPMWINGDKILFSCGDMTTIQSHVLRYSGYNVDDRELELSKYGAEAFFNQFQESGNGYKPKVVVGDTGSGFVEAVGVALDTQELAENFNKPNFPLITAKTWVVFDEEAALSSDATKAAEAAVEAELNNLIGILVAASPQTVRFYHMMGWRLLEVVDLSDLAQLEAVIVEALQEPHMPVVVHIRSIERSLESDVSDNTLVDEYHRWGDVPVESDQSVTTSLYTRFAIINASRELAWNHLREGYKAFFPADSAALEEVKRELEECYYDEREQEGGSKEGLTVPLERSSRSTPSRTPRLCAGL

SEQ ID NO: 19784 - protein, 259 aa, Asparagus officinalis
MLAIFHKGFAHPPQELYSPEHCRRQSKSPEEILRDFHSAHPSDTFCISFSTGAALASNSSAGAHSPCVSFHQRLFSSLDEVYCMFVGSLDNLSSLIRQYGLCGRSTSEAMLVIEAYRTLRDRGPYPADQVLKDLNGSFAFVIYDNKTGSVFAAQSYDGRVPLFWGVACDGSAVICDDLNVMKSGCGKSFAPFPNGCMFSSEGGLKSFERPMNKMKAVPRVDSEGTMCGSFFKVDSCTKISTMPRVGSSADWTSWEDSHK

SEQ ID NO: 19785 - protein, 351 aa, Arabidopsis thaliana
  misc_feature (336)..(336): Xaa can be any naturally occurring amino acid
  unsure (1)..(351): unsure at all Xaa locations
MAENLACGETSESWIIDNDDDDINYGGGFTNEIDYNHQLFAKDDNFGGNGSIPMMGSSSSSLSEDRIKEMLVREIEFCPGTDYVKRLLSGDLDLSVRNQALDWILKVCAHYHFGHLCICLSMNYLDRFLTSYELPKDKDWAAQLLAVSCLSLASKMEETDVPHIVDLQVEDPKFVFEAKTIKRMELLVVTTLNWRLQALTPFSFIDYFVDKISGHVSENLIYRSSRFILNTTKAIEFLDFRPSEIAAAAAVSVSISGETECIDEEKALSSLIYVKQERVKRCLNLMRSLTGEENVRGTSLSQEQARVAVRAVPASPVGVLEATCLSYRSEERTVEXNNNNNNNSNKRRRKQ

SEQ ID NO: 19786 - protein, 1224 aa, Ustilago maydis 521
MLATTARPQGARPMPSSSGSGGSGSGGGGGGGAGGAGGVGVGGAMAYYAAAAQPYSAPATKEAAWYEYEERMRPSYIQQPASSPLASSAHYNQPYTTRAQPPVSPSAYASNAYVQYASSSYSQQPSAYQHPPVQHALPSYPSSTKPPHSLYQTPQYTPQYQQPPQSPLRYNQATPSSSRPPPASSAKYANPHLNSAPSRFATNPSYPEPQEIPRSTVQGSAFMHKGFWDILSLVNNQGQGPSSNRLAPPSTSQRPSSPGKFRSTLSKASCALRKNTQDNFQAGPEYDPAAVFPANASPRAPGSPVKDASTSALPGAYPRPLFAAPLTHTANASAISAAMNFFTPAAIGPRAQKKRISIDMVGAPQTQTFVHAAHASDAEQAEVILNRWSRDGVGKVADPLWVEPIKHALRLQAARNQAEAIAQVQAAMHQDSLIQDNPRQLHIVNGAPSQISMLTTTTATAGHSTLSNATIRPGVNAPALSPTRERGAFAGIVEEPAVGMDGELEAAIHAHLQLSSPSPQPFARPAALRTNTAGTLLVNPSPPVARDADARAPDYMMYRPPSPNASNRNSRNIDGLPSGAPNGISAMFEAPAHNDDLQAPTSIPERPNSMVVLDSLRSVDTAGMTALVDLTQPIGAAVRPSLETVEKSVAAKIFFENLYYGILKKPKARDTRRAGLEAELASLRIPESSKNQIREAWMANETQYLRDLRARVNVNSFLKLKTIGHGAFGVVALCKERQSGQLYAMKQLRKADMLRKGQEGHVRAERDLMTSASASATAKWIVKLIYSFQDVDHLYLIMEFMGGGDLLNLLIEKDIFEEDFARFYVAEMVLAIHEAHSFGYIHRDIKPDNFLYTSDGHIKLADFGLCQSFHWAHDGAYYDQQRKNLLKKHGIDLDDSHAAAGMRRAAQATGRRGGAPGQAGAGLSDKELIEIMSDRNADGTPKTHVLTWREKNKKKIAYSVVGTNNYMAPEVLRGLGYDQACDWWSLGVIVFEMLYGYPPFVSKSRHLTRQKILNWKQTLRFPTKPRISREGQDFIARLVCEREDRLGSTASASVSRPNSYLQSARRSGFGNQGQSNTGSALQDGVEELMSHPWFRGIDWENLHRTRPPFRPALSHPGDTKHFEDDIEDEPLAAPGAANNPNADQPRDPMLRDQEQGPKLLEMRKQLAFMGYTFKSPKAFDPREQLADERNVIAVERAAGMTPAQERGRGREPTELGSRIRSMSM

SEQ ID NO: 19787 - protein, 326 aa, Pseudomonas syringae pv. phaseolicola 1448A
MSGDVALVAITGATGFVGSAVVRRLIKHTGHSVRVAVRGAYSCSSERINVVSAESLAPDNQWSDLVTGAHVVIHCAARVHVLNETADEPDQEYFRANVTATLNLAEQAAAAGVRRFIFLSSIKANGEFTHPGAPFRADDPCNPLDAYGVSKQKAEEGLRELSARSGMQVVIIRPVLVYGPGVKANFKSMMRWLDKGLPLPLGSINNRRSLVAVDNLADLVMVCVDHPAAGDQTFLVSDGDDLSTTRLLREMGKALGKPARLLPVPAGLLKNAAALLGKKAFSQRLCSSLQVDISKTCTMLDWHPPVSIEHAMQDTARYYLEYDKHD

SEQ ID NO: 19788 - protein, 550 aa, Pantoea agglomerans
MSTFTVGDYLLTRLQEIGIKHLFGVPGDYNLQFLDRVIAHPEISWVGCANELNAAYAADGYARCNGAGALLTTFGVGELSAINGTAGSYAEYLPVIHIVGAPATQAQLQGDCVHHSLGDGDFQHFIRMAAEVSVATALLTADNATAEIDRVIISALQARRPGYLSLAVDVAAMAVQPPAQPLNTHQPASADARRAFRAAAERLLAPAQRVSLLADFLALRWQQQSALAALREQSAIPCASLLMGKGVLDEQQPGYVGTYAGAASAGQVCEQIEQVDAAICVGVRFTDTITAGFTQQFATERLIDLQPFSASVGNERFAPLSMADALSELQPLFEHYGQQWQPAAAIPAAQPAEPTAVISQHAFWQAMQGFLQPGDLILAEQGTAAFGAAALRLPSRAQLVVQPLWGSIGYTLPAAFGAQTANPDRRVILIIGDGSAQLTIQELGSMLRDGQRLIIFLLNNDGYTVERAIHGATQRYNDIAPWNWTALPHALSLQGQAQSWRISETVQLDEVMTRLAAPQWLSLVEVVMLKDDLPPLLRKVTACLNQRNGG

SEQ ID NO: 19789 - protein, 744 aa, Candida glabrata CBS138
MHSLFKEDYSVTKEASEPEADESIDVNMAGLSLTSSMGDGSALHISSPGPSNATVQTIKREVTHGDESPQGDSDDINAQHSRAMSEHRPSIVALKMSLKEVAEAAAAKRKNLPFRTINNVMDSQRSSISSSRDEIFVDASPSPVVTRTASIDIPRSEDGRRSSNRLVNSKPYLYNYEPSGVPVGDPDGGMLQGTDVVLNQELLEQALKRDMKRKRADTMQSSTVELNKKVDTNTSKNSNHTEIMKNPPETAEPTSATAAMMMRLYGDRTLLNQQITKQKEDENKYSHTITNAAYKKLKPFSGVKRKILSNPNLNLQPLEPIRPNEPPTSGQRTPNNSAHVHSESPSPDRTNVILKWRDSQNQSNNKELKVYLVSNEICASLKNDDKLFAEGKLLATDNSQFNKIPLSYDSHNNEWYVPDLYLPQGIYRLQFLVNGNLVHSDFLPTATDDQGNIMNWFEVLRGYDRIEPYRDESEIQSDYTSSVDTTLEGMENNGFQGSSDNSTTSMRNNNPVALNLQAPAPSKAQASRNSSYYSAKSFEKSITQFSDYTGVSRTNSMVSAVSPINNANTRDNDLEFFPPIKPKVYEYSNNIPALFRISCDMEDVDDDNGTENNPRAFYDRPSFTNRVVDCNQDALFGDLQKGGKMDAEEAENLFLKKYQVPDLPVYLNSTYLNKIFHEFHQVAGPSTQDSSINHIIPHVNLKHLLTSSIRDGIVSVACTTRYAGKFITQVIYAPCGNDQLESKE

SEQ ID NO: 19790 - protein, 601 aa, Erwinia carotovora subsp. atroseptica SCRI1043
MNNHLQPYHVVHRVQDQINHCAGRITLREWTPAGEQQLTWTQAGQRIQRIASGLLALGLDVQERVAIFSHNSMNWSLADLALLHLRAISVPIYATNTTAQAAFIINDADIRTIFVGGQEQLDALLALRDTCPQLRNIIVMDKDVNLRGSDIVQSLHEFEAQAVDDFWRDEWQTRIDSRDLNDLFTLIYTSGTTGEPKGVMLDYTNMAMQLKLHDDRLSMSANDVSLCFLPLSHVFERAWSFVVMHCGAQNVYLSDTNLVRGAMLAVKPTVMCAVPRFYEKVYSAIHEKVAQAPWYRQRLFNWAIAQGQHAFLASNTTKKGGLFRRVMHHYADRLVLGKLRQLLGGEIRFMPAAGARLDDNIILFFRSIGIRIIYGYGMTETCATVSCWEEGRFRLGSIGTPLPGIEVRIGEEKEIQVRGATIMRGYFHRPQETAETFTEDGWLKTGDAGELDANGNLFITERLKDLMKTSGGKYIAPQHLEGTLGQDRFIEQVAIIADTRKYVSALIVPCFDALEEYAHSINLKYHDRLELLRHSHIIELFEQRLREMQKELSRVEQVKKFTLLPVPFSMAEGELTPTLKLRRKIINQRYQLEIDAMYVES

SEQ ID NO: 19791 - protein, 289 aa, Arabidopsis thaliana
MTGREILHKMKESVKEKVGLGASASSADSGKGKSKMLKQITHGFHLVKGKAFHEMEDYVVAKFKEVDDNELGLFAIFDGHLSHEIPDYLCSHLFENILKEPNFWQEPEKAIKKAYYITDTTILDKADDLGKGGSTAVTAILINCQKLVVANVGDSRAVICQNGVAKPLSVDHEPNMEKDEIENRGGFVSNFPGDVPRVDGQLAVARAFGDKSLKMHLSSEPYVTVEIIDDDAEFLILASDGLWKVMSNQEAVDSIKGIKDAKAAAKHLAEEAVARKSSDDISVVVVKFQ

SEQ ID NO: 19792 - protein, 445 aa, Nocardioides sp. JS614
MTAGATLPTAASAALFERARAVTPGGVNSPVRAFNAVGGTPRFIRSARGAWLTDADGNEYVDLICSWGPMLLGHAHPEVQAAVSAAVARGTSYGAPTEPEVELAEEIAARAPVERVRFVSSGTEATMSAIRLARGFTGRDVVVKFAGCYHGHVDSLLASAGSGLATFAVPGTPGVPESSTALTLVLPYNDRAAVEKAFAEHGDRIACLITEAAPGNMGVVPPDADGSGGGFNGFLAETCARHGALFVSDEVMTGFRASRQGQWGLDGAVEGWRPDLMTFGKVMGGGFPAAAFGGRADVMSRLAPEGPVYQAGTLSGNPIATTAGLATLRLATDDVYAHIGAAADTIKTAASDALSRAGVEHVVQAAGTMFSVFLTAGPVRDFADASRTDVAAYAAFFHAMLDQGVYLPPSAYEAWFLSSAHDDRAVQTVLDALPTAARAAAAAQT

SEQ ID NO: 19793 - protein, 398 aa, Dehalococcoides sp. CBDB1
MDNWQELEHKYYMQTFYRAPITIVKGQGAKVWDDKGKEYLDFVAGWAVNSLGHCHPAVVKAVTEQAGTLIQTSNNFYTIPQLNLAKLLIDNSCLDRIFFCNSGTEASEGAVKLARRYGKLKLKGAYEVITATGSFHGRTLAMVSASGQSKYQEPYTPLPTGFVNVEYNNPKAIKVAITDKTCAVMLEPIQGESGVNVPDAGYLKEVRKICDEAGILLILDEIQTGIGRTGKLFAYEHFGIEPDIITLAKGLASGVPIGAFMAKESASVFAKGEHGSTFGGNPLACAAGYATMKFILDNHISEHAAAMGKYLIKGLEKLKAKHSIIQGYRGCGLLMALDFKADIAKELVSNCLSEGLLLNAVKPNALRFMPSLNITEADIDEALSKLDNVLTHSESAGV

SEQ ID NO: 19794 - protein, 259 aa, Arabidopsis thaliana
LEMACVGGKDWYFYSQRDRKYATGLRTNRATATGYWKATGKDRTILRKGKLVGMRKTLVFYQGRAPRGRKTDWVMHEFRLQGSHHPPNHSLSSPKEDWVLCRVFHKNTEGVICRDNMGSCFDETASASLPPLMDPYINFDQEPSSYLSDDHHYIINEHVPCFSNLSQNQTLNSNLTNSVSELKIPCKNPNPLFTGGSASATLTGLDSFCSSDQMVLRALLSQLTKIDGSLGPKESQSYGEGSSESLLTDIGIPSTVWNC

SEQ ID NO: 19795 - protein, 665 aa, Arabidopsis thaliana
MVAPPLLSSHEFRPLSWHPRPLQQELICLGRIITMSAFVSKYEDELIKTAKYIATPGRGILAADESTETIGKRFAGINVENTESNRQAYRELLFTSPGSYPCLSGVILFEETLYQKTSDGKPFVDLLMENGVIPGIKVDKGLVDLAGTNGETTTQGLDSLGARCQQYYEAGARFAKWRAFFKIGATEPSVLSIQEDARVLARYAIICQENGLVPIVEPEVLTGGSHDIKKCAAVTETVLAAVFKALNYHHVLLEGTLLKPNMVTPGSDSPKVAPELIAEYTVTALRRTVPPAIPGIVFLSGIQREEQATLNLNAMNKLDVLKPWTLTFSFGGALQQSAIKAWAGKPENVAKAQAKFLTRCKANKDATLGKYTGWASGDSAAFENLVVIGYSWIEIFSSLLKSGLKVFMWSAKKFPKIKIVTSEIDNGLDEEFRVIPWYGRVWGQIFWHRRGLGHCGPAALGVPSISNHPFALSEVDKFPRVLLLTRMTNSNSIFLVDITYIFSIVAAKLVSLALQKATMSAFVGKYADELIKTAKYIATPGKGILAADESTGTIGKRFASINVENIESNRQALRELLFTSPGTFPCLSGVILFEETLYQKTTDGKPFVELLMENGVIPGIKVDKGVVDLAGTNGETTTQGLDSLGARCQEYYKAGARFAKWRAIP

SEQ ID NO: 19796 - protein, 298 aa, Zea mays
  misc_feature (89)..(89): Xaa can be any naturally occurring amino acid
  unsure (1)..(298): unsure at all Xaa locations
QASYKRRKLANRWWDEGRLGLPEPSLGKNQEEMAPSSKDGATEQPTSGGSGDDRENGTGEPKEGAVVTGNRRPRGRPPGSKNKPKPPIXSVTRDSPNALRSHVMEVAGGADVAESIAHFARRRQRGVCVLSGAGTVTDVALRQPTAPGAVVALRGRFEILSITGTFLPGPAPPGSTGLTVYLAGGQGQVVGGSVVGTLIAAGPVMVMASTFANATYERLPLDDAEEDPGQAQLPPGPGGGPPLIMGGIADPSAMPMFGGGGGGVPPSLMMPGGAAASGAGLQLGHEGLAWARARPPPY

SEQ ID NO: 19797 - protein, 229 aa, Brassica napus
MLRSSFRLLYITRTNLLVRASPSSLSRLPSKFTSAKPLVCSHHQIPLSTTGAIHSSFEHSMAASSEPKSIYDFTVKDAKGNDVDLSIYKGKVLLIVNVASQCGLTNSNYTELAQLYQKYKDHGFEILAFPCNQFGNQEPGSNEEIVQFACTRFKAEYPIFDKVDVNGDKAAPIYKFLKSSKGGLFGDGIKWNFAKFLVDKDGNVVDRYAPTTSPLSIEKDLKKLLGVTA

SEQ ID NO: 19798 - protein, 92 aa, Triticum aestivum
  misc_feature (48)..(48): Xaa can be any naturally occurring amino acid
  unsure (1)..(92): unsure at all Xaa locations
GNVINPWPTVDAHSGMWISLLGLNEARYTSVLSGVSRSIAIGFQIIWXRALGLPLERPESVTMQWLDSLCNKVTACSYTGSSSYNTSCLSCS

SEQ ID NO: 19799 - protein, 334 aa, Arabidopsis thaliana
MMDMTPTITTTTTPTPKSPEPESETPTRIQPAKPISFSNGIIKRHHHHHHPLLFTYKECLKNHAAALGGHALDGCGEFMPSPSSISSDPTSLKCAACGCHRNFHRRDPDNNNDSSQIPPPPSTAVEYQPHHRHHPPPPPPPPPPRSPNSASPPPISSSYMLLSLSGTNNNNNNLASFSDLNFSAGNNHHHHHQHTLHGSRKRFRTKFSQFQKEKMHEFAERVGWKMQKRDEDDVRDFCRQIGVDKSVLKVWMHNNKNTFNRRDIAGNEIRQIDNGGGNHTPILAGEINNHNNGHHGVGGGGELHQSVSSGGGGGGFDSDSGGANGGNVNGSSSS

SEQ ID NO: 19800 - protein, 516 aa, Glycine max
MAEDDGYTKDGTVDYCGNPANKKETGTWKACPYILGNECCERLAYYGMSTNLVLYFKNRLNQHSATASKNVSNWSGTCYITPLIGAYLADSYLGRYWTIAVFSIIYAIGMTLLTLSASVPGIKPTCHGHGDENCRATTLESAVCFLALYLIALGTGGIKPCVSSYGADQFDDTDSAEKERKSSFFNWFYFSINIGALIASSLLVWIQDNVGWGWGFGIPAVAMAIAVVSFFSGTRLYRNQKPGGSAITRICQVVVASIRKYNVEVPADESLLYETAETESAIKGSRKLDHTDELRFFDKATVLARSDKVKESTNPWRLCTVTQVEELKSILRLLPVWATGIIFSTVYGQMSTLFVLQGQTMDTRVGNSTFKIPPASLSIFDTLSVIFWVPVYDRIIVPIARKFTGYKNGLTQLQRMGIGLFISIFSMIDNAGLEWGFGIPAVAMAIAVVSFFSGTRLYRNQKPGGSAITRICQVVMASIRKYNVEVPADESLLYETAETESAIKGSRKLDHTNELR

SEQ ID NO: 19801 - protein, 347 aa, Xanthomonas campestris pv. vesicatoria str. 85-10
MKQTVLVTGGSGYVACRLVKQLLEAGDTVHATVRSLHDSPKLRPLRQLQADHPDQLRLFEADLLVPGSFVGAMQGCSVVHHVASPFLMPEKIKNGRTQLLEPALQGVRNVLTTVNATSSVERVVLTSTIGAIFGDYRDVLDMPGQTLSEAFFNTTSSLDHNPYHYSKVVAEQEAWAMYRAQQRWDLVCINPGLVLGPSPAAGSDSGSLFLLDELMRGLFFYGVPDLSFATVDVREVANAHIAAAKRPSAHGRYIVASAQMISFLEIARFLRKVHRRPYLLPRLQIPGLALRLLGPFFGLSPKYIRNHLGIRFGLDNRRSRQELGVDYRPVEQTLHEHYASWDRQRRA

SEQ ID NO: 19802 - protein, 175 aa, Triticum aestivum
MVPTVMASLATSVAPFQGLKSIAGLPVSRRSNGASLGSVSNGGRIRCMQVWPIEGIKKFETLSYLPPFSTEALLKHVDYLIRSKWVPCLEFSKVGFIFREHNASPGYYDGRYWTMWKLPMFGCTDATQVINEVEEVKKEYPDAYVRIIGFDNMRQVQCVSFIAFKPPGCEESVKA

SEQ ID NO: 19803 - protein, 458 aa, Staphylococcus epidermidis ATCC 12228
MGEIGMNDTDRTHKENKLEQDITLPYLKKAVIFSITFGFFGVNMAFALQSAMMGRIFQTLGANPNNLGWFFILPPLVGMIVQPLIGYYSDRTWTRFGRRMPYLLIAGPIGAIVLVLLPNAGSFGFGYASLMALSFGAVMTLLMDLTSNACMQPYKMIIGDMVNEKQRDMAWSWQQIFSNLGGIIATVLPFLLTMLGISNVAPKGEVPMTVKLAYYIAAAVLLIASIWTVISVREYEPKTYNYYHGINENNRNNKLNLLQLLKKAPKQFWQISVVQFFNWFALMYLWTYSTGAIAKNVWNVTDPSSAGYQAAGNWYGVLYCIQFLSSVIFGFVIARSKPSQRKFWYSFGLVFGGIGLISIFFIHNQWLLIFSFVLIGINNLTMNTQPFTLLTEAIDGENSGAYLGLFNTSICLPQIVASIVSFGLYPLLGSSMPAMLLLAGIMMLLGAVSVKFINAKFE

SEQ ID NO: 19804 - protein, 430 aa, Lycopersicon esculentum
MGSEKMMKINIKESTLVKPSKPTPTKRIWSSNLDLIVGRIHLLTVYFYKPNGSSNFFDNKVIKEALSNVLVSFYPMAGRLGRDEQGRIEVNCNGEGVLFVEAESDSCVDDFGDFTPSLELRKLIPSVETSGDISTFPLVIFQITRFKCGGVALGGGVFHTLSDGLSSIHFINTWSDIARGLSVAVPPFIDRTLLRARDPPTYSFEHVEYHPPPTLNSSKNRESSTTTMLKFSSEQLGLLKSKSKNEGSTYEILAAHIWRCTCKARGLPEDQLTKLHVATDGRSRLCPPLPPGYLGNVVFTATPIAKSCELQSEPLTNSVKRIHNELIKMDDNYLRSALDYLELQPDLSTLIRGPAYFASPNLNINSWTRLPVHECDFGWGRPIHMGPACILYEGTIYIIPSPNSKDRNLRLAVCLDAGHMSLFEKYLYEL

SEQ ID NO: 19805 - protein, 377 aa, Shewanella sp. MR-4
MLPAPHFSAFNPPRRILMGPGPSDVYPEVLAAQARPTVGHLDPLFVGMMDELKSLIQYAFQTKNEMTMAVSAPGSAGMETCFVNLVEPGEKVIVCRNGVFGERMRQNVERVGAIAVLVDNEWGTPVDPAAVEAALKANPDAKFLAFVHAETSTGALSDAKILCALAKQYGCLSIVDAVTSLGGVELRVDEWGIDAIYSGSQKCLSCVPGLSPVSFSPNAVEKLKNRKTPVQSWFLDQSLVMAYWTSAGGKRSYHHTAPVNALYALHESLRLLAEEGLENAWKRHQDMHLVLRAGLEKLGLKFVVAEASCLPQLNAIYIPKGVDDAAVRARLLKDYNLEIGAGLGALAGKAWRIGLMGFGARRENVALCLRALEEVLN

SEQ ID NO: 19806 - protein, 197 aa, Pisum sativum
MSASRFIKCVTVGDGAVGKTCLLISYTSNTFPTDYVPTVFDNFSANVVVNGSTVNLGLWDTAGQEDYNRLRPLSYRGADVFILAFSLISKASYENVSKKWIPELKHYAPGVPIILVGTKLDLRDDKQFFVDHPGAVPITTAQGEELRKLINAPAYIECSSKSQQNVKAVFDAAIRVVLQPPKQKKKKSKAQKACSIL

SEQ ID NO: 19807 - protein, 212 aa, Yersinia pestis KIM
MQNVDNTAVIDAANALPGRLTSIPVSPLHAVHGHSMTYIPEGMDLAFFAMGCFWGAERLFWQQPGVYSTAAGYSGGHTPNPTYHEVCSGRTGHAEVVRVVFDPAVISYQQLLQIFWENHDPAQGMRQGGDVGTQYRSAIYVLTPEQEEQAHKSRERFQQAMEKAGDQRVITSEITVALPFYYAEDDHQQYLHKNPHGYCGLGGIGVCLPPNV

SEQ ID NO: 19808 - protein, 885 aa, Zymomonas mobilis subsp. mobilis ZM4
MTKPRTINQNPDLRYFGNLLGQVIKEQGGESLFNQIEQIRSAAIRRHRGIVDSTELSSRLADLDLNDMFSFAHAFLLFSMLANLADDRQGDALDPDANMASALKDIKAKGVSQQAIIDMIDKACIVPVLTAHPTEVRRKSMLDHYNRIAGLMRLKDAGQTVTEDGLPIEDALIQQITILWQTRPLMLQKLTVADEIETALSFLRETFLPVLPQIYAEWEKLLGSSIPSFIRPGNWIGGDRDGNPNVNADTIMLSLKRSSETVLTDYLNRLDKLLSNLSVSTDMVSVSDDILRLADKSGDDAAIRADEPYRRALNGIYDRLAATYRQIAGRNPSRPALRSAEAYKRPQELLADLKTLAEGLGKLAEGSFKALIRSVETFGFHLATLDLRQNSQVHERVVNELLRTATVEADYLSLSEEDRVKLLRRELSQPRTLFVPRADYSEETRSELDIIQAAARAHEIFGPESITTYLISNGESISDILEVYLLLKEAGLYQGGAKPKAAIEAAPLFETVADLENAPKVMEEWFKLPEAQAIAKAHGVQEVMVGYSDSNKDGGYLTSVWGLYKACLALVPIFEKAGVPIQFFHGRGGSVGRGGGSNFNAILSQPAGAVKGRIRYTEQGEVVAAKYGTHESAIAHLDEAVAATLITSLEAPTIVEPEFSRYRKALDQISDSAFQAYRQLVYGTKGFRKFFSEFTPLPEIALLKIGSRPPSRKKSDRIEDLRAIPWVFSWSQVRVMLPGWFGFGQALYDFEDTELLQEMASRWPFFRTTIRNMEQVMARSDMTIAKHYLALVEDQTNGEAIYDSIADGWNKGCEGLLKATQQNWLLERFPAVDNSVQMRRPYLEPLNYLQVELLKKWRGGDTNPHILESIQLTINAIATALRNSG

SEQ ID NO: 19809 - protein, 416 aa, Zea mays
  misc_feature (142)..(142): Xaa can be any naturally occurring amino acid
  unsure (1)..(416): unsure at all Xaa locations
MAEICCEEAKSTPATAVAAASVSATAAAAAAVAVASSALERRRRRLEMRRFRVAGDPEAPVAEDVRAAKRQRLARTLSSTCPDAGSGSGSDSDSDRPALPERLPRYGVTSVCGRRREMEDTVSVRPDFVPGTSKQHFFGVFXDGHGCSHVATMCQNMMHEVVADEHRKADCSGEETAWKAVMERSFARLDEQAASWATSRSRDEPSCRCEQQKPLRCDHVGSTAVVAVVSPTHVVVANAGDSRAVLSRAGVPVPLSVDHKPDRPDELARIEAAGGRVIYWDGARVLGVLAMSRAIGDGYLKPFVSSEPEVTVTERTDDDECLVLASDGLWDVVTNEMACEVVRACFHSNGPPAPAARANGAALPAAENGSAVAKGVSVEDSDKACSDAAMLLAKLALARRSADNVSVVVVDLRRGI

SEQ ID NO: 19810 - protein, 477 aa, Oryza sativa
MGISKGGSGKEAKKPPLLLGRFEVGKLLGQGNFAKVYHARNVATGEEVAIKVMEKEKIFKSGLTAHIKREIAVLRRVRHPHIVQLYEVMATKLRIYFVMEYVRGGELFARVARGRLPEADARRYFQQLVSAVAFCHARGVFHRDIKPENLLVDDAGDLKVSDFGLSAVADGMRRDGLFHTFCGTPAYVAPEVLSRRGYDAAGADLWSCGVVLFVLMAGYLPFQDRNLAGMYRKIHKGDFRCPKWFSPELIRLLRGVLVTNPQRRATAEGIMENEWFKIGFRRFSFRVEDDRTFTCFELDDDAAVDAPTSPPDTPRTVDSGDVGAAPTRPRKAGSLTSCDSAPLNAFDIISFSPGFDLSGLIPEQQKHTARFVSAAPVEVIVATLEAAAAAAGMAVREREDGSISMEGTREGEHGALAVAAEIYELTPELVVVEVRRKAGGAAEYEEFFRARLKPSLRELVCDDRPCPEDSGELSRSL

SEQ ID NO: 19811 - protein, 531 aa, Pleurotus sajor-caju
MFPGARILATLTLALHLLHGAHAAIGPVGDMYIINEDVSPDGFTRSAVVARSAPSTESTSETGSTPGVLVQGNKGDNFQLNVLNQLSDTTMLKTTSIHWHGIFQTNSTWADGPAFVNQCPIASGNSFLYDFNVADQAGTFWYHSHLSTQYCDGLRGPLVIYDPSDPHLSLYDIDNADTVITLEDWYHVVAPQNAVLPTADSTLINGKGRFAGGDTTALAVINVESNKRYRFRLVSMSCDPNFTFSIDGHSLQVIEADAVNIVPIVVDSIQIFAGQRYSFVLNANQTVDNYWIRANPNLGSTGFDGGINSAILRYAGATEDDPTTTSATSTPLEETNLVPLENPGAPGPAVPGGADININLAMAFDFTNFELTINGSPFQAPTAPVLLQILSGATDAASLLPSGSIYAPEANKVVEISIPALAVGGPHPLHLHGHTFDVIRSAGSTTYNFDTPARRDVVNTGTDANDNVTIRFTTDNPGPWFLHCHIDWHLEIGLAVVFAEDVTSIAAPPAAWDDLCPIYDALSDTDKGGIA

SEQ ID NO: 19812 - protein, 491 aa, Candida albicans SC5314
MAPKLNNPNLFQNKPFINGQWYDSKSTSTFKVYDPATQELIIELPDQTPEEIDEAIAITHKAFQTYQRTPVYERAKWLRRMYELMIENLQDLATLITWENGKCLADALGEIKYAASYFEWFSEECKRNYGHTIQPSNQNNKVITYKQPVGPVGLLCPFNFPSAMGARKAAPALAAGCTCILKPDGQTPLSSLALAYLAQQAGFPDGCFNVVLTSVTNTPMCGLKFCQSPKLKKISFTGSTNVGKLLMQQSSSTLKKLSMELGGNAPIIVFNDCNLDLAVDQSITSKFRSLGQTCVCANRIYVEKGVYDEFCNKFVEKVNQFKIGNGFEPGVTHGCLINTKAIEKVEDHVQDAVEKGAKLIVEGGRLPQLGENFYSPSVVKDVTQDMKVVKEETFGPLAAIIPFDSKEQVLQWCNDTPYGLASYIFSENLNTVWYMSEFLENGMVSVNTGLFTDAALPFGGVKESGFGREGSLYGMDDYTVIKSITLGNVYN

SEQ ID NO: 19813 - protein, 161 aa, Lycopersicon esculentum
MVPTPQSDLPLNENDSQEMVLYEVLNEANALNIPYLPQRNQLLPRNNILRPLQCIGKKYRGVRRRPWGKYAAEIRDSARHGARVWLGTFETAEEAALAYDRAAFRMRGAKALLNFPSEIVNASVSVDKLSLCSNSYTTNNNSDSSLNEVSSGTNDVFESRC

SEQ ID NO: 19814 - protein, 282 aa, Helianthus annuus
MSLVGGFTEVKDFANSIVIDDLARFAVDEYNKKQNTLLEFRKVLNAKEQIVSGTLYYITLDAANGGIIKTYEAKVWVKKWENLKELQEFKPVDAATSVIGGITEVKDFANSLEIEDLARFAVDEHNKKQNTLLEFGKVLNAKEQIVAGKLCYITLEATDGGVKKTYEAKVWVKPWENFKELQEFKPVDAATPVIGGITEVKDFANSLVIDDLARFAVDEYSKKQNTLLEFERVLDAKQQIVAGTMYYFILEATVGGVKNTYVAKVLLKPDNSKELKEFKHLY

SEQ ID NO: 19815 - protein, 532 aa, Pleurotus sajor-caju
MRALSHFIASLTLVLWFRPGANAVETIGPVGSMRIVNKVVSPDGFSRSAVVAGKTAAGATNPGVLVHGWKGNNFKLNVINELTDTTMLKTTSIHWHGFFQAGTSWADGPAFVTQCPIAAGNSFLYDFEVPDQAGTFWYHSHLSTQYCDGLRGAFVVYDLFDPPRLRYDIDNADTVITLEDWYHVVAPQNGPIPTPDSTLINGLGRYAGGPTSPLAVVRVLWGLRYRFRLVSLSCDPNWTFSIDGHKLLVIEADAVNVEPVEVDSIQIFAGQRYSFVLRANQQIANYWIRAEPNLGTVGFAGGINSAILRYILAPNADPTTTAPASPVQLAETDLVPLSNPGAPGPPVPGGADVNINLAMNFDFTNFELIINGQAFHPPTAPVLLQILSGATTAASLLPAGSIYELPPNKVIELSIPALAIGGPHPFHLHGHTFDVIRSAGMTTYNFDTPARRDVVNTGVGAEDNVTIRFVTDNPGPWFLHCHIDWHLEIGLAIVFAEDAPIVNTENPPSSWDDLCPIYDALTEEEKGGLLPT

SEQ ID NO: 19816 - protein, 448 aa, Oenococcus oeni PSU-1
MSINNRESQNNLVDNYHSALLGIQHLLAMYSGAVLVPLLIGGALKFSAAQMTYLISIDIFMCGLATFLQLFTNRIFGIGLPVILGCAIQAVAPLEMIGQNFSIGTMYGAIIASAVFVFLIAGLFAKIRKFFPPLVTGTVITVIGLTLIPIGFVNLGGGSATAKSFGSGNNLIVGLFTILVVLVCSVYGRGFISRIAVLIGLLLGTILASLMGMVSFKAVVDASWFHFPQPFYFGTPRFEVSSILTMIAISLVSLVESTGVFFALGDITKKPIGEKDLKKGYRAEALAGILGGIFNTFPYTTFSQNVSLVQLSGIKSRQPIYYAAGFLMLLGLLPKIGALATIIPTPVIGGATVIMFGMIAIQGIRILEKMDFSNNKNILVAAISIGAGLGVSVEPNIFQSLPETVRLIFSNGVVIASLCAVLLNLIIQPDRVTNKIKNPAGSVKQQEN

SEQ ID NO: 19817 - protein, 248 aa, Lycopersicon esculentum
MTENSVPVIKFTQHIVTTNKHVFSEHNEKSNSELQRVVRIILTDADATDSSDDEGRNTVRRVKRHVTEINLMPSTKSIGDRKRRSVSPDSDVTRRKKFRGVRQRPWGRWAAEIRDPTRGKRVWLGTYDTPEEAAVVYDKAAVKLKGPDAVTNFPVSTTAEVTVTVTETETESVADGGDKSENDVALSPTSVLCDNDFAPFDNLGFCEVDAFGFDVDSLFRLPDFAMTEKYYGDEFGEFDFDDFALEAR

SEQ ID NO: 19818 - protein, 520 aa, Candida albicans SC5314
MLRVNSRLLTTRKSQFMFTSNSLRFLATFKPADPLTTHDINPQTVEAKYAVRGKIPIIADELNELIQKQPQSHGLPFSKIINANIGNPQQLEQRPLTWYRQVLSLLQYPDLLKNGDPETVKSLYPEDVIERAQSILKHIGSIGAYSHSQGASYFRQSIAEFITNRDGGYVSHANNIFLTSGASTAVSYLLQILSVNENSGFLIPIPQYPLYTATIALNNAKPIGYYLDESNHWSTNPQEIRELIETNQSQGINIKALVVINPGNPTGAILSSQDIIELIDIAAEYGIVLIADEVYQENIFKGKFVSFKKILSELIEQDPQTYKHVQLASLHSTSKGVSGECGQRGGYMELVGFKPEVKDVVFKLASINLCSVVSGQALMELMINPPQEGDPSYPLYKSETESIHNDLESRAESLYQAFLQMEDIKCNKPMGAMYIFPTLDFDPARYHKLYSRAKNSNLQIDDIYCIELLEGTGICCVPGNGFGQKPDTYHLRTTFLPPGKEWIDKWINFHKSFIKKYKDE

SEQ ID NO: 19819 - protein, 529 aa, Bacillus flavocaldarius
MSWWQRAVIYQVYPRSFQDTNGDGVGDLEGIRRRLPYLKSLGVDALWLSPFYKSPMKDFGYDVADYCDVDPVFGTLQDFDRLLEEAHALGLKVLVDLVPNHTSSEHPWFLESRASRNSPKRDWYIWKDPAPDGGPPNNWQSFFGGPAWTLDEATGQYYLHLFLPEQPDLNWRNPEVREAIKEVMRFWLRRGVDGFRVDVLWLLGKDPLFRDEPGSPLWRPGLPDRARHEHLYTEDQPETYAYVREMRQVLDEFSEPGRERVMVGEIYLPLPRLVRYYAAGCHLPFNFSLVTEGLSDWRPENLARIVETYEGLLSRWDWPNWVLGNHDQPRLASRLGEPQARVAAMLLFTLRGTPTWYYGDELALPNGLIPPEKVQDPAALRQRDREPTAYHTLGRDPERTPMPWDASPYGGFSTVEPWLPLNPDYRTRNVAVQEQDPRSMLHLVKRLIALRKDPDLLYGAYRTYRAREGVYAYLRGEGWLVALNLTEKEKALELPRGGRVVLSTHLDREERVGERLFLRPDEGVAVRLD

SEQ ID NO: 19820 - protein, 521 aa, Pleurotus sajor-caju
MVLSTKLVALVASLPFVFAVTKKLDFHIRNDVVSPDGFERRAITVNGIFPGTPVILQKNDKVQIKTINELTDPGMRRSTSIHWHGLFQHKTSGMDGPSFVNQCPIPPNTTFLYDFDTAGQTGNYWYHSHLSTQYCDGLRGSFIVYDPNDPLKHLYDVDDESTIITLADWYHDLAPHAQNQFFQTGSVPIPDTGLINGVGRFKGGPLVPYAVINVEQGKRYRFRLIQISCRPFFTFSIDNHTFDAIEFDGIEHDPTPAQNIDIYAAQRASIIVNANQTIDNYWIRAPLTGGNPAGNPNLDVSLIRAILRYKGAPAVEPTSVATTEGHKLNDADMHPIAQEGPGNLGTGPPDMAITLNIAQPNPPFFDINGISYLSPSVPVLLQMLSGARKPQDFLPSEQVIILPANKLIEVSIPGAGAHPFHLHGHTFDIVRVSNSDVVNLVNPPRRDVLPINGGNTTFRFFSGNSGAWFLHCHIDWHLEAGLAVVFAERPAEVNEGEQAQIVTQDWRTLCPAYDGLAPEFQ

SEQ ID NO: 19821 - protein, 389 aa, Bacillus anthracis str. A2012
MNRVWKSLIAEENIVKWRRHFHKYPELSFHEKETSQFIYDTLCTFSSFEVTRPTKYSVLAIKRGTEQGKVVAIRADIDALPIQEETSKSYTSVNKGIMHACGHDAHAAILLSTAEVLSNIKEDFAGEIRLFFQHAEEVYPGGGQEMVEAGVMDGVDYVIGLHVMSGLESGKIGIAYGPMMAAPDVFTVEIQGKGGHAARPEETIDPIAIGAQIITNLQHIVSRNTSAFMQRVVSVTQFHGGMADNIIPSVATLMGTVRSFNQVLRVEAEEKIEKIVKGITKAHGGAYTYTYRYGYNPVINDEYITKVVEESAIHLFGNERVVKLEPSMGGEDFSAYLRKAPGCFIKLGTGNEKINTCYPHHHPKFDVDESALINGVELFLETAIRLLKS

SEQ ID NO: 19822 - protein, 666 aa, Bacillus clausii KSM-K16
MKPLTKENISQLSVTTVRTLSIDSVEYAQHGHLGMPLGAAPMAYALYRNVLKHNPKNPKWYDRDRFVLSSGHGSILQYTLLHLTGYDVSLSDLKNFRKLGSKTPGHPEVGYTPGVEATTGPLGQGLPMVVGMAIAERHLAAKYNKDDLNIVDHYTYTICGDGDLMEGVGQEAMSLAGHLGLGKLIVLYDSNDICSDGSVTDSNTENVQEKYKTMGWQTILVEDGNDLEKIQQAIELGKKETNKPTLIEVKTVIGYGSPNLSGTEHIHSNPVGEKEAQLIKQQYGWHFEDPFHIPDKVKEDFSQVLSNGLDNENKWNELFKQYQQKYPALATEFIRSMENEIEINELSTEFTEEKVATRSASGTVLNEVASKVPSIIGGSADLASSNKTTLRDNEFMTKEDYRGSNIHFGVREFGMAAIINGIALHGGIKGYCGTFLVFSDYMRSAIRMSAIMKVPVTYVFTHDSIMLGPDGPTHQPIEHLISLRAMPNLNVIRPADANETKAAWLIAANSKKTPTAIILGRHDVPVLDNASLEGVRKGAYLISEGTEEATGIIIATGSEVELAIKAQNILESKNIFVNVVSMPSWELFNQQNEDYKNSVLPSNLDNKLAVEMGSDIGWREYIGPKGDTITINTFGDSGNGQELAEKLGFTPENIAHRFIELKERNL

SEQ ID NO: 19823 - protein, 475 aa, Bacillus flavocaldarius
MAWYEGAFFYQIFPDRFFRAGPPGRPAPAGPFEPWEDPPTLRGFKGGTLWGVAEKLPYLLDLGVEAIYLNPVFASTANHRYHTVDYFQVDPILGGNEALRYLLEVAHAHGVRVILDGVFNHTGRGFFAFQHLMENGEQSPYRDWYHVKGFPLKAYTAHPNYEAWWGNPELPKLKVETPAVREYLLAVAEHWIRFGVDGWRLDVPNEIPDPTFWREFRQRVKGANPEAYIVGEIWEEADFWLQGDMFDAVMNYPLARAVLGFVGGEALDRDLAAQTGLGRIEPLQALAFSHRLEDLFGRYRPEVVRAQMNLLTSHDTPRLLSLMRGSVERARLALALLFLLPGNPTVYYGEEVGMAGGKDPENRGGMVWEEARWQKDLRETVKRLARLRKEHPALRTAPYLRIYAQDGHLAFARGPYLVVVNASPHPFRQDFPLHGVFPRGGRAVDLLSGEVCTPQGGRLCGPVLPPFSLALWREA

SEQ ID NO: 19824 - protein, 532 aa, Pleurotus sajor-caju
MFPGARILATLALALHLLHGALAAIGPVGDMYIVNEDVSPDGFSRSAVVARSVPITGPTPATASIPGVLVQGNKGDNFQLNVVNQLSDTTMLKTTSIHWHGFFQAGSSWADGPAFVTQCPVAPGDSFLYNFNVPDQAGTFWYHSHLSTQYCDGLRGPFVVYDPTDPHLSLYDIDNADTVITLEDWYHIVAPQNAAIPTPDSTLINGKGRYAGGPTSPLAVINVESTKRYRFRLVSMSCDPNFTFSIDGHSLLVIEADAVNIVPITVDSIQIFAGQRYSFVLTADQTPDNYWIRANPNLGSTGFAGGINSAILRYVGAADADPTTTSSTSTPLLETNLVPLENPGAPGPAVPGGADININLAMAFDFTTFELTINGVPFHPPTAPVLLQILSGASSAASLLPSGSIYELAPNKVVEISMPALAVGGPHPFHLHGHTFDVIRSAGSTTYNFDTPARRDVVNTGTGANDNVTIRFVTDNPGPWFLHCHIDWHLEIGLAVVFAEDVTSISAPPAAWDALCPIYDALSDADKGGIIP

SEQ ID NO: 19825 - protein, 525 aa, Pleurotus sajor-caju
MAPLVRALACLAILAVTNVYGATVGNNADIYIANKVIAPDGFERSGVLAGTAAGVEVIGPLVRGWKGNRFRLNVINQLSDSSMLKTTSIHWHGFFQEGSSWADGPAFVTQCPIASGDSFLYDFRVPDQAGTFWYHAHLSTQYCDGLRGAFVVYDLLDPHRLRYLVDNEDTVITLADWYHTVAPQAGLVPVPDSTLINGRGRYAGGPTVPLSLIRVLWGVKYRFRLVSLSCDPNYTFSIDGHKMTIIEVDGVNTKPLEVDSIQIFAGQRYSFVLHANQRIANYWIRANPNLGTRGFEGGLNSAILRYYGAPNRDPTTTQETSVNPLVETNLVPLRDAGAPGVPGVGNADVNINLAMAFDFPSLQFTINGAPWVSPTSPVLLQIISGASSASELLPPGSIYTLPRNKVVELSIPALAIGGPHPIHLHGHAFDVVRSAGSSTYNYNNPVRRDVVSTGTGSDNVTIRFKTDNPGPWFLHCHIDWHLEIGLAVVFAEDTASTSKQRPPKSWSDLCPIYDSLTEEQKGGIV

SEQ ID NO: 19826 - protein, 276 aa, Streptomyces avermitilis MA-4680
MTPRLSGKTAVITGAARGLGRATAVAFAREGADLMLLDLAADLPGVPYPLGSESQLAHTAELCREQGVAASTARLDVRDLDAVEAAMATTRERFGRIDVLVNNAGIAAPSGKAAHEIDEREWQLMIDVDLSGAWRTIRAVGGHMAEQRSGSIINIASTAGLVGYRHFAGYVAAKHGLVGLTKAVALDYAPLKVRVNALCPGSVRDDSQVEGRMLSEIARCLDVPVAEHEETFVQAQPMNSLIEPEDIASAAVWLASDESRQVTGSVLAVDGGFTAR

SEQ ID NO: 19827 - protein, 565 aa, Listeria monocytogenes str. 1/2a F6854
MEITETKEWWKESVVYQIYPRSFQDSNGDGIGDIRGIIERLPYLKDLGINVIWLCPVYKSPMDDGGYDISDYYEIDPMFGTMSDMDELIEKAEKLGIKILMDLVVNHTSDEHEWFEKAIADPKSKYRDYYIFREGVNGNPPNNWRSYFGGSAWEAVPGEENMFYLHAFSKKQPDLNWENIVVRNECIQMINWWLEKGLGGFRIDAILNLKKRIEYGTFPADGEDGLVFIGHWILNQPGIEEWLKEIDERTFKKHNAFTVAEADVPEERLSEFIGENGHFRMVFDFSYTDIDTPETGEWFKNSEWTVKELKEKIITNELVTQRNGWGAKYLENHDQPRSINKYLPQEYQDDRSKKMLGTLFMMLHGTPFIYQGQEIGMSNTRMESIDDYNDIATHDQYHRAILSGMSPEEALEGMYRRSRDNSRTPMQWNNQKNAGFSDSDEIWLKANPNYLDINVEQEQIDDNSVLNFYKKLIHLRSDSSKYKEVAVYGELLPVESSDEVIAYKRKTDDAELLIIVNFSDSENQLCIEGTYEQVLANVALPEMIENVLEIPAYTGAVFSRVLEVD

SEQ ID NO: 19828 - protein, 214 aa, Glycine max
  misc_feature (14)..(14): Xaa can be any naturally occurring amino acid
  misc_feature (36)..(36): Xaa can be any naturally occurring amino acid
  misc_feature (51)..(51): Xaa can be any naturally occurring amino acid
  misc_feature (79)..(79): Xaa can be any naturally occurring amino acid
  misc_feature (105)..(105): Xaa can be any naturally occurring amino acid
  misc_feature (129)..(129): Xaa can be any naturally occurring amino acid
  misc_feature (170)..(170): Xaa can be any naturally occurring amino acid
  unsure (1)..(214): unsure at all Xaa locations
MMHILHKTLTGKTXTLEEESSDTIDIAEAIIQDKEXGIHPDQQRLIFAGKXLEDGRTLAVYNIHKERTLQLALRLRGGXQILGKTLTGKTITVEGESSDNMHNVXAKIQDKEGIPTDQQRLIFGAKQLXDGRTLADYNIQKETTAYLVLRLRGGMQIFVNTLTGQTITLXGESSDTISNVKANIDDKDGMLPDQDMLIFSGKQLADGRTLADYN

SEQ ID NO: 19829 - protein, 480 aa, Listeria monocytogenes str. 1/2a F6854
MQIKNKAMLITYSDSLGENMEELSKVMETYFEDAIGGIHLLPFFPSTGDRGFAPSDYTTVDSDLGSWEMIEKLGEKYYLMFDFMINHISRESLFFQDFKKEHLNSKYKDMFIRINDFFPPGRPNEKDLDLIYKRKDKAPFQEVEFADGETELVWNTFGEEQIDLDVTAEVTKEFIRQTIKNMAAHGCSILRLDAFAYAIKKLDTNDFFVEPEIWDLLDEVKAEAAKYDMELLPEIHEHYSIQMKIANHDYYIYDFALPMVMLYSLYSGRVEHLAKWLEMSPMKQFTTLDTHDGIGVVDARDLLTDEELDYTSAELYKIGANVKKIYSSEKYNNLDIYQINSTYYSALGDDDKSYLLARVIQCFAPGIPQIYYVGLLAGKNDIDLLEETKEGRNINRHYYTIDEIKNEVKRPVVKALCNLLRFRNTSEAFDLEGSIEIETPSSNEIVIIRKNKTNKITATLKADLSTKTFQISENERNILI

SEQ ID NO: 19830 - protein, 400 aa, Bordetella parapertussis 12822
MSTLFASVELAPRDPILGLNEQYNADTRPGKVNLGVGVYYDDEGRIPLLQAVRKAEVARIEAAAARGYLPIEGIAGYNEGAQALLLGADSPLAAEGRVLTAQALGGTGALKIGADFLRQLLPQSKVLISDPSWENHRALFERAGFPVETYAYYDAATHGLNFEAMLAALQAAPEQTIVVLHACCHNPTGVDPTPQQWEQIAAVVKARNLVPFLDIAYQGFGEGLEQDAAVVRMFAALDLTMFISSSFSKSFSLYGERVGALTVVAGSKDEAARVLSQLKRVIRTNYSNPPTHGGTVVSTVLNTPELFALWENELAGMRDRIRLMRKELVEKIKAQGVAQDFSFVLAQRGMFSYSGLTAAQVDRLREEHGIYAVSSGRICVAALNSRNIDAVAAGIAAVLK

SEQ ID NO: 19831 - protein, 651 aa, Kluyveromyces lactis NRRL Y-1140
MLRTVRGRRVGLAQANFKSLVQARKFSSQMVLRQTISANGDINGQQQEAGSSSSHGYNIIDHEYDCVVVGAGGAGLRAAFGLAEAGYKTACISKLFPTRSHTVAAQGGINAALGNMHKDDWKWHMYDTVKGSDWLGDQDSIHYMTREAPKSIIELEHFGVPFSRTEEGRIYQRAFGGQSKEYGKGGQAYRTCAVADRTGHALLHTLYGQALRHNTHFFIEFFAMDLLTHNGEVVGVMAYNQEDGTIHRFRAHKTIIATGGYGRAYFSCTSAHTCTGDGYAMVSRAGFPLQDLEFIQFHPSGIYGSGCLITEGARGEGGFLVNSEGERFMERYAPTAKDLACRDVVSRAITMEIREGRGVGPEKDHMFLQLNHLPPSVLHERLPGISETAAIFAGVDVTKEPIPILPTVHYNMGGIPTKWNGEALTIDEETGEDVLIPGLLACGEAACVSVHGANRLGANSLLDLVVFGRAVAHTIADTLQPGLPHKPLPADLGKESIANLDKLRNATGHRPTADIRLAMQKTMQKDVSVFRTQASLDEGVKNINAVDKTFVDVGTTDRSMIWNSDLVETLELQNLLTCATQTAKSAAERKESRGAHAREDYPERDDVHWMKHTLSWQRDTGDDVVLKYRKVIATTLDEKECPPVPPTVRAY

SEQ ID NO: 19832 - protein, 124 aa, Triticum aestivum
  misc_feature (54)..(54): Xaa can be any naturally occurring amino acid
  misc_feature (94)..(94): Xaa can be any naturally occurring amino acid
  unsure (1)..(124): unsure at all Xaa locations
MGGLSVIAPPARDTASPQHRRARRAFLVSNYLILGCASGCGFLTLSLRLGPLRXDGFLLILLHALTVGRRRGGCRPSSAAPDRRAGRCYTAHMXRQRRSCQSCKGAAAVLAFSRNSGFLPAGPV

SEQ ID NO: 19833 - protein, 534 aa, Wolbachia endosymbiont of Drosophila ananassae
MKEAKFIFVTGGVVSSLGKGLVASSVGALLQAHGFKIRIRKLDPYLNIDPGTMNPTQHGEVFVTEDGAETDLDLGHYERFTGIKATKDDNITTGKIYHELLKKERRGDYLGKTVQVIPHVTDLIKSFIFNGTEGLDFVICEIGGTVGDIESQPFLEAIRQVNYTLGKQRVILIHLTLIPYLTAAQELKTKPTQHSVRELNSAGLQPDIILCRSEKEIFDNQREKIAKLCNVSLSNVIPAPDVSHIYELPVLYSQCGLDTQILEHFHLSKPKPSLTEWDQIVHSIRHPTQEVTVSIVGKYTEFPDAYKSLVEALNHGAISNKVKVKINWVNSREKEEKPINEKLIGEKLQNSHAILVPGGFGDDGVEGKILAINYARTNNIPFFGICLGMQLAIIEFARNVVKLEDAHSEEFRNCKHPIVKLAGDQDDDLGGTMRLGAYKCNINANSKMMDAYSNTTISERHRHRYIINSDYKDDLEKNGLLCSGISEDGTCIEAVELESHPWFIGVQFHPEFQSKPFSPHPLFVSFIEAAIDKK

SEQ ID NO: 19834 - protein, 710 aa, Ustilago maydis 521
MRLSLVSLALLGLAANHALAFPASLGDVKRNTDHAPYFDTDKSALDPDLTLGPDMLGSDDVDEFVRRIDQVLQSYEPDLSSFGLGPVPGFWPGHRHGDAHNHGPPHAHEDGHKDQGHQVPGSRPINGKPPKDTCKPKPPSGVSHKCEKRDFTPQTREFDWTITYGHSAPDGFLKKRILVNGQSPGPLIEANEGDTIVVKVRNLLDQGTSIHWHGMFQNSTPFMDGIAGFSQCPIPPRGHLTYRFKIEGQYGSYWWHSHSKMQYTDGLYGGLIVHSKRDPYQKCRDYDDERVFLFADNYHDFADYIVQQLLSANGYNGTAAAPSPQSGLINGAGQFNCAALAHAKGKQPGMPTRCTQLPTPTMDVEPNKKYRFRFINTGSHAQHIISIDNHELEVIAADGTPVKPHKVHRVPIHNGQRHDVFVDTNQGSDGDSFLLRSAMMTACFSFVDPLLDPVANLTLQYRLPGSKIAPKRPVPHDWKDAMGSQCQDLKDSELVPAIDTSVPPNHNLGSLGIFNSQFGNLQLANGTTLGRFFVDNVTQTNYVNKPYLEVTHAGGQINSSTVASLLIPDDVWVADIVINNEDSFLDHPFHLHATDMHIVARGSGSMTQAQWIALNQNAQPQNGNASALNLKNPLRRDTITVPRSSFVVVRIIPDLPGVWAMHCHIAMHVAEGLMAAIAIHPHKIRELKFSQEVLDLCLVSRAALNEVEPA

SEQ ID NO: 19835 - protein, 153 aa, Chlamydomonas reinhardtii
MAPKKAAKGDEAPKEVVSLGPTVREGEHVFGVAHIFASFNDTFVHVTDLSGRETISRVTGGMKVKADRDESSPYAAMLAAQDVAQKCKELGITALHIKLRATGGNRTKTPGPGAQSALRALARAGMKIGRIEDVTPIPTDSTRRKGGRRGRRL

SEQ ID NO: 19836 - protein, 92 aa, Kluyveromyces lactis
  misc_feature (12)..(12): Xaa can be any naturally occurring amino acid
  misc_feature (62)..(62): Xaa can be any naturally occurring amino acid
  misc_feature (76)..(76): Xaa can be any naturally occurring amino acid
  unsure (1)..(92): unsure at all Xaa locations
ARPAFVNKLWSXVNDKSNEKFIHWSTSGESIVVPNRERFVQEVLPKYFKHSNFASFVRQLNXYGWHKVQDVKSGSXLSNNDSRWEFENERHA

SEQ ID NO: 19837 - protein, 141 aa, Photobacterium profundum SS9
MKTLPGVVSTEAGRANGSTYNTSGEYDGYAECVCTQFDPTAVSVEQLMDYFFEIIDPYSVNKQGEDVGEKYRTGIYSKNPKHLVLVTCYLQAREDADKVAIEVLPLSNYVKSDDEHQDRLTLHPNDYCHIPKNILYKYKDE

SEQ ID NO: 19838 - protein, 330 aa, Kluyveromyces lactis NRRL Y-1140
MLGLKSHHKELIKLSRNCVPKLTPQLYKGQCGKICVVGGCEEYTGAPYFSAHAASIFGSDLVYLLCEKRAGLPIKGYSPNLMVHPYLGDTYSSTHGFQFEFEKVASVVQRCHVLVVGPGLGRDEQIMQEVLQLVEEAPSLGDDNDRCLVLDADGLFLLASENHTERMQKALKGYGDNRVVITPNAVELKRIMNALNVDSVEKVSEKLGCITVAKGQNDIIVNSQGERWENDVQGSMKRCGGQGDTLTGIIATMFGFSRAVHDFKLETIVEEGNGENLPWSKMAMLSCFIGSTATRMASRAAYDKVGRQLQTTDMNNMVGEVFNELYPPSQ

SEQ ID NO: 19839 - protein, 250 aa, Photorhabdus luminescens subsp. laumondii TTO1
MAVTKLVLVRHGESEWNRENRFTGWTDVALSEKGRAEAQQAGQLLKEEGFVFDFAYTSVLKRAIHTLWNILDQVDQQWLPVEKSWKLNERHYGALQGLDKAETAAKYGDDQVKLWRRGFAITPPDLTKDDERFPGHDPRYANLKPEELPVTESLATTIERVIPYWEEVIKPRVAQGEKVIIAAHGNSLRALVKYLDNMSEETILELNIPTAVPLVYEFDENMKPIKHYYLGNADEIAAKAAAVANQGKAK

SEQ ID NO: 19840 - protein, 92 aa, Kluyveromyces lactis
ARPAFVNKLWSMVNDKSNEKFIHWSTSGESIVVPNRERFVQEVLPKYFKHSNFASFVRQLNMYGWHKVQDVKSGSMLSNNDSRWEFENERHA

SEQ ID NO: 19841 - protein, 401 aa, Xanthomonas campestris pv. vesicatoria str. 85-10
MSKQIQEAYIVAATRTPVGKAPKGVFRNTRPDDMLAHVLRAVVAQAPGIDTSRIDDAIIGCAMPEGEQGMNVARIGVLLAGLPNSVAGQTINRFCSSGIQAIAMAADQIRLGNADLMLAGGTESMSMVPMMGNKVAMSPSVFADDHVAIAYGMGITAEKVAEEWKVSREDQDAFALASHQKAIAAIAAGEFRDEITPYEIHSHQPDLAGNVIALRKRLVDTDEGPRPDSSLEGLAKLRPVFRNGQFGGSVTAGNSSQMSDGAGAVLLASEQAIKDYGLTPLARFVSFSVAGVRPEVMGIGPIAAIPKALKQAGLTKDQLDWIELNEAFAAQALAVIRDSELDPSKVNPLGGAIALGHPLGATGAIRAATLVHGLRRRQQKYGMVTMCIGTGMGAAGIIEAL

SEQ ID NO: 19842 - protein, 83 aa, Brassica napus
MSVTKFIKCVTVGDGAVGKTCMLICYTSNKFPTDYIPTVFDNFSANVSVDGSIVNLGLWDTAGQEDYSRLRPLSYRGADVFVL

SEQ ID NO: 19843 - protein, 589 aa, Phytophthora infestans
MSSSSRKFFVGGNWKCNGSLGQAQELVGMLNTAKIPVNVEVVVAPSQVHAATVKASLRSYVRVSGQDVWKQGNGAFTGETSAEMLKDLGAEYTLVGHSERREKGETNEVVAKKAAYALEKGLGVIACIGETKDHREANQTVAYITEQLDAYAAEINDWTNVVIAYEPIWAIGTGLTASPEQAQEAHASIRAWLKEKVSPEAAEQTRVIYGGSVGAKNAPELSQKEDIDGFLVGGASLKPDFLQIINAQNPTANVGGAVNVAINGFGRIGRLVLRASAKNPLINIVAINDPFVSTTYMEYMLEYDTVHGKFDGSLSHDETHIFVNGKPIRVFNEMNPENIKWGEEQVQYVVESTGAFTTLEKASTHLKNGVEKVVISAPSSDAPMFVMGVNHELYEKNMHVVSNASCTTNCLAPLAKVVNDKFGIKEGLMTTVHAVTATQKTVDGPSKKDWRGGRGACFNIIPSSTGAAKAVGKVIPSLNGKLTGMSFRVPTADVSVVDLTARLVNPASYDEIKAAIKSASENEMKGILGYTEKAVVSSDFIGDSHSSIFDAEAGIALTDDFVKLVSWYDNEWGYSSRVLDLIEHMVKNE

SEQ ID NO: 19844 - protein, 666 aa, Xanthomonas axonopodis pv. citri str. 306
MTQPTRRQLANAIRFLAADAVEAAKSGHPGMPMGMADIAEVLWNDFYRHNPNNPQWFNRDRFVLSNGHGSMLQYALLHLSGYDLPIEQLKQFRQLHSKTAGHPERSETPGVETTTGPLGQGFANAVGFALAEKLLAQRYNRPELEIVDHRTWVFMGDGCLMEGISHEAASLAGTWGLGKLVAFWDNNQISIDGNTAGWFSDDTPARFEAYGWHVIRDVDGHDADKIKAAIETALENTDKPTLICCRTKIGFGAPTKAGKESSHGAPLGKDELEGARKALEWPYGPFEIPEEIYAGWRAGGTGTLRQAEWEQLFDKYAKQYGAQADELTRRSHGELPADFIAKADAYIAKAQEEGQTIASRKASQLAIEAFAPLLPELIGGSADLAHSNLTLWKASKSVATDDPDANYVYYGVREFGMTAIANGLALHGGFIPFDATFLVFSDYARNGVRMSALNPAHAIHVYTHDSIGLGEDGPTHQPVEHLASLRYIPNNDVWRPGDAVESAVSWKAAITRKDGPSCLIFSRQNLQHQPRSAEQLKLIERGGYVLADAEGGTPDVILIATGSEVGLAVEAKKTLDAAGLKTRVVSMPSTDVFDRQDAAYRESVLPNAVRKRVAVEAGVTGFWRKYVGLDGDVVGMDTFGASAPADQLYAYFKITAEHVVAAAKAL

SEQ ID NO: 19845 - protein, 746 aa, Zea mays
GNAALENGHHQAEADADEWREKEEDLANNGHSAPPPGMQQVDEHKEEQRQSIHWERFLPVKTLRVLLVENDDSTRQVVSALLRKCCYEVIPAENGLHAWRYLEDLQNNIDLVLTEVFMPCLSGIGLLSKITSHKICKDIPVIMMSTNDSMSMVFKCLSKGAVDFLVKPLRKNELKNLWQHVWRRCHSSSGSESGIQTQKCAKLNTGDEYENGSDSNHDDEENDDGDDDDFSVGLNARDGSDNGSGTQSSWTKRAVEIDSPQPISPDQLVDPPDSTCAQVIHPRSEICSNKWLPTANKRNVKKQKENKDESMGRYLGIGAPRNSSAEYQSSLNDVSVNPIEKGHENHMSKCKSKKETMAEDDCTNMPSATNAETADLISSIARNTEGQQAVQAVDAPDGPSKMANGNDKNHDSHIEVTPHELGLKRSRTNGATAEIHDERNILKRSDQSAFTRYHTSVASNQGGARYGESSSPQDNSSEAMKTDSTCKMKSNSDAAPIKQGSNGSSNNDVGSSTKNVAARPSGDRERVASPLAIKSTQHASAFHTIQNQTSPANLIGEDKADEGISNTVKMSHPTEVPQGCVQHHHHVHYYLHVMTQKQPSTDRGSSDVHCGSSNVFDPPVEGHAANYSVNGGVSVGHNGCNGQNGSSAVPNIARPNIESINGTMSQNIAGGGIVSGSGSGNDMYQNRFLQREAALNKFRLKRKDRNFGKKVRYQSRKRLAEQRPRVRGQFVRQSEQEDQTAQGSER

SEQ ID NO: 19846 - protein, 458 aa, Cryptococcus neoformans var. neoformans B-3501A
MTAATISTETVTQVQAPGTKANGTSGKYNPRNYLSDRAKVTEIDGIRGLMACEGPGIVSFLAGRPNPDTFPFNSITLNLKPPLGLPESSNNMPVSITIEDPDLAIALQYAPSSGIPKLREWLADLQAHVHERPRGDYDISIGSGSQDLMFKGFQAVLNPGDPVLLETPMYPGVLPVMRVLKAESVEVDVDDQGLSAENLEKVLSEWPADKKRPRVLYTSPIGSNPSGCSAPKERKLEVLKVCKKYGVLIFEDDPYYYLAEKLIPSYFALEKQVYPEGGHVVRFDSFSKLLSAGMRLGFATGPKEILHAIDVSTAGANLHTSAVSQGVALRLMQYWGIEGFLAHGRAVAKLYAERRAQFEATAHKYLDGLASWVSPVAGMFLWIDLRPAGIEDSYELIRHEALAKGVLGVPGMAFYPTGRKSSHVRVSFSIVDLGEESDLGFQRLAEAIKDKRKALGLA

SEQ ID NO: 19847 - protein, 372 aa, Listeria ivanovii
MDLNQFISIRRELHQIPETGYKEWKTQAYLLDYINKLPSRYLEVKKWRTGLLVRVSGTSPTKTIGYRTDIDALPITEETGLAFESKHAGNMHACGHDLHMSIALGVLTHFASKPAKDNLLFVFQPAEEGPGGAKPIMESAEFAEWRPDSIYGLHIAPEYKVGQIAIKPGLLFANTSELFISFKGKGGHAAYPHLANDMVVAASAFVGQMQTIISRNIDPMDSAVITIGRIHGGEIQNVIAETAFLDGTIRTLSPETMEIVWTRLKQLAKGWEEAYQCEVTFHAGSDYYQVDNDPAETAAFIDFLKESYPKSYVPAKSAMTGEDFGYFLSGIKGFMFWLGVDSEYSLHHAKLNPKEEAIPFAIEVLIHFLESK

SEQ ID NO: 19848 - protein, 305 aa, Zea mays
MQIFVKTLTGKTITLEVESSDTIDNVKAKIQDKEGIPPDQQRLIFAGKQLEDGRTLADYNIQKESTLHLVLRLRGGMQIFVKTLTGKTITLEVESSDTIDNVKAKIQDKEGIPPDQQRLIFAGKQLEDGRTLADYNIQKESTLHLVLRLRGGMQIFVKTLTGKTITLEVESSDTIDNVKAKIQDKEGIPPDQQRLIFAGKQLEDGRTLADYNIQKESTLHLVLRLRGGMQIFVKTLTGKTITLEVESSDTIDNVKAKIQDKEGIPPDQQRLIFAGKQLEDGRTLADYNIQKESTLHLVLRLRGGQ

SEQ ID NO: 19849 - protein, 418 aa, Cryptococcus neoformans var. neoformans B-3501A
MSPYRLIEYDVGQPLYGVGFSNSVSHPHRVALTSLVTGPTNKLYIADLSHPPDTQPSSPYYPQANNGSSGPSHPPPAYRQLTSTNINLPATKVGWEPEGSVRVDQGGRGELVATTGESLHLWEVAKGWTEGSGHVGHNGWGNERYTLKSRSILSNTKGAHGSLPPVTSFSWNNKSPNKIVTCSIDTTATLWDINTAQAMTQLIAHDRAVYDLCWLPDSSDIFVSVGADGSLRAFDLRQLEHSTILYESSRDAPLARIAFSKKEQHMLACFGLDDSKILILDMRSPGKPVAELIGHQAPLGAIAWGSGGTRGRRESTGGGWLASCGDDSQLLLYDLTAPLPTSRSSSRSNFRNSNATSPYVFSPSATPSSQRTPSPADAVEMMPAKGWTARGEINNLAFTNDGDWVGCVTGTTLKVLHV

SEQ ID NO: 19850 - protein, 154 aa, Lycopersicon esculentum
MSLIPRIFGDRRSSSMFDPFSIDVFDPFRELGFPSTNSGESSAFANTRIDWKETPEAHVFKVDLPGLKKEEVKVEVEEDRVLQISGERNVEKEDKNDKWHRMERSSGKFMRRFRLPENAKMDQVKASMENGVLTVTVPKEEVKKPEVKSIEISG

SEQ ID NO: 19851 - protein, 453 aa, Bacillus anthracis str. A2012
MKETNSFSQKLKQFVLLFFPIFVTQMSLFAMSFFDTTMSGHASPIDLAGVAIGTSIWIPVSTGLTGILMATTPIVAQLVGSKKKEDVPHVIIQAVYLAICASFVVILIGLFTVTPILNGMRLEEPVERIAAQFLSIIAIGIIPLFTYTVLRGFIDALGKTRTTMIITLLSLPINVVLNYVLIFGNFGFPKLGGVGAAIASAATYWCILIITVMIIRTKEPFASFNIFKQLYRPSLSSWKEFLKLGVPIGFAIFFETSIFAAVTLMMSNFSTTTIAAHQAAMNFASLLYMTPLSLAMAMTIAVGFEVGAKRYNNAKQYGFIGIGLALAFALLYSILLYFFDDEIASIYTTDIQVHHLAKEFLIFAILFQISDAIATPVQGALRGYKDVNVALIMTLIAYWVIGLPLGYILATYTDWAAKGYWIGLIIGLAFGATFLLIRLFQVQRKYTTQNSRS

SEQ ID NO: 19852 - protein, 344 aa, Rubrivivax gelatinosus PM1
MGAAALAAAGASALLTSCAHPKAPDADPPRMPPASFAPALRQGLSAAVGVFGVGLEYSAAELQKPEARRRVGAGRVADRIGAGFVISGAEGLIVTASHAVAGSQRIAVRLPDRRIVAATLVGEDEMADIALLRVPLVLPEPPPQGRSAALRPGDWVLAVGEPYGLNRSVVAGIVGGTDRHFAEDQELLFIQSDLALNPGNSGGPLLDGSGAIVGMNTRTVVGAEGSGGVSLSIPIEIVMQIVGELRDQGHVARPRLGAEFDDVAPFVALDARRAYASGARVGEVGLDSLAERIGLQVGDIIVGMNGRPIGHSGDLARALLAWRSVSGTTLTVFREQAYLELRLQ

SEQ ID NO: 19853 - protein, 442 aa, Xanthomonas oryzae pv. oryzae KACC10331
MWDQAPSTEGAYTVSDLDQVTLNAGDTSVVLPVLKPTLGNDCVDISKLTKETGLFTYDSGFTATASCKSAITYIDGDNGVLLYRGYPIEQLAEKSTFLEVSYLLMNGELPTADEFKKFDHEVTHHTMMHESLKNFLGGFRHDAHPMAMLAGSVASLSAFYHDTLDLNDPEQRRQAAIRLIAKVPTLAAAAYRYSIGWPIRYPRNNLNYVDRFLHMMFEVPSEPLATNPVVAKALDLLFILHADHEQNASTSTVRLVGSTGVNPYASVAAGITALWGPAHGGANEAVLKMLEEIGTADNVESAVAKAKDKNSSFRLMGFGHRVYKNFDPRAKIIREMTHKVLGELGVNDPLLEVALKLEEAALKDDYFVQRKLYPNVDFYSGIIYKALNIPVEMFTVMFAIARTAGWVSHWLEQQVDPEMKIGRPRQIYTGYDKRNYKDAEQR

SEQ ID NO: 19854 - protein, 379 aa, Listeria monocytogenes str. 1/2a F6854
MDQQKKIQILKDLVNIDSTNGHEEQVANYLQKLLAEHGIESEKVQYDVDRASLVSEIGSSNEKVLAFSGHMDVVDAGDVSKWKFPPFEATEHEGKLYGRGATDMKSGLAAMVIAMIELHEEKQKLNGKIRLLATVGEEIGELGAEQLTQKGYADDLDGLIIGEPSGHRIVYAHKGSINYTVKSTGKNAHSSMPEFGVNAIDNLILFYNEIEKYVASIHATNEILGDFIHNVTVINGGNQVNSIPEKAELQGNIRSIPEVDNETLKRRIVEIVNELNKKEHVKLELLFDYDKQPVFSDRNSSLVNVARDVAKGIIKEEIPLLGISGTTDAAEFTKAKKQFPVIIFGPGNETPHQVNENVSIGNYLEMVDVYKRIATEFLS

SEQ ID NO: 19855 - protein, 480 aa, Pseudomonas syringae pv. phaseolicola 1448A
MQLKDSTLFRQQAYINGQWLDADGGQSIKVNNPANNEILGTVPKMGAAETRRAIEAADKALPAWRALTAKERGNKLRRWFELMIENQDDLGLLMTLEQGKPLAEAKGEITYAASFIEWFAEEAKRVYGDVIPGHQPDKRLIVLKQPIGVTAAITPWNFPAAMITRKAGPALAAGCTMVLKPASQTPFSALALAELAERAGIPAGVFSVVTGSAGDIGAELTGNPIVSKLSFTGSTDIGRQLMAECAKDIKKVSLELGGNAPFIVFDDADLDKAVEGAMISKYRNNGQTCVCANRIYVQDAVYDAFAEKLKAAVGKLKIGNGLEDGVTTGPLIDDKAVAKVKEHIADAVSKGATVLTGGNSLEGSFFEPTILVNVSKDAAVAREETFGPLAPLFRFKDEAEVIAMANDTEFGLASYFYAQNMSRVFRVAEALEYGMVGINTGLISNELAPFGGIKSSGLGREGSKYGIEDYLEIKYLCLSV

SEQ ID NO: 19856 - protein, 349 aa, Oryza sativa
MSRSGAMDLASGLGGKITKDEVKSAVDEYEKYHGYYGGKEEARKSNYTDMVNKYYDLATSFYEYGWGESFHFAHRWNGESLRESIKRHEHFLALQLGVKPGMKVLDVGCGIGGPLREIAKFSLASVTGLNNNEYQITRGKELNRVAGVSGTCDFVKADFMKMPFSDNTFDAVYAIEATCHAPDPVGCYKEIYRVLKPGQCFAVYEWCITDHYEPNNATHKRIKDEIELGNGLPDIRSTQQCLQAAKDAGFEVIWDKDLAEDSPVPWYLPLDPSRFSLSSFRLTTVGRAITRTMVKALEYKALEYVGLAPQGSERVSNFLEKAAEGLVEGGKKEIFTPMYFFLVRKPISE

SEQ ID NO: 19857 - protein, 151 aa, Zea mays
MGILDHMSHVCSITETKEALKLRKKRPLQTVNIKVKMDCEGCERRVKSAVKSMRGVTSVTVNAKQSKCTVTGYVEPAKVLERVKATGKNAEMWPYVPYTLTTYPYVGGAYDKKAPAGFVRSAPQAMADPSAPEVKYMSMFSDENVNACTVM

SEQ ID NO: 19858 - protein, 595 aa, Pseudomonas putida KT2440
MCGLAGELRFTPIDQAPRPADLAAVERITHHLAPRGPDAWGFHSQGPIALGHRRLKIMDLSDGSAQPMVDNTLGLSLAFNGAIYNFPELREELQALGYSFWSDGDTEVLLKGYHAWGAALLPKLNGMFALAIWERDNQRLFLARDRLGVKPLYLSRNGERLRFASTLPALLKGGDIDPMLDPVALNHYLNFHAVVPAPRTLLANVQKLEPGTWMRIDRHGEVERQVWWQLHYGPHPDERELDLEGWTTRVLDATRDAVAIRQRAAVDVGVLLSGGVDSSLLVGLLREVGVDDLSTFSIGFEDAGGERGDEFQYSDLIAKHYGTRHHQLRIAEHEIIDQLPAAFRAMSEPMVSHDCIAFYLLSREVAKHCKGVQSGQGADELFAGYHWYPQVDGADDAYAAYREAFFDRSHAEYRDTVQAPWLLETDAAGDFVREHFARPGAPAAVDKALRLDSTVMLVDDPVKRVDNMTMAWGLEARTPFLDYRLVELSARIPARFKLPDGGKQVLKQAARRVIPHEVIDRKKGYFPVPGLKHLEGATLGWVRELLTDPSQDRGLFNPTMLDRLLSNPHGQLTPLRGSKLWQLAALNLWLSEQGI

SEQ ID NO: 19859 - protein, 356 aa, Oryza sativa
MAKYGEGDARWIVQERADGTNVHNWHWAERDCLEWSRSRLTSLLAGLPVLSGEGGLALRTTALDKLDGEAYVNIRKGKVIPGYELSLTLAWEAEATTESGVVKVSGAAEVPYLADENADEDPELRVTVRGDDGPVARRAKDAFLTKGKPLVLEKIREYVAAMAKGGPAKDELDSKKTPTKAAAVEAGGAATAPAPAAEKKEEAPAVKEKKAKAKDKEGFKTIEMTEKFYCRAKDMYEILMDENRWKGFTQSNARISREVGGQFSLFDGSISGVNEELQEGKLIVQKWRFGSWPDGVHSTVRLVFDEPESGVTVISLKQTDVPEEDRYGNSTVVENTERGWRELIFQRIRGVFGFGI

SEQ ID NO: 19860 - protein, 141 aa, Xanthomonas campestris pv. vesicatoria str. 85-10
MALERTLSIIKPDAVAKNVIGEIYSRFEKAGLKVVAAKYKQLSRREAEGFYAVHRERPFFNALVEFMISGPVMIQALEGENAVAAHRDLLGATNPKDAAPGTIRADFADSIDANAAHGSDSVENAANEVAYFFAATEVVSR

SEQ ID NO: 19861 - protein, 135 aa, Saccharomyces cerevisiae
ARTKQTARKSTGGKAPRKQLASKAARKSAPSTGGVKKPHRYKPGTVALREIRRFQKSTELLIRKLPFQRLVREIAQDFKTDLRFQSSAIGALQESVEAYLVSLFEDTNLAAIHAKRVTIQKKEIKLARRLRGERS

SEQ ID NO: 19862 - protein, 723 aa, Kineococcus radiotolerans SRS30216
MSGAAITLLPMDGTRSAFAGDLLTGGAAVAGLPRVVQGQPGAVLLVHVAEGTVLFANPLAEQLAPRTALPCSVDDWSRAAGLESTAGDDITDPANAASPLSRIARGEPVHGERVTAARSSDMSEEREALWVIGLPMNDAPVDELSSLALVVLLPLREEGMVREAQESAERLHSRAVLASDLSFTISDPTKPDNPLVWTNPAFERVTGYGREVLGQNCRFLQGPGTDREAVARIRRALETGDTVTELLLNYRKDGTAFWNEVVISPVHDADGRLTHFVGVQSDVTLRVQAERERDAALLDARDARHRLEFLSSVTDRLSEVLDPDTAQDLLPSLVVPDFAEWAFATLLDGNGRARHVRASHANPALATDVERFQDLHTALGEESISLQVLRGRLGPTLVTVRDRHLETGVTTAEAATLLRRLGLGSAIVVPLRARGEVRGSLTLLSGPDRPPFTEDDLATATDLGARAGVALENARLYAQQRQSSETLQRSLLSPPTRSAGLSIATRYHPAAEAAQVGGDWYDAFTQPDGCTVVVIGDVMGHDVSAAAAMGQLRTLVRGLAYDRSAQPDEVLRRLDRLLAGLGLTTLATAIVLQLDALAPDGTGDGSRGIRWCTAGHLPPVVAEPDGSVRLLPGEGIVLGLGAGQDRVQQEARLALGSTLLLYTDGLVERRDQSMEVRLAELREAVADLGNQPVEALCDGLVERMLPKGSDDDVAIVAVRVVEV

SEQ ID NO: 19863 - protein, 324 aa, Lactobacillus plantarum WCFS1
MTKVFIAGQLPAQANTLLLQSQLVIDTYTGDNLISHAELIRRVADADFLIIPLSTQVDQDVLDHAPHLKLIANFGAGTNNIDIAAAAKRQIPVTNTPNVSAVATAESTVGLIISLAHRIVEGDHLMRTSGFNGWAPLFFLGHNLQGKTLGILGLGQIGQAVAKRLHAFDMPILYSQHHRLPISRETQLGATFVSQDELLQRADIVTLHLPLTTQTTHLIDNAAFSKMKSTALLINAARGPIVDEQALVTALQQHQIAGAALDVYEHEPQVTPGLATMNNVILTPHLGNATVEARDGMATIVAENVIAMAQHQPIKYVVNDVTPA

SEQ ID NO: 19864 - protein, 130 aa, Saccharomyces cerevisiae
SSAAEKKPASKAPAEKKPAAKKTSTSVDGKKRSKVRKETYSSYIYKVLKQTHPDTGISQKSMSILNSFVNDIFERIATEASKLAAYNKKSTISAREIQTAVRLILPGELAKHAVSEGTRAVTKYSSSTQA

SEQ ID NO: 19865 - protein, 127 aa, Vibrio sp. Ex25
MAYSEKVIDHYENPRNVGSFDKEDPSVGSGMVGAPACGDVMKLQIKVTPEGIIEDAKFKTYGCGSAIASSSLVTEWVKGKSVDEAAAIKNSEIAEELELPPVKVHCSILAEDAIKAAVADYKKKHQE

SEQ ID NO: 19866 - protein, 103 aa, SYNECHOCOCCUS SP. WH 8102
MAAVSLSVSTVKPLGDRVFIKVSESEEKTAGGILLPDTAKEKPQVGEVVQVGPGKRNDDGSRQAPEVGVGDKVLYSKYAGTDIKLGGDEFVLLTEKDILAIVN

SEQ ID NO: 19867 - protein, 383 aa, Photorhabdus luminescens subsp. laumondii TTO1
MDWSSYLSRQLSERRSTSLWRQRQVNQKSDGRFLYAADGKYLNFSSNDYLGLSANPAIISAWQRGAEQYGVGSGGSGHITGYTKAHQLLEQQLADWLGYPKALLFISGYSANQGVIAALMTEQDRIIADRLSHASLMEAAMHSPAQLRRFLHNQPESLANLLATPCVGKTLVVTEGVFSMDGDCAPLADIHQQTRISGNWLMVDDAHGIGVCGEQGRGSCWQQKVKPEILIVTFGKAFGLSGAAVLCDEQTAEYLIQYARHLIYSTSMPPAQAQALSEAVRQIQSGDELRQRLQQNINYFRRQAQKLPFNLTDSTTAIQPLIVSDNELSVSLSQSLQQKGIWVKAIRPPTVPPGSARLRITLTASHMPQDIDMLMEALHGFRS

SEQ ID NO: 19868 - protein, 544 aa, SYNECHOCOCCUS SP. WH 8102
MAKRIIYNENARRALEKGIDILAESVAVTLGPKGRNVVLEKKFGAPQIINDGVTIAKEIELEDHIENTGVALIRQAASKTNDAAGDGTTTATVLAHAMVKAGLRNVAAGANAITLKKGIDKASDFLVSKIKEQAKPIADSNAIAQVGTISAGNDEEVGKMIADAMDKVGKEGVISLEEGKSMETELEVTEGMRFDKGYISPYFATDTERMEAVLDEPYILLTDKKIGLVQDLVPVLEQIARTGKPLMIIAEDIEKEALATLVVNRLRGVLNVAAVKAPGFGDRRKAMLEDMAVLTNGQLITEDAGLKLENAKLEMLGTARRVTINKDTTTIVAEGNEAAVGARCEQIKKQMDETDSTYDKEKLQERLAKLAGGVAVVKVGAATETEMKDKKLRLEDAINATKAAVEEGIVPGGGTTLAHLAPSLEEWANGNLSGEELIGANIVAAALTAPLMRIAENAGANGAVVAENVKSRAISEGYNAATGDYVDMLAAGIVDPAKVTRSGLQNAASIAGMVLTTECIVADLPEKKDAAPAGGGMGGGDFDY

SEQ ID NO: 19869 - protein, 394 aa, Staphylococcus aureus subsp. aureus Mu50
MNSIIELTDYYSSNNYAPLKLVISKGKGVKVWDTDGKQYIDCISGFSVANQGHCHPTIVKAMTEQASKLSIISRVLYSDNLGKWEEKICHLAKKDKVLSLNSGTEAVEAAIKIARKWGSEVKGITDGQVEIIAMNNNFHGRTLGSLSLSNHDAYKAGFHPLLQGTTTVDFGDIEQLTQAISPNTAAIILEPIQGEGGVNIPPKGYIQAVRQLCDKHQILMIADEIQVGLGRTGKWFAMEWEQVVPDIYILGKALGGGLYPVSAVLANNDVMRVLTPGTHGSTFGGNPLAIAISTAALDVLKDEQLVERSERLGSFLLKALLQLKHPSIKEIRGRGLFIGIELNTDAAPFVDQLIQRGILCKDTHRTIIRLSPPLVIDKEEIHQIVAAFQDVFKN

SEQ ID NO: 19870 - protein, 154 aa, Lycopersicon esculentum
MSLIPRIFGDRRSSSMFDPFSIDVFDPFRELGFPSTNSGESSAFANTRIDWKETPEAHVFKVDLPGLKKEEVKEEVEEDRVLQISGERNVEKEDKNDKWHRMERSSGKFMRRFRLPENAKMDQVKASMENGVLTVTVPKEEVKKPEVKPIEISG

SEQ ID NO: 19871 - protein, 143 aa, Brassica napus
RRNSGSTTRPERTSAIHVKRIAEDPEDQVSESVLVLESPNGRKMINRAVWGPLNQTIVSGGEDAVLRIWDAETGKLLKESDSEVGHKNTITSLTKSADDSHFITGSLDKTAKLWDMRTLTHLKTYVSRVPVNTVSMSPLLDHV

SEQ ID NO: 19872 - protein, 546 aa, Staphylococcus aureus subsp. aureus Mu50
MKQRIGAYLIDAFHRAGVDKIFGVPGDFNLAFLDDIISNPNVDWVGNTNELNASYAADGYARLNGLAALVTTFGVGELSAVNGIAGSYAERIPVIAITGAPTRAVEQAGKYVHHSLGEGTFDDYRKMFAHITVAQGYITPENATTEIPRLINTAIAERRPVHLHLPIDVAISEIEIPTPFEVTATKDTDASTYIELLATKLHQAKQPIIITGHEINSFHLHQELEDFVNQTQIPVAQLSLGKGAFNEENPYYMGIYDGKIAEDKIRDYVDNSDLILNIGAKLTDSATAGFSYQFNIDDVVMLNHHNIKIDDVTNDEISLPSLLKQLSNISYTNSATFPAYHRPTSPDYTVGTEPLTQQTYFKMMQNFLKPNDVIIADQGTSFFGAYDLALYKNNTFIGQPLWGSIGYTLPATLGSQLADKDRRNLLLIGDGSLQLTVQAISTMIRQHIKPVLFVINNDGYTVERLIHGMYEPYNEIHMWDYKALPAVFGGKNVEIHDVESSKDLQDTFNAINGHPDVMHFVEVKMSVEDAPKKLIDIAKAFSQQNK

SEQ ID NO: 19873 - protein, 154 aa, Lycopersicon esculentum
MSLIPRIFGDRRSSSMFDPFSIDVFDPFRELGFPGTNSGESSAFANTRIDWKETPEAHVFKADLPGLKKEEVKVEVEEDRVLQISGERNVEKEDKNDKWHRVERSSGKFMRRFRLPENAKMDQVKASMENGVLTVTVPKEEVKKPEVKSIEISG

SEQ ID NO: 19874 - protein, 159 aa, Arabidopsis thaliana
MAEQTEKAFLKQPKVFLSSKKSGKGKRPGKGGNRFWKNIGLGFKTPREAIEGTYIDQKCPFTGTVSIRGRILSGTCHSAKMQRTIIVRRDYLHFVKKYRRYEKRHSNIPAHVSPCFRVKEGDRVTIGQCRPLSKTVRFNVLKVIPAGSSSIGKKAFTGM

SEQ ID NO: 19875 - protein, 387 aa, Cryptococcus neoformans var. neoformans JEC21
MDGVPGITQCSIPPGGSFTYNFTVSHQSGTFWWHSHYSNSMADGIWGPLIVHSANESLQRGRDYDEDRIVFITDWMHDNSEVIVAALISPEGYRGSTVPPQGDAILINGRGQTNCTATGSSSCFYPPPPEIQVPVDRRVRLRMISASSHAMYRVSIDNHSMEIVETDGTAVYGPTIHEMSISSGERYSAIINTTEGKEGDAFWLRTSVALACMSQGSTQVGLAVLRYTGNGNITTAEPRTEAWTDLARHDTPCVGLDEMYALSPREPLNASKTALQSRVLNSKLGTFVDVYGTSFEGYGGSWLVLRIITDNPGVWACHCHIGWHLAKGKVGCNVTSPTDLFANCFVQMAVVVVQPKAIEDIQWSESWTNLCANTDPNAFGPARRSFP

SEQ ID NO: 19876 - protein, 336 aa, Bacillus anthracis str. A2012
MAKVYYEKDVTVNVLKEKKVAIIGYGSQGHAHAQNLRDNGFDVVVGLRKGKSWDKAKEDGFSVYTVAEAAKQADVVMILLPDELQPEVYEEEIAPNLQAGNSLVFAHGFNVHFDQVKPPVNVDVFLVAPKGPGHLVRRTFSEGGAVPALFAVYQDATGVATEKALSYADGIGATRAGVLETTFKEETETDLFGEQAVLCGGVTALVKAGFETLVDAGYQPELAYFECLHELKLIVDLMYEGGLENMRYSVSDTAQWGDFVSGPRVVTEDTKKAMGTVLAEIQDGTFARGWIAEHKAGKPNFYATNEKENEHEIEVVGRKLRGMMPFVQPRVKAGVK

SEQ ID NO: 19877 - protein, 153 aa, Mesorhizobium loti MAFF303099
MRDNTDNVYLFSDKLYFINPHNVGVLDIPNAAGEVGAVACGDGLKLMMGFDPKTETITAATFQTFGRGSAITASSTITQFIVGKTIDEALQITDQEMADFLGALPPHTIYSSLDRLILERGLRLMSEFFHAVRQAFEETPGFSRLVLVKASSP

SEQ ID NO: 19878 - protein, 499 aa, Ashbya gossypii ATCC 10895
MIAQIAALGAVLATNVACASLVEREEAAQFVRMDFDKKRGPSFSEAWSGRAAVPRLAKRNDWVDIEIDNQQMFYSVNLSIGTPPQEVRVLMDTGSSDLWVVGAGVRCGPNNYPNPNQLNCYEHGSFDTSRSSTWKDNNTQFHIRYGDSTYAHGTWGTDRLDLGQANVDGLTFAVAHASNSSVAVLGIGLPAMETTMSSQQFGYQYDNLPMVLKRNNVIKKTVYSMFINELNAKTGSVLFGAVDHSKYKGTLNTVPLVNANYRRRVNKPVELHVTLAAIGLHTGRDEDKVQTLLGSKVPALLDSGTTLTYFPMQLADRLARAAGARWHSEEVGYIVDCNSRRLHQTAYIYDFGGFQIRSPLSDYSMMTNVRGTCRFGIMPHSSDYVILGDVFLTRAYVVFDLEALEVSMAQANYEGGKEQIEVIAGAVPRAVRAPGYNDPWKAYTPLVFNGELGNLTATASDSSSGSVGSRSNSALTLTPPSLSETLFAASLLGAATRII

SEQ ID NO: 19879 - protein, 373 aa, Dehalococcoides sp. CBDB1
MNENCYKRVVIKLGTSLLTGGTGKLDHERMADLCRQIAELTRLGTEIVIVSSGAIAAGRSKMGIRHIPKDVPFKQVLAAIGQSQLMNYYDQLFSPHGLTVAQGLLTKSDLSDRSGYLNARNTLLALMELGIITIVNENDVVAIDEIQQAKFGDNDNLSAMVANLIEADLLLILTNIRGLYTSDPTLHPEATLITEVKEITEELEQLAAGSSNKLGTGGMVTKLEAARLATSSGVTAIIADGHIPDIILKLANGENEGTRFIPSLHKPDSRQRWMMSGLCTRGSICVDDGAAKALRENQKSLLAAGVQQAEGKFGRGDIVKLTDSHGKRLGYGITNYSSDDISKIKGLHSQELNAVLGGNQGPEVIHRNNLVVI

SEQ ID NO: 19880 - protein, 621 aa, Bordetella parapertussis 12822
MTRASMHPRAEGPPRGDWPALTLPQMLREQARRQPARIALRQKDYGIWQPIDWATYWRRACQVALGLRAAGLEPGGKVAIIAENRLEWLLAQMGAGVLGAVPVGVYCTSPAAEVGYVLEHAEVDMVVCEDQEQTDKVLEVAARLPGLRRIVVMETKGLRNHAEAERARMISFAELEARGAQCGAAEQARLEQALDAQTLDDVGLMIYTSGSTGKPKGAMISYRNMRGVAPGIADRLDMDAGSVHLSYLPLCHVAEQMLSTFVPVYLGSQVNFGESIRTVQEDLREVAPTVFLGVPRIWEKLHAAISIKMQESGRLRRWLYARALRGCAPFLELSRARYGWRERLVYGWHYALILRALHNFVGLRRVKVAMTGAAPIPPEVLRYFRTLGIPLIEVYGLTESTGMIFGQHPDRVRVGTVGEPTLGVQARVGEQGELLVRGEMVFHGYYRNPQASADTVRDGWLHTGDVVALEDGQYRIVDRLKDIMITAGGKNLTPSEIENAVKGSPYVKECIAIGDQRRYVAALIQIEYDTVAKWAELNGIAYTHFRSLAEHPRVRQLVHGEVERANAALAQVARVKRFHLLVKELDHDDGEVTATMKVRRASIAQAYRSEIEALYRQEEAA

SEQ ID NO: 19881 - protein, 487 aa, Streptomyces avermitilis MA-4680
MTQAPQKAPYTTNNVGIPVESDEHSLTVGPDGPILLQDHYLIEKMAQFNRERVPERVVHAKGSGAYGFFEVTNDVSQFTKADLFQPGKRTEMLARFSTVAGEQGSPDTWRDPRGFALKFYTEHGNYDMVGNNTPVFFVRDTIKFQDFIRSQKRHPVTGLRSNDMQWDFWTLSPESAHQVTWLMGDRGIPKTYRHMNGYSSHTYMWINGAGERFWVKYHFKTDQGIDFLTQAEADELAGSDADKHRRDLFESIESGNAPTWTLKVQIMPFEDAADYRFNPFDLTKVWPHGDYPLIDVGRMVLNKNPEDYFIHIEQAAFEPSNLVPGIGPSPDKMLLGRLFSYPDTHRYRIGPNYAQLPPNRPHAPVNSYAKDGPMRYVPSNAARPYAPNSYGGPAADYGQFGDPASWETAGELVREATKPHREDDDWGQPGTMVRQVLDDAARDRLVSNVSGHLKADVSRPVLDRAVQYWRNIDKEIGDRIASNVNGG

SEQ ID NO: 19882 - protein, 394 aa, Dehalococcoides sp. CBDB1
MTTAQKWIGVLLSLVLIGVSAFNTILLLDQKDQLQTAQGQISSLQSQLSQAGTDINTLKSQLTAVNGHLATLDGQIGELLKLSTAQVDAIASVMASVVYIEVDYYDRSTGERGTVSGSGTIMDSRGYILTNRHVVENATNVTVILPNKQVYTAEDFWIDDFMDVAVVKIKANGLQAASFGDPSTLKMGDTVVALGYPLSISPTDGGMTVTAGIVSNLENWFFIDETPYFDVIQTDAAINPGNSGGPMINLTGEIIGINSAGILDAQNMGFAINVATAEQIYESLVADGSVSHPYLGIDVDDYYDDIPGFSGATESNGVEVLDVEHGSPADLAGLRDGDVIYQFDGKAVTSFSDLLRILWRMESGETVVLQIKRGGVERTITIFLEDRPSSSYFF

SEQ ID NO: 19883 - protein, 280 aa, Dehalococcoides sp. CBDB1
MEGVKSRWISIAVIALLVVVTGFNTAMLFQKSDQLSQAETKIDSLTQSLASLSGLGGDIAGLQQDLSTVQSQLQQVNTDLTCHACAVSDVVSLIEPAIVRVDVSGRNFSASGSGTIVDNRGYILTNYHVIEGATTIRVTLMSGAIYSASVVGSDTGRDVALLLMSATSGQEFPTVTLSTMADIKVGMDVVAAGFPLGTDLAGPATFTKGIVSAMRTYEGYLYVQTDAAVNPGNSGGCMVNMDGLMIGIPSAGIVPYGEDIEDINLVIPVSDIISFLALYI

SEQ ID NO: 19884 - protein, 239 aa, Burkholderia sp. 383
MAPALADGSERSRCRPPRIRIRRIPVRDIIDGFLRFQREVYPQRVELFKQLATTQNPKALFVTCSDSRVVPELLTQREPGELFVIRNAGNIVPSYGPEPGGVSATVEYAVAVLGVRDIVICGHSDCGAMGAISRCTCLDHMPAVANWLRHSDAAKAINAAHQFDSPRAKLDGLVRENVIAQLANLRTHPSVALALEQGRMNLHGWVYDIEMGRIDALDGATRHFVPLSESPATVAVKSY

SEQ ID NO: 19885 - protein, 424 aa, Dehalococcoides sp. CBDB1
MEKALLEIEEKARLARAASRPLSYASSAQKDAALKNIARCLLDNEPAILEANLKDQNEAKASGMLPAMLDRLIIDQSRLEGIAKDTFAIAALPDPVGEIFDMNTMPNGLIIGKKRVPLGVIAAIYESRPNVTVDIASLCLKAGNAVILRGGKETIHSNTILAKLIRQAVEQAGLPKEAVQFIENTDRNLVNHLLKLSDQIDLVIPRGGAGLISYVKQNSFIPVVAGGIGVVHVYVDADAKVTDAVNIAYNSKVQRPTVCNAMDTLLVHKDIAPVFLPAVAAEWSKAGVEIRADEAALKILENTFGCKLIPATPDDWGKEFLALIAAVKVVDSLDEALSHIARYGSGHTESIVTQNYTSSQRFLNEVDAAAVMVNASTRFTDGSQFGLGAELGISTQKMHARGPMGLKEITSYKWIVYGSGQIRG

SEQ ID NO: 19886 - protein, 272 aa, Arabidopsis thaliana
MQGVWSQLWRKYADYKYNKFERFAVWEMIEPYRRPKTFTTLITIYVAAFYTGVIGAAVTEQLYKEKFWEEHPGKTVPLMKPVFYRGPWRVYRENASSSLSLLGRAKELISLGLSSQRPWLELVQCSAFSLPISFSVATERIKSNIMIFRTNYIVIFIVSIFISMLWQPVHLSVFVILIVAWLYVYSRDNEPWVIFGSVIDDSTLVLVLLVLTIGIFLLTDVSRGIVIGVLAGLPVVLVHGMCRRNTEMLFVLEDDEEKVAMNTSSSSLSSSS

SEQ ID NO: 19887 - protein, 445 aa, Nocardioides sp. JS614
MTELPRKAVARTARLAALPLGYAGRSAVGLGKRLGGAPAETVMTEIQQRTAEQLFRTLGELKGGAMKVGQMLSIMESALPESLAGPYREHLTRLQDDAPPMPTQTVRDILARDLGPDWREQLVWLDGGPTAAASIGQVHRGRWHDGREVAVKVQYPGAADALRSDLRQLARVARTAAPLVPGLDLKPLVAELQARAEDELDYQLEAEAQATFAAAFRDDPDIVVPDVVAVGETVLVTEWLESPASLASIIAGGTQEERDHYGELLVRFLFSGPARTGMLHADPHPGNYRILPGPGGEPGRLGVLDFGAVARLPERGLPEAMGRLLRVAAVEDPEELLEGLRREGFVKDRVRVDPQQLLDYLAPFVEPTKVERFRFSRSWMRSQFARINDPRDPAYTVGMKINLPPSYLLIHRTWLAGIGVLSQLECEAPFRQILTESLPGFADPS

SEQ ID NO: 19888 - protein, 492 aa, Kineococcus radiotolerans SRS30216
MDEDTGAAAPAGEPRDRGLEGLLAALPLGVLVVGAQGRVHAQNDAARAAFGLSGPAAFADVFPRSSPDAPPFAVRRADEAAPEPVEVVGRDADGTTFPVEVTVSPGPRPGTSLVLTRDLRGAARAEAELRRQRGLTELLLESTTDGFLGTDREGQVLFANTAVRRLLRQRASDLVGRPLAQVGRRPADATLPDGPALSDVLDGSGEGAGGGRAVLWDRYGTPLSVQVAVSPLITGEEVVGSVLTVRDATEQERVEELKRQFTAVVSHELRTPLTAIKASLRLVTSGVLGPLPEEPARLLRIADENADRLAALVNDILDVERLDAGTMPLEPEDVDLADLARAGVEQLESTAVAAGVELVLGEVGPARVHADPHRIAQALTNLVGNAVKFSEAGGRVEVTCRRTAREARLAVRDEGRGIPHDQLEAVFDRFRQVYASDAQRQSGSGLGLAITKGIVERSGGRVELRSRPNEGSEFTVVLPLTDAEEDAPPPEP

SEQ ID NO: 19889 - protein, 411 aa, Zea mays
MNALAATSRNFKQAAKLLGLDSKLEKSLLIPFREIKVECTIPKDDGTLASYVGFRVQHDNARGPMKGGIRYHHEVDPDEVNALAQLMTWKTAVANIPYGGAKGGIGCSPGDLSISELERLTRVFTQKIHDLIGIHTDVPAPDMGTNSQTMAWILDEYSKFHGYSPAVVTGKPVDLGGSLGRDAATGRGVLFATEALLAEHGKGIAGQRFVIQGFGNVGSWAAQLISEAGGKVIAISDVTGAVKNVDGLDIAQLVKHSAENKGIKGFKGGDAIAPDSLLTEECDVLIPAALGGVINKDNANDIKAKYIIEAANHPTDPEADEILSKKGVLILPDILANSGGVTVSYFEWVQNIQGFMWDEEKVNAELRTYITRAFGNVKQMCRSHSCDLRMGAFTLGVNRVARATVLRGWEA

SEQ ID NO: 19890 - protein, 153 aa, Oryza sativa (japonica cultivar-group)
MAPKAEKKPAAKKPAEEEPAAEKAEKAPAGKKPKAEKRLPAGKGEKGSGEGKKAGRKKGKKSVETYKIYIFKVLKQVHPDIGISSKAMSIMNSFINDIFEKLAGESAKLARYNKKPTITSREIQTSVRLVLPGELAKHAVSEGTKAVTKFTSA

SEQ ID NO: 19891 - protein, 485 aa, Nostoc punctiforme PCC 73102
MNKAGNHLQQRYLEAFTTRYNERTKKSKQLAQTYRPIITSNMGPVGFSLSCKEMCYPITAKRSLGSRIWDVDGNEYIDFMMGLGVNLFGHNPPFIQAALKEQLEKGIQIGPQSELTGEVGELICELTGMERVAFSNTGTEAVMAAIRLARTATGRNKIVLFSGSYHGHFDGTLVEVETIDGIPHTVPITSGIPQNIVEDYLVLDYGNPQSLDAIRANKHELAAVLVEPVQSRRPDLQPKDFLLQLRQLTKELGIALIFDEVITGFRVHPGGAQAWFGVEADIATYGKIVGGGMPIGIIAGKATYMDRIDGGMWNYGDASQPQVETTYFAGTFRRHPLAMAAALAVLKHLKMQGSQLQQQLNQRMSQLVETLNAYFEEEEVPLRLRNFSSWFSPAFLENFSLLEYATPSELRELLYYHLLDKGVMLGGPGGYLSTAHTDEDINYIIQAFKDSVRELRKGGFLPPIAPQNLVKEFSLETREQIADVR

SEQ ID NO: 19892 - protein, 185 aa, Shigella boydii
RPGKINLGIGVYKDETGKTPVLTSVKKAEQYLLENETTKNYLGIDGIPEFGRCTQELLFGKGSALINDKRARTAQTPGGTGALRVAADFLAKNTSVKRVWVSNPSWPNHKSVFNAAGLEVREYAYYDAENHTLDFDALINSLNEAQAGDVVLFHGCCHNPTGIDPTLEQWQTLAQLSVEKGWLPL

SEQ ID NO: 19893 - protein, 357 aa, Oryza sativa (japonica cultivar-group)
MAPQVQGGGGYSQPQSQRRSSDDGYNWRKYGQKQVKGSENPRSYYKCTFPNCPTKKKVERSLDGQITEIVYKGTHNHAKPQNTRRNSGSSAAQVLQSGGDMSEHSFGGMSGTAATPENSSASFGDDEIRVGSPRAGNGGGDEFDDDEPDSKRWRKDGDGEGISMAGNRTVREPRVVVQTMSDIDILDDGYRWRKYGQKVVKGNPNPRSYYKCTTAGCPVRKHVERASHDLRAVITTYEGKHNHDVPAARGSAALYRPAPPAAAATSSHPYLPNQPPPMSYQPTGPQPYALRPDGFGGQGPFGGVVGGSSFGGFSGFDDARGSYMSQHQQQQRQNDAMHASRAKEEPGDDMFFQNSLY

SEQ ID NO: 19894 - protein, 577 aa, Oryza sativa (japonica cultivar-group)
MGGCSSAFAVSTRMIRFSRGRVPAAILPVTSNDEPCCSCSPENNNKNNDGGGGGCDGGEHQKGKSWRRWQYRRCGGGGGGGGGRKNAILGDAADVKTAAGFAERYRLGAELGRGEFGVTRRCSDAATGEALACKTIRRKRLRRCRGDAEDVRREVEILRRISALGAGADSVVRLRDACEDSDGVHLVMELCEGGELFDRIFARGHYTERAAAKLARTIVGVVQLCHENGVMHRDLKPENFLFANKSEDSPLKAIDFGLSVFFKPGERFTQVVGSTYYMAPEVLNRSYGPEADVWSAGVILYILLCGVPPFWGDNDEKTVTAILQGGINFQREPWPKVSPHAKDLVSKMLDPDPSTRLTAKEVLEHPWLKNADRAPNVSLGEIVRSRLMQFSAMNKFKKKALGVVAKNLPVEEMDKYTQMFHKMDKDNSGNLTLEDLKLGLQINGHPVPETEIEMLLEAGDIDGNGTLDCEEFVTVLLHIKKMSNEEYLPKAFKFFDKDGNGFIEMEELMDALGDELGPTEQVVKDIIRDIDTDKDGRISYQEFESMMISGSDWRNASRRYSKANFSSLSRKLCKGNS

SEQ ID NO: 19895 - protein, 433 aa, Arabidopsis thaliana
MRRRRCDLQPKRTRMCDLQPKRTSMCDLPPKLVGEKILTRIPITSLRAVRSTCKLWNALTKDRVLGKAAAQFLGFMTMDSKVCSVRFHLRRSKEEEEDTMDLSIKQVDLLNQVEISRVYHCDGLLLCVAKDNSRVVVWNPYLGQTRWIRPRTESNIGDSYALGYDINRNHKILRMVQTRNVSVYRYEIYDLRSNSWRVLEVTPNGEMDPNHPLYGVSVKGNTYFFAHEDSSSGEIDEDGDIIDLEDFLLCFDFTTETFGLRLPLPFHSTIDATVTLSCVRDQQLAVLYHNEGLHSDDRFTTVEFWVTTSIEPNSVSWSKFLTVDMRPLALTGVRFDNDMGATFFIDEDEKVAVVFDLDGYLSTESARYHTTFISGKDGFFKPVTLGVAPNVGEPCPRTGHIPTTYRPPLVCSSTYLPSLVQVNQQRKRKERHV

SEQ ID NO: 19896 - protein, 402 aa, Arabidopsis thaliana
  misc_feature (119)..(119): Xaa can be any naturally occurring amino acid
  unsure (1)..(402): unsure at all Xaa locations
MDYMYGPGRHHLFVPGPVNIPEPVIRAMNRNNEDYRSPAIPALTKTLLEDVKKIFKTTSGTPFLFPTTGTGAWESALTNTLSPGDRIVSFLIGQFSLLWIDQQKRLNFNVDVVESDWGXQGANLQVLASKLSQDENHTIKAICIVHNETATGVTNDISAVRTLLDHYKHPALLLVDGVSSICALDFRMDEWGVDVALTGSQKALSLPTGLGIVCASPKALEATKTSKSLKVFFDWNDYLKFYKLGTYWPYTPSIQLLYGLRAALDLIFEEGLENIIARHARLGKATRLAVEAWGLKNCTQKEEWISNTVTAVMVPPHIDGSEIVRRAWQRYNLSLGLGLNKVAGKVFRIGHLGNVNELQLLGCLAGVEMILKDVGYPVVMGSGVAAASTYLQHHIPLIPSRI

SEQ ID NO: 19897 - protein, 349 aa, Gracilaria tenuistipitata var. liui
MSTSQNLSQTPVKETLLTPRFYTTDFDEMSKLDISSNIDEFEALLQEFRADYNRQHFIRDQEFEQSWNNLDSGTKALFVEFLERSCTAEFSGFLLYKELSRKLDKSNPVIAECFLLMSRDEARHAGFLNKAMSDFNLSLDLGFLTKSRKYTFFAPKFIFYATYLSEKIGYWRYITIYRHLEKHPEHRIYPIFKFFENWCQDENRHGDFFAALLKSQPQLLNNLEARLWCRFFLLSVFATMYLNDFQRSNFYKSIGLDARQYDMQVIRKTNESASRIFPVALNVDQPKFFQYLDQCAVENKKLIEIDQKYNNWFIKKLIKMPIYIKLCSCLIKLYLLPAIPSAHVVSTIR

SEQ ID NO: 19898 - protein, 190 aa, Shigella boydii
RPGKINLGIGVYKDETGKTPVLTSVKKAEQYLLENETTKNYLGIDGIPEFGRCTQELLFGKGSALINDKRARTAQTPGGTGALRVAADFLAKNTSVKRVWVSNPSWPNHKSVFNAAGLEVREYAYYDAENHTLDFDALINSLNEAQAGDVVLFHGCCHNPTGIDPTLEQWQTLAQLSVEKGWLPLLDFAY

SEQ ID NO: 19899 - protein, 185 aa, Shigella boydii
INLGIGVYKDETGKTPVLTSVKKAEQYLLENETTKNYLGIDGIPEFGRCTQELLFGKGSALINDKRARTAQTPGGTGALRVAADFLAKNTSVKRVWVSNPSWPNHKSVFNSAGLEVREYAYYDAENHTLDFDALINSLNEAQAGDVVLFHGCCHNPTGIDPTLEQWQTLAQLSVEKGWLPLFDFA

SEQ ID NO: 19900 - protein, 253 aa, Glycine max
IIHITNSSIHYLSDLSMDSDFWTSRLAAAKRQYTLQHHHPNSHLDRLGIDDFDMEEEVRPDFPCPYCYEDFDIASLCSHLEDEHSCESRVTICPICSDKVARNMLSHITLQHGHLLKLQRRRRLRRVAIPNSQTLSLLGRDLREAHLQVLLGGGGGGGYRSNSVAAAVSNAAATDPFLSSFILNFPACEAEEISKSVVTSAENSSAKNATPEHIWKSSFGPSLSTEEREKRMRQAAGRSGFVQELFLSTLLGE

SEQ ID NO: 19901 - protein, 201 aa, Shewanella sp. ANA-3
MKLLKPLFDNNRRWAGRIRQEHPDFFEQLAKQQNPEYLWIGCSDSRVPSNQIIDLMPGEVFVHRNIANMVIHTDLNCLSVLQYAIDVLKVKHIMVVGHYGCGGVRAAMGSQRLGLIDNWLGHLRDIYRIYHDELMQMDEAKRFDRLCELNVIEQVANVTSTTIVQEAWARGQELAIHGWIYGIDNGLLTDLDVTVDRAQKI

SEQ ID NO: 19902 - protein, 666 aa, Xanthomonas oryzae pv. oryzae KACC10331
MTQPTRRQLANAIRFLAADAVEAAKSGHPGMPMGMADIAEVLWNDFFRHNPNNPQWFNRDRFVLSNGHGSMLQYALLHLSGYDLPIEQLKQFRQLHSKTPGHPERSETPGVETTTGPLGQGFANAVGFALAEKLLAQRYNRPELEIVDHRTWVFMGDGCLMEGISHEAASLAGTWGLGKLVAFWDNNQISIDGNTAGWFSDDTPARFQAYGWHVIRDVDGHDADKIKAAIETALENTDKPTLICCRTKIGFGAPTKAGKESSHGAPLGKDELEGARKALEWPYGPFEIPEEIYAGWRAGGTGTLRQAEWEQLFDKYSKQYASEADELTRRSHGELPADFIAKADAYIAKAQEEGQTIASRKASQLAIEAFAPLLPELIGGSADLAHSNLTLWKASKSVATDDPDANYVYYGVREFGMTAIANGLALHGGFIPFDATFLVFSDYARNGVRMSALNPSHAIHVYTHDSIGLGEDGPTHQPVEHLASLRYIPNNDVWRPGDAVESAVSWKAAITRKGGPTCLIFSRQNLQHQPRSAEQIKLIERGGYVLADAEGGTPDVILIATGSEVGLAVEAKKTLDTAGLKTRVVSMPSTDVFDRQDAAYRESVLPNAVRKRVAVEAGVTGFWRKYVGLDGDVVGIDTFGASAPADQLYAYFKITAEHVVAAAKAL

SEQ ID NO: 19903 - protein, 507 aa, Ashbya gossypii ATCC 10895
MTRLVWFCMQVAYCLHGWDWDIMDRGRSSNSYDSLWGGKARDNPIVSQLPLQYRIRSALTQEQQTAYQVMYRIQEITIKLRTNDLNPPTSRYRSLSPPPVYDSQGKRTNTREHRYRKKLEEERHRLVEIALKMIPHFIAPDDYRRPSKFQDKYYIPINDYPEINFVGLLLGPRGNTLKQLQQQSGCKIVIRGRGSVKEGKAATDLPKGAMNMNEPLHCVISADTEEKIPLGINAGESIIIKAITFPEGQNDFKRGQLRELAVLNGTLREDNRPCPLCGEQGHKKWECSSNPSLSMTVICQRCNQPGHAARDCTSPLNEFGKRTSDGPEFRETKKLQQDAPPPSGPVGSHPSAPGSGSANSGVAPASLHPPGTMAPPGALPPPGSLAAPGTLPPPAALPAPAAPGTLPPPVALPAPATLPQAGVPPAPDASPAVKTAVPIEGPPAPPQTAPPLRQTAATASSAGSSQSAQEEPENARNGVEKAAPGPPAAVLPPPPPPPPPPPPPPSS

SEQ ID NO: 19904 - protein, 549 aa, Zea mays
MAPTAATAGASDEGASALLGLLQRVQSEALRTLGPHDFDPKFYVDLPLATDERAAAAALAALPRPSPSRAELDDFLSRYFGDPGSDLVADVPPDFEPEPRGFLPHVHSPEARAWALEVHALWKRLARRVAPDVAARPDRHTLMPLPGRAVVPGSRFREVYYWDSYWVIRGLLVSKMYDTAKTIVLNLVYLLEKYGFVPNGARSYYTNRSQPPLLSSMVLEIYRATGDVEFVRTVFHSLLKEHSFWMSVAVQSFTIKGPTNIVFFFKDEELASKLNSMAAKEKLYCEIASTAESGWDFSSRWMRNSTDMTTLATTYIIPVDLNTFLFKMELDIGALAKVVGDNATSEFFFNASKARHIAIDSILWNSEMEQWLDYWLPGDADCQEVHEWKPNSQNRNIFASNFVPLWLNAYHSEFVRFADEAKSNRVMASLKASGLLHAAGIATSLTNTSQQWDFPNGWAPLQHLIAEGLLHSGSEAKKLAEDIATRWVRTNYAAYKATGAMHEKYDVEACGESGGGGEYKPQTGFGWSNGGVLSFLEEFGWPEGKEIAC

SEQ ID NO: 19905 - protein, 321 aa, Bacillus cereus G9241
MKALYFEQFGNPDVLQYKELNDPIINPKEILVRTKAIGLNFADIYRRRGDYHLAGNPPYVLGYEGAGIVEKVGADVTNINPGDRIAFADVPFANAELVAVPSEKAIKLPDSISFETVASVLLQGLTAHYLTKDSYEIKQGDIALVHAAAGGVGQLLIQMIKLLGGKVIGLTSSNEKGKVATLAGADHVFLYTESWATKVLEITNGTGVNVVYESVGSTLEESFSATKTGGTVVFYGMADGNPAPVDPRMLMDTSKTLTGGDLWNVLTTYEERKKRSTQLFDWIATGKLNIASPTTFSLQNGALAHELLESRKSTGKILLIP

SEQ ID NO: 19906 - protein, 357 aa, Nocardioides sp. JS614
MVCVLALTLGLVGGALGGLAYDQLSEDEPGTVSSGLAGVDTVSEAPLSADNGSIEAVAARLLPSTVQISAEYEGQRGGATGSGFVLDRQGHVITNNHVVADADEADGPIQIVDQDGNRYPATVVGRSPVYDLAVLYSPKAKGLTPAALGASQELRVGEGVVAIGSPLGLSSTVTAGIVSALHRPVTTGDAGNDSSYINAVQTDAAINPGNSGGPLVNLRGQVVGVNSAIATTGGGIGGESGNIGVGFAIPIEQVRVTADQILRTGEAKYPVIGAQVQTGQNDGNGAEIDEVMPDTPAERGGLRKGDVIIEVEGERVTDGIALIVAIRTHQPGETVEFTILRDGQERTISLTLGAETG

SEQ ID NO: 19907 - protein, 210 aa, Mycoplasma mycoides subsp. mycoides SC str. PG1
MNYLLIGGAGYIGSHVAEIINKTDNNKVIIYDNLSSGLNDFIEQKSTFIQGDILDFNKLNEVFSSNKIDVVIYLAGLIKVGESVQKPLDYYQTNILGLINTLKIMQAHNVNYFVFFSSAAVYGNNSRHNGYFYEDDPKEPCSPYGRTKYFGEEIIKDFAIANPNFHYTFLRYFNVAGASKSKRIGYLTKDNNKPTHLIPAISYFAFGLTD

SEQ ID NO: 19908 - protein, 156 aa, Pisum sativum
KNEKKRMFSEIDGGVEENGGSGDRKSVDKKNQVVGWPPVCSYRKKNMNEGSKMYMKVSMDGAPYLRKIDLCLHKGYLELALALEKLFDCCGIEEALKDAENCEHVPIYEDKDGDWMLVGDVPWEMFIESCKRLRIMKRSDAKGFDLQPKGSLKRFI

SEQ ID NO: 19909 - protein, 316 aa, Glycyrrhiza glabra
MAAAAIEIPTKVLPNSTCELRVPVIGMGSAPDFTCKKDTKEAIIEAIKQGYRHFDTAAAYGSETALGEALKEARDLGLVTREDLFVTSKLWVTENHPHLVVPALRKSLETLQLEYLDLYLIHWPLSSQPGKFSFPIQAEDLLPFDVKGVWESMEESLKLGLTKAIGVSNFSVKKLQNLLSVATIRPAVNQVEMNLAWQQKKLREFCNANGIVLTAFSPLRKGASRGPNEVMENDMLKGIAEAHGKSIAQVSLRWLYEQGVTFVAKSYDKERMNQNLQIFDWELTTEDHQKIDQIKQNRLIPGPTKPQLNDLWDDEI

SEQ ID NO: 19910 - protein, 230 aa, Triticum aestivum
ESHPTSSPTLQQVLSLSSSHPPPPSLLEMDPAVERLKTGFEKFKTEVYDQKPDLFEPLKAHQSPKYMVFACADSRVCPSVTLGLEPGEAFTVRNIAAMVPCYCKNKHTGVGSAIEYAVCALKVEVIVVIGHSRCGGIKALLNLKDGADDTFHFVEDWVRIGFPARKKVKDECSEMSPEEQCGVLEKEAVNVSLQNLNTYPFVKEAVANGTLKLVGGHYDFVSGKFDTWAL

SEQ ID NO: 19911 - protein, 448 aa, Photorhabdus luminescens subsp. laumondii TTO1
MIHGNINCYKGKVYYIGAMIHDILTREFNGVYYMNNNKFINYKKIINISESDWENAENNKISGLDVKVSGINYMTDQYGREFHHFCTTSYLGLDYHKDILNGAIDAIKETGSLRIPNSKNRCKLSILEDYERELSALFNAECLSTLSCSSASSGILPLLASGVFTGNVNPVMVFDKYSHYSMNHLKPSCADETEVITAPHNDMGYLEDICKIHKKVVYVADGVYSMGGVADINSIMYLKERYGLFTYLDDSHALSAIGDKGCGYVRSHIKELDEDSIIVASLAKSFAASGGLVMLGSRNQKKLIHRYGGPSNWSQSLNSAAIGAGRASIRIHYKPELKELQEKLKKNIQLFDSLITTDQFGSSTAIRLIQCGDASLANKTAAFLAENGFFTSSVFFPVVPQGRAAIRVTLRADMDSDLIKRFCYLITDFLRESLYQESATLNSLISVA

SEQ ID NO: 19912 - protein, 475 aa, Crocus sativus
MAKEHIVLFPFMSQGHIIPFLSLAKLISERHPTYTITLLNTPLNILNLQSTLPPNSNIHLKSLPYRSSDFGLPPDRENTDSLPFPLVLSFYQSGESLATHFTHFVSDLTRQNHDTPPLLIVADVFFGWTAEIAKRLNTHVSFSTCGAYGTAAYFSVWLHLPHAETDLPDFTAPGFPETFKLQRNQLSTYLKKADGSDRWSKFFQRQISLSLTSDAMICNTVEEMEAEGLRLLRKNTGLRVWSIGPLLPSLPPNSSLGRSGRKSGMEVSYIMKWLDSHPPGSVVYVSFGSIHDTAAQMTSLAVGLAVELATRSCGHSGRRFGGNRNRNSNPNGVPDEFEARMRGSGRGILIHGWAPQLEILEHESTGAFVSHCGWNSTLESLSRGVCMIGWPLAAEQFYNSKMVEEDWEWGGTCEGSGGGVRSEEVERLVRLVTEDEKGSDEENEQYDEMIGGYEEKGGEGSLSGQLIKFIGMESQ

SEQ ID NO: 19913 - protein, 219 aa, Pseudomonas fluorescens PfO-1
MKNLIEGFLKFQNEAFPQRTELFKHLATTQTPGTLFITCSDSRVVPELLTQQEPGELFVIRNAGNIVPSYSPHPGGVSATVEYAVAVLGVTDIVICGHSDCGAMTAIAQCKCMDHLPAVSGWLQHAESAKVVNESRPHANDAAKLSSMVRENVIAQLANIQTHPSVRLAQEKGLLNLHGWVYDIETGSIDALSADRRTFVSLAEQPSTCAVYGQTVDAA

SEQ ID NO: 19914 - protein, 1420 aa, Nostoc punctiforme PCC 73102
MGAIRLARATTGRSKIALFTGSYHGIYDGILVRGVTTSEGTRRSIPRAIGIPSYIADDVIVLDYGQPESLEILKTHAHELAAVLVEPIQSSRPDLQPKEFLLQLRQLTQATGTVLIFDEVITGFRMHPGGIQGLWDIQADLTTYGKTVAAGMPIGVIAGKAALMDTLDGGMWNYGDESYPQAETTMFAGTFFKHPLVMAAAWAALNHIKNSGPKLQQELSQKTAKLAQTINSYFEKRQVPIQVVHFGSLFRFIGSSPLKFNQLFFYHLLEKGVYVWEGRTFYLSTAHTDADIEHIIRAVKESVVEMQQGELLPSAPILTTLKIPLTAAQKELWFLAQMGDEVSRAYNESRTIHLRGTCNLLAVRKAVQEIINRHEALRTTFSPEGDEQLIHSTLTIDIPVSDFSTLDKSQREAQLSELLAREAQQIFHLEKGPLLGCHIVKLEENYHLVVLTNHHIVADGWSIGILLQELAAIYSAQCQGIASQLLQPMKWSEYALWQVERQQSPEMAKAEAYWLGQFSSSVPVLELPTDRPRPPIFSYTGARENLILDPTLYNALKNLSGQRGYTLFTILLTAFITLLQRLTNQQDIVVGIASAGQSAIAGESLVGHCVNLLPIRSQVIGNPGFTEYLSAIQQVLLDAYEYQIYPFIKLIENLKLPRDPSRTPLFTTGFNLDKAQFESKSLKQEFEVAKNSTSATKFDLNLNIFQTDNELLIELEYNTDLFDCQTIQRWSKHYVTLLEGIVANPEQPLAQLPVLTKTEQQQLLVEWNNTQTDYSGEYCIHELFEVQVERSPDAIAVIFEDQQLTYRELNQRANQLAHYLRSAKLSRSNSLGVGPEVLVGIFMDRSIDMVVSILGILKAGGAYVPLDPTYPKERLAFMLSDAQVSVLLTEDKFLEGLPEHQAQVVCLNQNSEAWCQERVDNPVREVTTNNLAYVIYTSGSTGKPKGVLVNHQNVIRLFTATQSWFNFSDRDVWTNFHSYGFDFSVWEIWGSLLYGGRLVVVPYWISRSPEAFYNLLCTQQVTVLNQTPSAFRQLMNAEEEAAGKTGTLALRLVIFGGETLELDSLQPWFERHGDGSQLVNMYGITETTVHVTYRPINIADLNQRNGSLIGHRIPDLQIYLLDSQRQPVPIGVAGELYIGGAGVTRGYLNRPELTAERFIVNPFSEVTDAYLYKSGDLARYLPNGELEYLGRIDHQVKIRGFRIELGEIETALRKHQAVREVIVQAVEESHGEKRLVGYVVLDDKQAVTIGDLQRFLKEKLPEYMVPSAFIFLPALPLTPNGKLDRRSLPAPETIRPNLSDAYVMPQTEMEQTIATIWQKALNIEKIGIHDNFFELGGHSLLMVKVHSKLREIFQTDLSMIDMFRYPTISSLAECFTTIKNHTLSLQKTDVKIEKIKDGKAQQQKRLQKLKSITKSLGVKE

SEQ ID NO: 19915 - protein, 79 aa, Avicennia marina
MSCCGGNCGCGAGCKCGNGCGGCNMYPDLGYSEATAPAEALVLGVAPLKFYEGAESVEGAAENGCKCGANCTCNPCNCK

SEQ ID NO: 19916 - protein, 615 aa, Litchi chinensis
MGHSSQTWFNKSKSFAPSWALSCRIPGPMFQPLYSSRIFLNPVRRAGLFRALLLLNTVIAQGADPVESTSESILIKNFNSLYDYNNSTTFDPTSKSLILTQSSSSTLSYEPDSDSEPDFATVVASQRFFFTSPGSSNSIIESSPSIATLESSDTSVSMISHGVNQSLNNFSDRSLLKSWKSPSVKDSVAVPTYSPDPYLDFRQSMQEMVEARDLVDVRSNLDYLHELLLCYLALNPKTTLVELGGTLGLEECALWMPSRSGSSLQLSHTLRHQITVGSTVSINLPVVNQVFSSNRAIIIPHTSPLARIRPLAGRYVPPEVAAVRVPLLHLSNFQINDWPELSAKSYAIMVLMLPSDSARKWHVHELELVEVVADQVAVALSHAAILEESMRARDLVKEQNVALDLARREAEMAIRARNDFLAVMNHEMRTPMNAIIALSSLLLETGLTPEQRLMVETVLKSSNLLATLINDVLDLSKLEDGSLELEIKAFNLHAVFKEVMSFIKPIAAIKRLSVSVMLAPDLPLCAIGDEKRLMQTILNISGNAVRFIVHYTCGGCLQSPYFCGRERICFRSIHLCCFQHQCSGGCQVPQQTIPSVQNSNRFWRLSHQGQVVPFV

SEQ ID NO: 19917 - protein, 156 aa, Triticum aestivum
TDNPEDDLKTESLVKQLLYNSKLRSACPLPFDEAKLWQGENGPELKQEIQKQFRNISAIMDCVGCEKCRLWGKLQVLGLGTALKILFSVDGDSHLNQPLQLQRNEVIALFNLLNRLSESVKFVHEKGSSIEEVIKEQIPSTFQKGASKPNLKLDFL

SEQ ID NO: 19918 - protein, 181 aa, Shigella boydii
INLGIGVYKDETGKTPVLTSVKKAEQYLLENETTKNYLGIDGIPEFGRCTQELLFGKGSALINDKRARTAQTPGGTGALRVAADFLAKNTSVKRVWVSNPSWPNHKSVFNAAGLEVREYAYYDAENHTLDFDALINSLNEAQAGDVVLFHGCCHNPTGIDPTLEQWQTLAQLSVEKGWLPL

SEQ ID NO: 19919 - protein, 241 aa, Gracilaria tenuistipitata var. liui
MSTNLAQQLREGTTKAHSMAENVSFVKSFLVGVIDKKSYRGLVANLFFIYSALEKAIEINKHHHVVQSIYFPELNRKLSLQKDLEYYYGPNWETQIYPSPATKIYVDRITNISFNQPELLISHAYTRYMGDLSGGQILKRIAQTAMNLSSSDGTAFYNFDDIKDDKKFKSIYRQALDNAPINHIQIETIITEANIAFNLNMRIFEELNSNFIKIIGMLLLSVITSLRRKLFKIKYYLLQDV

SEQ ID NO: 19920 - protein, 176 aa, Escherichia albertii
NLGIGVYKDETGKTPVLTSVKKAEQYLLENETTKNYLGIDGIPEFGRCTQELLFGKGSALINDKRARTAQTPGGTGALRVAADFLAKNTSVKRVWVSNPSWPNHKSVFNAAGLEVREYAYYDAENHTLDFDALINSLNEAQAGDVVLFHGCCHNPTGIDPTLEQWQTLAQLSVEKG

SEQ ID NO: 19921 - protein, 174 aa, Shigella boydii
LGIGVYKDETGKTPVLTSVKKAEQYLLENETTKNYLGIDGIPEFGRCTQELLFGKGSALINDKRARTAQTPGGTGALRVAADFLAKNTSVKRVWVSNPSWPNHKSVFNAAGLEVREYAYYDAENHTLDFDALINSLNEAQAGDVVLFHGCCHNPTGIDPTLEQWQTLAQLSVEK

SEQ ID NO: 19922 - protein, 238 aa, Arabidopsis thaliana
  misc_feature (130)..(130): Xaa can be any naturally occurring amino acid
  misc_feature (160)..(160): Xaa can be any naturally occurring amino acid
  misc_feature (166)..(166): Xaa can be any naturally occurring amino acid
  misc_feature (177)..(177): Xaa can be any naturally occurring amino acid
  misc_feature (186)..(186): Xaa can be any naturally occurring amino acid
  misc_feature (202)..(202): Xaa can be any naturally occurring amino acid
  unsure (1)..(238): unsure at all Xaa locations
MDSVFSNVARAPEDPILGVTVAYNNDPSPVKINLGLGAYRTEEGKPLVLDVARKAEQQLVNDPSRVKEYIPIVGISDFNKLSAKLILGADSPAITESRVTTVQCLSGTGSLRVGVEFLKTHYHQSVIYIXPKPTWGNHSKVFNLARSPAEYFRYYDPATXRGLDFXGLLEDFGLLHXGAIVLLHAXCAHIFTGVAPPFVQWXQFLQLLRFQSLFPSSVVPSCVLPRPLFSICLFCSSS

SEQ ID NO: 19923 - protein, 341 aa, Gracilaria tenuistipitata var. liui
MKNKIILPSSVSSEYNINSNIVLHLYKDMLLGRCFEDMCAQMYYRGKMFGFVHLYNGQEAVSTGVIKVLQKDDYVCSTYRDHVHALSKGVPANLIMAELFGKETGCSRGRGGSMHIFSAAHNFLGGFAFIGEGIPISIGAAFQSVYRKQILNDLQPMRVTACFFGDGTSNNGQFFECLNMAVLWKLPIIFVVENNQWAIGMAHNRSTSFPEIHKKAEAFGLPGIEVDGMDVLAIREVAISAVDRARFGHGPTLIEALTYRFRGHSLADPDELRSVSEKEAWLARDPIKRLKNYISDNSLCSEKEVEDVNLAVKIEIDQAVEFAISSPEPNIKDLKKYLFSD

SEQ ID NO: 19924 - protein, 214 aa, Triticum aestivum
RCYRQIKNKPYPKSRYCRGVPDPKIRIYDVGMKKKGVDEFPYCVHLVSWEKENVSSEALEAARIACNKYMTKSAGKDAFHLRVRVHPFHVLRINKMLSCAGADRLQTGMRGAFGKPQGTCARVDIGQVLLSVRCKDNNAAHASEALRRAKFKFPGRQKIIESRKWGFTKFSRADYLKYKSEGRIVPDGVNAKLLGNHGRLEKRAPGQAFLKAVA

SEQ ID NO: 19925 - protein, 171 aa, Escherichia albertii
IGVYKDETGKTPVLTSVKKAEQYLLENETTKNYLGIDGIPEFGRCTQELLFGKGSALINDKRARTAQTPGGTGALRVAADFLAKNTSVKRVWVSNPSWPNHKSVFNAAGLEVREYAYYDAENHTLDFDALINSLNEAQAGDVVLFHGCCHNPTGIDPTLEQWQTLAQLSVE

SEQ ID NO: 19926 - protein, 557 aa, Triticum aestivum
MDSARSWFQKFQPRDKSKSPAVPASHGKDPGKPPVDDAPSSATKQKVAAAKQYIENHYKTQMKSLQDRKERRWMLERKLQDAEVPAEEQNNILKHLEKKETEYMRLQRHKMGVEDFELLTIIGRGAFGEVRLCREKTSKSVYAMKKLKKSEMLRRGQVEHVKAERNLLAEVDSAYIVKLYYSFQDDEFLYLIMEYLPGGDMMTLLMRKDTLTEDEAKFYIAETVLAIESIHKHNYIHRDIKPDNLLLDLSGHLKLSDFGLCKPLDSSNFPNLNEPDYTPGKGAKPLPDNTSRLTNSSAPKRTQQEQLSHWQKNRRMLAYSTVGTPDYIAPEVLLKKGYGMECDWWSLGAIMYEMLVGYPPFYSEDPMSTCRKIVNWRSHLKFPEEAKLSSETKDLISKLLCNVEQRLGTKGAHEIKAHTWFRGVQWEKLYQMKAAFIPEVNGELDTQNFEKFEETGAQVQSSSKAGPWRKMLPSKDANFVGYTYKNFEIVNDDEVAGIAELKKKSSKSKRPTIKTLFESMDEDEPVHGGFLNMLPHKEGQPSSHSSAPPEQYQPRRK

SEQ ID NO: 19927 - protein, 307 aa, Methylobacillus flagellatus KT
MSTALVSHPDTLLHVMDGLHPESPARITAIMDALAEHRLLDKLQRHEAPQATDEALLRVHDAAYIKHIRSIAPRAGIVRLDPDTAMGPMSLSACLHASGAVIKAVDLVMQKQVTNAFCCVRPPGHHAGRARAAGFCIFNHIAAGVAYALASYKLKRIAVLDIDVHHGDGTEDIFRNDPRVMLCSTFQHPFYPHSGADTRLDHIVNVPLPAESDGAAFREAFLLRFEPALQRFQPQMVFISAGFDAHANDPLAQLMLKGEDYHWITQFAMRIAEQHADNRIVSLLEGGYHLPSLAESATIHVRTLAGL

SEQ ID NO: 19928 - protein, 279 aa, Bacillus licheniformis ATCC 14580
MVSSLKDTVTLHNGVKMPWFGLGVFKVEEGSQVVESVKAAIKNGYRSIDTAAIYQNEEGVGKGIKESGVPREELFITSKVWNSDQGYEKTLAAFDESLRKLGLDYLDLYLIHWPGKDKYKDTWRALEKLYKDGRVKAIGVSNFNVHHLESLLEDAEIKPMVNQVEFHPRLTQTELRDYCKKQGIQVEAWSPLMQGKLLDDQVLTDIAKKYNKSVAQVILRWDLQNEVVTIPKSIKEHRIIENADIFDFELSAEDVEKINALNKDERVGPDPDTMVNGFE

SEQ ID NO: 19929 - protein, 215 aa, Triticum aestivum
  misc_feature (80)..(80): Xaa can be any naturally occurring amino acid
  misc_feature (107)..(107): Xaa can be any naturally occurring amino acid
  misc_feature (132)..(132): Xaa can be any naturally occurring amino acid
  misc_feature (176)..(176): Xaa can be any naturally occurring amino acid
  unsure (1)..(215): unsure at all Xaa locations
WLSHRTGIIVVGSVCVYVAICRNEGVMLRCLGNRVPWEDFNDASDEDLVHEHEIVGSSSIPCHKKEAFNFSNGDLYKWNXLWLMVVGIFGKEWAVYEGEETRFMFHXAMIGKEVQLAEIHTRRMNLVGTELXSIIFGWFIKFVFNVKCERFNNLNESKDHAYWGVVITFKSFIAWXIDKMKLFKIFTQWSPITFPFFEVRAQLHFQFPLEAVRSK

SEQ ID NO: 19930 - protein, 593 aa, Glycine max
MAVDSEVPRAERSAKALQFIEEVTKNTDSVQERVLTEILTQNAETEYLKRFGLNGATDRDTFKSKVPVVTYEDLQPDIQRIANGDSSPILCSHPISEFLTSSGTSAGERKLMPTIHEEMDRRQLLYSLLMPVMNQYVSDLDKGKALHFLFIKAEAKTPGGLVARPVLTSYYKSEQFRKRPFDPYNVLTSPNEAILCPDSFQSMYTQMLCGLIMRHEVLRVGAVFASGLLRAIRFLQLNWEQLSHDILTGTLNPKITEPSIKERMSKILKPDPQLAAFIKNECSVENWERIIVRIWPNTKYLDVIVTGAMAQYIPTLDYYSGGLPKPCTMYASSECFFGLNLKPMSEPSDVSYTILPNMGYFEFLPHDDSSPVTLSKDSPPRLVELADVELGKYYELIITTYSGLCRYRVGDILQVTGFHNSDPQFRFVRRKNVLLSIDSDKTDEAELQKAIENASELLKEFNTSVVEYTSFADTKSIPGHYVIYWELMMKDSSHPPTNQVLNQCCLVMEESLNSVYRQGRVADNSIGPLEIRVVKNGTFEELMDYAISRGASINQYKVPRCVSFTPIMELLDSRVVSFHFSPAAPHWTPERRR

SEQ ID NO: 19931 - protein, 269 aa, Triticum aestivum
MASPYLLHRLTADEIFQTLEASSSTSSSCYDAFVPVFRPDPSASSLSVSAADRVRSQFLSVERDLFHDALVAPRNDDLGFPEENDEEEEASIRWDCFQLDEEEEPDLPLEASVPAEEFDWEEVAFASGPLVENPEPDWEMLGDMPPSAPAGANEGFVYTSDREAYEVLVAVGDGLFLTNKPPAARSAVKALPSAILAAGEEGEGEECSVCKDGVVAGERVKMMPCSHRYHEDCILPWLEVRNSCPLCRFELPTDNPKYETWKAGRAMAT

SEQ ID NO: 19932 - protein, 437 aa, Bordetella parapertussis 12822
MSNTYFPRWRLADDTVPGAVIAPDERLSWPKNIAMGAQHVVAMFGSTVLAPLLMGFDPNVAILMSGIGTLIFFLFVGGRVPSYLGSSFAFIGGVVAVTGYVAPGANANIGVALGAIIACGLVYALIGLVVWAASARGNGARWIEAMMPPVVTGAVVAVIGLNLAPIAAKGAMGSSGFEASMALMTILCVGGIAVYTRGMVQRLLILVGLVLACVIYAVCANGLGLGAPMDFAKVAAAPWFGLPSFAAPVFEPQAMGLIVPVAIILVAENLGHVKAVAAMTGQDLDRCVGRAFVGDGVATMVSGAVGGTGVTTYAENIGVMAVTRIYSTLVFVVAAVIALVLGFSPKFGALIQTIPGPVLGGMSVVVFGLIAIAGARIWVVNQVDFSDNRNLIVAAVTLVLGAGDFSVKLGDFSMNGIGTATFGAIILYALLGLARRR

SEQ ID NO: 19933 - protein, 323 aa, Streptococcus pneumoniae TIGR4
MKLNRVVVTGYGVTSPIGNTPEEFWNSLATGKIGIGGITKFDHSDFDVHNAAEIQDFPFDKYFVKKDTNRFDNYSLYALYAAQEAVNHANLDVEALNRDRFGVIVASGIGGIKEIEDQVLRLHEKGPKRVKPMTLPKALPNMASGNVAMRFGANGVCKSINTACSSSNDAIGDAFRSIKFGFQDVMLVGGTEASITPFAIAGFQALTALSTTEDPTRASIPFDKDRNGFVMGEGSGMLVLESLEHAEKRGATILAEVVGYGNTCDAYHMTSPHPEGQGAIKAIKLALEEAEISPEQVAYVNAHGTSTPANRKRRKWCYRSCSW

SEQ ID NO: 19934 - protein, 588 aa, Staphylococcus aureus subsp. aureus MRSA252
MAEKHLIVVGGGLAGLMSTIKAAEKGAHVDLFSVVPVKRSHSVCAQGGINGAVNTKGEGDSPWIHFDDTVYGGDFLANQPPVKAMTEAAPKIIHLLDRMGVMFNRTNEGLLDFRRFGGTLHHRTAYAGATTGQQLLYALDEQVRAYEVDGLVTKYEGWEFLGIVKGDDDSARGIVAQNMTTAEIETFGSDAVIMATGGPGIIFGKTTNSMINTGSAASIVYQQGAIYANGEFIQIHPTAIPGDDKLRLMSESARGEGGRIWTYKDGKPWYFLEEKYPDYGNLVPRDIATREIFDVCINQKLGINGENMVYLDLSHKDPHELDVKLGGIIEIYEKFTGDDPRKVPMKIFPAVHYSMGGLYVDYDQMTNIKGLFAAGECDFSQHGGNRLGANSLLSAIYGGTVAGPNAIDYISNIDRSYTDMDESIFEKRKAEEQERFDKLLAMRGTENAYKLHRELGEIMTANVTVVRENEKLLETDKKIVELMKRYEDIDMEDTQTWSNQAVFFTRQLWNMLVLARVITIGAYNRNESRGAHYKPEFPERNDEEWLKTTMASFQGAFEKPQFTYDDVDVSLIPPRKRDYTSKSKGGKK

SEQ ID NO: 19935 - protein, 197 aa, Bacillus anthracis str. A2012
MDTNITWHTASVSKDERRVKNGHHSFVIWFTGLSASGKSTVANAVARKLFEKNIGNYVLDGDNIRHGLNKDLGFSESDRMENIRRIGEVAKLFVDQGAVVLTAFISPFRVDRKQVRDLLAVDEFIEVFVKCPIEECEKRDPKGLYKKARKGDIKEFTGIDSPYEEPEKAELIVETHKYSIEECAEQIVKYLQERSLI

SEQ ID NO: 19936 - protein, 348 aa, Bacillus cereus G9241
MRNIENSLFYMPAEWEKHEGTWLQWPHDRTHRGEGYRAKLDDIWVTMVKELHYGETVHIVVYDEKEKVHVQSKLTEAKVDMDKIDFLIEETDDVWIRDNGPIFVKDKKGNLCLTHWIFNGWGEKYPYKKDAVMPAKISEMYSIPKVKSSVCLEGGGIEINGNGTLMAAKTSIINENRNPTLSQEEIEIELTKYLGVTNFIWITGIRGEDNYDEDTDYHIDGAARFVNENTILYEYDPFGEGEPYLLDAYEKHYQELRQARNLDGKPFQLIPVPVTRKVVKEAECKGSYLNFYIGNEVVLVPIYGDEHDKLGLQIIEGQFPGRRIIGIYINELFAYGGMIHCVTQQHLV

SEQ ID NO: 19937 - protein, 315 aa, Glycyrrhiza glabra
MAAAIEIPTKVLPNSTCELRVPVIGMGSAPDFTCKKDTKEAIIEAIKQGYRHFDTAAAYGSETALGEALKEARDLGLVTREDLFVTSKLWVTENHPHLVVPALRKSLETLQLEYLDLYLIHWPLSSQPGKFSFPIQAEDLLPFDVKGVWESMEESLKLGLTKAIGVSNFSVKKLQNLLSVATIRPAVNQVEMNLAWQQKKLREFCNANGIVLTAFSPLRKGASRGPNEVMENDMLKGIAEAHGKSIAQVSLRWLYEQGVTFVAKSYDKERMNQNLQIFDWELTTEDHQKIDQIKQNRLIPGPTKPQLNDLWDDEI

SEQ ID NO: 19938 - protein, 382 aa, Shigella flexneri 2a str. 301
MFKSDAARTRQRLSARKGRTLPPGRGKFPHSTTESFRNTFWLKKIMEHCFNMVDQQTTTAQTNANFLQIRFTTMSKKIAVIGECMIELSEKGADVKRGFGGDTLNTSVYIARQVDPAALTVHYVTALGTDSFSQQMLDAWHGENVDTSLTQRMENRLPGLYYIETDSTGERTFYYWRNEAAAKFWLASEQSAAICEELANFDYLYLSGISLAILSPTSREKLLSLLRECRAKGGKVIFDNNYRPRLWASKEETQQVYQQMLECTDIAFLTLDDEDALWGQQPVEDVIARTHNAGVKEVVVKRGADSCLVSIAGEALVDVPAVKLPKEKVIDTTAAGDSFSAGYLAVRLTGGSAENAAKRGHLTASTVIQYRGAIIPREAMPA

SEQ ID NO: 19939 - protein, 531 aa, Shewanella sp. ANA-3
MSADQQTVTPLENFSPKVAQRAVHRVQPELNFWQIFNMCFGFLGIQFGFALQNANVSRIFQTLGASIDDIPILWIAAPLTGLLVQPIIGYLSDNTWGRLGRRRPYFLIGAICTTLAIFVMPHSPTLWIAAGMLWIMDASINIAMEPFRAFVGDNLPPKQRTQGYAMQSFFIGIGAVVASALPYVLSNYFDVANTAPAGEIADSVRYAFYFGGAVLFLSVAWTVVSTKEYSPDELAAFHGNADAGADEQQHRTRTHKNYQFAAIVWMAVGALLTFAVWAQDLDKQLYILTLGIFVFGPLQLYCALRLGKSTPSQRAQLGIVFNVVDDLFHMPKAMHQLAIVQFFSWFALFAMWIYTTSAVTSYHFGSSDVLSKAYNDGADWVGVLFASYNGFSAIAALFIPLLAKRIGIKLTHTFNMFCGGFGLISFYFIKDPSLLWLPMIGVGIAWASILSVPYAMLSGALPPKKMGVYMGIFNFFIVIPQLLAASVLGLILNGLFDGQPIYALITGGVLMLCAGIAVLFVEQPNTQHTQA

SEQ ID NO: 19940 - protein, 96 aa, Colwellia maris
MSIRPLHDRVIVKRKDAESKSEGGIVLMGSATEKSTRAEVIAVGNGRILENGEVRPLDVKVGDQVIFSEGYGVKTEKIDGEEVLILSESDILAIVE

SEQ ID NO: 19941 - protein, 52 aa, Brassica napus
  misc_feature (8)..(8): Xaa can be any naturally occurring amino acid
  unsure (1)..(52): unsure at all Xaa locations
MPSHKTFXRIKQKLAKKQRQNRPIPYWIRMRTDNTIRYNAKRRHWRRTKLGF

SEQ ID NO: 19942 - protein, 596 aa, Xanthomonas axonopodis pv. citri str. 306
MSAYKITEHKYDMVVVGAGGAGLRATFGLAQKGLQTVCLTKVFPTRSHTVAAQGGISAALGNMGEDDWRYHFYDTIKGSDWLGDQDAIEYMCREAIPAIIELEHYGVPFSRTEEGKIYQRPFGGMTTKYGEGPSAQRTCAAADRTGHAMLHTLYQQSLAHNARFMIEYFALDLIFDEEGVCRGVLALDMAEGSLHLFRAHGVVLATGGYGRAYFSATSAHTCTGDGGGLVMRAGLPVQDMEFVQFHPTGIYGAGCLITEGVRGEGGILRNSNGERFMERYAPHYKDLASRDVVSRSMTVEIREGRGVGEHKDHILLDLTHLGPEVINEKLPGIAESAHIFAGVDVTKQPIPVLPTVHYNMGGIPTNFYGEVVRKRGDDADAVVPGLYAIGEAACVSVHGANRLGSNSLLDLVVFGRAVANRCAETVKPNQPHKTLPSDACDKALGLLDKLRHANGSTPTAVIRDNMQRTMQSDAAVFRTSKTLKEGVDKMAEIFATFEDVKVSDRSLVWNSDLIETYELNNLLLNAVATINSAEQRKESRGAHSHEDFPDRDDVNWQKHTLVTVDDKGKCEFDYRPVHMYTLSKDVDVVPPKPRVY

SEQ ID NO: 19943 - protein, 151 aa, Trichodesmium erythraeum IMS101
MANAWAASAWSAATRPRLGNVLGQLKATVRSNYSSPPTRGARLVQQVLASPELSAQWAQELAQMRGRIKDMRAQLHSALHERFGERRDFGFLLTQRGMFSYTGISEPQVHRLRDEHGVYLIRSGRMCMSGLSGANVQYVADAIATVLEAPQ

SEQ ID NO: 19944 - protein, 316 aa, Trichodesmium erythraeum IMS101
MTTLAPLDTARASMFSHVPPYPGDPILSLMEAFQQDPRTDKVSLSIGLYFDEAGRLPVLDSVRQAGDALAREQSPSGYLPIEGIAPYRQLVQNLVFGAEHEAVRAQRIATVQTLGGSGALKLGADFIKHYFPDAEVWLSDPTWDNHLAIFQGAGLRTHSYPYYDAATGSLRFDAMLQTLRELPSGSVVLLHASCHNPTGVDLSREQWQQLIPVIVERGLIPFVDMAYQGFGDGLDEDAWSVRALADAGAPGLCGQFVFQEFLAVWRTRGRPQRGLQRRGHGSAMCWASSRPRCAATIPRPPPVARAWCSRCWHRQN

SEQ ID NO: 19945 - protein, 222 aa, Canavalia lineata
MARQKIKIKKIDNVTARQVTFSKRRRGIFKKAEELSVLCDAEVGLIIFSATGKLFEYPSSSMKDIITKYNQHSHDNNQLGRPQNLQVEQCVDLSKEVAERNQQLRQMKGEDFQGLNLDDLQQLEKTLETGLERVNETKEKRIMDEIVALHKKGLKLEEENKHLKQKMAMLCMGKSSFLVDSDITLQEVVSSESMNVCSCNSGPSLEDDSSDTSLKLGLPFPN

SEQ ID NO: 19946 - protein, 503 aa, Triticum aestivum
MDRADPARGRLAVLSSHLLAAGAEPAAALERSPASAAAPGTRAGVLAVVDSRTGKRYEVKVSEDGTVRATDFKKITAGKDDKGLKTYDPGYLNTAPVRSSICYIDGDEGILRYRGYPIEEVAESSSFVEVAYLLMYGNLPSQSQLAAWEFAISQHSAVPQGLLDIIQSMPHDAHPMGVLASAMSTLSVFHPDANPALRGQDLYNSKQVRDKQIVRVLGKAPAIAAAAYLRLAGRPAVLPSNNLSYSENFLYMLDSLGDKEYKPNPRLARVLDILFILHAEHEMNCSTAAVRHLASSGVDVFTALSGGVGALYGPLHGGANEAVLKMLNEIGAVENIPDFIEGVKNRKRKMSGFGHRVYKNYDPRAKVIRKLAEEVFSIVGRDPLIEVAVALEKAALSDEYFIKRKLYPNVDFYSGLIYRAMGFPTEFFPVLFAIPRMAGWLAHWKESLDDPDNKIMRPQQVYTGVWLRHYTPVRERVASNQGEELGQIATSNATRRRRAGSSL

SEQ ID NO: 19947 - protein, 117 aa, Triticum aestivum
  misc_feature (88)..(88): Xaa can be any naturally occurring amino acid
  unsure (1)..(117): unsure at all Xaa locations
DDSLLRQSLLFHESLRVTVQGEVIEQSFGEEHLCFRTLQRFTAATLEHGMHPPIAPKPEWRALMDEMAVVATEEYRSIVFQEPRFVSXFRLATPELEYGRMNTGKWNLVCVGRVGAT

SEQ ID NO: 19948 - protein, 396 aa, Bacillus subtilis subsp. subtilis str. 168
MSISTLQKEINKQLDGCFEEMVEIRRHFHMYPELSFQEEKTAAFIASYYESLGVPIRTNVGGRGVLANIEGSEPGPTVALRADFDALPFKMKKDVPYASKVPGVMHACGHDGHTAALLAVAKVLHQNRHELKGTFVMIHQHAEEYYPGGAKPMIDDGCLENTDVIFGTHLWATEPLGTILCRPGAVMAAADRFTIKVFGKGGHGAHPHDTKDAVLIGSQIVSSLQHIVSRKVNPIQSAVISTGSFIADNPFNVIADQAVLIGTARSFDENVRDILEKEIEAVVKGICSMHGASYEYTYEQGYPAVVNHPAETNHLVSTAKNTEGVQQVIDGEPQMGGEDFAYYLQNVKGTFFFTGAAPEQPERVYSHHHPKFDINEKAMLTAAKVLAGAAITYHQL

SEQ ID NO: 19949 - protein, 112 aa, Zea mays
MAAVETVVLKVAMSCEGCAGAVRRVLSKMEGVETFDIDLKEQKVTVKGNVKPEDVFQTVSKSGKRTSYWEGEATAPDAAAAPEAEAAPSTAAEAPPPAAPAAPEITPAKADA

SEQ ID NO: 19950 - protein, 359 aa, Staphylococcus aureus subsp. aureus Mu50
MMTIKVGIIGCGGIANGKHMPSLQKVENVEMIAFCDVDISKAASAAEAYGTDNAKVYDDYKALLKDDTIDVIHVCTPNDSHCEITVAGLHAGKHVMCEKPMAKTTAEAQKMIDTAKSTGKKLTIGYQNRFRPDSQFLHQAAQRGDLGDIYFGKAHAIRRRAVPTWGVFLNEEAQGGGPLIDIGTHALDLTLWMMDNYEPESVMSSTFHKLNKQHDAANAWGSWNPDEFTVEDSAFGFIKMKNGATIILESAWAINSLEVDEAKCSLSGTKAGADMKDGLRIHGEDMGTLYTKHVELENKGVDFYEGNEVDEAEEEAKAWIDAVVNDTEPVVKPEQAMVVTKILEAIYQSAKSGKAIYFE

SEQ ID NO: 19951 - protein, 346 aa, Staphylococcus aureus subsp. aureus Mu50
MTKLKVGVIGVGGIAQDRHIPALLKLKDTVSLVAVQDINTVQMIDVAKRFNIPQAVETPSELFKLVDAVVICTPNKFHADLSIEALNHGVHVLCEKPMAMTTEECDRMIEAANKNHKLLTVAYHYRHTDVAMTAKKAIEAGVVGKPLVARVQAMRRRKVPGWGVFTNKALQGGGSLIDYGCHLLDLSLWLLGKDMVPHEVLGKTYNQLSKQPNQINDWGTFDHTKFDVDDHVTSYMTFANRASMQFECSWSANIKEDKVHVSLSGEDGGINLFPFEIYEPRFGTIFESKANVEHNEDIAGERQARNFVNACLGIEEIVVKPEEARNVNALIEAIYRSDLDNKSIQL

SEQ ID NO: 19952 - protein, 316 aa, Bacillus anthracis str. 'Ames Ancestor'
MIPVTILTGFLGSGKTTLLNRILTENHGQKLAVIVNEIGKIGIDNQLIMNVEEEIMEMTNGCLCCTVREDLLVALKQLLDVKAEGKMDFDGLVIETTGLANPGPIIQTFFLDPVIQSAYQINGVVTVVDSYHIHKHFEKGLEAKEQIAFADVILVNKLDLIEESEKENLLHELQGINPTAKLIQSTNCDVDIPSLLKIQTFKTKDTLQIYPHKEHNHLEGVKSFVLREERPLDLQKLNEWMSAVVQELGEYLYRYKGILSIDGVDKRIVFQGVHTLFAASYDREWQEGEERVSEVVFIGKDINKEWFQEHFEECVK

SEQ ID NO: 19953 - protein, 145 aa, Triticum aestivum
MGSSEAETPAKANKASAPQEQQPPATSSTATPTVYPDWTSFQGYPPIPPHGFFPSPVVSNPQGHPYMWGPQPMMPPYGSPPYVIYPPGGIYAHPSMRPGAHPFAPYTMTSPNGNPDAAGTTTTAATAGGETNGKSSEGKEKSPIK

SEQ ID NO: 19954 - protein, 451 aa, Staphylococcus epidermidis ATCC 12228
MANTRELNHKDAQYVWHPFTQMGVYAKNDNIIIEKGRGSYLYDTEGNKYLDGYASLWVNVHGHQHKKLNKAIHKQLDKIAHSTLLGSSNIPSIELAEQLVKLTPDRLQKVFYSDTGSASVEIAIKMAYQYWKNIDAKQYAKKNKFLTLHHGYHGDTIGSVSVGGIDSFHKIFKDLIFENIQIETPCLYKSKYRNEAEMLNSILNQIENILSERNDEIVGFILEPLIQGATGLFVHPHGFLKAVEQLCRKYDVLLICDEVAVGFGRTGEMFACNHEDVQPDIMCLGKAITGGYLPLAATLTSQKIYDAFLSQSHGKNTFFHGHTYTGNQLVCSVALENINLFKKKHLIGHIQKTSQTLKQRLEALQPHKNIGDIRGRGLMYGVELVENKSTQTPLDIPTVELIIRRCKENGLMIRNLENVITFVPILSMSNKEIKKMVKIFNKALHQTLGKK

SEQ ID NO: 19955 - protein, 474 aa, Bdellovibrio bacteriovorus HD100
MKTLLVLILSVAMTAQAQTGAKELPKDPPKMNLSAALPGNLFVELAKAINPAVVNISTTAIPKNSPRMRDPMLDMLEQLYGFRMQQPQQQQQRPQQMGLGTGFIIREDGLIVTNNHVIAGADIINVQLSEKSTDVFEATLVGSDERTDIALIKINPKSKLPVAVLGSSKDVEVGEWVAAFGNPFGHGHSMTKGIISSKGRDITEINKIPLLQTDASINPGNSGGPLVNTKGQVIGVNSAIDARAQGIGFAIPIDEVKAILPILESKGRIARGFLGTALGDLDPEAAEYLGLGELRGAVITAVSPGSPALKAGLKMYDIVTEFNGKKIRTSLDLMDAVADAPIGQPIKTKIIRNNKEMTLNVVTAERIEEKRAVRAATKTYAGQKAPFDLGFTVIDPTTELRKEWGLPDDMKQPVVIETERNSNASKGGLRVGDVILDVNKQPVDTAKDVLKALKKGKNTLRIARNTRIQIINIE

SEQ ID NO: 19956 - protein, 377 aa, Staphylococcus epidermidis ATCC 12228
MDIKAQLKQIQDKGLYRELQPIQSVEKQYIYINDQSYINFTSNDYLGIGQLEYQPQNFLDFIKTYSIHLSSSRLVSGNSVVYQQLEQAISEHFNFEDALIFNSGYDANLAVFNIFKNNNVVIFSDQQNHASIIDGIKLSGLSKVIYQHLNYDDLESHLAQDTHLDVQKVIVSDSVFSTNGTKADINRLVHLKQRYNAILIIDASHSLGLNLFEYHADIDIVTSSLSKAWGAHGGIIFSSKDIKDLIINKGRSLIYSSSLPSYHLYFIQVSLQHVIEDTYRREKLNALSEYFNHQFMELFPNQPLSNTPIKNIVCDSLASAQAQYDMLFEHGIFVSYLRYPTVSQPTLRISLSYFHDTDDIDRLFNVMKQYDEGDSYV

SEQ ID NO: 19957 - protein, 101 aa, Triticum aestivum
  misc_feature (23)..(23): Xaa can be any naturally occurring amino acid
  unsure (1)..(101): unsure at all Xaa locations
MSWWWAGAVGAVKKRQDERAASXDPTFQSVALILGCTGIVGASLLNILPDDHTPGWPWNVYSASHLAPHGWWTPSPSPSVTLLNLWISYSCCMNDALLPVT

SEQ ID NO: 19958 - protein, 385 aa, Bacillus cereus G9241
MKKIVKFCLMATLSTTIISGCSFEGNNENAKGKGNEKVEVQKTFGKYTMPDEKDKHEGTWLQWPHEYTYGEEYKQEVEPIWVKIASALTEGEKVHIVAYDEEEKERINKLLIDKGLNMDKIDFFIAPTDDVWARDSGPIFVYDNNKNLKILDPAFNGWGKKTPYKNDARIRENVSKQAGIERIDWGKFVLEGGAIELDSNGTALLTRSAVTNKNRNPDLSEKEIEKYISDLGVSNFIWLDGVPNLDITDFHIDGFAKFHNKSTIVTMKEDDLAEWGLSNKDMDTLLDAKNAAGKKYKYEYLPLSKEKVVLENGKTLDYKGSYINYYIGNTVVLVPNYNDPNDKIANDTIQKLYPDRKIVGIDVRELYKNGGMIHCVTQQQPIAMK

SEQ ID NO: 19959 - protein, 366 aa, Candida albicans SC5314
MATFAPHISKITKSSTKFNYGRIAKTFLGVAGSAAIATYFYNNGNPFNNNNNNNNNNEGSKNAAKALFGASAGANVKIAKVPEGKSASDYQKVYNDIATKISENLEFDENAGYYGQLLRLAWHTSGTYDKSDNSGGSYGGTMIFAPEEFDPENAGLQVGREFLMEFLVKYPWISRGDLWTLGGVAAVQESGGPKIEWRPGRVDDNTASKVPPNGRLPDASKDGKYVKDLFARMGFNERETVALLGAHVLGRCHKHNSGYDGPWGPSFNQFTNVFYTTLLGDWHVKKWDGKKQYEDDETGEFMMLPTDMALKEESYFLKYVKMYADDQDLFFKDFAKAFSKLISNGIKYPADSKPILFKTLDEQDEE

SEQ ID NO: 19960 - protein, 339 aa, Neisseria meningitidis
MKNILVTGGTGFIGSHTVVSLLKSGHQVVILDNLCNSSINILPRLKTITGQEIPFYQGDIRDREILRRIFAENRIDSVIHFAGLKAVGESVAEPMKYYDNNVSGSLVLAEEMARAGVFSIVFSSSATVYGDPGKVPYTEDMPLGDTTSPYGTSKSMVERILTDIQKADPRWSMILLRYFNPIGAHESGLIGEQPNGIPNNLLPYICQVAAGKLPQLAVFGDDYPTPDGTGMRDYIHVMDLAEGHVAAMQAKSNVAGTHLLNLGSGRASSVLEIIRAFEAASGLTIPFEIKPRRAGDLACFYADPSYTKAQIGWQTQRDLSQMMEDSWRWVSNNPNGYDD

SEQ ID NO: 19961 - protein, 410 aa, Methylobacillus flagellatus KT
MSKRRVVVTGLGVVSPVGIGVQTSWANLVAGQSGITNITKFDASPFSSQVAGEVKDFDVSQYLPAKEARRMDTFIQYGMAAAIEAVKDAGIEVTEENAERIGVSIGSGIGGLQLIEDTDEIYHESGPRKISPFFIPGTIINMISGNLSIMYGFKGPNVAIVTACTTGTHSIGDAARMIEYGDADIMVAGGAEAPITKLGVGGFAASRALSTRNDDPATASRPWDADRDGFVIGEGAGVLVLEEYESAKKRGAKIYAELVGYGMSADAYHMTAPSMDGPRRSVANALKNAGLNPDQIQFVNAHGTSTPLGDVNETNAIKAAFGDHAKNLVVNSTKSMTGHLLGGAGGLESVFTVLSIYHQISPPTINIFNQDPECDLDYCANEARDLKIDAAVKNNFGFGGTNGSLVFRKI

SEQ ID NO: 19962 - protein, 108 aa, Coffea canephora
GVYTGYSLLATALALPEDGKILAMDINRENYELGLPVIEKAGVSHKIDFREGPALPVLDELIEDDKNHGSFDFIFVDADKDNYLNYHKRIIELVKVGGMIGYDNTLWT

SEQ ID NO: 19963 - protein, 338 aa, Escherichia coli CFT073
MISSGQTGYIPLTSCLKRNTIMTDKLTSLRQYTTVVADTGDIAAMKLYQPQDATTNPSLILNAAQIPEYRKLIDDAVAWAKQQSNDRAQQIVDATDKLAVNIGLEILKLVPGRISTEVDARLSYDTEASIAKAKRLIKLYNDAGISNDRILIKLASTWQGIRAAEQLEKEGINCNLTLLFSFAQARACAEAGVFLISPFVGRILDWYKANTDKKEYAPAEDPGVVSVSEIYQYYKEHGYETVVMGASFRNIGEILELAGCDRLTIAPALLKELAESEGAIERKLSYTGEVKARPARITESEFLWQHNQDPMAVDKLAEGIRKFAVDQEKLEKMIGDLL

SEQ ID NO: 19964 - protein, 187 aa, Pisum sativum
MEFKATELRLGLPGITEEEEKKIIHGSSVVKNNNKRQLPQTSEESVSISKVTNDEHIVESSSAAPPAKAKIVGWPPIRSYRKNSLHEADVGGIFVKVSMDGAPYLRKIDLRVYGGYSELLKALETMFKLTIGEYSEREGYKGSEYAPTYEDKDGDWMLVGDVPWDVTSCKRLRIMKGTEAKGLGCGV

SEQ ID NO: 19965 - protein, 322 aa, Arabidopsis thaliana
MGNCCGNPSSATNQSKQGKPKNKNNPFYSNEYATTDRSGAGFKLSVLKDPTGHDISLQYDLGREVGRGEFGITYLCTDNETGEKYACKSISKKKLRTAVDIEDVRREVEIMKHMPKHPNVVSLKDSFEDDDAVHIVMELCEGGELFDRIVARGHYTERAAAAVMKTIVEVVQICHKQGVMHRDLKPENFLFANKKETSALKAIDFGLSVFFKPGEQFNEIVGSPYYMAPEVLRRNYGPEIDVWSAGVILYILLCGVPPFWAETEQGVAQAIIRSVIDFKRDPWPRVSDSAKDLVRKTLEPDPKKRLTAAQVLEHTWILNAKK

SEQ ID NO: 19966 - protein, 605 aa, Bacillus cereus ATCC 10987
MIFHRGPDDEGYFRDEHVQFGFRRLSIIDLEAGHQPLTYENDRYVIIFNGEIYNYVELREMLLEKGATFATQSDTEVIIALYAHMKEKCVDYLRGMFAFMIWDREEKKLFGARDHFGIKPLYIAQQGDTTFFASEKKSIMHVMEDKGVNPTSLQHYFTYQYGPEPETLTIDVNKIEPGHYFVKEIGKEMEIHRYWKPYFNASSATKEEHIQAIRDVLYDSVKVHMRSDVPVGSFLSGGIDSSIIASIAREMNPNLLTFSVGFEQRGFSEVDVAKETAEKLGVKNHNVFISAKEFMDEFPKIIWHMDDPLADPAAVPLYFVAKEARKHVTVVLSGEGADELFGGYNIYREPNSLKMFSYIPSPGKSVLKALSGALKEGFKGKSFLERGCTPIEERYYGNAKIFREEEKAELMKYYNESVNYMDITKPLYNEIKDYDDVSKMQYIDMFTWLRGDILLKADKMTMANSLELRVPFLDKEVFDVASKIPTEFKIANGTTKAILREAARGIVPDHVLDRKKLGFPVPIRHWLKDEMHDWAINIINESKTEHLIDKQYVLNLLEAHCADKGDYSRKIWTVLAFMVWHQIYVEHKYDTNKFHEETKRAYSLV

SEQ ID NO: 19967 - protein, 324 aa, Shigella flexneri 2a str. 301
MKPSVILYKALPDDLLQRLQAHFTVHQVANLSPQTVVQNAAIFAEAEGLLGSNENVDAALLEKMPKLRATSTISVGYDNFDVDALTARKILLMHTPTVLTETVADTLMALVLSTARRVVEVAERVKAGEWTASIGPDWYGTDVHHKTLGIVGMGRIGMALAQRVHFGFNMPILYNARRHHKEAEERFNARYCDLDTLLQESDFVCLILPLTDETHHLFGAEQFAKMKSSAIFINAGRGPVVDENALIAALQKGEIHAAGLDVFEQEPLSVDSPLLSMANVVAVPHIGSATHETRYGMAACAVDNLIDALQGKVEKNCVNPHVAD

SEQ ID NO: 19968 - protein, 532 aa, Arabidopsis thaliana
MEMKQMKFLTHQAFFSSVRSGDLSQLQQLVDNLTGDELIDESSPCSAVAELMSVQNDAGETAVYISAAENLEDIFRYLIRFSSLETVKIRSKSDMNAFHVAAKRGHLGIVKELLRLWPELCRICDASNTSPLYAAAVQDHLEIVNAMLDVDPSCAMIVRKNGKTSLHTAGRYGLLRIVKALIEKDAAIVGVKDKKGQTALHMAVKGRSLEVVEEILQADYTILNERDRKGNTALHIATRKARPQITSLLLTFTAIEVNAINNQKETAMDLADKLQYSESALEINEALVEAGAKHGRFIGREDEARALKRAVSDIKHEVQSQLLQNEKTNRRVSGIAKELRKLHREAVQNTTNSITVVAVLFASIAFLAIFNLPGQYFTEGSHVGQANIAGRTGFRVFCLLNATSLFISLAVVVVQITLVAWDTRAQKKVVSVVNKLMWAACACTFGAFLAIAFAVVGKGNSWMAITITLLGAPILVGTLASMCYFVFRQRFRSGNDSQRRIRRGSSKSFSWSYSHHVSDFEDESDFEKIIAL

SEQ ID NO: 19969 - protein, 393 aa, Xanthomonas axonopodis pv. citri str. 306
MHAAADRAVNGAARPLAQRSPRFHGVTAMVRSIFSGASPMRKGIALIVGVTGISGYNLANVLLADGWTVYGLARRPLPHDGVIPVAADLLDAESTNNALRGLPITHVFFCTWTRRDTERENVQANGAMMRHLCDALSDAPLQHMALVTGTKHYLGAFENYGSGKAETPFRESEPRQPGENFYYTLEDLLFAHAEQHGFGWSVHRSHTMVGMANGSNAMNMGVTLAVYASLCKHTGQPFVFPGSQAQWNSLTDLTDAGLLGRQLAWAGLSPAARNQAFNTVNGDVFRWRWMWGEIAKFFELDAAPCPAVPEPLEARMSQTAPALWAEVAAQHTLVESDVNRLASWWHTDADLGREIECVNDMTKSRELGFLDFYDSRASFFELFTRLRALRIIP

SEQ ID NO: 19970 - protein, 466 aa, Shigella flexneri 2a str. 301
MDQKLLTDFRSELLDSRFGAKAISTIAESKRFPLHEMRDDVAFQIINDELYLDGNARQNLATFCQTWDDENVHKLMDLSINKNWIDKEEYPQSAAIDLRCVNMVADLWHAPAPKNGQAVGTNTIGSSEACMLGGMAMKWRWRKRMEAAGKPTDKPNLVCGPVQICWHKFARYWDVELREIPMRPGQLFMDPKRMIEACDENTIGVVPTFGVTYTGNYEFPQPLHDALDKFQADTGIDIDMHIDAASGGFLAPFVAPDIVWDFRLPRVKSISASGHKFGLAPLGCGWVIWRDEEALPQELVFNVDYLGGQIGTFAINFSRPAGQVIAQYYEFLRLGREGYTKVQNASYQVAAYLADEIAKQGPYEFICTGRPDEGIPAVCFKLKDGEDPGYTLYDLSERLRLRGWQVPAFTLGGEATDIVVMRIMCRRGFEMDFAELLLEDYKASLKYLSDHPKLQGIAQQNSFKHT

SEQ ID NO: 19971 - protein, 311 aa, Zea mays
MATYFVLNTGAKIPSVGLGTWQADNGLVGDAVYAAVKAGYRHIDCAQAYNNEKEVGFGLRRVLDEGIVKREDLFITSKLWDINHAAEDVPVALNGTLKDLQTDYVDLYLMHWPVRMKKGAGFGPHAVVPSDIPATWAAMEELYDAGKARAIGVSNFSSKKLADLLAVARVRPAVDQVECHPVWRQGRLRAFCASQGIHLSAYSPLGSPGTATVKAGAVLEHPAVVSAAETLGKTPAQVALRWGVQMGHSVLPKSTDEGRIRANLDVFGWSLPEDLLAKFSEIEQERLIRAGFFVDPDGVFKSIEEFWDGEI

SEQ ID NO: 19972 - protein, 397 aa, Neisseria meningitidis Z2491
MYRHIEYYPGDPILSLVETFKNDPRPEKVNLSIGIYFDDEGKMPVLESVSRAETARAAAPAPSPYLPMEGLDTYRSAVQHLLFGKDNPALAQGRIATVQTLGGSGALKVGADFLHRWFPEARAYVSDPTWDNHCGIFEGAGFEVGTYPYYDPATVGVKFDEMTAFFNTLPENSVLILHPCCHNPTGVDMSEQQWDEVLHIIKTRKLIPFMDIAYQGFGGDLDSDAYAVRKAVEMELPLFVSNSFSKNLSLYGERVGGLSVVCPNKEEADLVFGQLKFTVRRIYSSPPAHGAYIAADVMNSPELYALWQNEVYMMRDRIRAMRQKLYDVLTAQIPDRDFTYFIKQRGMFGYTGLSVEQVRRLRDEFAVYLLDSGRMCVAGLNTSNTDYVARAFAEVLK

SEQ ID NO: 19973 - protein, 877 aa, Frankia sp. CcI3
MTASVSPPSPSRHSHSPPMSGSTAKNVRRTRGDHNPLRPDLQASLVVFVVALPLSLGIAVASGAPVAAGLLAAVIGGVVAGALGGAPLQVSGPAAGLTVIVADLVHTYGWRVTCLITAGAGILQILLGLCRVARASLAVSPAIVHGMLGGIGLTIVLGQFHVVLGGQAESHAWENVAAVPEAIIDPHGFATLVGFVTIATILLWPRLPKRLPNAVRAIPAYLAAVVTGTLLAAVAGFDLPRVDLPSSLFDAVALPGLPHGDWSGIALGVVTVAIVASVESLLSAVAVDQLATTRGWRGPRVDLDRELLGQGSANLVSGLAGGLPITGVIVRSSTNVASGGRTRKSAVLHGVWVLLFAVFLGRMVEWVPLSALAGLLVVVGARLVNVAHLRHVRRHGELPVYLVTIVGVVALDLLQGVALGLLTALALVLRRVLWSSVRLVRTGELWQVEVEGTLSFLSLPRLARILGRIPAGAPVSIELIVDYLDHAAYEHLRGWCANHEASGGTVSVDEIGQVWFRRPAEVAEQRRRTVVPHLPRWFAPWSQWQELELASSSSDSPSSDSPSSDSPSSGSRSSDSQPAGVTPPAIHPVQGPDPAASVPAQASPDRTFDHVSTMLFGVNEFHRRAAPLLRGTFDALAGGQQPGALFLTCADSRIVPNIITSSGPGDLFTIRNVGNIVPVDDPAGSDPDAPLRRSGDLSVTAALDYAVDVLRVPSLVVCGHSGCGAMQALLSGTLDGAPDSALAGWLSHAAASLERTPPAGTEDLPPVERLGRANVAQQLENLRAHPAVRRALARGTLELVGLYFDIADARIWVLEESTGRFVDPMDALPTAVIGTGSRRRWDAPVRVPAPMVAVGAGPADEQPPPAGRRARWLGLPR

SEQ ID NO: 19974 - protein, 680 aa, SYNECHOCOCCUS SP. WH 8102
MTTPATADWALPQPGGPDPGSDGIWRRIVAWWAEFSLQTKLLAVATLVVSLVMTGITFLALNGIQRDAVMNDTRYARDLGLLLAGNVTELVAQEQDRELANVAEKFWRSSRSVRYIFFADPDGVVYLGIPISGAAAGGDGDLRLNRRLELPDELRRRPQNPLVRQHLTPQGRVTDVFVPLIRNGRYYGVLGLGVNPNETALASAALTREVTVAVFISIWVLVILGAVFNALTITRPVKELLRGVRSISLGNFQARIDLPVGGELGELLTGFNAMASQLEAYDEANIEELTAAQVKQQSLIATMADGAILLDEQGRIVLANPTARRLFRWEGRKLEGQELVAELPDLLAIELQAPLDLLLISGADSEDLRCSVGEPSRTLRIVMQAVRDASGESLKGIAVTVQDLTREVELNAAQSRFISNVSHELRTPLFNIKSYVETLHDLGDQLSPEEHKEFLGVANDETDRLTRLVNDVLDLSRLESGRAVQFEAMNLLPAMEQTLRAYRLNADDKHVKLELDAPEDLPEVLGNWDLLLQVLDNLVGNALKFSRSGGTLALRAYPWPDTCPVGSPNDEQAGPSCALSSPLPRLRVEVADTGCGISAADQERIFDRFFRVENAVHTEVGTGLGLSIVRGILEKHGTKVSMASEPEVGTTFWFDLPLGQADVDELKLQAERRSTAEQLA

SEQ ID NO: 19975 - protein, 268 aa, Photorhabdus luminescens subsp. laumondii TTO1
MSVPAFGLGTFRLKDDVVITSVKNALELGYRAIDTAQIYENEAAVGQAIEESGVAREDIYITTKIWTENLSKEKLIPSLKESIAKLRTDYVDLTLIHWPSPHNVVSVDETMNALLDAKNMGLTREIGVSNFTIDLMQQAIDAVGAEHITTNQIELSPYLQNCHVTAWAKDHGIHITSYMTLAYSKALQDEVIRRIATKHQATPAQVILSWAMALGYSVIPSSTKRENLQSNLRASVLKLDADDMAAIATLDHNERLVNPEGLAPQWDN

SEQ ID NO: 19976 - protein, 454 aa, Schizosaccharomyces pombe
IISVGVVSGRNIWKTDFQKATAIIEKAISAVGSERVQVASSSSILHIPHSLSGEDQINPEIKRWFAFAVEKCAELAILTKAANDGPASVRAELEGNAADCKARAESPITNVESVRERQSKVTPQMHGRKSPFETRYAKQQASLKLPLFPTTTIGSFPQTKEIRVTRNRFAKGLISQEEYDAFIRKEISDVVKFQEEVGLDVLVHGEPERNDMVQYFGERMEGFVFTVNGWVQSYGSRGVRPPIIVGDVYRPAPMTVKESQYAQSITSKPMKGMLTAPITILRWSFPRDDVHDSVQAQQIALGLRDEVLDLEKAGIKVIQCDEPALREGLPPRRAEWDEYLKWAIDAFRLATAAVQDDTQIHSHFCYSDFNDIFDAIQRLDADVVSIENSKSDMKLLNVLSRYTSCIGPGLFDIHSPRVPPVSEFKERIDAIVKHVPKDHLWLNPDCGLEDPRMA

SEQ ID NO: 19977 - protein, 549 aa, Gloeobacter violaceus PCC 7421
MTKYVFVTGGVVSSIGKGIVAASLGRLLKSRGYSVTILKLDPYINVDPGTMSPFQHGEVFVTNDGAETDLDLGHYERFTDTDVSKLNNVTTGSIYQSVINKERRGDYMGGTVQVIPHITNEIKERIRRVAHDTNPDVVIVEVGGTVGDIESLPFLEAIRQFRKDVGRENVLYIHVTYILHIPTAGEMKTKPTQHSVKELRSIGIQPDILVCRSDRPLSVGIKDKISEFCDVPVRAVITCQDAQTIYAVPLNLEREGLAHQAITLLGLEQRQPDLRDWEILVDRICNPSRAVTIAIVGKYVRLSDAYISVVEALRHAAVALDAEVKVEWVSAEAVEERGAGYFLNNVDGAVVPGGFGSRGIDGKVSAIEFSRGHRLPFLGLCLGMQCSVIEWARHTAGLAANSTEFDPQTPNPVISLLPEQADVVDLGGTMRLGLWPCRLQEGTLAHRLYGETLVYERHRHRYEFNNAYRKAIIEAGFQISGASPDERLVEIIELADHPYFIATQFHPEFKSRPNKPHPLFFGLVRAALERKETERLPASPAPVPLPSAV

SEQ ID NO: 19978 - protein, 394 aa, Staphylococcus aureus subsp. aureus Mu50
MQEAYIVAYGRSAAAKAKQGALFHERPDDVAAKVLQGVLKRIDGKFNKNMIEDVIVGTAFPEGLQGQNIARTIALRAGLSDTVPGQTVNRYCSSGLQTIAIAANQIMAGQGDILVAGGVELMSAVPMGGNEPTNNPTLQYDDIGASYPMGLTAENVASQFDVSREDQDAYAVRSHQRAYDAQRDGRFKDEIIPIRVNSVEYTNAGPKVHTNIFDQDEFIRPDTTMEALAKLRTVFKADGTVTAGTSAPLSDGAGFVVLMSGDKVKELGVTPIARFVGYKAVGVDPKIMGIGPAYAIPEVLSLSNLSVEDIDLIELNEAFASQTIASIKEVGLDISRTNVNGGAIALGHPLGATGAMLTARLLNEMGRRPDSRYGMVTMCIGVGMGAAAIFEYVR

SEQ ID NO: 19979 - protein, 463 aa, Triticum aestivum
NEVAEVLDTFHVLAELPSDSFGAYVISMATAPSDVLAVELLQRECHVKKPLRVVPLFETPGALEAAPAALARLFSVEWYRNRINGKQEVMIGYSDSGKDAGRFSAGWQLYKAQEELIKVAKAFGIKLTMFHGRGGTVGRGGGPTHLAILSQPPETIHGSLRVTVQGEVIEQSFGEEHLCFRTLQRFTAATLEHGMHPPIAPKPEWRALMDEMAVVATEEYRSIVFQEPRFVEYFRLATPELEYGRMNIGSRPSKRKPSGGIESLRAIPWIFAWTQTRFHLPVWLGFGAAFKHVLQKDIRNLQALKEMYNEWPFFRVTIDLVEMVFAKGDPGIAALYDKLLVSDDLWPFGERLRANYEETKQLLLQVAGHKDLLEGDPYLRQSLRLRDSYITTLNVCQAYTLKRIRDPSFHSQPGPHLSKEIMESGKLAAELLKLNPTSEYAPGLEDTLILTMKGIAAGMQNTG

SEQ ID NO: 19980 - protein, 666 aa, Bacillus cereus E33L
MSHSIEQLSINTIRTLSIDAIEKANSGHPGMPMGAAPMAYTLWTQFMKHNPNNPTWFNRDRFVLSAGHGSMLLYSLLHLSGYDVTMDDLKNFRQWGSKTPGHPEYGHTAGVDATTGPLGQGIATAVGMAMAERHLAAKYNRDAYNVVDHYTYAICGDGDLMEGVSAEASSLAAHLQLGRLVVLYDSNDISLDGDLNRSFSESVEDRYKAYGWQVIRVEDGNDIEAIAKAIEEAKADEKRPTLIEVRTTIGFGSPNKSGKSASHGSPLGVEETKLTKEAYAWTAEQDFHVAEEVYDNFRKTVQDVGETAQAEWNTMLGEYAQAYPELANELQAAMNGLLPEGWEQNLPTYELGSKAATRNSSGAVINAIAESVPSFFGGSADLAGSNKTYMNNEKDFTRDDYSGKNIWYGVREFAMGAAMNGIALHGGLKTYGGTFFVFSDYLRPAIRLAALMQLPVTYVFTHDSIAVGEDGPTHEPIEQLAALRAMPNVSVIRPADGNESVAAWRLALESTNKPTALVLTRQDLPTLEGAKDDTYEKVAKGAYVVSASKKETADVILLATGSEVSLAVEAQKALAVDGVDASVVSMPSMDRFEAQTAEYKESVLPKAVTKRFAIEMGATFGWHRYVGLEGDVLGIDTFGASAPGEKIMEEYGFTVENVVRKVKEML

SEQ ID NO: 19981 - protein, 494 aa, Euglena gracilis
MSATQLLGGYQTISERTAPQNKLAVVGAVAVIAVASGVAAGYALNLSMPPLLPPCAPLAHGHLSRTTWHRPTPAAVAFASASEGAQTFVAPAAQSSNTFATSSVAASIGMVMGAGAVLLARMNQKPVAMNAWTGSVYGVLSQLWRSHGPSMLMSVRQDHLHPWQGILAADESRPNKTCGARLKSIGVENTEENVHSSRSCVHRTWLQRGNILGVIMYEETLYQKDKNGKPFVQIINEAGAVAGVKVDTGIAPLPGADDEGYTMGLDGLRERCQEYYRQGARFAKWRAVLRIDSKGLPSDRSILANATGLAQYAAICQECGLVPIVEPEILMDGDHDIETAAAAAERVLVAVYDALATQGVLLEGTLLKPNMVTPGVDSGIKATPETLPIFTCALLATVPAAVAGISFLSGGSSEEDASLNLNAINAIPYERKPWALTFSFGRALQASTLKTWGGKDENIARLRRCSLSVPSQWPGKYQGSGQAGESLFVKGYKY

SEQ ID NO: 19982 - protein, 435 aa, Nostoc punctiforme PCC 73102
MTTFDIGSPLIAIAQKTRKAASKLAILSTEAKNQAIIAIAQALESAKDEILQANIADCEAANAEGIPKPLYKRLQLDEHKLRDAIVGVQDVGKLDDPVGKVQIHRELDTGLILKRITCPLGVLGIIFEARPEAAIQIASLAIKSGNGVILKCGKEAVRSCEAIVKAIKQGLSHTAVNPDTVQLLTTREETLELLKLDKYVDLIIPRGSNSFVRFVQENTRIPVLGHADGICHLYIDKAADISKAVPITVDAKAQYPAVCNAIETLLVHQSIATEFLPKVADALQERHVELRGDKRTLKILPNIVSATEIDWETEYSDYILSIKIVDSIEDAIAHINEYGSRHTDAIITEDSTSVETFFGLVNSANIFHNCSTRFADGFRYGFGAEVGISTQQMPPRGPVGLEGLVTYKYQMTGDGHIVATYTGANAKAFTHRDLV

SEQ ID NO: 19983 - protein, 339 aa, Rhodopseudomonas palustris CGA009
MRVYYDRDADLNLIKGKKVAVIGYGSQGHAHALNLKDSGVKDVAIALRKGSASAKKAENAGFKVMEVAEAAKWADVMMMLTPDELQADIYREHLHDNMKQGAALLFAHGLNVHFNLIEPRADLDVLMVAPKGPGHTVRSEYQRGGGVPCLIAIHKDASGNAHDLGLSYASAIGGGRAGIIETTFREECETDLFGEQVVLCGGLVELIKAGFETLVEAGYAPEMAYFECLHEVKLIVDLIYEGGIANMNYSISNTAEYGEYVTGPRIVTPETKAEMKRVLADIQNGIFTRNWMLENKVNQTSFKATRAKLAQHPIEEVGAKLRDMMPWIKKGALVDKSKN

SEQ ID NO: 19984 - protein, 479 aa, Desulfitobacterium hafniense DCB-2
MKKEIRESLFIDGEWQEAINKEVKGVINPATGKVFCEIGYGEVDDALSAVDAADRAFGAWSKTSVRERADILNRTADLLRQRADHIGLILAAESGKPVPQAVGEVKFSAEYFQWFAEEIRRPYGQSIPSDAANKRHHVYTQPAGVALCLSPWNFPVSIQARKLAPALAAGCTVVARGSEVAPLSLIELFKCLQDAGIPKGVANSIQGPAAVTTAAMMKHPAVRVVSFTGSTPVGRSLMRQAADGVIRLALELGGNAPFIVFADADIEKAVEGAMIAKFRNNGQSCIGANRFYVHERIYDKFTALFAEKILRMKIGNPTEEVDLDLGPMVNLKDKARIESLIREAEALGAKPLVPKAEVPAEGYYVPPVILENVPESAALAREELFAPVAPLFKFADENEVIEKANSSDMGLAAYVYTNDLSRSIRVTESLKFGIIGLNNALPSVAYAPMGGVKQSGIGREGARIGLEEFMDVKYVATEI

SEQ ID NO: 19985 - protein, 325 aa, Listeria monocytogenes str. 1/2a F6854
MNLKKHSERKFDLITVGRACIDLNAVEYNRPMEETMTFSKYVGGSPANIAIGTAKLGLKVGFIGKISDDQHGRFIEKYMRDLAINTDGMVKDTEGRKVGLAFTEIKSPDECSILMYRENVADLYLTPEEISEDYIKEARVLLISGTALAKSPSREAVLKAVSLARKNDVVVAFELDYRPYTWKNSEETAVYYSLVAEQADVIIGTRDEFDMMENQVGGKNEATKAYLFQHQAKIVVIKHGVEGSFAYTKAGETFQAQAYKTKVLKTFGAGDSYASAFLYGLFSDESIETALKYGSAAASIVVSKHSSSDAMPTADEIKALIAQAE

SEQ ID NO: 19986 - protein, 165 aa, Oenothera elata subsp. hookeri
MFPMVTGFMNYGQQTVRAARYIGQGFMITLSHANRLPVTIQYPYEKLITSERFRGRIHFEFDKCIACEVCVRVCPIDLPVVDWKLETGVRKKRLLNYSIDFGVCIFCGNCVEYCPTNCLSMTEEYELSIYDRHELNYNQIALGRLPMSVIDDYTIRTILNSAQIK

SEQ ID NO: 19987 - protein, 587 aa, Cucumis melo
MAKVADKPFFPKPFLVFFVLSIIFGFGITLSEAGFPKIRHYKWEVEYMFWSPDCVENIVMGINGQFPGPTIRANAGDMVVVELTNKLHTEGVVIHWHGILQRGTPWADGTASISQCAINPGETFTYRFVVDKAGTYFYHGHLGMQRSAGLYGSLIVDPQEGTSEPFHYDEEINLLLSDWWHQSVHKQEVGLSSKPMRWIGEPQSILINGRGQFDCSIAAKYKNGLKQCELSGKEQCAPFILHVHPKKIYRIRIASTTALASLNFAIGNHKLLVVEADGNYVQPFSTSDIDIYSGESYSVLITTDQNPSENYWVSIGVRARLPKTPPGLTVLNYLPNSVSKLPISPPPETPDWEDFDRSKNFTFRIFAAMGSPKPPVRYNRRLFLLNTQNRINGFMKWAINNVSLALPPTPYLAAMKFRLSTAFNQNPPPETFPIDYDINNPPRNPETATGNGVYKFNMGETVDVILQNANMLNANTSEIHPWHLHGHDFWVLGYGEGKFSAAEDGRKLNLKNPPLRNTVVIFPYGWTAIRFVADNPGVWAFHCHIEPHLHMGMGVIFAEGVHKVGMIPPNAMACGSTAMIKNYPRKP

SEQ ID NO: 19988 - protein, 808 aa, Magnaporthe grisea 70-15
MSPPNPRKRAAPGAIPAVQIPTTVQQYQSPYATPLDQVSRWNGAEVYATDPITPGPKNIPQFNMTEPHSSYPNATTHQSYQHQAIATPGPTNAIARRPAGSSRALVTRQQYDGLSTEPWPSFSDETALMPASGVVNPLDENDNIALLEERAARAKRDAQANRKQIPPFVQKLGSFLNEEKNTDLIRWSQKGDSFIVLDEDEFAKTLIPELFKHNNYASFVRQLNMYGFHKRVGLSDNSMKASERKNKSPSEYYNPYFQRGHPNLLWLINKPKSGNSKKRSAKNNDGAEVESDEDATPTVEDINGAGYVGAAQNSSRSGGPAQGDPGSQALQKKDFQVVKDQLNQLQTQQRAISNMIQRLRSDHTALYNQALAFQNMHERHENSINAILNFLANVFRKSLEEQGGNSNHTMQDLLASIIPNGGSGSQMHKGSVVDLGDFVQQQSVDHSNVADNTPKRGQRLLLPSRGGRASATSTAAKSPSASYATSPRGQMGSVTELFDNSPNEVTSPPDYLSNDLRQSPQQMMRIIDATNAAGATADIDLPDIAAKTPVTLSSDQRNQMLNLMASQATAPQSTSSIPATASPLPATTTATSPQPIPAMQQRQQQHRATPPPVPAQAASGMVSSPVNSALGASPPRSLSPLMSSMPPPPSLHDITMTQEELDSLQRLQDEQKHKIDEISHFLAPLSPSGRVPGVDEAGNPTTVSPEASGSYFPDMTDNMDIEQFLDSSAFGAFDASGTGGSADDFNFSLDANYDGSTPVAAYSLAAPITESHSNTPSSAATEEYVIRKDFAENDGSAVGPDAKRRRMG

SEQ ID NO: 19989 - protein, 145 aa, Bacillus cereus ATCC 10987
MRNLFPEITKRQNGIFDFGPSLLEGMTDAFFKPMNMDTFKVDVHEQSDKYTVKADLPGFQKENIQVEFEQDVLTIQATNHNEVEEKNENGIYIRKERSIGSVTRRFNFQQVEEENVKANYKDGVLTIELPKLKEEKNSKTTINIE

SEQ ID NO: 19990 - protein, 352 aa, Pseudomonas aeruginosa PAO1
MKALRWHAARDLRLSELERQAPRPGEVELEVAYCGICGSDLHEYQSGPHSIPQAEAHPLSGCRAPLTLGHEFCGVVAALGPGVEGPRIGDRVAVEPEYRCGECRYCREGRYNLCESMGFIGLMGDGGFAERARVPAYMLHRLPDAVGFRQAAVLEPAAVALHALRRSSLAPGQRCAVFGLGPIGLLLVMLARLRGIEDIAAVDVSPERLALAGEFGASRALDARDGDTAARLREGGALDCAFEAAGSQASLDAALASLRKGGELVLVSLMGEVRLDAFDLVNRELRLLGSVGYRDAYPELIALLADGRLDLARAVTRSVPLEQAVEHGFEALLRDKSQLKVLVNPNPALADA

SEQ ID NO: 19991 - protein, 213 aa, SYNECHOCOCCUS SP. WH 8102
MRRLLLALLIGMLTLPSAVMADTETAVFAGGCFWCLEHDLEDHPGVLEATSGYSGGHVDNPTYRQVSAETTGHQEVVEVRFDPTEITYGTLLRSYWRNVDPLDGGGQFCDRGDSYRPVIFTADAAQAREAEASAQAAARELGQPRSALKVELRDAARFWRAEDYHQNYAELNELKYNFYRFSCGRDRRLDAVWGASARSGDAWSDASQSDRNP

SEQ ID NO: 19992 - protein, 828 aa, Frankia sp. CcI3
MSAREGQVPAGGGGRGFADRAATVAVTTPDGSVPWDVANSRATPLLDSDPVTVGTYQLVARLGQGGMGIVYLGRSRDGRPVAVKVVRTDLARQPEFLARFRREAEVAQRVARFCTAEVLEVDVEADRPYLVTEFIDGPTLADAIAANGPMAEADLERLAISVAAALTAIHAAGMIHRDLKPSNVLLSRLGPRVIDFGIARAMDSTTSLTTSTGLIGTPAFMAPEQARGALVTAAADIFAWGGVVTFAGTGIGPFGKATTPVLLYRAVHEAPKIDGLPDGLRSIVAKTMSKEPADRPTASDLYQSLLGLSNVDEAVRGEAGPTAVTVVTDPPVKPPARMDAGASRTPSDSVGSVGSANPAMPPPSDDILSPLDLSPLDRPAPGRGYPEGGEPKQQQRQRRGRWQRRTVVSLVASLCAVAVAVTATLMFVTHKDPASVPESIEVSRRLASEAAAASTTQPQLARQLALAAYRVEPTEEAQRSLIENFGGVEINTLVGHTERVIGVRFSPNGRMLVTGSDDSTVRLWDISNPMATRPLAVIPGDSGTFLQGGFSADGRLLSTSTDDHIVRLWDISVPERPRSLAVLRDVNNSVAFAVGGKTMATAGTDNTAKLWDITDPHQPRLAATLVGHTDWVNTVAFSPDGRMLATGSHDRTIRLWDVSTPTRPTPLAILNGHENAVLGLAFRPDGRILGSTSADRSARLWDIATPTEPKMLYTFTDRSDWVSSVAFRVDLHLMGTTARKAARLWDISDPRNPRPVGGLLGHTATVRRVQFSPDGTLAATSGDDNTARLWDIDPAHIAKRACTDPTAVMSEAEWERHAPQIPYPSRCP

SEQ ID NO: 19993 - protein, 497 aa, Glycine max
MATRVIPPRILKNLRYNTTTKPLNAAQPSISPAIASPSLFERSPSPPAADVIPASAAGTAALNLDDAERLFASVSTKRLLRSSAVLHATAVGPMVDLGMWMMKSRVFQSGVLKDLVMAATKETFFSHFCAGEDAAAAGRSISALKEAGLRGMLVYGVEDAHENDGCDRNLKGFLHTVDVSKSLPPSSVSFVIVKITAICPMTLLERMSDLLRWQQKDPSFVLPWKQDSLPIFAESSPLYHTQKRPEPLTPEEESDLQLANQRLLELCQRCEEANMPLLVDAEHTTVQPAIDYFTYSSSIRHNKDDNPIVFGTIQTYLKDAKERLLLTTKAAEKMGVPLGFKLVRGAYMSTESKLAESFGYASPIHNTIQETHNCFNGCSSFLLEKIANGPGSISVVLATHNIESGKLAAAKAYELGVGKVNHKLEFAQLYGMSEALSFGLSNAGFQVSKYMPFGPVDMVMPYLLRRAEENRGLLAASGFDRQLMRKELGRRLKAAMF

SEQ ID NO: 19994 - protein, 334 aa, Gloeobacter violaceus PCC 7421
MTMVQQQLPPTRYHIDRPEALVLYRDMVLGRTFEDTCAQMYYRGKMFGFVHLYNGQEAVSTGVIKAMRPDDYVTSTYRDHVHALSKGVPARSVMAELFGKATGCSKGRGGSMHLFSAEHNLLGGFAFVAEGIPIATGAGFTAVYKGTDQVSACFFGDGATNNGQFFECLNMAALWNLPVLYVVENNLWSIGMYHHRASSVIEIYKKADAFGIPGVRVDGMDVLAVRAVAKEAIERARAGGGPTLIECTTYRFRGHSLADPDELRDPAEKEFWRKQDPIPRLAAFVREQELASAEELKAIDQEIRAEIDDAVLFAEESPEPPIDELYRFQFAEDA

SEQ ID NO: 19995 - protein, 554 aa, Shewanella sp. MR-4
MDNAIKTPVEMLAHWANTRGDEIYLRQPIKGQYLDFTWNEVQEKVQQLAGALRHLGLEPGDKIAVLSKNCAEWFITDLALMHGGYISVPIYPTANTDTIRYVLQHSGAKAIFLGKLDHWADQEAGVGGELLRLAMPYETMPAQYQWEQLLKMGNPLIEAPLPELDQTMTLIYTSGSTGQPKGAIQTFASYGWTCQAVVRDLRTNGDDRLLSYLPLAHITERVAIEGSSFYSGSTVAFVESLDSFVADVQRAKPTVFFSVPRLWSLFQKNIIDKIGVGKLNLLLKIPLISSLVKHKIHKGLGLNHCRLLGSGSAPIPPSLIHWYHSIGLDICEAWGMTENCAYSIINYPFDVRKIGTVGKPVQDCQIRQGEDGELLLKSPGLMTAYYQQPEATAAAFDPDGFFHTGDLCAIDADGCVTITGRVKDNFKTAKGKYVAPVPIERKLAQDPHVELICVIGSGLPHPVALVQLSEGATLQAREEVRASLKATLDSVNPHLESHEHVDAIVVVNEPWTIENDVLTPTLKIKRHVLEKAFSERVDGIRGAQVRWEDELTVK

SEQ ID NO: 19996 - protein, 476 aa, Arabidopsis thaliana
MEDGVTPPLLITEKDTTMIRVKEEVKKQLWLSAPLIGVSLLQYSLQVISVMFVGYLGSLPLSAASIATSFASVTGFTFLLGTASALETLCGQAYGAKLYGKLGIQMQRAMFVLLILSVPLSIIWANTEQILVLVHQDKSIASVAGSYAKYMIPSLFAYGLLQCINRFLQAQNNVFPVFVCSGITTCLHLLLCWLFVLKTGLGYRGAALAISVSYWFNVILLSCYVKFSPSCSHSWTGFSKEAFQELYDFSKIAFPSAVMVCLELWSFELLVLASGLLPNPVLETSVLSICLNTSLTIWQISVGLGGAASIRVSNELGAGNPQVAKLAVYVIVGIAVAEGIVVVTVLLSIRKILGHAFSSDPKIIAYAASMIPIVACGNFLDGLQCVLSGVARGCVWQKIGACVNLGSYYLVGVPLGLLLGFHFHIGGRGLWLGIVTALSVQVLCLSLVTIFTNWDKEAKKATNRVGSSDDKDGDVQ

SEQ ID NO: 19997 - protein, 441 aa, Lactobacillus acidophilus NCFM
MDTKEIKNIIIGFGKGGKTLAKFLASKNEEVLVIEKSNQMYGGTCINIACLPSKRLIIEAANGIEFTDAINSKNEMTSFLRNANYHMLADEKTVTVLDGTAKFLSDHEIEVTKNDGTKEKYSGKRIFINTGAIPNYAPIPGLIESNKVINSTEAMDQTEMPKKLTIIGSGYIGLEFASMFANYGTKVTVLDNHRDFLPREDNDISEMIKQDLENTGIKFELGVKINRVEDDTVFYEKDGQNLSIKSDRILAATGRKPNTQNLGLENTNIELTDNGAIKVNDHLMTTAQNVWAIGDVKGGPQFTYISLDDYRIIKDQLFGDGKRVISDRINIPYSVFITPALSQVGLNEKQAKKQEINYELKKLPVAAIPKARVAKDTRGLFKALVDPTTNQILGATLYGIESYELINQISMAMKAKIPANILRDQIYTHPTMSEAFNDLFK

SEQ ID NO: 19998 - protein, 64 aa, Triticum aestivum
  misc_feature (21)..(21): Xaa can be any naturally occurring amino acid
  unsure (1)..(64): unsure at all Xaa locations
MVYALAACPSQMRFPMPAERXPHNHCWMVLPQRPYNWREHAEPSQKTFVRTVIAMSNSVLVTIC

SEQ ID NO: 19999 - protein, 766 aa, Beta vulgaris subsp. vulgaris
AGGKQILSDGPFSEVLRSAQEAIVVPPFVAIAVRPRPGVWEYVRVNVSELNVEQLTVSEYLHFKEELVDGKADDHYVLELDFEPFNESVPRPTRSSSIGNGVQFLNRHLSSSMFCNKDCLEPLLDFLRVHKHKGVVMMLNDRIQTIQRLQSALSKAEDYLIKLPADTPYSEFEFVIQGMGFERGWGDTAERVLEMMHLLLDILQAPDPSTLETFLGRLPMVFNVVILSVHGYFGQAHVLGLPDTGGQIVYILDQVRSLEHEMLQRIKKQGLDVTPRILIVSRLIPDAKGTTCNQRMEKVSGTEHASILRVPFRSEKGILRKWISRFDVWPYLETFTEDAAGEIIGELQGRPDLIIGNYSDGNIVASLLSHKMGVTQCNIAHALEKTKYPDSDIYWKRFEDKYHFSCQFSADLMAMNHADFIITSTYQEIAGTKNTVGQYESHKAFTFPGLYRVVHGIDVFDPKFNIVSPGADMAIYFPFSEKDVTCLTSLHRLIEQLLFKPEQNEEHIGVLDDTSKPIIFSMARLDRVKNITGLVECYGKNAKLRELANLVVVAGYNDVKKSNDREEIAEIEKMHRLIQEYNLRGQFRWIASQTNRVRNGELYRYICDKGGIFAQPAFYEAFGLTVVEAMTCGLPTFATCHGGPAEIIEDGVSGFHIDPYHADQAEKMTEFFVKCREDPNYWTKISAGGLLRIKERYTWQKYSERLMTLAGVYGFWKYVSKLERRETRRYLEMFYILKFRDLANSVPLATDEEPSTTDAVATFRGP

SEQ ID NO: 20000 - protein, 395 aa, Vibrio vulnificus CMCP6
MNSHLSQPIYIHGCGFHSALGATAEQIHHALQHNHSVQMQQAVDQLNTGTATIVGRVSDTLPELPSSLREYDSRNNRLALSALQQIEPAIQEAIRQYGANRIAVVIGTSTSGIADGENAFEQKLSQEHFPSDYHYRKQELGNVSDFIADYFQLTGPCYAISTACSSSGRVFISAKRLLLSGMADAVIVGGADTLCRLTLNGFNGLEALSNQHCQPFSADRSGINIGEGAAFMLLSKAPSEIALLGCGDSSDAHHISAPHPEGNGAEEAMEKALLDANLKPEQIGYVNAHGTATPLNDSMESKAIFRLFGQSVPVSSTKHLTGHTLGAASAVEAAIAWHILKYNLDLPQQGCQNKADDIEVTLVEQPMKLAHKAILSNSFAFGGNNISLIFGYPHE

SEQ ID NO: 20001 - protein, 229 aa, Candida albicans
MQIFVKTLTGKTITLEVESSDTIDNVKSKIQDKEGIPPDQQRLIFAGKQLEDGRTLSDYNIQKESTLHLVLRSRGGMQIFVKTLTGKTITLEVESSDTIDNVKSKIQDKEGIPPDQQRLIFAGKQLEDGRTLSDYNIQKESTLHLVLRLRGGMQIFVKTLTGKTITLEVESSDTIDNVKSKIQDKEGIPPDQQRLIFAGKQLEDGRTLSDYNIQKESTLHLVLRLRGGF

SEQ ID NO: 20002 - protein, 76 aa, Arabidopsis thaliana
MKVSPRLNSALLLLFMILATVMGLVTVEARTCETSSNLFNGPCLSSSNCANVCHNEGFSDGDCRGFRRRCLCTRPC

SEQ ID NO: 20003 - protein, 409 aa, Vibrio vulnificus CMCP6
MNRRVVVTGMSGVTAFGNDWQSVEPKLRALENATQFMENYQQYEGLNTKLAAPVVDFELPSHYKRKQVRGMGRVSKLATVATENALRQAGLIGEDVLTNGQTGIAYGSSTGSTDAIGAFGVMLNDKTTKAITATTYVQMMPHTTAVNVGLFFGLRGRVIPTSSACTSGSQAIGYAYEAIKHGYQTVMVAGGAEELCPTESAVFDTLFATSLKNDQPKTTPSPYDKDRDGLVIGEGAGTLVLEEYEHAKARGATIYAEIIGFASNCDAAHVTQPQMETMQICMEMALQNADLHPKHIGYVSAHGTATDRGDIAESNATQNAIGKVPISSLKSYFGHTLGACGAIEAWLSIEMMNSGWFSPTLNLTNLDPDCGDLDYIAGAGREMDIDYMMSNNFAFGGINTSLIFKRVRD

SEQ ID NO: 20004 - protein, 380 aa, Streptococcus pneumoniae R6
MKNEMLALILAGGQGTRLGKLTQSIAKPAVQFGGRYRIIDFALSNCANSGIHNVGVVTQYQPLALNNHIGNGSSWGLDGINSGVSILQPYSASEGNRWFEGTSHAIYQNIDYIDNVNPEYVLILSGDHIYKMDYDDMLQSHKDNNASLTVAVLDVPLKEASRFGIMNTDANNRIVEFEEKPAQPKSTKASMGIYIFDWQRLRNMLVAAEKSKVGMSDFGKNVIPNYLESGESVYAYEFSGYWKDVGTIESLWEANMEYISPENALDSRNRQWKIYSRNLISPPNFLGANAHVEDSLVVDGCFVDGTVKHSILSRGAQVREGAEVLDSVIMSGAIIGQGAKIKRAIIGEGAIISDGVEIDGTDEVQVVGYNEVVGVATDED

SEQ ID NO: 20005 - protein, 165 aa, Triticum aestivum
  misc_feature (92)..(92): Xaa can be any naturally occurring amino acid
  misc_feature (124)..(124): Xaa can be any naturally occurring amino acid
  unsure (1)..(165): unsure at all Xaa locations
MDHRKQQQQRSPSPRSGGSSGKHGGKGGSKAGGGGSKKPIKVVYISNPMRVKTNAAGFRALVQELTGRHADPSKYNTDDGFDDGGTAQELSXAPEGSAAGSTPDAGAPGPAATGGQPELAGGGXGDGDGDREDEEDIFRSQLLDNDYAVFSPPPLLYDYPDSNQV

SEQ ID NO: 20006 - protein, 379 aa, Streptococcus pneumoniae R6
MKIDKYSAILGNTVGFHNMSTLTDHRPVASLPFGGKYRLIDFPLSSLANAGVRSVFGIFQQDNISSVFDHIRSGREWGLSTLLSHYYLGIYNTRVESSTVGKEYYQQLLTYLKRSGSNQTVALNCDVLINIDLNQVFHLHSTTKEPITVVYKKLAKKDISEVNAILDVDETDHVLSHKLFDSKSTAETFNMSTDIFVVDTPWLIEHLEEEAKKEHPEKLRYVLRDLAVKEGAFAYEYTGYLANIHSVKSYYQANIDMLESQKFYSLFSPNQKIYTKVKNEEPTYYANTSKVSTSQFASGSIIEGQVANSVLSRNIHVHKDSLVKDSLLFPRVVIGEGAQVEYAILDKGVEVEPGVVIRGTAEHPVVVKKGAKVTEDIHS

SEQ ID NO: 20007 - protein, 463 aa, Shigella flexneri 2a str. 301
MSVSTLESENAQPVAQTQNSELIYRLEDRPPLPQTLFAACQHLLAMFVAVITPALLICQALGLPAQDTQHIISMSLFASGVASIIQIKAWGPVGSGLLSIQGTSFNFVAPLIMGGTALKTGGADVPTMMAALFGTLMLASCTEMVISRVLHLARRIITPLVSGVVVMIIGLSLIQVGLTSIGGGYAAMSDNTFGAPKNLLLAGVVLALIILLNRQRNPYLRVASLVIAMAAGYALAWFMGMLPESNEPMTQELIMVPTPLYYGLGIEWSLLLPLMLVFMITSLETIGDITATSDVSEQPVSGPLYMKRLKGGVLANGLNSFVSAVFNTFPNSCFGQNNGVIQLTGVASRYVGFVVALMLIVLGLFPAVSGFVQHIPEPVLGGATLVMFGTIAASGVRIVSREPLNRRAILIIALSLAVGLGVSQQPLILQFAPEWLKNLLSSGIAAGGITAIVLNLIFPPEKQ

SEQ ID NO: 20008 - protein, 378 aa, Neisseria meningitidis Z2491
MDWHERFPELEAQLGAPIENYAPPKHWTRKQLRSMGRVSYLCVDAAEQALTDAGLLGDESITDGRMGVACGSSSGSTKDIGDVGELLLTGMSRNFSANTYVRMMPHTAAANIGIFFGLKGRIIPTSSACSSGSQGIGYAYEAIKYGLTDMMLAGGGEEFFPSEVYVFDSLYAASRRNGEPEKTPRPYDANRDGLVIGEGAGIFVLEELEHAKRRGAIIYAELVGYGANSDAYHISTPRPDAQGAILAFQTALQHADLAPEDIGWINLHGTGTHHNDSMESRAVAAVFGNNTPCTSTKPQTGHTLGAAGAIEAAFAWGIADRKSNPEGKLPPQLWDGQNDPDLPAINLTGSGSRWETEKRIAASSSFAFGGSNCVLLIG

SEQ ID NO: 20009 - protein, 565 aa, Photorhabdus luminescens subsp. laumondii TTO1
MELEHESKRPLYIPYSGPILLEFPLLNKGSAFTEEERRNFNLHGLLPEAVETIEEQAERAYRQYLDFKNDADKHIYLRNIQDTNETLFYRLLDAHLNEMMPIIYTPTVGEACEHFSDIYRRARGLFISHPNKAHIDDMLQNATKQNVKVIVVTDGERILGLGDQGIGGMGIPIGKLSLYTSCGGISPAYTLPVVLDVGTNNPQRLNDPLYMGWRHPRITGKEYDEFVDEFIQAVKRRWPNVLLQFEDFAQKNAMPLLNRYRHEICCFNDDIQGTAAVTLGSLIAASRAAGRQLKDQTVTFLGAGSAGCGIAEQIVAQMKSEGLSDEQARARIFMVDRFGLLTDKLPNLLDFQNKLVQKSSSLAKWDVNNDSISLLDVVRNAKPTVLIGVSGQAGLFTEEIIREMHKHCERPIVMPLSNPTSRVEARPEDIINWTDGAALVATGSPFNPVKYKDQEYPIAQCNNAYIFPGIGLGVIASGAKLVTDGMLMAASRTLANCSPLAQEGQGPLLPLIDDIQEVSRKIAKQVAKEAQIQGVATVTSDGALDEAIERNFWKPEYRVYKRTSF

SEQ ID NO: 20010 - protein, 475 aa, Nostoc sp. PCC 7120
MNLVWQRFTLSSLPLKQFLATSYLHRFLVGLLSSWRQTSFLLQWGDMIAAALLSLIYVLAPFVSSTLVGVLLIACVGFWLLLTLSDEPSSNNNSLVTPIHLLVLLYWGIAAVATALSPVKKAALTDLLTLTLYLLLFALCARVLRSPRLRSWIITLYLSASLVVSIYGMRQWRFGAPPLATWVDPESTLSKTTRVYSYLGNPNLLAGYLVPAVIFSLMAVFVWQGWARKSLAVTMLFVNTACLIFTYSRGGWIGLVVAVLGATALLVDWWSVQMPPFWRTWSLPILLGGLIGVLLIAVLFVEPVRFRVLSIFADRQDSSNNFRRNVWDAVFEMIRDRPIIGIGPGHNSFNKVYPLYQRPRYSALSAYSIFLEVAVEMGFVGLACFLWLIIVTINTAFVQLRQLRQSANVQGFWLVGALATLLGMLAHGTVDTIWFRPEVNTLWWLMVALIASYWTPLSANQCQELNLFKEEPTSN

SEQ ID NO: 20011 - protein, 257 aa, ASPERGILLUS NIDULANS FGSC A4
MATTTITHSGRLHGKVAIVTGAGSGFGYGIAKKFVEEGAKVIVADISEKNGQAVAAELGSKFIYTDVTRRDDWQALLQATLDEYKTLDIVVNNAGATYSNKPTTEVTDADFDLCVNVNVRSIYLSTSVIVPYFLEHNRPGCFIQVSSTAALRPRPGLTWYNASKAAVSNATKTMAVEYGPKKIRFNCVCPVVGSTGMTHLFLGKPDTEENRAAFVSTIPLGRPSTPADVANTCSFLASDEAGFITGVELEIDGGRCV

SEQ ID NO: 20012 - protein, 500 aa, Arabidopsis thaliana
ETNIRVVLYSIFSLIFLIISFKFLKPKKQNLPPSPPGWLPIIGHLRLLKPPIHRTLRSFSETLDHNDGGGVMSLRLGSRLVYVVSSHKVAAEECFGKNDVVLANRPQVIIGKHVGYNNANMIAAPYGDHWRNLRRLCTIEIFSTHRLNCFLYVRTDEVRRLISRLSRLAGTKKTVVELKPMLMDLTFNNIMRMMTGKRYYGEETTDEEEAKRVRKLVADVGANTSSGNAVDYVPILRLFSSYENRVKKLGEETDKFLQGLIDDKRGQQETGTTMIDHLLVLQKSDIEYYTDQIIKGIILIMVIAGTNTSAVTLEWALSNLLNHPDVISKARDEIDNRVGLDRLIEEADLSELPYLKNIVLETLRLHPATPLLVPHMASEDCKIGSYDMPRGTTLLVNAWAIHRDPNTWDDPDSFKPERFEKEEEAQKLLAFGLGRRACPGSGLAQRIVGLALGSLIQCFEWERVGNVEVDMKEGVGNTVPKAIPLKAICKARPFLHKIIS

SEQ ID NO: 20013 - protein, 641 aa, Helicobacter pylori J99
MQLSNADLERLKSMANTLRFLCADMIDKANSGHPGVCLGLADVMVVLSLHLNLNPTNPKWLNRDRLVFSGGHASALVYSLLHLWGFDLSLDDLKRFRQLHSKTPGHPELHHTEGIEITTGPLGQGFANAVGFSMASQYAQTLLDKEAISHKVYCLCGDGDLQEGISYESTSLAGHLRLDNLIVIYDSNQISIEGAINISFSEQVKTRFLAQNWEVLECDGHDYQAIHNALEEAKKSHKPTLLIAHTIIGKGAIGLEGSEKTHGSPLSKEVLKQSKENAQINPNESFIISPKNKMHFEEVKVRGISLEALWEKSLSPKTKEKIHALKNFDFNAINYPAFKKGESLATRVSNGMILNAIAKECEGFLGGSADLAPSNNTHLKHSGDFPLGQNLHFGIREHAMGAITNALAAYGLFVPFCATFFVFSDYLMPSIRLSALMKLKALFIFTHDSIGVGEDGATHQPIEQLSHLRALPHFYAFRPSDAFENKACMQVALSLNAPSALILSRQNLSVLDEVSKEQVLKGAYVKHHSKDPIITLVASGSEVSLALESAKILERENIPTQVVSAPCFDLLVEQDESYFKELFKGKVLVIEASRAIEWYRFADKIIGMDSFGSSAKGDKLFEKFGFSVENITAQAKRLLNA

SEQ ID NO: 20014 - protein, 500 aa, Arabidopsis thaliana
MLYFILLPLLFLVISYKFLYSKTQRFNLPPGPPSRPFVGHLHLMKPPIHRLLQRYSNQYGPIFSLRFGSRRVVVITSPSLAQESFTGQNDIVLSSRPLQLTAKYVVYNHTTVGTAPYGDHWRNLRRMCSQEILSSHRLIIFQHIRKDEILRMLTRLSRYTQTSNESNDFTHIELEPLLSDLTFNNIVRMVTGKRYYGDDVNNKEEAELFKKLVYDIAMYSGANHSADYLPILKLFGNKFEKEVKAIGKSMDDILQRLLDECRRDKEGNTMVNHLISLQQQQPEYYTDVIIKGLMMSMMLAGTETSAVTLEWAMANLLRNPEVLEKARSEIDEKIGKDRLIDESDIAVLPYLQNVVSETFRLFPVAPFLIPRSPTDDMKIGGYDVPRDTIVMVNAWAIHRDPEIWEEPEKFNPDRYNDGCGSDYYVYKLMPFGNGRRTCPGAGLGQRIVTLALGTLIQCFEWENVKGEEMDMSESTGLGMRKMDPLRAMCRPRPIMSKLLL

SEQ ID NO: 20015 - protein, 618 aa, Oryza sativa
MADSPNPSSGDHPAGVGGSPEKQPPVDRRVAALAAGAAGAGARYKAMSPARLPISREPCLTIPAGFSPSALLESPVLLTNFKVEPSPTTGTLSMAAIMNKSANPDILPSPRDKTSGSTHEDGGSRDFEFKPHLNSSSQSTASAINDPKKHETSMKNESLNTALSSDDMMIDNIPLCSRESTLAVNISSAPSQLVGMVGLTDSSPAEVGTSELHQMNSSGNAMQESQPESVAEKSAEDGYNWRKYGQKHVKGSENPRSYYKCTHPNCDVKKLLERSLDGQITEVVYKGRHNHPKPQPNRRLSAGAVPPIQGEERYDGVATTDDKSSNVLSILGNAVHTAGMIEPVPGSASDDDNDAGGGRPYPGDDAVEDDDLESKRRKMESAAIDAALMGKPNREPRVVVQTVSEVDILDDGYRWRKYGQKVVKGNPNPRSYYKCTNTGCPVRKHVERASHDPKSVITTYEGKHNHEVPASRNASHEMSTPPMKPVVHPINSNMQGLGGMMRACEPRTFPNQYSQAAESDTISLDLGVGISPNHSDATNQLQSSVSDQMQYQMQPMGSVYSNMGLPAMAMPTMAGNAASNIYGSREEKPSEGFTFKATPMDHSANLCYSTAGNLVMGP

SEQ ID NO: 20016 - protein, 636 aa, ASPERGILLUS NIDULANS FGSC A4
MILMLSIPSSTIVAKFMKKAPSKYQRGCFPGRLLSGEIAFLGRIFLTSPGNVAIVQKRPNFRYWRPYAPMSFVDPSRPVRCHQLDTLTTILNLTDMSLSQSSPPTQAATARDGSISEQTPLLAGQSQPPAEEEPSTKRLLLVLCGIWVGVFLAALDITIVATLTGPISSSFNSLSLFSWLATAYLISNAACQPLSGRLTDIFGRKAGLIFSNLVFAAGNLICGLAQRQWTIILGRVIAGIGGGGLTAISTFVASDLIPLRKRGVWQGVGNICFGVGSGLGGVFGGWINDTLGWRWAFLIQIPFVLASAILVALTVKIPPKNANKDKLRRVDFLGAITLVTALVLLLLGLNTGGNQLPWTHPLILTTLPLSAVVLGAFVYIEANIASEPVIPVRLLLNRTVLSGCLTNWFTTMNVYALLFYLPILFQVQGLSATASGARLIPQAIGTSFGSLGSGALMRYSGRYKMYSHITMLLLVVSSALICTLKPDTPTALPLLYFLLGGVAYGSMLTITLVALISAVDHEHHAVITSASYAFRSTGSSIGITIGSSVFQNILRSGLWSRFGDRENAREVISRLLDSLQEIQKVPADWLPGVMDAYMVSLRATFITLLGLAVLGALVSFGMREHVLHSNMARRNE

SEQ ID NO: 20017 - protein, 217 aa, Bartonella quintana str. Toulouse
MKFFVDSANIEEIRELQNLSLVDGVTTNPSLILKSGRNILDVIKEICTLIEGPVSAEVAATEFEIIMKEAAILAKIADNICIKLPLTLEGLKACKALAAQGLKTNLTLCFSANQALLAAKAGATFVSPFIGRLDDCGINGSELLHEIRTIYDNYGFETQILAASIRTVNHVKEAALSGADVASVPPTILKALVKHPLTDKGLQTFLDDWKKTGQNIA

SEQ ID NO: 20018 - protein, 375 aa, Shewanella sp. MR-4
MSDAKKLSGAGLRGQSAGETALSTVGVSGSGLTYRGYDVKDLAENATFEEVAHLILYGELPTTAQLEAYKTKLKGMRGLPQALKEVLERIPADAHPMDVMRTGCSMLGNLEAEHSFSEQSQIADRLLAAFPSIICYWYRFSHDGVRIETETNDEQIGAHFLHLLHGKAPSALHAKVMDVSLILYAEHEFNASTFTARVCASTLSDMHSCVTGAIGSLRGPLHGGANEAAMELIQDMKDEADARDVLMGKLERKEKIMGFGHAIYRESDPRNAIIKEWSEKLAADYGDDRLYRVSVACEALMWEQKKLFCNADFFHASAYHFMGIPTKLFTPIFVCSRVTGWTAHVMEQRSNNRIIRPSADYVGVALRKVVPIAER

SEQ ID NO: 20019 - protein, 343 aa, Bacillus cereus E33L
MVGRKNITIIHSNLETGVIAEISGNSNGPLIAIRADIDALPIQEETNLPYASKIHGRMHACGHDFHTAAIIGAAYLLKEKESSLSGTVRFIFQPAEESSNGACKVIEAGHLHGVQAIFGMHNKPDLPVGTIGIKDGPLMAGVDRFEIEIHGVGTHAAVPDAGVDPIVASSQIVMALQTIVSRNISSSHNAVVSVTNIHSGNTWNVIPEKATLEGTVRTFQNETREKIPALMKRIIQGVSDALGVKTEFRFYAGPPAVHNDTSLTNLSTQVAETMNLNIVSPTPSMAGEDFSFYQQEIPGSFVFMGTSGTHEWHHPAFTVDERALPISAEYFALLAERALKQFA

SEQ ID NO: 20020 - protein, 320 aa, Desulfitobacterium hafniense DCB-2
MTVDKTNLEIATFAGGCFWCMESVYSPLPGVLEVLSGYTGGHVENPTYNEVCSHTTGHREAIQIKFNPNIVSYKELLAFFWRQIDPTDPGGQFHDRGESYQTAIFYHSEEQRRLAEESKQALISSSHFDKPIVTEILPAAPFYPAEDYHQGYHQKNAFRYALYRQGSGRDAFINKHWAKEKEQLKKRLTPLQFHVTQEKGTEPPFQNEFWNNKQEGIYVDVVSGEPLFSSKDKFDSGCGWPSFTRPVLKSNIVEKIDLSHNMTRTEVVSRNSESHLGHVFDDGPGPDGLRYCINSAALRFIPKEDLEREGYGDLLRLFRD

SEQ ID NO: 20021 - protein, 252 aa, Desulfitobacterium hafniense DCB-2
MRLMNKVAIVTGAASGMGKSIALLYAKEGAKVVVSDLNLEGAHKVAEEITSAGGTALAIKTNVAVEEDIQALVDTAVSTYGTVDIFVNNAGIMDNFEPAADIEDKNWERIFAVNTTSVMRATRKVLPIFLEKSSGVIVNVASAGGLNGARAGATYTASKHAVIGFTKNTGFMYAQQGIRCNAIAPGAVETNIGSTITDPHKFGSARAYAGMATNPRMGKPEEIAQVALFLAAEESSFVNGAVIVADGGWSAY

SEQ ID NO: 20022 - protein, 429 aa, Pseudomonas fluorescens Pf-5
MADKKAQLIIEGAAPVELPILTGTVGPDVIDVRGLTATGRFTFDPGFMSTASCESKITYIDGDNGILLHRGYPIEQLAEKSDYLETCYLLLNGELPTAEQKAQFVSTVKNHTMVHEQLKSFFNGFRRDAHPMAVMCGVVGALSAFYHDSLDINNPQHREISAVRLVAKMPTLAAMVYKYSMGQPMMYPRNDLSYAENFLHMMFNTPCEIKPISPVLAKAMDRIFILHADHEQNASTSTVRLAGSSGANPFACIAAGIAALWGPAHGGANEAVLTMLDEIGDVSNIDKFIAKAKDKNDPFKLMGFGHRVYKNRDPRATVMKQTCDEVLKELGINNDPQLELAMRLEEIALTDPYFIERSLYPNVDFYSGIILKAIGIPTSMFTVIFALARTVGWISHWKEMLSSPYKIGRPRQLYTGYESRDITKLEDRK

SEQ ID NO: 20023 - protein, 565 aa, Bdellovibrio bacteriovorus HD100
METDNKYARPVYIPYSGTVLLEMSLLNKGSAFSEEERTHLNLHGLVPQTIETIEEQAERVYSQYRLLKADIDKHVYLRNLQDTNETLFYHLVVNHLTEMMPIIYTPVVGEACEHFSEIYRASRGLFISYPNKDRIDEMLRNVTKQKVKVIVVTDGERILGLGDQGIGGMGIPIGKLSLYTACGGISPAYTLPVVLDVGTNNQALLNDPLYMGWRQPRITGKEYEDFVDAFVQAVKRRWPDVLLQFEDFAQKNASPILKRYRDEICSFNDDIQGTAAVTVGCLIAASRANGGRLRDQRVVFLGAGSAGCGIAEQIIAEMKHEGLSDEQARQRVFMVDRFGLLTDKMPNLLEFQSPLVQKTETLAGWEVTNDEISLLDTVRNAKPTILIGVSAQPGLFTEEVIRTMQSHCEHPIVMPLSNPTSRVEATPADILRWTDGKALVATGSPFMPVHMNDQIYPIAQCNNSYIFPGIGLGVLACGARRVTDSMLMAASSALADCSPLAQNGKGALLPELSQIEKVSRTIAFAVAKAAQADEVAVKVSDEELLSLIDKNYWYPKYRSYKHASS

SEQ ID NO: 20024 - protein, 163 aa, Nostoc punctiforme PCC 73102
MQNANLQKATFGAGCFWGVEAAFRQVKGVTSTAVGYSGGHLDNPTYEDVCRGKTGHAEAVEVEYNPAIVSYDQLLNVFWNKHNPTASNHEELNVGYQYRSVIFFHTPEQELLVRASKEQLENSSRYHKNPIVTEILPASQFYRAEKYHQQYLEKHGRASYRIG

SEQ ID NO: 20025 - protein, 477 aa, Streptococcus pneumoniae R6
MKILFVAAEGAPFSKTGGLGDVIGALPKSLVKAGHEVAVILPYYDMVEAKFGNQIEDVLHFEVSVGWRRQYCGIKKTVLNGVTFYFIDNQYYFFRGHVYGDFDDGERFAFFQLAAIEAMERIDFIPDLLHVHDYHTAMIPFLLKEKYRWIQAYEDIETVLTIHNLEFQGQFSEGMLGDLFGVGFERYADGTLRWNNCLNWMKAGILYANRVSTVSPSYAHEIMTSQFGCNLDHILKMESGKVSGIVNGIDADLYNPQTDALLDYHFNQEDLSGKAKNKAKLQERVGLPVRADVPLVGIVSRLTRQKGFDVVVESLHHILQEDVQIVLLGTGDPAFEGAFSWFAQIYPDKLSTNITFDVKLAQEIYAACDLFLMPSRFEPCGLSQMMAMRYGTLPLVHEVGGLRDTVRAFNPIEGSGTGFSFDNLSPYWLNWTFQTALDLYRNHPDIWRNLQKQAMESDFSWDTACKSYLDLYHSLVN

SEQ ID NO: 20026 - protein, 225 aa, Nostoc punctiforme PCC 73102
MSIHNFTPSRQLLRNLSIISLTFVLLYGASRVMLSAPATDISNAAPQGKQVAVFAGGCYWGMEAVFEHLLGVSDVVSGFSGGDARTADYTLVSAGLTNHAESVKITYDPSKISYNQLLKVYFLVAHNPTELNRQGPDSGKQYRSAIFFANDEQKQAAQEYIAQLNKSRVFDKPIVTELDPLKGFYQAAAYHQNYIVHHPSDRYVVVNDLPKLAKLQAKFPDMYSK

SEQ ID NO: 20027 - protein, 423 aa, Haloarcula marismortui ATCC 43049
MNEAQQERRRSVRRDLHSYPEPAWREFYTTSRIAEEIERIGVDQLYIGRNVVDGDARMAVPDDDELEDWQRKARDAGAREDVLEAAAGGFTGALAVLEQGEGPTVALRVDIDALPITESDSVAHAPATEEFRSTNEGYMHACGHDAHATIGLGVLEAVKESDFKGTFKVVFQPAEEVIGGGKAVAESGHLDDVDHLLAIHIGLDHPTGEIVAGVGGFLAVRQFEATFTGETAHAGGHPAQGRDAVQALATAVQNLHAIRRHGDGATRVNAGVVEGGTATNIVPGEATLEGEVRGETTPLKEYMSERADTVMSSAAEMHDCEVAIETTAEAPSAVSDDALAGVVYDAADSVPGVTSRLRTDDLGGSEDATYLMDRVQNHGGTATFVGIGTDHPGGHHTPLFDIDEDSLTIGIDVVTEAISQLSG

SEQ ID NO: 20028 - protein, 590 aa, Pseudomonas fluorescens Pf-5
MANIPTISFDAIIIGGGGAGMRAALQLAQGGHKTAVITKVFPTRSHTVSAQGGITCAIASADPNDDWRWHMYDTVKGSDYIGDQDAIEYMCQEGPAAVFELDHMGLPFSRTETGRIYQRPFGGQSKDYGKGGQAARTCAASDRTGHALLHTLYQGNLKAGTTFLNEWYAVDLVKNQDGAFVGVIAICIETGETTYIRSKATVLATGGAGRIYASTTNALINTGDGVGMALRAGVPVQDIEMWQFHPTGIAGAGVLVTEGCRGEGGYLINKHGERFMERYAPNAKDLAGRDVVARSMVKEIIAGNGCGPNGDHVMLKLDHLGEEVLHSRLPGICELSKTFAHVDPVVAPVPVVPTCHYMMGGVATNIHGQAITQNAAGEDTIIPGLFAVGEVACVSVHGANRLGGNSLLDLVVFGRAAGLHLEKALTDGIEYRDASDTDVDVALNRLAKLNERTTGEDVATLRRELQNCMQNYFGVFRTGEYMQKGIAQLADLRERIANVKINDKSQAFNTARIEALELQNLLEVAEATAIAAEVRKESRGAHAREDFEDRDDENWLCHTLYFPGEKRVAKRAVNFSPKTVPTFEPKVRTY

SEQ ID NO: 20029 - protein, 217 aa, Oryza sativa (japonica cultivar-group)
MSKRSRTMWDMQEFVGSVDTARVLMLLAQQSQHGLLGGGGFAAGAQPVVVRGGAHDRVFECKTCNRQFPTFQALGGHRASHKRPRQQQQHALGGGAGADDVGLCLGRQPTPPRPQPAKPRVHECPVCGLEFPIGQALGGHMRRHRAEAEAAATTTTTTTKNGDVGKAAAVKACDGGGVCLDLNLTPSENRAKCRNVVGLGAGGQGVHKALAMLDCFL

SEQ ID NO: 20030 - protein, 388 aa, Anabaena variabilis ATCC 29413
MIEVVITGIGLVSALGTSLEESWQSLIAGKSGITWHQPFPELPPLPLGLIGQKPTSLPSLTQVVVDAAIKDAGLVPPLTDCAVVIGSSRGYQASWEKLAQQIYAGDNSFDNAERLEDWLDTLPHMNAMATARQIGATGAVTAPMAACATGIWAIAQAAILIQTGQYQRVIAGATEAAITPLTLSGFQQMGALAKTGAYPFDLQREGLVLGEGAAVFVLESRQLAEKRKAKIYGQILGFGLTNDAYHSNQPEPKGKSAIAAIEQCLVRSQLTSADIDYIHAHGTATQLNDRIESQVIKHLFPSKVAVSSTKGSTGHTLGASGALGVAFSLLALEQKILPPCVGLQEPEFDLNIVKTAQHSQIQQVLCLSFGFGGQNAAIALGRGNDHRG

SEQ ID NO: 20031 - protein, 877 aa, Listeria monocytogenes str. 1/2a F6854
MKMAKTKVHVIPHSHWDREWYFTSSRSTIYLVKHLKEVIETLEAKDDYHFYLMDAQSSLIEDYLRYCPEDKSRLEKLIAEKRLITGPWYTQTDQLVISQESIVRNLLYGTRIAREMGHSMAVGYVPDAFGQGGNMPQIYKEFGISKFLFWRGVADNRLKQTEFIWQGDDGTEMLAEQIPFGYYYGANIPENEAELKTYLDEQIGALEEKASTPNVYFPNGLDQAPVRKNLPELVAKFNELDSTREYQIASPETFFADLEKDVTNLPVIAGELTEGKHSRLHKSIFSTRADLKQANNQIENFLSNVLEPVLSISYSLGNRYPHNELAEIWKLMFENAAHDSIGGCNSDTTNRDVKHRYKLASDLATNLLDLNMRLISEKIEQKQPFQFTVFNPLPYEKSGVIKMTAYIPEDNFTVEDTQGNTLEYTILEKTDLTEYVLNQHIDLNPSRPVYLPEKVFLATMLVNVNNLPALGYDTIYFNLEKETAEQEPTQSAATKIENEFYEIQLAANNSLTIHDKKAGRTYTDQMIFVENGDDGDSYNYSPPRKDLVISSKEAVVESIESSISSVNQAFTISFKLNVPYNLEERANGEKNNEMIIKTVISLRKNEELIRFDVQIANQVLSHRLCVTFATEIASKFSTADQLFAPIKRPVRLPEMDVWEAEEWQEAPISIEAMQSFVSLHDESHGVAVMTEGVREYEIIGENYDTISLTLFRTFSHMGKTDLLYRPGRASGESIVATPDAQLLGEINATFALTLFESSFDEATIAKKAKEYLSNPPVYQMSDFLNGRLIYVYRDEEKTLDATYSLALPTIDGAIISAVKKAEDSDAFITRFFNPYLQKEITIPEIFQGKERHLDESKSNEKQTTLKHAKVQSYLFEK

SEQ ID NO: 20032 - protein, 122 aa, Tiquilia plicata
ASDKYIDVHYDITTVTEAKPLLKEALQAEVGLPCDRNVPVIGFIGRLEEQKGSDILVAAIHKFIGMDVQIVVLGTGKKKFEQEIQQLEVLYPNKARGVAKFNVPLAHMITAGADYMLVPSRF

SEQ ID NO: 20033 - protein, 557 aa, Methanosarcina mazei Go1
MTNSLWMLGKTKRYLEVTRVLFKYNLIPELYHDLRTEYISNPDCTCTFDLENRETAAKLRQAFEELGPTFIKMGQTMSKRPDLVPQPYVVEMANLQDRVKPVPFEEMAESLDLACVCEYQTREERKRKKSEEELKAARERKAKAFIDIFDSFDPEPIACGSIAQVYKGVLEGKPVAVKILRPHLIDIINIDLSILDDFKPVMKKVMGVGKNFDIDAFLLEIREMLTREVDLRIEAVNMRRFEDNFKNVKNVSVPKIYPDYCSANVLTMEFIQGTQVKDIIDTPLPQSKKSEYTRTITKSYLKQVYIDGFYHADPHGGNMLVEENDTVSFIDFGAVGSIDDELKRNMLEFYYAINNRDVEGATQGFLKIGGADSRDVDVRRLRKDMDELIANQNYGLEGRQSDNYAKLGLKYDIRLPGEFSTLQRAILLIEGVCLELDPRYNIKSIAIPVLMDAYKKLNTPKGAALHIEFSSEPVDEKAEMRAAIREVADKMEGMGDRFLEVRQKDKRREVFSKEIFLAVLLVVSAYILLYGEVFYWVGLAGFGGAILIAVIASLKGK

SEQ ID NO: 20034 - protein, 493 aa, Candida albicans SC5314
MTETSISGLRGPKSMYFMEIVDVSSQESSVLSSIVESFTSAVSASNLGVYSDEVLCDIKSSLKENSPITMLPNYNVSPTGDEHGQYLVIDLGGSTLRIAVVDISKPHPNLSRSERITIVVEKSWIIGNDFKRIDGEFFKYIGSKINEILMGQNVIDVKSVINTGITWSFPLETTDYNRGKIKHVSKGYTVGEDIYDKDLKMVLEDTLRQEYGLTLDVQSILNDSLAVYSAGCFIDSKMKLAMVLGTGINMCCSLKRSSDIHPSKMLADATLFNCELSLFGQNLCKDFATKYDIIIDKRFAGFSHHFKTFMEPDPITKTLFQPHELMTSGRYLPELTRLVVVDLIEAGEIFQNVDHQQMYQEYGGFSGELMCFVHENDDYDDIHDKLCKAYGWTTVGLSDIVCLKEVVSCIIKRAAFIVANAIIAFFKLLGSDELGGDVTIGYVGSVLNYFHKYRRLIVEYVNNAEEAKGIKVDLKLIENSSIIGAAIGAAYHK

SEQ ID NO: 20035 - protein, 349 aa, Bacillus licheniformis ATCC 14580
MVDKVRTGILGYGLSGSVFHAPLLSVLEDYEIRKVMTSRKEQVKQDLPEAEAVSTIEDITKDPDIDLVIVTTPSGLHYEMAKECIRAGKHVVLEKPMTATAEEAEELINAAKEKGVLLSVYHNRRWDNDFLTIKQLIKEGRLGEVNTFHASYDRFRPNVRQRWREQKGPGSGALYDLGSHLIDQALHLFGMPNGVTAQVTAQRANAETDDYFHVILHYDQRQVILHSGSIVPANGPRYQIHGSKGSFIKYGIDGQEDALRAGHKPAGDEWGADQPEYYGELATVEGDEIRKETVETLPGSYLTYYKQLASSILEGGSLPVTAEEGRDVIRIIEAAQKSSETNQTVFLNK

SEQ ID NO: 20036 - protein, 119 aa, Tiquilia plicata
  misc_feature (58)..(58): Xaa can be any naturally occurring amino acid
  misc_feature (79)..(79): Xaa can be any naturally occurring amino acid
  unsure (1)..(119): unsure at all Xaa locations
KYIDVHYDITTVTEAKPLLKEALQAEVGLPCDRNVPVIGFIGRLEEQKGSDILVAAIXKFIGMDVQIVVLGTGKKKFEXEIQQLEVLYPNKARGVAKFNVPLAHMITAGADYMLVPSRF

SEQ ID NO: 20037 - protein, 122 aa, Tiquilia plicata
ASDKYIDVHYDITTVTEAKPLLKEALQAEVGLPCDRNVPVIGFIGRLEEQKGSDILVAAIHKFIGMDVQIVVLGTGKKKFEKEIQQLEVLYPNKARGVAKFNVPLAHMITAGADYMLVPSRF

SEQ ID NO: 20038 - protein, 416 aa, Arabidopsis thaliana
MDGSMNLGNEPPGDGGGGGGLTRQGSIYSLTFDEFQSSVGKDFGSMNMDELLKNIWSAEETQAMASGVVPVLGGGQEGLQLQRQGSLTLPRTLSQKTVDQVWKDLSKVGSSGVGGSNLSQVAQAQSQSQSQRQQTLGEVTLEEFLVRAGVVREEAQVAARAQIAENNKGGYFGNDANTGFSVEFQQPSPRVVAAGVMGNLGAETANSLQVQGSSLPLNVNGARTTYQQSQQQQPIMPKQPGFGYGTQMGQLNSPGIRGGGLVGLGDQSLTNNVGFVQGASAAIPGALGVGAVSPVTPLSSEGIGKSNGDSSSLSPSPYMFNGGVRGRKSGTVEKVVERRQRRMIKNRESAARSRARKQAYTVELEAEVAKLKEENDELQRKQARIMEMQKNQETEMRNLLQGGPKKKLRRTESGPW

SEQ ID NO: 20039 - protein, 369 aa, Zea mays
MDMGSGSSPVITDPISISPPLLGGLTSNLMPFSVMSGGCSSSPSMSNSSRRKIEEVLVNGLLDAMKSSSPRKKHNLAFGQDNSPDEDPAYTAWLSKCPSALASFKQIVANAQGRRIAVFLDYDGTLSPIVDDPDKAFMSPVMRAAVRNVAKYFPTAIVSGRSRKKVFEFVKLTELYYAGSHGMDIVTSAAAHATEKCKEANLFQPACEFLPMINEVSKCLVEVTSSIEGARVENNKFCVSVHYRNVAEKDWKVVAGLVKQVLEAFPRLKVTNGRMVLEVRPVIDWDKGKAVEFLLRSLGLSDSEDVVPIYIGDDRTDEDAFKVLRERSCGYGILVSQVPKDTEAFYSLRDPSEVMGFLNSLVRWKKHPL

SEQ ID NO: 20040 - protein, 435 aa, Triticum aestivum
  misc_feature (371)..(371): Xaa can be any naturally occurring amino acid
  misc_feature (376)..(376): Xaa can be any naturally occurring amino acid
  unsure (1)..(435): unsure at all Xaa locations
MLLLLFILYDLMYRSISIYNVGLLGLLLEAHYPVWYYSLQMQIFVKTLTGKTITLEVESSDTIDNVKAKIQDKEGIPPDQQRLIFAGKQLEDGRTLADYNIQKESTLHLVLRLRGGMQIFVKTLTGKTITLEVESSDTIDNVKAKIQDKEGIPPDQQRLIFAGKQLEDGRTLADYNIQKESTLHLVLRLRGGMQIFVKTLTGKTITLEVESSDTIDNVKAKIQDKEGIPPDQQRLIFAGKQLEDGRTLADYNIQKESTLHLVLRLRGGMQIFVKTLTGKTITLEVESSDTIDNVKAKIQDKEGIPPDQQRLIFAGKQLEDGRTLADYNIQKESTLHLVLRLRGGMQIFVKTLTGQNITLEGESSDTIDNVXAQIQXDREVIPPEQQGLISAGKHLEDGRTLGDYTSRKDHSPTGARLRGGSNAGGARWCPVSSEW

SEQ ID NO: 20041 - protein, 444 aa, Neisseria meningitidis Z2491
MTDLNTLFANLKQRNPNQEPFHQAVEEVFMSLDPFLAKNPKYTQQSLLERIVEPERVVMFRVTWQDDKGQVQVNRGYRVQMSSAIGPYKGGLRFHPTVDLGVLKFLAFEQVFKNALTTLPMGGGKGGSDFDPKGKSDAEVMRFCQAFMTELYRHIGADTDVPAGDIGVGGREIGYLFGQYKKIRNEFSSVLTGKGLEWGGSLIRPEATGYGCVYFAQAMLQTRNDSFEGKRVLISGSGNVAQYAAEKAIQLGAKVLTVSDSNGFVLFPDSGMSEAQLAALIELKEVRRERVATYAKEQGLQYFENQKPWGVAAEIALPCATQNELDEEAAKTLLANGCYVVAEGANMPSTLGAVEQFIKAGILYAPGKASNAGGVATSGLEMSQNAIRLSWTREEVDQRLFGIMQSIHESCLKYGKVGDTVNYVNGANIAGFVKVADAMLAQGF

SEQ ID NO: 20042 - protein, 333 aa, Perilla frutescens
MENSTQESHPRPENVVTYDSPYPIYAMAISAVNRRRVAVGSFVEELKNHVDILSFSEDSSSLKPVPSLSFDHPYPPTKLLFHPSVSAPSNLLASSGDFLRLWEVKDSSIVAVSTLNNSKTSEYSAPLTSFDWNEVEPRRIGTSSIDTTCTIWDIEKGAVETQLIAHDKEVYDIAWGEAGVFASVSADGSVRIFDLRDKEHSTIIYESPMPDTPLLRLAWNKQDLRYMATILMDSNKIVILDIRSPTMPVAELERHSASVNAIAWAPQSCKHICSAGDDGQSLLWELPTVAGPNGIDPMTMYSAGAEINQLQWSAAQPDWIAIAFANKMQMLKV

SEQ ID NO: 20043 - protein, 808 aa, Oryza sativa
MAAKLARLHSLRERLGATFSSHPNELIALFSRYVNQGKGMLQRHQLLAEFDALIEADKEKYAPFEDILRAAQEAIVLPPWVALAIRPRPGVWDYIRVNVSELAVEELSVSEYLAFKEQLVDGHTNSNFVLELDFEPFNASFPRPSMSKSIGNGVQFLNRHLSSKLFQDKESLYPLLNFLKAHNHKGTTMMLNDRIQSLRGLQSSLRKAEEYLMGIPQDTPYSEFNHRFQELGLEKGWGDCAKRVLDTIHLLLDLLEAPDPANLEKFLGTIPMMFNVVILSPHGYFAQSNVLGYPDTGGQVVYILDQVRALENEMLLRIKQQGLDITPKILIVTRLLPDAVGTTCGQRVEKVIGTEHTDILRVPFRSENGILRKWISRFDVWPFLETYTEDVANEIMREMQAKPDLIIGNYSDGNLVATLLAHKLGVTQCTIAHALEKTKYPNSDIYLDKFDSQYHFSCQFTADLIAMNHTDFIITSTFQEIAGSKDTVGQYESHIAFTLPGLYRVVHGIDVFDPKFNIVSPGADMSVYFPYTEADKRLTAFHPEIEELLYSEVENDEHKFVLKDKNKPIIFSMARLDRVKNMTGLVEMYGKNAHLRDLANLVIVCGDHGNQSKDREEQAEFKKMYGLIDQYKLKGHIRWISAQMNRVRNGELYRYICDTKGVFVQPAFYEAFGLTVIEAMTCGLPTIATCHGGPAEIIVDGVSGLHIDPYHSDKAADILVNFFEKCKQDSTYWDNISQGGLQRIYEKYTWKLYSERLMTLTGVYGFWKYVSNLERRETRRYIEMFYALKYRSLASAVPLAVDGESTSK

SEQ ID NO: 20044 - protein, 805 aa, Magnaporthe grisea 70-15
MARQYIASSEPDPKTSRYYSVLVAYHRAPAMNIISVDKERFDLDGDEGADIPDIPLRRRPNQGRSSPADLGLKTAMTLDNIIAGTRDLSMDPATGSPISHSGPRHGENQHRGGLGTSIKSPASIRVRSPEPDVFTMGTQSPPPSTYQPSTYQPSTYQPSILSNRSKAASTASTYLNTAVSLAALQTKAGDDDTALEPLMEEDVEPGSFDLVGPAVGEAGLYSLEKRSELLFSKEHLQTIFDDPIILQRFTTFLCGQRPSSLPLLIYYLDALKAVKAVEYSNAIIEALEPIPGHDFTGHEVMATINESLRQRADAAFEALARDDLPAYITHVWTQTVSISIRKRITGTLPPHLREMSEGLAEVFCLTDPSRHDNPIVFASEEFHRTTQYGMNYVLGRNCRFLQGPKTNPFSVKRIKEKVLAGKEHFETFLNYRRDGSPFMNLLMVAPLYDSRGAVRYFIGAQVDVSGLAKDCVGLESLRRLVDESEEKDKDKPDEAEAQAPEKKEEIRQLCEMFNLQELETVRKHGGAMHRLHTHQEHLQASDAPQPQNWHKPRVLIRDEASSIGGGEDRDPLDDLDDDDDDDDLIRRKGGKATSGNNGASAASAVPHSVPAPSAPSGRLSGIFENYLLVRPYPNLKILFASPSLRVPGILQSHFMSKIGGSSRVRDELTAALAEGHGVTAKVRWVASAKTGEGRHRWIHCTPLLGGNGAIGVWMVVITEDEEAIAGVSGARRTRDAPPVDLSDGASNSHKRHARKTFMSGLYGDDVYSGPESRSASVAMPFRHPNGSMISGTTSSSPYTLKIGEE

SEQ ID NO: 20045 - protein, 808 aa, Arabidopsis thaliana
MENNSLPMDPAMDSSFMDGLLLEGCWLETTDASEFLNFSPSTSVAPFDPSSFMWSPTQDTSNSLSQMYGQDCPERSSLEDQNQGRDLSTFNRRWWIGPSGHHGFSVMERLVQAVTHIKDFTSERGSLIQLWVPVDRGGKRVLTTKEQPFSHDPMCQRLAHYREISENYQFSTEQEDSDSSSRDLVGLPGRVFLGKVPEWTPDVRFFKNEEYPRVQHAQDCDVRGTLAIPVFEQGSQICLGVIEVVMTTQMVKLSPDLESICRALQAVDLRSTEIPIPPSLKGPDFSYQAALPEIRNLLRCACETHKLPLAQTWVSCLKQSKTGCRHNDENYIHCVSTIDDACYVGDPTVREFHEACSEHHLLKGQGVVGEAFLTNGPCFSSDVSSYKKSEYPLSHHATMFGLHGTVAIRLRCIHTGSVDFVLEFFLPKNCRDIEEQRKMLNALSTIMAHVPRSLRTVTQKELEEEGDSMVSEVIEKGVTLPKIENTTEVHQSISTPQNVGLVFDGGTTEMGELGSEYGKGVSVNENNTFSSASGFNRVTEKKRTKAEKNITLDVLRQYFAGSLKDAAKSIGVCPTTLKRICRQHGIQRWPSRKIKKVGHSLQKIQRVIDSVEGVSGHHLPIGSFYASFPNLAASPEASSLQQQSKITTFLSYSHSPPAKSPGSSCSHSSSCSSETQVIKEDPTDKTRLVSRSFKETQTTHLSPSSQEDDFLRVKVSYEEEKIRFKMRNSHRLKDLLWEIAKRFSIEDVSRYDLKYLDEDNEWVLLRCDDDVEECVDVCRSFPGQTIKLLLQLSSSYLPERSSVSGCLS

SEQ ID NO: 20046 - protein, 312 aa, Saccharophagus degradans 2-40
MNNSVAVIGESMLELMRAESDSSCRSMPAMLSYGGDTLNSSVYMSRLGAKVEYITAVGKDKNSEWLVKQWQSEGVGTRFVRTDEKKVPGLYMVTNDESGERYFTYWRNDSAARYIIDSEEKKQALYADLEGFDWIVISGISIAILDEASKKRMYELLQQCKARGAKIAFDGNYRPALWESKEQTRQAYQTVTAFADIILPTIDDEFQLYGEEPKDEVIDRLLSYGAKEIVLKMGGEGCYTVADNERTLVPGRKVVVVDTNSAGDSFNAGYLTGRMQGMSVEESALRGHLLASTVVQYRGAIIPKTAMPKMVG

SEQ ID NO: 20047 - protein, 128 aa, Pseudomonas syringae pv. tomato str. DC3000
MAYSEKVIDHYENPRNVGKMNAEDPDVGTGMVGAPACGDVMRLQIKVNEHGVIEDAKFKTYGCGSAIASSSLATEWMKGKTLDEAETIKNTQLAEELALPPVKIHCSVLAEDAIKAAVRDYKQKKGLL

SEQ ID NO: 20048 - protein, 569 aa, Pichia stipitis
MVSTYPESEVTLGRYLFERLHQLKVDTIFGLPGDFNLSLLDKVYEVPDMRWAGNANELNAAYAADGYSRIKGLSCLVTTFGVGELSALNGVGGAYAEHVGLLHVVGVPSISSQAKQLLLHHTLGNGDFTVFHRMSNSISQTTAFLSDISIAPGQIDRCIREAYVHQRPVYVGLPANMVDLKVPSSLLETPIDLKLKQNDPEAQEVVETVLKLVSQATNPIILVDACALRHNCKEEVKQLVDATNFQVFTTPMGKSGISESHPRLGGVYVGTMSSPQVKKAVENADLILSVGSLLSDFNTGSFSYSYKTKNVVEFHSDYMKIRQATFPGVQMKEALQQLIKRVSSYINPSYIPTRVPKRKQPLKAPSEAPLTQEYLWSKVSGWFREGDIIVTETGTSAFGIIQSHFPSNTIGISQVLWGSIGFTVGATVGAAMAAQEIDPSRRVILFVGDGSLQLTVQEISTLCKWDCNNTYLYVLNNDGYTIERLIHGKSASYNDIQPWNHLSLLRLFNAKKYQNVRVSTAGELDSLFSDKKFASPDRIRMIEVMLSRLDAPANLVAQAKLSERVNLEN

SEQ ID NO: 20049 - protein, 141 aa, Pseudomonas syringae pv. tomato str. DC3000
MAVQRTFSIIKPDAVAKNVIGEITTRFEKAGLRVVASKLKQLSKAEAEGFYAEHSARGFFGDLVAFMISGPVVVQVLEGENAIALNRELMGATNPKEAAAGTIRADFADSIDANAVHGSDSEAAAAREISYFFAATEVTAR

SEQ ID NO: 20050 - protein, 478 aa, Pseudomonas fluorescens Pf-5
MTQKFDVVVIGAGPGGYVAAIKAAQLGFTTACIEKYTDKEGKLALGGTCLNVGCIPSKALLDSSWKFHEAQDGFAIHGINHAGVTMDVPAMVGRKANIVKGLTSGVATLFKANGVTSIQGHGKLLAGKKVEVTKPDGSVEVIEAENVILAPGSRPIDIPPAPVDQNVIVDSTGALEFQSVPKRLGVIGAGVIGLELGSVWSRLGAQVTVLEALDTFLMAADTAVSKEALKTLTKQGLDIKLGARVTGSKVNGEEVVVTYTDANGEQTITFDKLIVAVGRRPVTTDLLAADCGVTLDERGFVHVDDHCATTVPGVYAIGDVVRGMMLAHKASEEGIMVAERIKGHKAQMNYDLIPSVIYTHPEIAWVGKTEQALKAEGVEVNVGTFPFAASGRAMAANDTGGFVKVIADAKTDRVLGVHVIGPSAAELVQQGAIGMEFGTSAEDLGMMVFSHPTLSEALHEAALAVNGTAIHIANRKKR

SEQ ID NO: 20051 - protein, 123 aa, Brassica napus
  misc_feature (21)..(21): Xaa can be any naturally occurring amino acid
  unsure (1)..(123): unsure at all Xaa locations
MATNEPEHETRDAEEAGANEXEEVVVTTGEEDEDAVLDLKSKLYRFDKEANQWKERGAGTVKLLKHKDTGKIRLVMRQSKTLKICANHFVKPGMAVQEHVGNEKSCVWHALDFADGELKDELF

SEQ ID NO: 20052 - protein, 671 aa, Ehrlichia ruminantium str. Gardel
MSQKYSNMIAMANAVRVLSIDAIQKAASGHPGMPLGMADVGTMLFAKFLKFNPKDPNWFDRDRFVLSNGHGSMLLYSILYFLGCLDIEEIKKFRQIHSLTPGHPEYGCTPGVDATTGPLGQGLASAVGMAIAEKILSEKFGADIVSHNTYVMVGDGCLMEGISHEAASLAGHLQLDKLIVLFDDNNVSIDGPISLSVSDNVKGRFLSYGWDVDEIDGHDFSQIESSIKNAKNSKKPSLICCKTIIGKTIPSKENTCDIHSWPVTEEDIIVMKKRLGWAYKPFEFPEEILQLWQDIACNSEEEYKLWVERVSEYGKTSQDFMDVMADGVSNKVFLNLKSLKEELCSLNLNEATRKSSGRVLDVIMGSTGKLIGGSADLSNSNNTKPKFTSVINKDNFSGSYLHYGVREHAMAACMNGMALHKGVIPYGGTFLIFSDYCRPAIRLSALMKRQVIYIMTHDSIGVGEDGPTHQPVEHLPSLRLIPNLYVFRPADAIEVLECWEIALKLIDAPSVLILSRQNVKCVRSTYVAENMSSKGAYIIREYKNDLDVTIFATGSEVEIALKASDILIGKGLGVRVVSVPCWELFYKQDKKYIISLLNNKSIKAAVEAASSFGWCKYIGEDGIFVGLEDFGISAPFKDLYKYFGITPENLVDKILSKLRINSNYESNVTAD

SEQ ID NO: 20053 - protein, 183 aa, Arabidopsis thaliana
YPYIAGMGVYVFRKEGLLKLLRSSYPTSNDFGSEIIRARRKLHNVQAFLFNDYWEDIGTIGSFFDANLALTEQPPKFQFYDQKTPFFTSPRFLPPTKVDKCRILDSIVSHGCFLRECSVQHSIVGIRSRLESGVELQDTMMMGADFYQTEAEIASLLAEGKVPVGVGQNTRIKNCIIDINARI

SEQ ID NO: 20054 - protein, 118 aa, Tiquilia plicata
  misc_feature (57)..(57): Xaa can be any naturally occurring amino acid
  misc_feature (78)..(78): Xaa can be any naturally occurring amino acid
  unsure (1)..(118): unsure at all Xaa locations
YIDVHYDITTVTEAKPLLKEALQAEVGLPCDRNVPVIGFIGRLEEQKGSDILVAAIXKFIGMDVQIVVLGTGKKKFEXEIQQLEVLYPNKARGVAKFNVPLAHMITAGADYMLVPSRF

SEQ ID NO: 20055 - protein, 444 aa, Methylobacillus flagellatus KT
MEFLQGFQRSADERAVQASLGSAHCYCRASQSFAPAAVAGPLGLSSPIKYKEHLMRALTYHGSKDVRIETVPDPVLQADDDIIIRVTSTAICGSDLHLYRGKIPQLHDGDILGHEFMGIVEDTGHGVTEVRKGDRVIIPFVIACGHCFFCAQQQFAACETTNPGPGPSLNKKSGTPPAALFGYSHLYGGIPGGQAELVRVPHGNVGPFKINGSLADEQVLFLTDILPTGYQAVLNAGVGKGSSLAIFGAGPVGLMAAACARMMGVETIFMIDDLQYRLDFAQAQYNTISINLDEVEDPADYILEHTAHRGVDGSIDAVGFEAKGSVVESALTALKLETSNGKVIRQCIAATRRGGTVSIPGVYAGFIHGFLIGDAFDKGLTFKMGQTHVHRFLPELLEFIENGDLHPADIITHRMALEDAPLGYRIFNDAEENCRKVVLTPGLH

SEQ ID NO: 20056 - protein, 119 aa, Tiquilia plicata
  misc_feature (59)..(59): Xaa can be any naturally occurring amino acid
  unsure (1)..(119): unsure at all Xaa locations
DKYIDVHYDITTVTEAKPLLKEALQAEVGLPCDRNVPVIGFIGRLEEQKGSDILVAAIXKFIGMDVQIVVLGTGKKKFEKEIQQLEVLYPNKARGVAKFNVPLAHMITAGADYMLVPSR

SEQ ID NO: 20057 - protein, 132 aa, Neurospora crassa
MVSADAAPKGQMSVLDALKGVLKISLMHDGLARGLREASKALDRREAHMCVLNESCEEEAYKKLVIALCSEHKIPLIKVPDGKQLGEWAGLCVLDREGNARKVVNCSCVVVKNWGEMSSEREILLNYFQTEQ

SEQ ID NO: 20058 - protein, 115 aa, Brassica napus
MLPSGLKETQLNNNNNNQKVHPQPMEQCINQNPEAMEALISNLFGNISSLKSAYIQLQSAHTPYDPDKIQEADKAVISELKNLSELKHVYRENNPKPVCVSPKDSRLAAEIQEQQ

SEQ ID NO: 20059 - protein, 435 aa, Staphylococcus aureus subsp. aureus MRSA252
MQNDEMFERTVKPVLDVNEKPQPAQWAFLSLQHLFAMFGATVLVPFLTGLPISAALLASGIGTLLYILITKAQIPAYLGSSFAFITPIITGLSTHSLGDMLVALFMSGVMYVIIGILIKLSGTAWLMKLLPPVVVGPVIMVIGLSLAPTAVNMAMYENPGDMKGYNISFLIVAMITLLVTIFVQGFFKGFLSLIPVLVGIIVGYVVAIFMGIVKFDAIMSAKWIDFPHIYLPFKDYVPSFHLGLVLVMIPIVFVTVSEHIGHQMVLNKIVGRNFFEKPGLDKSIIGDGVSTMFASIIGGPPSTTYGENIGVLAITRIYSIYVIGGAAVIAIVLAFIGKFTALISSIPTPVMGGVSILLFGIIAASGLRMLVESKVDFANNRNLVIASVILVVGIGNLVFNLKEIGINLQIEGMALAALSGIILNLILPKEKKQNN

SEQ ID NO: 20060 - protein, 109 aa, Thermoplasma volcanium GSS1
MQARNIGLDVSVPEKECTDPHCPFHGNLPVRGQVLTGKVISTAMTRSVVVAREYQQYIPKYERKATKIKKYHVHVPDCIELRVGDTVRFAECRKLAKTISFVVVEKVKQ

SEQ ID NO: 20061 - protein, 376 aa, Candida albicans SC5314
MSLSPKLEEIVSSIEKSFEIKDDFLVKATEYFIESMNVGLESPKPSKDVMPMIPTYVTSIPTGKEVGLYLAADLGGTNFRVCSIDLKGDHTFSMKQSKYRIPVDLMKAEKSNDLFGFLAKKVQSFLLENHSEACTAKNTEPLKLGFTFSFPVNQTALNRGTLIRWTKGFDIPDTVDRDVVELLQANLTILEVNVKVVAIANDTVGTLLTAAYSNDSAKTNRNTIIGCIFGTGTNGAYFESKIPKLSSSTGDNKGMVINTEWGSFDNGLKILPSTEFDEIVDSETANPGYHLFEKRISGMFLGEILRVALIHLFKKGLIFQELYKARGGSLPHRIEEPWLLDAEVLSYLQIDDSTDLKTSGLILQNVSQIGNQQGGT

SEQ ID NO: 20062 - protein, 385 aa, Zea mays
MVLSHASSGRDDDAVASTFASRYVRERLPRYRMPERSIPREAAQQIISDELMLDGNPRLNLASFVTTWMEPECDKLIMDSINKNYVDMDEYPVTTELQNRCVNMIAHLFNAPIKEDETAIGVGTVGSSEAIMLAGLAFKRKWQNKRKEQGKPCDRPNIVTGANVQVCWEKFARYFEVELKEVKLSEGYYVMDPVKAVEMVDENTICVAAILGSTLTGEFEDVKQLNDLLTDKNKETGWDVPIHVDAASGGFIAPFLYPELEWDFRLPLVKSINVSGHKYGLVYPGVGWVIWRSKEDLPEELIFHINYLGTDQPTFTLNFSKGSSQIIAQYYQLIRLGFEVLLFFDRFFLLLIEHSEYICAGEQKGVLSDTLLEGVSFLFQFSLVL

SEQ ID NO: 20063 - protein, 131 aa, Arabidopsis thaliana
MDQGGRGVGAEHGKYRGVRRRPWGKYAAEIRDSRKHGERVWLGTFDTAEEAARAYDQAAYSMRGQAAILNFPHEYNMGSGGSSSTAMAGSSSSSASASSSSRQVFEFEYLDDSVLEELLEEGEKPNKGKKK

SEQ ID NO: 20064 - protein, 159 aa, Streptococcus pyogenes M49 591
MPNLYDFTVKAQNGNDLSLAAYKKKVVLIVNTATKCGLTPQYQALQALYDTYHDKGFEVLDFPCNQFLNQAPGDAEEINHFCSLTYHTTFPRFAKIKVNGKDADPLFTWLKEEKSGPLGKRIEWNFTKFLIGQNGQVIKRYSSKTDPKLIEEDLKALLG

SEQ ID NO: 20065 - protein, 290 aa, Zea mays
MGKDDVIESGAGGGEFAAKDYTDPPPAPLIDAAELGSWSLYRAVIAEFIATLLFLYITVATVIGYKHQTDASASGADAACGGVGVLGIAWAFGGMIFVLVYCTAGISGGHINPAVTFGLFLARKVSLVRALLYIVAQCLGAICGVGLVKAFQSAYFDRYGGGANSLASGYSRGTGLGAEIIGTFVLVYTVFSATDPKRNARDSHVPVLAPLPIGFAVFMVHLATIPVTGTGINPARSLGAAVIYNKDKPWDDHWIFWVGPLVGAAIAAFYHQYILRAGAIKALGSFRSNA

SEQ ID NO: 20066 - protein, 398 aa, Desulfitobacterium hafniense DCB-2
MRKKECIAMLLAGGQGSRLGCLTRNIPKPAVSFAGKYRIIDFSLSNCSNSNIDTVGVLTQYKPFALNTYINMGSAWDLNCLNGGIHILPPFVGEAQGSWYKGTANAIYQNMDFINFYNPEYILILSGDHIYQMDYYEMLSCHKQKHAEVTLSAIAVPWEEASRFGVMVTDAGGRIIRFEEKPPRPESNLASMGVYIFNWDVLKEALLEDERDPQSDHDFGKNVLPRLLQQGRRLYSYLFHGYWRDVGTIESYYNANMEVLQEERVDKFFELKQRVFSNEEILAPQHLGERAKIHNSLIGNGCTILGEVRDSVIASGVYVGEGSLIEQSILLPNSEIYEDVRLHKTILGENAIVRAHCRIGDKREGNPPQEGITVIGDHLHIPEGTVISEGENVRKDTA

SEQ ID NO: 20067 - protein, 372 aa, Desulfitobacterium hafniense DCB-2
MTNAIGMIFGNLNSSALQGLDPNRPIGTVPFGGRYRLLDFALSSMVNSGIHTVGLITPQQYRPMLDHLGAGRDWSLDRKSGGLFFLPGVIHSLNHTVHFSLQDIAVNIDFLEKDCAKNIIISSSDQVFNLDFRPVLEEHEQAQADITLVYNQSVHPPEGSERIYLRMNAHKKVTAMSKSKEVAGLQSPWNYFIDILIIRRELLLQMLRGYGSIGTIELSEVIAHHLDIINVQGYFCGGYVGRIRSVQDYFLNNMALLQEEVRRDLFINTRPIRTKIRDNPPTKYGKQAQVKNSLISSGCTLEGKVENTILSRGVVIEEGCEVRNCIIMSKCVIGKHSVLENLIMDKFVEINEGSVLKGQPNKLMVIPKKAVI

SEQ ID NO: 20068 - protein, 135 aa, Geobacillus kaustophilus HTA426
MHPVILFDGDCLFCHASAHWIAARDRQAVFRFAAQQSAVGQALLAKQEMSAGDSVVLIENGCCYVKSDAVLRIGRRLAWPWNWLAASGFLIPRLLRDHIYDTVANHRHRLTLKRDHCQLPPPELRSRFLDEWPLW

SEQ ID NO: 20069 - protein, 1193 aa, Desulfitobacterium hafniense DCB-2
MVLAYHNSHDPFFRSPFGAVPCGGLLRLRLLMQPEDSSGAGSPVQECFLRLWVQDREERLPMLRVEEPILWEINREGTVTGEEAITGEGVLTGEGVVYEVEYPLPHEPGIIWYYFIFRAGGETCFYGNNQEELGGVGELRSSEPPGYQITVYRPMALPGWYTQGIMYQIYVDRFFNGDEQGKVLNPRPRSLIHGDWSDTPFYIKNEKGEVLRWDFFGGNLAGVIKKLPYLKELGVSILYLNPIFDSSSNHKYDTGDYLTLDPMYGDEEIFAQLIKEAQSLGIAIILDGVFSHTGDDSIYFNRYGRYPGLGAYQSPDSPYYSWYQCHGEGQEKEYSCWWGVSTLPEVWEMEPSYREFIIHSPQGVLQSWMKRGIKGWRLDVADELPDEFIQEFRQMMKTMDPEGVLIGEVWEDPTHKFSYGKLRQYFWGEELDATMNYPLRNIFLQYFLGQIDAGQAHKRIMNLYENYPRENFFGQMNLIGSHDRARILTLLGEAPPPEQLSAVEQEQYRLPAPARDLAVQRLKLLTLLQMSFPGVPCLYYGDEAGCEGYPDPYNRGTYPWGREDQEILQWFKRVLRYRREYEVLRQGEFSSWFEGKEIYVLQRKGEKEEIIVLVNRSAEESTEMTLKLEQNVGQVIDIFAGEVLHSLSLILPPLSAKALFYQKYERGHYFKQEIMTRACGILMHISSLPSPWGIGDLGEEAYAFVDFLAEGGQSLWQVLPLNPLGLGDSPYQSESALAGNFLLISLDLLIEAGLLTEGEARREWADYGQEVKKTEGSEGSEGSEGSEGSEGLGSEGFAWVERYKEKLLRKAYERFKEKLPRYPLDLSSPEGGSQPGTKGYLDPQGYDRFIEENQDWLQDYALYKCLKLKFPGKAWHQWEESYRLRKPEALEAVTEDYAEEINYIFFVQYTFADQWQRLKDYAQEKGVKIIGDLPIYVAYDSCDTWANRECFALDENNAPAGTAGVPPDYFNPEGQNWGNPLYDWDALRAADYAWWKLRFRQGLERFDALRLDHFRGFEGYWEVPPQAGSAKEGRWLKGPGKEFFESLVRELGPLPVIAEDLGCITPEVNTLRAILGFPGMRVTQFSPLQQEGNYVDYSGTHDNDTLLGWYRSQGYSDKDSLAQVERTIEELYQGNGIWVIFPLQDILKLDSRARMNTPGTIKGNWQWRVERGTLTQEVCARLRGLAEKYGRLS

SEQ ID NO: 20070 - protein, 765 aa, Listeria monocytogenes str. 4b F2365
MVKAISSNLGYPRLGEKREWKRALEKFWNGTISEKELLAETKILRLHALKKQQDKGIDLIPVGDFSFYDQVLDTSVTFGIIPKRFQHDGGKVSLNTYFDIARGKNDAVASEMTKWFNTNYHYIVPELADAEPKVLDNRALYYYEEAKKELGIEGKPVLVGPITYLKLGKGSDAKSFEVLLDKFIPAYVEILKELEAAGAKWVQIDEPYLATSFDKKEIALFEKVYQAFQTAVPNLKIELQTYFESLDYYEEVVNLPVAAIGIDFVHDHGDSIKALKAHGFPEDKYLAAGVVDGRNVWRSDLDAKLELLTEIANYVADGKLIVQPSNSLLHVPVTKLSEPDLDEVILGGLSFADQKLEEITILTKALTNGAESVAAELEESRAAVTALNESSHRNNLEVQEAIANLKNVRVDRELPFAERIKLQHAWLKLPLFPTTTIGSFPQSPEVRKTRADWLKGNITDAEYNAFIEKETARWIKIQEDLDIDVLVHGEFERTDMVEYFGQKLAGFQATKFGWVQSYGSRAVRPPLIYGDVAFTEEITVKESVYAQSLTKRPVKGMLTAPVTIINWSFVRDDVPESVVANQVGLALRKEVEALERNGIKVIQVDEPALREGLPLKQARWQKYLDDAVYSFKLTTASVQNDTQIHTHMCYSDFDDIIDTISALDADVISIETSRSHGEIISTFEEVTYDKEIGLGVYDIHSPRVPTVTEIQDNIRRALRAIDAKQFWINPDCGLKTRKEPETIAALQDMIKATKEVRAEYQVLEK

SEQ ID NO: 20071 - protein, 506 aa, Geobacillus kaustophilus HTA426
MIPVVTSDEMYAIDREVTERIGISADSLMENAGQALFRVLKGRIPRADRVAVLAGAGNNGGDGFVVARMLKSCGYETDVWLIPPKEKVKGAARTALEVYERSGYSWIPYEGNEQEFAMRAPHYDVIIDALLGIGVKGEVRSPYQEIIEQLNRSRAVVYAIDVPSGVPADGGDVAAAVRADMTLTIQCPKLGAYTFPAADYYGELAVVDIGIPPLVVKTNAARRFVWERSDVMRTMPKRRRSSHKGTYGKLLVVGGSKAMAGAVTLAAKAALRSGAGLVTMAVPETVYEAVANRMPEAMCRPWPAEGGAFAGAADWNGLDVDALAVGPGMGRTEGVRRLVGELVRKPVPLILDADALFFWDDYAEQVRRRSAPTVITPHPGEMARIVRRSIREVEHDRFGLSKRLAMEYGVYVVLKGPYTIVTAPDGSQYVNTTGNPALAKGGSGDVLTGIVAAFLLQHEAVQPAVSNAAFVHGKAADWLVQHGHSPWDVLASDVVEALPAVLASLA

SEQ ID NO: 20072 - protein, 332 aa, Nostoc sp. PCC 7120
MTLPTETSSPKSSAMKTAPTATDLVRTYLREIGRVPLLSHEEEIRYGKQVQRSTTLQEMREELATQSGREPSVEEWAKAANLNPADLLEAIADGEIAKRKMVEANLRLVVSVAKKYIKRNVDLLDLIQEGSIGMQRGVEKFDPTKGYRFSTYAYWWIRQAITRAIAEKARTIRLPIHITEKLNKIKKAQRQLSQRLGRAPTAGELANELELTPKQVREYLEKARLPLSLDLRLGDNYDTELGEMLEDPGASPEDFVMQSSLSNDLEVLMEQLTPQQKEVITLRFGLIDGQALTLARIGEILNISRERVRQIEREALTKLRKSKANMGEYLAS

SEQ ID NO: 20073 - protein, 250 aa, Glycine max
MAATQLTASPVTVSARSLASLRASSAKFGTLKPGTLKQSQFRSFVVRAASVVAPKYTSIKPLGDRVLVKIKEAEEKTMGGILLPSTAQSKPQGGEVVTVGEGRTIGKTKIDIDVPTGAQIIYSKYAGTEVEFNDVQHLILKEDDIVGLLETEDIKDLKPLNDRVFIKVAEAEEKTAGGLLLTETTKEKPSIGTVIAVGPGSLDEEGKRQPLSISTGSTVLYSKYAGNDFKGKDGSNYIALRASDVMAILS

SEQ ID NO: 20074 - protein, 455 aa, Debaryomyces hansenii
MVLPHEPEFQQAYNELVSALEDSTLFTEKPEYKKVIPVVSVPERIIQFRVAWENDNGDVEVNNGYRVQFNSALGPFKGGLRFHPSVNLSILKFLGFEQIFKNALTGLSMGGGKGGCDFNPKGRTDSEIRRFCVAFMRQLARYIGSDTDVPAGDIGVGSREVGYMFGAYKQMQNNWSGILTGKGLSWGGSLIRPEATGYGVVYFVEKMIEKATGGKESFKGKRVAISGSGNVAQYAALKVIELGSTVVSLSDSKGCIISQTGITPDQIKAIAAAKIHFKTLEEITKESASLFSGSNEVQYIAGVRPWTHCGQVDVALPSATQNEVSGEEAKALVEAGCKFVAEGSNMGSTKEAIDVFEANRSKAVWYAPGKAANCGGVAVSGLEMAQNSQRVTWAAEEVDEKLKNIMYTCFDNCYANAAKYSAEKDAENLPSLLKGANITGFIKVADAMFDQGEVF

SEQ ID NO: 20075 - protein, 322 aa, Streptococcus pneumoniae R6
MSTLDKNLLLEMFRKMEEIRRMDLKIAQLVKKGKVPGMTHFSVGEEAANVGAMLALNPDDLITSNHRGHGQAIAKGIDLNGMMAEILGKYTGTCKGKGGSMHIADLDAGNLGANGIVGGGMGIAVGAALSQQMQNTGKIVVCFFGDGATNEGVFHEAVNMASIWNLPVIFYCINNGYGISADIKKMTNIEHIHQRSAAYGIPGMFIEDGNNVIDVYEGFQKAVDHVRSGNGPVLIESVTYRWLGHSSSDPGKYRTREEVELWKQKDPIENLRNYLIENNIASAEELEKIQAQVKEAVEASVKFAEESPFPPLESAFEDIYTD

SEQ ID NO: 20076 - protein, 432 aa, Listeria monocytogenes str. 4b F2365
MDHSMSKKLHDEALLHIVGGVNSPSRSNKGVGGGIPVTMERASGAYFYDVDGNKYIDYLAAFGPIITGHAHPHITEAITKAAQNGVLYGTPTKHEITFAKMLKEAIPSLEKVRFTNSGTEAVMTTIRVARAYTGRDKIIKFAGCYHGHFDLVLVEAGSGPSTLGIPDSAGVTKSTAEEVITVPFNDFASFKEALAVWGDQVAAVLVEPIVGNFGMVAPEDGFLEAVNELAHANGSLVIYDEVITAFRFMYGGAQNYLGVIPDLTAMGKIIGGGLPIGAYGGRIDIMEKVAPLGPAYQAGTHAGNPASILSGIACLEVLQEEGLYERFEKYGSMLKDGIEKAALKHGIAVTVNQIVGALTVYFTEDPVTNYAEAGATNGELFGRFFKGMLEEGINLAPSKYEAWFITSAHSEADILETIQAVDTVFGKMVQDN

SEQ ID NO: 20077 - protein, 453 aa, Streptococcus pneumoniae R6
MYKTKCLREKLVLFLKIFFPILIYQFANYSASFVDTAMTGQYNTMDLAGVSMATSIWNPFFTFLTGIVSALVPIIGHHLGRGKKEEVASDFYQFIYLALGLSVVLLGMVLFLAPTILNHIGLEAAVAAVAVRYLWFLSIGIIPLLLFSVIRSLLDSLGLTKLSMYLMLLLLPLNSGFNYLLIYGAFGVPELGGAGAGLGTSLAYWVLLGISVLVLFKQEKLKALHLEKRILLNMDKIKEGVRLGLPIGGTVFAEVAVFSVVGLIMAKFSSLIIASHQSAMNFSSLMYAFPMSISSAMAIVVSYEVGAKRFDDAKTYIGLGRWTALIFAAFTLTFLYIFRGNVASLYGNDPKFIDLTARFLTYSLFFQLADTFAAPLQGILRGYKDTVIPFYLGLLGYWGVAIPVATLFDSLTDFGAYSYWIGLIISLIVSGALYRWRLTVIMKRFESLAKSKR

SEQ ID NO: 20078 - protein, 122 aa, Tiquilia nuttallii
ATDKYIDVHYDITTVTEAKPLLKEALQAAVGLPCDRNVPVIGFIGRLEEQKGSDILVSAIHKFIGMDVQIVVLGTGKKKFEKEIQELEVSYPDKARGVAKFNVPLAHMITAGADYMLVPSRF

SEQ ID NO: 20079 - protein, 595 aa, Dunaliella tertiolecta
MASVDCTLVSARGIKDVEIVGKQSPYAVLTVGPKTFKSGTANGGGSDPVWNQTFSFTNVTPDSSVKLEIFNSNVVLRDVAIGGCKAPMDKALSAGKDELTLPIITKKGKPHGEVKLILTLKPDATKQMVTSHKTRKAAGAWILPTYGNTDCWKDYEPGTLLGKGTFGTTYLATEKKTGQKCAVKVISKRKLTTPDEVDDVKKEVQIMHHLAGHPNVVGLKGVYEDKSNVCLAMEVATGGELFDSIVKRGHYSERDAAELIRTIVSVVAHCHNMGVIHRDLKPENFLLSDKSPRAQLKATDFGLSSFFQEGQVFTDIVGSAYYVAPEVLRRSYGKEADIWSCGIILYILLCGFPPFHGDSEKKIFEAIISKSVDFNTQPWPRISAPAKDCVKRMLQRDPKKRATANEIMQHDWMRENGVASDEPLEMEVVSRIKNFSGMNKLKKEALKVIAVNLPIDEISGMREMFMDIDKDKSGNITIDEFAAALHKKGQIVTEKEIEKIMKEADVDGDGTIDYEEFLAATINLGKLQREENLKTAFEHFDLDGNGEISHNELVQCLSKLGINDAHVKDIIKEVDADGNGQIDYNEFCIMMRNLD

SEQ ID NO: 20080 - protein, 1134 aa, Methylobacillus flagellatus KT
MNKRQLQGKLKAEKDLRFNDDPLWYKDAVIYQVHVKSFFDANNDGIGDFAGLIRKLDYIVELGVNTIWLLPFYPSPRRDDGYDIAEYKGVHPDYGTLFDVKRFIVEAHKRKLRVITELIINHTSDQHPWFQRARRAKPGSAARNFYVWSDTDTAYSQTRIIFTDTEKSNWTWDPVAGAYYWHRFFSHQPDLNFDNPRVFKAIISIMRFWLDLGVDGLRLDAVPYLIEREGTSNENLPETHEILKRIRSEIDQNYPDRMLLAEANMWPEDVQEYFGDGSNECHMAFHFPLMPRMYLALAQEDRFPISDILRQTPEIPPTCQWAIFLRNHDELTLEMVTDKERAYMLNFYATESRARLNVGIRRRLAPLLQRDRRRLELLNSLLLSMPGTPVIYYGDEIGMGDNIHLGDRDGVRTPMQWSPDRNGGFSHADPARLVLPPIMDTQYGYHAINVEAQSSDPHSLLNWMRRLLAIRKQYHAFGRGSMRLLYPNNRKILSYLRTHIPGGESADEEQIILCVANISSTAQAVELDLAEFSGYDPMEMMGGSVFPRIGQQPYVLTLGAYDFYWFRLTKNRQPLNGAGEQDGSLPEYLTLVLNQQLTSLFAPQLRRTMEQDILPAYLPCQRWYAGKQKDTLAAIQLTLLGVLDAIDPAEPPFLLAQVETSTATGADQYFLPMGVVSDEQEMPALVRRLALANVRRGPRVGALTDAFALDGFVRAVLHHLRSDSTLDSEQGSIHFNSTASLHQVDFKTELEIRRTDQEQSNSSLIINDLAVMKLLRRVQPGINPELEVARHLAKVGYANTPPLLGDVTFIDADGMPHTQVIMQAFVHNQGNAWQWTLDRLNRLLHDNLSADLMKQALAVDDASPLKELTNFAAMLGQRLAELHIALTKDTDNPSFSPEIFSAAQVETWRDKLHEQADDVLALLDRGPWSGDADAQHASAICSRREQLFQAIDELVQHVVGQPRIRIHSDFHLGQVLMISGDVMIIDFEGEPARSLEQRRQKDHPFRDVAGLLRSFSYAAAHVEKSDMGKPAGEHAERRQGLLRDYEGCSKRAFMQAYFAHSHLPPTSQAPDSAPVLAEELPAGDQAILNLCLLEKVIYEIAYEAANRPAWIGIPMRGLLGLLDEMRADGNPEQP

SEQ ID NO: 20081 - protein, 122 aa, Tiquilia nuttallii
  misc_feature (61)..(61): Xaa can be any naturally occurring amino acid
  unsure (1)..(122): unsure at all Xaa locations
ATDKYIDVHYDITTVTEAKPLLKEALQAAVGLPCDRNVPVIGFIGRLEEQKGSDILVSAIXKFIGMDVQIVVLGTGKKKFEKEIQELEVSYPDKARGVAKFNVPLAHMITAGADYMLVPSRF

SEQ ID NO: 20082 - protein, 543 aa, Glycine max
  misc_feature (295)..(295): Xaa can be any naturally occurring amino acid
  misc_feature (448)..(448): Xaa can be any naturally occurring amino acid
  unsure (1)..(543): unsure at all Xaa locations
MASISHFRTSANSFLSQYEPLSLLLAPLLSLLFAHALRSFFHLLSQNGLKATLLGFLINSLKLVPGVKGYIDAEKQKVVDKLQSDGKSKREGWKTELPSTGLGTSVLEKMREEKINDAVWQGKCSGTVYIGGSESDGHFSLINEACSMFAHTNPLHLDVFKSVARFEAEVVAMTAALLGSKEKSSGRQICGNMTSGGTESILLAVKSSRDYMKSKKGITRPEMIIPESGHSAYDKAAQYFNIKLWRVPVNKNFQADVKAIRRHINKNTILIVGSAPGFPHGVIDPIEIIWQFLPXELGHLASSFGICFHVDLCLGGFVLPFARELGYHIPPFDFSVKGVSSISVDVHKYGLAPKGTSVVLYRNHEIRKHQFVAVTEWSGGLYVSPTIAGSRPGSLIAGAWAAMMSLGKEGYLKNTKAIMEGSRRIQKGIEEIAELFIVGKPDMTIGAXGSAVLDIFEVNDVMSSKGWHLNALQRPNSIHICVTLQHVPIVEDFLNDLKESVKTVKANPGPISGGLAPIYGAAGKMPDRGMVQELLVDYMDGTC

SEQ ID NO: 20083 - protein, 268 aa, Vibrio parahaemolyticus RIMD 2210633
MSRYEKMFARLNEKNQGAFVPFVTVCDPNAEQSYKIMETLVESGADALELGIPFSDPLADGPTIQGANIRALDSGATPDICFEQIGKIRAKYPDLPIGLLMYANLVYSRGIESFYERCAKAGIDSVLIADVPTNESAEFVAAAEKFGIHPIFIAPPTASDETLKQVSELGGGYTYLLSRAGVTGAETKANMPVDHMLEKLNQFNAPPALLGFGISEPAQVKQAIEAGAAGAISGSAVVKIIEAHVEQPQIMLDKLGEFVSAMKAATQK

SEQ ID NO: 20084 - protein, 314 aa, Shigella flexneri 2a str. 301
MDIPNMQNAGSLVVLGSINADHILNLQSFPTPGETVTGNHYQVAFGGKGANQAVAAGRSGANIAFIACTGDDSIGESVRQQLATDNIDITPVSVIKGESTGVALIFVNGEGENVIGIHAGANAALSPSLVEAQRERIANASALLMQLESPLESVMAAAKIAHQNKTIVALNPAPARELPDELLALVDIITPNETEAEKLTGIRVENDEDAAKAAQVLHEKGIRTVLITLGSRGVWASVNGEGQRVPGFRVQAVDTIAAGDTFNGALITALLEEKPLPEAIRFAHAAAAIAVTRKGAQPSVPWREEIDAFLDRQR

SEQ ID NO: 20085 - protein, 149 aa, Thermoplasma volcanium GSS1
MRAETVKRIVSDLKGVGTSRVYIDTNKLDKIDEAATRSDILALIEQDVVKIKQKKGISNGRLKKRIKQLSKDRRRGPGSLRGTRNARYKRKERWIDTIRALRDELRKLKKDGKIDPAVYRKYYRIIKSGSIKSRAQLVSHIKSAGLLKE

SEQ ID NO: 20086 - protein, 480 aa, Geobacter metallireducens GS-15
MKEYRLFINGEWVPSSTGTMADDINPATGDVYAKVHQASRDDIEQAIASAYRARVDWGKTVPAQREAILIKAAAILEERIPEFAEVLIEEGGATFGKAMFESSFVVTLLRSAAGECRRIFGETIPSDAPGLFSMSVRRPLGVIAGISPFNFPFLLAMKKVALALAAGNTFVLKPASPTPVIGLKIAELFEAAGLPKGVLNVIPVKGSTLGNTLVEDPRIRMVTFTGSTDVGKQLAEVAGRHQKKITLEMGGKSPLIVLKDADIDYAVDAAVFGIFLHQGQVCMANSRLIVEADIYDRFCEKLTAKVKGLKMGDPHKPDTVIGPLIDAKQCAFIDSQVHDALADGARVLSGGRSEGAFYQPTIVADVTRKMRIFDEESFGPVVCVIKAANSEEALALANDSSFGLSAGLITNDLQKAFDLSLRLESGMVHINDSSIFDEPHVPFGGVKDSGVGREGGHYSMEEMTEVKWITVQMGKRQFPF

SEQ ID NO: 20087 - protein, 640 aa, Lycopersicon esculentum
MFSLNGTSFTNNSLSGVSRCLNQSSRRVSAPMVVVAAVNSNGKPGDGSVSVLVENALTESPAPVEMEVKSTVTGGVQDVYGEDSATEDQSITPWTLSVASGFSLLRNPHYNKGLAFSERERDTHYLRGLLPPVVISHDLQVKKMMNSIRKYDVPLQRYMAMMDLQEMNERLFYKLLIDNVEELLPIVYTPTVGEACQKYGSIFRRPQGLFISLKEKGKIHEVLKNWPEKKIQVIVVTDGERILGLGDLGCQGMGIPVGKLSLYTALGGIRPSACLPVTIDVGTNNENLLNDEFYIGLRQRRATGQEYSELLDEFMYAVKQNYGEKVLIQFEDFANHNAFDLLAKYGTSHLVFNDDIQGTASVVLAGLMAALNLVGGSLSEHTFLFLGAGEAGTGIAELIALEMSKQTGIPLEETRKKIWMVDSKGLIVKSRMEMLQHFKRPWAHDHEPVQELVNAVKSIKPTVLIGSSGAGRTFTKEVVQAMATFNEKPIIFALSNPTSQSECTAEEAYSWSEGRAIFASGSPFAPVEYNGKVYASGQANNAYIFPGFGLGLIISGAIRVHDDMLLVASEALADEVSQENFEKGLIYPPFSNIRKISAHIRAKVAAKAYELGLATRLPQPKDLVAYAESCMYSPAYRSYR

SEQ ID NO: 20088 - protein, 484 aa, Momordica charantia
MVLQSSNNAKKLLSKLATGNGHGEDSPYFDGWKAYDSDPFHPTLNPRGVIEMGQAENQLSFGFVEKWMRNNPQASICTAEGIDEFKDVDIFQDYHGLPEFRNAVANFMGKVRGDRVKFDPDRVVMSGGATGAHETVAFCLADPGEAFLVPVPYYPGFDRDLRWRTGVEIVPVICESSNNFRLTREALETAYEEAQKSDTKIKGLLITNPSNPLGTVYDRETLETAVAFINDKNIHLVCDEIYAATVFAEPGFVSISEVIENDPSCDRNLIHVVYSLSKDMGFPGFRVGIIYSYNDAVVSCARKMSSFGLVSSQTQHMIASMLSDDEFVESFLVGSAEKLAARHRSFTKGLAQVGIGYLQGSGGLFLWMDLRHLLKEKTLEAEMALWRVIINEVKLNVSPGSSFHCSEPGWFRVCFANMDDKTMDISITRIRTFVLQNKEATKIKKHKFCWRQSSLELRLSSRRLEDIMSPHSPLPQSPMLRATT

SEQ ID NO: 20089 - protein, 463 aa, Ralstonia eutropha JMP134
MTPNLQSHGAVPVHPVDEVLPAPRLLALGLQHVLVMYAGAIAVPLIVGGALKLPKDQIAFLIAADLFCCGLVTMIQSIGIWKVGIRLPVMMGVTFTAIAPIIATGSNPSLGLPAVFGAVMLAGIFTFLVAPYVGKMVRWFPPVVTGTVVLVIGISLMRVGINWAAGGNPMISTPNGPVPNPNFGVPVNIAIATVVLLTVLALVAFAKGFLCNVAVLIGILTGFAIALSLGKVSFDGLAAAHWVELITPFHFGWPTFDPMTTVTLCVVMVVIMIEGVGQFLALGEIVGRPVTCDDLTRGLRADGVGALVGAVFNTFTYTSYAQNVGLVQVTGVRSRWVCATAGAILVVLGCLPKLAFFAASIPQYVLGGAALVMFGMVAATGVRILGHVDFVENKKNAYIVAVSIALGMIPLVSERFFSQMPELLAKFCQNGILLGTLSAVLLNVLFNARSPQPQAHGLAKEPA

SEQ ID NO: 20090 - protein, 463 aa, Leifsonia xyli subsp. xyli str. CTCB07
MAAAPSRLDSVITLAQHRGFVFPSGDIYGGTRSAWDYGPLGVELKENIKREWWNSFVRGRGDMVGLDSAIILPTAVWEASGHVKVFSDPLTESLITHKRYRADHLFEAYEAEHGHPPANGLDDIADPDHPEKVGQWTPIRPFSGLMKTYLGIVDDESGLHYMRPETAQGIFTDFASVLQTSRKKPPFGIGQIGKAFRNEITPGNFIFRTREFEQMEIEFFVEPGTDEEWFDTWIDLSWEWFTGLGIKPENIRRFEHPKDSLAHYSKRTIDIEYKFEFAGSEWGELMGVANRADFDLKTHIEHSGKDLSYFDQNKNERYVPFVIEPSFGLTRALMAFLVDAYDEEQAPNAKGGTDKRTVLHLDPRLAPVKVAVLPLSRNEALSPLARGLADRLRQRRAVDFDDSGAIGRRYRREDEIGTPLAVTVDFDSLEDDAVTVRDRDSMRQERIPLEGLDRYLAERLREV

SEQ ID NO: 20091 - protein, 579 aa, Lycopersicon esculentum
MESALKDLSTPTGGVEDVYGEDCATEDQCITPWTIAVSSGYNLLRDPRYNKGLAFTERERDAHYLRGLLPPVISSQELQEKKLMQSIRQYDVPLHKYVAMMELEERNERLFYKLLIDNVEELLPIVYTPTVGEACQKYGSLFKRPQGLYISLNEKGRILEVLKTWPEKSIQVIVVTDGERILGLGDLGCQGMGIPVGKLALYTALGGVRPSACLPITIDVGTNNEKLLNDEFYIGLRQRRATGQEYYDFLHEFMSAVKQNYGEKILVQFEDFANHNAFELLAKYRTSHLVFNDDIQGTASVVLAGLIASLKLLGGALCDHTFLFLGAGEAGTGIAELIALEISNKTNIPVEETRKKIWLVDSKGLIVSGRKETLQAFKKPWAHEHEPVNNLLDAVKAVKPTVLIGTSGTGRTFTKEVVEAMACMNKRPLIMALSNPTSQAECTAEEAYTWSEGRAVFASGSPFPSFEYDGKLNIPGQANNCYIFPGFGFGLVMSGTIRVHDDMLLAASEALAAQVTEEHYAKGMIYPPFADIRKISAHIAASVAAKAYELGVATRLPRPADLVKYAESCMYTPNYRSYR

SEQ ID NO: 20092 - protein, 586 aa, Thermoplasma volcanium GSS1
MSEIQRNNSVAFPIFIFYVIIVVAFWYFGHLGYVKLAIASLLVAPLFYITYLVASYAGPKKSKLYGLENLTAKLPAVKKAKGHVEFKYKMLWTAVIVILYFALSNIYIYGLNTAKTIDVFASFREIFAGASGSLMDLGIGPIVTASIVMQLFVGAKIFNLDLQNSEDKAIYQGVQKLLVIIMIFVEAIPQAFGYLVPDTKFVNSINSVLPGYGEFLAQTTIIMQLFFGSYLVFLMDEVVSKYGIGSGISLFIAADVSEQLFIGAFNWQALNNALTYSLKNPPAGAFPKMFYIIMHSSSAYLLTNGVVQILFAPPNPMIAVLGTLLIFFLVAYFQSSKIELPIAHERVRGARGRYPLQLLYASNIPVILATALLANVSMWTLLFWSSPVLSKVPLLGHNKFLGSYPSAAQAAALNISSTTPTGGLAYYLFSPNGLSDWLFPILQPSAYQNILLGHTPIEEAIHIIVFTAFMVGFSVLFAIFWIETTNMGASAVAKQIQSSGMQIPGFRRDPRVMERVLKKYIPAITIFSGAAVGLLAAGANLIGTVGDTSGTGLLLAVGIIIQFYEAMGREQLMEMHPVIRQFFVGG

SEQ ID NO: 20093 - protein, 172 aa, Glycine max
MGQVWASLQEKLQGRHWKERQVRKITDRVFDRLTEDTRKPEKDALKFEEVYIAVLCVYNDINKYLPGPHYDPPSKERLKELMKEFDIDMNGLLDREEFAEFIRKLTAESLCAISLKLIITLVAAPALALATKRATEGVPGVGKVVHKVPNAIYAAAITMAAVLIQRSAEGVE

SEQ ID NO: 20094 - protein, 502 aa, Capsicum annuum
MEIQFTNLVAFLLFLSSIILLLKKWKTQKLNLPPGPWKLPFIGSLHHLAVAGPLPHHGLKNLAKLYGPLMHLRLGEIPTVIISSPRMAKEVLKTHDLAFATRPKLVVADIVHYDSTDIAFSPYGEYWRQIRKICILELLSAKMVKFFSSIRQDELSMMVSSIRTMPNFPVNLTDKIFWFTSSVTCRSALGKICRDQDKLIIFMREIISLTGGFSIADFFPTWKMLHDVGGSKTRLLKAHRKIDEILEHVVNEHKQNRADGQKGNGEFGGEDLIDVLLRVRESGEVQISITDDNIKSILVDMFSAGSETSSTTIIWALAEMMKKPSVLAKAQAEVRQVLKEKKGFQQIDLDELKYLKLVIKETLRMHPPIPLLVPRECMKDTKIDGYNIPFKTRVIVNAWAIGRDPESWDDPESFSPERFENSSVDFLGSHHQFIPFGAGRRICPGMLFGLANVGQPLAQLLYHFDRKLPNGQSHENLDMTESPGISATRKDDLVLIATPYDP

SEQ ID NO: 20095 - protein, 232 aa, Geobacillus kaustophilus HTA426
MNNKKILVVDDDEDICCTIKQYLELHHYQVETVHSGVEALKMINDDFDLIVLDIMMEGIDGMELCTIIRDRVDYPIVFVSAKTLEEDKVQALAIGGDDYITKPFSLKELKARIDSHLRREERIRSNERYLLSSKNITIDLLANEVFCKGKKLPLTKKEYEIVKLLMLNKKVVFSKERIFERVWGIDSDSQLDTVTESIKNIRKKIKDVDPETSYIQTLYGLGYKWDVSNEKR

SEQ ID NO: 20096 - protein, 186 aa, Debaryomyces hansenii CBS767
RANLRTQKRLAASVVGVGKRKIWLDPNEATEISNANSRQAIRKLYRNGTIVKKPVVVHSRARARALLESKRAGRHMGYGKRKGTKDARMSAQVLWMRRLRVLRRLLAKYRDAGKIDKHLYHSLYKSAKGNAFKHKRSLVEHIIQAKAEALREKSLKDEAEARRSRNRAARERRQQRVNEKREALLN

SEQ ID NO: 20097 - protein, 556 aa, Zea mays
MAAPAPAPKQEELQPHAVRDQLPSVSYCLTSPPPWPEAVLLGFQHYLVMLGTTVIIPTALVPQMGGGNEEKARVVQTLLFVAGINTLVQSFLGTRLPAVMGASYTFVAPTISIVLAGRYSGIADPHEKFVRIMRGTQGAFIVASTLQIIMGFSGLWRIVVRLLSPLSAAPLVALVGFGLYELGFPSVAKCVEIGLPQILLLVALSQYIPHAAPLLSTAFERFAVIMSIALIWLYAFFLTVGGAYKNAAPKTQFHCRTDRSGLVGGAPWISVPYPFQWGAPTFDAGEAFAMMAASFVALVESTGAFIAVSRYASATPCPPSVMSRGIGWQGVGILLGGIFGTANGTSVSVENAGLLGLTRVGSRRVVQISAGFMIFFSILGKFGAVFASIPGPIIAAIYCLLFAYVGTAGVGFLQFCNLNSFRTKFILGFSLFMGLSVPQYFNEYTSVAGFGPVHTRARWCFVTTPLKKSCKLTDNAFSSCSHVQFNDMVNVVFSSKAFVGGAVAYFLDNTLQRRDGAVRKDRGHHFWDRFRSFKTDPRSEEFYSLPFNLNKFFPSF

SEQ ID NO: 20098 - protein, 680 aa, Burkholderia fungorum LB400
MTKKLNEVPVDDDATQSEENPAAVPAKVEKAKARDRRAKEKALLKDAFASSQPGTVEELEERRSKLRALIKLGKERGFLTYAEINDHLPDNFTETEAIEGIISTFNDMGVAVYEQAPDAETLLLNDNAPAASSDDEVEEEAEVALSTVDSEFGRTTDPVRMYMREMGTVELLTREGEIEIAKRIEDGLKHMVMAISACPTTIADILAMAERVANEEIRIDELVDGLIDANAEDADGFSAQEAEAIESEDEEVEEDSEEDEEEDDGTAQATANAAQMEALKRASLEKFAMISEWFDKMRRAFEKEGYKSKSYLKAQETIQNELMTIRFTARTVERLCDTLRAQVDEVRQVERQILHTVVDKCGMPRAEFIARFPGSETDLEWADKIVGEGHAYSAILTRNIPAIREQQQRLLDLQARVVLPLKDLKETNRQMAAGELKARQAKREMTEANLRLVISIAKKYTNRGLQFLDLIQEGNIGLMKAVDKFEYRRGYKFSTYATWWIRQAITRSIADQARTIRIPVHMIETINKMNRISRQILQETGLEPDPATLAEKMEMPEDKIRKIMKIAKEPISMETPIGDDDDSHLGDFIEDNNTVAPADAALHASMRDVVKDVLDSLTPREAKVLRMRFGIEMSTDHTLEEVGKQFDVTRERIRQIEAKALRKLRHPSRSDKLKSFLEGN

SEQ ID NO: 20099 - protein, 324 aa, Streptococcus pyogenes M49 591
MQLYTAPHILIATGGHPVFPDIEGAQYGISSDGFFALDEVPKRTAVVGAGYIAVELAGVLHALGSKTDLFIRHDRPLRSFDKAIVDVLVEEMAVGGPCLHPHSEVAKVVKNTDESLTLYLKDGQEVEVDQLIWAIGRKPNLEGFGLDKTGVTLNEKGYIKTDAYENTSVKGIYAVRDVNGKLALTPVAVAAGRRLSERLFNGKTDEKLDYQNVATVIFSHPVIGSVGLSEEAAVKQYGQEAVKTYQSRFTSMFTAITNHRQPCLMKLVTVGDTEKIVGLHGIGYGVDEMIQGFAVAIKMGATKADFDNTVAIHPTGSEEFVTMR

SEQ ID NO: 20100 - protein, 492 aa, Mycobacterium avium subsp. paratuberculosis K-10
MAPGGGRGSKTAGYGNSDFVVVANRLPVDQERLPDGSTAWKRSPGGLVTALEPLLRRQRGAWVGWPGIVDEDVDHEDDPIVQDDLELRPVKLSADDVAEYYEGFSNATLWPLYHDVIVKPIYHREWWDRYVAVNRRFAEATSRAAARGATVWVQDYQLQLVPAMLRELRPDLTIGFFLHIPFPPVELFMQLPWRTEIVKGLLGADLVGFHLTGGAQNFLFLSRRLIGANTSRGAVGMRSRYGEVELESRVVRVGAFPISIDSTALDQTARHRDIRRRAREIRAELGNPRKVLLGVDRLDYTKGIDVRLKAFSELLAEGRAKRDDTVLVQLATPSRERVDSYQQLRNDIERQVGHINGEYGEVGHPVVHYLHRPVPRNELIAFFVAADVMLVTPLRDGMNLVAKEYVACRSDLGGALVLSEFTGAAAELRQAYLVNPHDLEGVKDTVEAALNQSVEEGRRRMRSLRRQVLAHDVDRWARSFLDALAESGPRDG

SEQ ID NO: 20101 - protein, 555 aa, secondary endosymbiont of Bemisia tabaci
MAAKDLKFGNDARKKMLKGVNILANAVKATLGPKGRNVVLDKPYGAPSITKDGVSVAREIELEDKFENMGAQMVKEVASKANDAAGDGTTTATVLAQSIVTEGLKAVAAGMNPMDLKRGIDKAVEAAVEELKIISKPCKDSKEIAQVGTISANADAKVGKLISDAMKRVTNEGVITVEEASGLEDDLIVVEGMQFDRGYLSPYFINKQESSSIEFDNPYILLVDKKISNIRDMLSILEVVAKEGKPLLIIAEDVEGEALATLVVNTMRGIVKVSAVKAPGFGDRRKEMLQDIAVLTHGHVISEETGDSLEKATKENLGNAKRVVITKDATTIIDGAGEKSKIEARIQNIKKQIENATSDYDKEKLQERVAKLSGGVAVIKVGAPTEIAMKEKKARVEDALQATRAAVEEGVVPGGGVALIRVASKIANSSLKGDNGDQNVGIRVALRAMESPLRQIVVNAGEEASVIANKIKENKGNDNYGYNAQTEAYGDMIEMGILDPTKVTRSALQYAASIAGLMITTECMVTDLPKEEKASDMGAGGMGGIGGMGGMNGMM

SEQ ID NO: 20102 - protein, 177 aa, Arabidopsis thaliana
MKIQCDVCEKAPATVICCADEAALCPQCDIEIHAANKLASKHQRLHLNSLSTKFPRCDICQEKAAFIFCVEDRALLCRDCDESIHVANSRSANHQRFLATGIKVALTSTICSKEIEKNQPEPSNNQQKANQIPAKSTSQQQQQPSSATPLPWAVDDFFHFSDIESTDKVVMRIEIQC

SEQ ID NO: 20103 - protein, 555 aa, secondary endosymbiont of Bemisia tabaci
MAAKDLKFGNDARKKMLKGVNILANAVKVTLGPKGRNVVLDKSYGAPSITKDGVSVAREIELEDKFENMGAQMVKEVASKANDAAGDGTTTATVLAQSIVTEGLKAVAAGMNPMDLKRGIDKAVEAAVEELKIISKPCKDSKEIAQVGTISANADAKVGKLISDAMKRVTNEGVITVEEASGLEDDLIVVEGMQFDRGYLSPYFINKQESSSIGFDNPYILLVDKKISNIGDMLSILEVVAKEGKPLLIIAEDVEGEALATLVVNTMRGIVKVSAVKAPGFGDRRKEMLQDIAVLTHGHVISEETGDSLEKATKENLGNAKRVVITKDATTIIDGAGEKSKIEARIQNIKKQIENATSDYDKEKLQERVAKLSGGVAVIKVGAPTEIAMKEKKARVEDALQATRAAVEEGVVPGGGVALIRVASKIANSSLKGDNEDQNVGIRVALRAMESPLRQIGVNAGEEASVIANKIKENKGNDNYGYNAQTEAYGDMIEMGILDPTKVTRSALQYAASIAGLMITTECMVTDLPKEEKASDMGAGGMGGIGGMGGMNGMM

SEQ ID NO: 20104 - protein, 303 aa, Escherichia coli
MVAINDLLDADYMAYMLKYDSTHGRFDGTVEVKDGHLIVNGKKIRVTAERDPANLKWDEVGVDVVAEATGLFLTDETARKHITAGAKKVVMTGPSKDNTPMFVKGANFDKYAGQDIVSNASCTTNCLAPLAKVINDNFGIIEGLMTTVHATTATQKTVDGPSHKDWRGGRGASQNIIPSSTGAAKAVGKVLPELNGKLTGMAFRVPTPNVSVVDLTVRLEKAATYEQIKAAVKAAAEGEMKGVLGYTEDDVVSTDFNGEVCTSVFDAKAGIALNDNFVKLVSWYDNETGYSNKVLDLIAHISK

SEQ ID NO: 20105 - protein, 555 aa, Pseudomonas fluorescens Pf-5
MSAAFRLPLQVFYEREARHPQQRFLVQPSAGGQVQELSWFEVGQQARRAAQWLRERQLPSGSHIAIIGKNSAHWVIADLAIWIAGHVSVPLYPNLTAESVAQVLEHSESALAFIGKLDDWPQMALGIKAGLPTIRLPLAPEGPFDFSWEDLQRCPPLEGSPSPAADQLATIIYTSGTTGLPKGVMHSFGNLGFAASHGVQMFGLGPEDRLLSYLPLCHVAERMFVEMAAIYTGQTVFFAESLDTFLADLQRARPTALFGVPRIWTKFQMGVYSKVPAKRLDFLLGLPFIGKRVGHKVLSGLGLDALRVALSGAAPVPQTLLHWYRRLGLDVLEVYGMTESCGYSHIGRSGEHVPGWIGRPCPEVEVRIDEAGEVQVRSGATMLGYFKDPQKTAETVTEDGFLRTGDKGEQDAAGNLRLTGRLKEIFKTSKGKYVAPAPIENRLAVHAHIEQVCVVGDGLIAPLGLCVLSAAGVQAAAGSAREGLHSSLESLLAQVNGSLDKHERLHRLVVVKDSWAVENGFLTPTLKIKRNVIEATYGGSFQAWSERSEAVLWQD

SEQ ID NO: 20106 - protein, 555 aa, secondary endosymbiont of Bemisia tabaci
MAAKDLKFGNDARKKMLKGVNILANAVKVTLGPKGRNVVLDKSYGAPSITKDGVSVAREIELEDKFENMGAQMVKEVASKANDAAGDGTTTATVLAQSIVTEGLKAVAAGMNPMDLKRGIDKAVEAAVEELKIISKPCKDSKEIAQVGTISANADAKVGKLISDAMKRVTNEGVITVEEASGLEDDLIVVEGMQFDRGYLSPYFINKQESSSIEFDNPYILLVDKKISNIRDMLSILEVVAKEGKPLLIIAEDVEGEALATLVVNTMRGIVKVSAVKAPGFGDRRKEMLQDIAVLTHGHVISEETGDSLEKATKENLGNAKRVVITKDATTIIDGAGEKSKIEARIQNIKKQIENATSDYDKEKLQERVAKLSGGVAVIKVGAPTEIAMKEKKACVEDALQATRAAVEEGVVPGGGVALIRVASKIANSSLKGDNEDQNVGIRVALRAMESPLRQIVVNAGEEASVIANKIKENKGNDNYGYNAQTEAYGDTIEMGILDPTKVTRSALQYAASIAGLMITTECMVTDLPKEEKASDMGAGGMGGIGGMGGMNGMM

SEQ ID NO: 20107 - protein, 329 aa, Burkholderia pseudomallei K96243
MQVPLDVVTYGEAMAMFVAAEPGPLDSATHFTRRIAGADLNVAIGLARLGFRVGWMSRVGADSFGRYVLDTLAREQVDASCVTVDARYPTGFQLKSRATDGADPSVEYFRKGSAASRLSLDDYVPDYVLGARHLHLTGVAPALSDSSRELAFHLACTTRAAGKTVSFDPNLRPTLWPSPEAMARTLNALAEHADWVLPGLAEGRQLTGLDTPADIARFYLERGARGVIVKLGAAGAYFRVADGREGEIAAERVEHVVDTVGAGDGFAVGVVSALLEGRAIDEAVARGNRIGALAIQVIGDSEGLPTRAALDRIENLSNARDRLEAPLAR

SEQ ID NO: 20108 - protein, 219 aa, Pseudomonas fluorescens Pf-5
MIDLYTAATPNGHKVSILLEELGLPYEVHALSFDKKEQKAPAFLKINPNGRIPAIVDRDNGDFPVFESGAILVYLAERTGQLLPADPKGRSLVMQWLMFQMGGVGPMQGQANVFFRYFPEKLQGAIDRYQHETRRLYEVLDSRLQQAEYLAGDYSIADIATFPWVRGHEWSGVSVQGLPALQRWMAALEARPAVQRGLQVPQRSDDASVVKGAQAMLIR

SEQ ID NO: 20109 - protein, 596 aa, Bartonella henselae str. Houston-1
MNFFNHSEKAKKFFHTKPSFSSLTTFSPYLVRYRWLFVFAFIALSVAALVTLTLPVAIRQMLDHGFSTSSHGHINFYFALLFVLALLLALASACRYYCVITLGERIVADLRRDVFVHIMKLSPAFFDRSHSGELVSRLLTDTTQIKLAVGSTASTALRHLIVVIGAIVMMVITNAKLSSLVLLAIPFVAIPLVVFGRKVRTRTRAAQDRIADANALATEQVSAIRTVQAFTAEKLVSKRFSQLVERAFQTARSSVILRSFFTGFAIFLVFGSVVAVLWIGSRDVLNGTMTGGALGQFVLYAVFGASTFAQLSELGAELIQAAGAAERLAELLQEQPTILAPKAPAPLAKPVQGALVFDQVDFTYSSRPQEKILRSLSFSVKPGETVAFVGASGAGKSTLFSLILRFYDPISGQIRFDGVEIKRLSLQDLRSSISYVPQDVAIFDGTLRDNIVFGTENMTEEQIIAAAKAANALEFIEALPNGLDTEVGERGIMLSGGQKQRIGIARAILRNAPLLLLDEATSALDANSEKLVQEALEELMQNRTTLVIAHRLATILKADRILVMEKGALVEEGTHAELVAQNGVYAYLAKLQFSPE

SEQ ID NO: 20110 - protein, 226 aa, Arabidopsis thaliana
NPFPPPVPTLLCLNSSSPKKKRLVAQEVDHNDPLRYLRMTTSSSKLLTVREEHELSARIQDLLKLERLQTELTERSGRQPTFAQWASAAGVDQKSLRQRIHHGTLCKDKMIKSNIRLVISIAKNYQGAGMNLQDLVQEGCRGLVRGAEKFDATKGFKFSTYAHWWIKQAVRKSLSDQSRMIRLPFHMVEATYRVKEARKQLYSETGKYPRPEKIAEATVSLRYGFS

SEQ ID NO: 20111 - protein, 495 aa, Arabidopsis thaliana
MDGADGTVRVKPGRGFETETDVAVSSPVTRQKAAAAKQFIENHYKNYLQGLHERMERRREFQRKVQEAQLPVEEQDEMMRNLARRETEYMRLQRRKIGIDDFELLTVIGKGAFGEVRLCRLRSTSEVYAMKKLKKTEMLSRGQVEHVRSERNLLAEVDSRYIVKLFYSFQDSECLYLIMEYLPGGDIMTLLMREDILSEDVARFYIAESILAIHSIHQHNYVHRDIKPDNLILDKSGHLKLSDFGLCKPLDDKYSSLLLEDDEMLSQDSENQSGKSDADKAPWQMPKEQLLQWKRNRRALAYSTVGTLDYMAPEVLLKKGYGMECDWWSLGAILYEMLVGYPPFCSDDPRITCRKIINWRVCLKFPEEPKISDEARDLICRLLCDVDSRLGTRGVEEIKSHPWFKGTPWDKLYDMEAAYRPIVDGELDTQNFEKFPEVEGSPSEAPQVGPWRKMLTSKDTNFIGFTFKKSDITRSMESSGSLHISCLYCLCVCLL

SEQ ID NO: 20112 - protein, 343 aa, Bartonella henselae str. Houston-1
MNERLEDIALTLVGAGKGILAADESTATIGKRFESIGVECTEDNRRAYREMLFTAKEAMESAISGVILFDETLRQKASTGQMLTDLIRDAGAVPGIKVDTGAKPLAAFPQETITEGLDGLRERLKDYYTLGARFAKWRAVIAIDAQTLPTRGAISQNAQALARYAALCQEAGLVPIVEPEVLMDGPSRQHSITRCFEVTKVVLHTVFKELFEARVLFEGMILKPNMVIDGKDARIASVEEVAEKTVHVLKQTVPAAVPGIAFLSGGQTDEEATAHLSAMNALGALPWKLTFSYGRALQAAALKAWAGKNENIVVAQKAFCHRARMNHLAALGQWTKDQEKSCA

SEQ ID NO: 20113 - protein, 450 aa, Bordetella bronchiseptica RB50
MAFDFDLYVIGAGSGGVRAARFAAGYGARVAVAESRYLGGTCVNVGCVPKKLLVYGAHFHEDFEQAAGFGWNPGRPEFDWPTLIANKNREIERLNGIYRNLLVNSGVALHEGHARIVDPHTVEINGQRHSAQHILVATGGWPFVPDIPGKEHAITSNDAFFLPELPRRVLVVGGGYIAVEFASIFNGLGAQTVQVYRRELFLRGFDGSVREHLRDELVKKGLDLRFNTDVERIDKRADGVLAVTLSDGSVLETDCVFYATGRRAMLDDLGLENTGVRLAESGYIEVDDEYRTSEPSILAIGDVIGRVPLTPVALAEGMAVARRLFRPQEYRKVDYDLIPTAVFSLPNIGTVGLTTEQALERGFRVTRYESRFRPMKLTLTQSQEKTLMKLVVDADSQKVLGCHMVGPDAGEIVQGLAVALKAGATKQVFDDTIGIHPTAAEEFVTMRTAT

SEQ ID NO: 20114 - protein, 491 aa, Shigella flexneri 2a str. 301
MANYFNTLNLRQQLAQLGKCRFMGRDEFADGASYLQGKKVVIVGCGAQGLNQGLNMRDSGLDISYALRKEAIAEKRASWRKATENGFKVGTYEELIPQADLVVNLTPDKQHSDVVRTVQPLMKDGAALGYSHGFNIVEVGEQIRKDITVVMVAPKCPGTEVREEYKRGFGVPTLIAVHPENDPKGEGMAIAKAWAAATGGHRAGVLESSFVAEVKSDLMGEQTILCGMLQAGSLLCFDKLVEEGTDPAYAEKLIQFGWETITEALKQGGITLMMDRLSNPAKLRAYALSEQLKEIMAPLFQKHMDDIISGEFSSGMMADWANDDKKLLTWREETGKTAFETAPQYEGKIGEQEYFDKGVLMIAMVKAGVELAFETMVDSGIIEESAYYESLHELPLIANTIVRKRLYEMNVVISDTAEYGNYLFSYACVPLLKPFMAELQPGDLGKAIPEGAVDNAQLRDVNEAIRSHAIEQVGKKLRGYMTDMKRIAVAG

SEQ ID NO: 20115 - protein, 224 aa, Arabidopsis thaliana
MAGGGGYGGASGKVDYVFKVVLIGDSAVGKSQLLARFARDEFSMDSKATIGVEFQTRTLSIEQKSIKAQIWDTAGQERYRAVTSAYYRGAVGAMLVYDMTKRETFEHIPRWLEELRAHADKNIVIILIGNKSDLEDQRAVPTEDAKEFAEKEGLFFLETSALNATNVENSFNTLMTQIYNTVNKKNLASEGDSNNPGSLAGKKILIPGSGQEIPAKTSTCCTSS

SEQ ID NO: 20116 - protein, 484 aa, Momordica charantia
MVLQSSNNAKKLLSKLATGNGHGEDSPYFDGWKAYDSDPFHPTLNPRGVIQMGLAENQLSFGFVEKWMRNNPQASICTAEGIDEFKDVAIFQDYHGLPEFRNAVANFMGKVRGDRVKFDPDRVVMSGGATGAHETVAFCLADPGEAFLVPVPYYPGFDRDLRWRTGVEIVPVICESSNNFRLTREALETAYEEAQKSDTKIKGLLITNPSNPLGTVYDRETLETAVAFINDKNIHLVCDEIYAATVFAEPGFVSISEVIENDPSCDRNLIHVVYSLSKDMGFPGFRVGIIYSYNDAVVSCARKMSSFGLVSSQTQHMIASMLSDDEFVESFLVGSAEKLAARHRSFTKGLAQVGIGYLQGSGGLFLWMDLRHLLKEKTLEAEMALWRVIINEVKLNVSPGSSFHCSEPGWFRVCFANMDDKTMDISITRIRTFVLQNKEATKIKKHKFCWRQSSLELRLSSRRLEDIMSPHSPLPQSPMLRATT

SEQ ID NO: 20117 - protein, 668 aa, Bartonella henselae str. Houston-1
MTNTETKKQMANAIRFLAIDAIEKANSGHPGLPMGAADIATVLYTKFLAHDPKNPHWPNRDRFVLSAGHGSMLLYALLYLSGYEDISLEDLKNFRQIGSKVAGHPEYGHAAGIETTTGPLGQGIANAVGMALGERLLNARFGDLINHYTYALVGDGCLMEGISQEALSLAGHLKLNKLIVLWDDNNISIDGEISLADSTDQIARFKASGWNTHKVDGHDQAAIARAIEAARNSDKPTLIACKTTIGFGAPNKAGTNKIHGAPLGASEIAETRIALGWEAEPFVIPADILDNWRLAGLNAAKKRQKWKEKFAALPLSERIEFERLMRGDLVGGFDGAIDVYKKKLVEDCPCVATRKASEMALEVINEVVLETIGGSADLTGSNNTKSSQMKTISAEDFSGRYLHYGVREHAMGAVMNGLALYGGFIPYGGTFLCFSDYMRPAMRLSSLMGLRVIYVMTHDSIGLGEDGPTHQPVEHLASLRTLPNHLVFRPADAMETVECWQLALKTRGTPSTLALSRQNLPLLRREYEEENLCMLGAYELLTASDDAQVTLFASGSELQIAVHAHAVLEEKGIPTRVVSVPCFELFTQQSPSYQRALIGDAPIKIAIEAALRQGWDYFIGTNGVFIGMQGFGASGTIDALYAHFGITCENVVAAVEKKLEDIHKENVK

SEQ ID NO: 20118 - protein, 478 aa, Bartonella henselae str. Houston-1
MKRARKVKIIATLGPSSFSISMIEKLFMAGADVFRLNMSHTDRETMVDLVQRIRKVEKTVRRPIGILVDLQGPKLRVGCFDKGQEDLRIGQSFTLDDRDILGDAQRVFFPHGEVLAAIKPGDRLLIDDGKLELLAQVCDGHSVQCLVVAGNRISDRKGVSLPDTVLPFGPMTLKDKADLQAVLEQPVDWVALSFIQRPEDIIAVRALTKSKVSLMAKIEKPQALEHIEEIIDVADGIMIARGDLGVEMPLERVPAIQMELIKACRLAGKPVVVATQMLESMITSSVPTRAEVSDVATAVYTGTDAVMLSAESASGRYPEEAVLMMDRIAQQIEQDQTYAAQVGAQHPAPESTGTDAISLAARQIAETLQLTAIVAYTASGTTGVRTSRERPNRPIIALSPIVKTARRLALVWGLHCVVTEDARDLEDMVDRAAAIAFQEGFCQGGDRFLVTAGVPLGTPGATNLLRIASVSQDGTKGV

SEQ ID NO: 20119 - protein, 360 aa, Ralstonia eutropha JMP134
MTHHATQLPPVPVTILTGFLGSGKTTLLNHILTQKHGHRIAVIENEFGEVDVDSDLVMTSDEEIYQMTNGCICCVVDVRTDLVRILQKLLERPERFDHILVETSGLADPTPVAATFFMDHEVAQQVRLDGILTLVDAVHIEDHLDDPQLTGFDNQAVDQIVAADRVILNKTDLVSAARLDALEARIHKLNEGAQILRSNYAQVDLGKILGIGGFTPGIVQMEDHGHAHHEHDHAGHVCDEHCDHAHDEAEHGHRHDPSVTSVSLVFDQPFDRQRLEYGLRALLAAQGDDVFRMKGIVAVAGDTQRYVLQAVHRLMDFRADAPWGTEAPQSKFVFIGRNLDKQRLQTLLNVCMPVRVAEAA

SEQ ID NO: 20120 - protein, 491 aa, Candida albicans SC5314
MLRSFKSIPANGKLAQFVRYASTKKYDVVVIGGGPGGYVAAIKAAQLGLNTACIEKRGALGGTCLNVGCIPSKSLLNNSHLLHQIQHEAKERGISIQGEVGVDFPKLMAAKEKAVKQLTGGIEMLFKKNKVDYLKGAGSFVNEKTVKVTPIDGSEAQEVEADHIIVATGSEPTPFPGIEIDEERIVTSTGILSLKEVPERLAIIGGGIIGLEMASVYARLGSKVTVIEFQNAIGAGMDAEVAKQSQKLLAKQGLDFKLGTKVVKGERDGEVVKIEVEDVKSGKKSDLEADVLLVAIGRRPFTEGLNFEAIGLEKDNKGRLIIDDQFKTKHDHIRVIGDVTFGPMLAHKAEEEGIAAAEYIKKGHGHVNYANIPSVMYTHPEVAWVGLNEEQLKEQGIKYKVGKFPFIANSRAKTNMDTDGFVKFIADAETQRVLGVHIIGPNAGEMIAEAGLALEYGASTEDISRTCHAHPTLSEAFKEAALATFDKPINF

SEQ ID NO: 20121 - protein, 760 aa, Vibrio parahaemolyticus RIMD 2210633
MATTTHILGYPRIGEKRELKFAQEKYWRGDIDQTELKKVGADLRAKNWQTQTEAGLSFTTAGDFAWYDHVLTTTLLLGHVPKRHAGGFPNLDTLFKVGRGQSQAGCGCAGAAASDMTKWFNTNYHYIVPEFSKDDTFEVSWPQLFEEINEAVQAGHKVKPVLLGPVSYLYLGKEVEEGFDRLTLLPRLLTAYQAILAKLASQGVEWVQIDEPILSLELEKQWADAFKLAYQLIRSDVKVLLTTYFDSVTDTLDKIVELPVDGLHVDLSAAPQQLDDVVAKLPEGWVLSAGVVNGRNVWRSDLSAQLERLQPVKEKLGDKLWVASSCSLLHSPVDLELETELSEEVKSWFAFAKQKVTEVALLGRALDGDQNAILACDTYSQPIKARKTATHVNKPQVQVRLNNITASLAERSAPYAERAAHQAEVLGLPLLPTTTIGSFPQTGEIRVQRSAYRTGQLSESDYIQALKGHIADAVKRQEALDLDVLVHGEAERNDMVEYFAENLAGFQTTKFGWVQSYGSRCVKPAIVVADIEREKPITVEWSTYAQSLTSKQMKGMLTGPVTILCWTFPREDITRQEIAQQLALALRDEVSDLQDAGINIIQIDEPAIREGLPLKKRDHKAYLEWAVNAFKISAASAKPETQIHTHMCYSEFNEIIDSVAALDADVITIETSRSNMELLKAFEEFNYPNEIGPGVYDIHSPNIPTEEWIEGLIKKAAEKIPVQRLWVNPDCGLKTRNWAETEAALANLVSAAKKLRAELA

SEQ ID NO: 20122 - protein, 449 aa, Ralstonia eutropha JMP134
MTTAVHPVDQILPARAMASLGFQHMLVSYLGAIAVPMIVASALKMTPAQTTMLISTALFTSGIATLLQTVGFWKFGVRLPLMQGVAFSSVAPVIAIGSDPSLGFNGVCGAIIGAGVITMLLAPVIGRLKRFFPPVVSGCTITAVGLSLFPVSFHWFGGGRGAPDFGSPVFFAVGFGVVALILLINRHRSELVRNLAVMIGLLVGGAVAWMLGMGNFDEVSRAPWFTMVTPFAFGMPVFDIGAITTMVIVMVVQMVESMGLFVAVSEIVKRPITEQDATRGLRANGLASAIGGMFAAFPYIAFMENVGLVIVTGVRSRWVVATCGVMLCAVALVPKIGALFASIPPAALGGAAMVMFGVVVAAGIKTLGRVEYDRNPANLSVVAITLACAMMPVMLPSMLDKLPGFLQPFVHSSVIIACVVSVLLNLLLNGVPARDESEHPIHTDNIQEV

SEQ ID NO: 20123 - protein, 202 aa, Brassica napus
MDSVFSNVDRAPEDPILGVTVAYNNDPSPSKLNLGVGAYRTEEGKPLVLDVVRRAEQQLVNDPSRVKEYIPIAGLADFNKLSAKLILGADSPAIQESRVATIQCLSGTGSLRVGAEFLKKHYHQSVIFIPKPTWGNHPKVFNLAGLSVEYYRYYDPSTRGLDFQGLLEDLGAAPSGAIVLLHACAHNPTGVDPTPEQWEQIR

SEQ ID NO: 20124 - protein, 447 aa, Leifsonia xyli subsp. xyli str. CTCB07
MAAAAIGEANLAQFGRAQRVIPGGVNSPVRAFRSVGGTPRFMVFANGPYIVDAEGREYVDLVASWGPAILGHAHPAVVSAVQEAAARGLSFGASTPAETELAEAVIARVPFVEKLRLVSTGTEATMTAIRLARGFTGRPLLIKFAGHYHGHSDSLLAEAGSGLATLSLPGSAGVTEATAAQTLVLPYNDLGAVRAVFEANGPDIAAVIAEAAAANMGVVPPDEGFNAALTDLAHEYGALLILDEVLTGFRVSEAGFWGLDRGYTPDLVAFGKVIGGGMPLAAVGGRAELMDILAPAGPVYQAGTLSGNPVAVAAGLATLAHAGEAVYDRLDIVAGTLSAAVSDALTAEGVAHSVQRAGNLFSFVFGDVAAAPRTFAEVQRQEAFRYRAFFHAMLDAGVSLPPSVFEAWFVTAAHDDAAVGRVLEALPAAARAAASACPGRPLLFVRR

SEQ ID NO: 20125 - protein, 335 aa, Zea mays
MGRAPCCEKVGLKRGRWTAEEDQLLANYIAEHGEGSWRSLPKNAGLLRCGKSCRLRWINYLRADVKRGNISKEEEDIIIKLHATLGNRWSLIASHLPGRTDNEIKNYWNSHLSRQIHTYRRKYTAGPDDTAIAIDMSKLQSADRRRGGRTPGRPPKTSASRTKHSDADQPGGEAKGAAASSPRHSDAVNPGPNQPNSSSGSTGTAEEEGPSSEDASGPWVLEPIELGDLWGEADSEMDALMPIGPGGHDSAALQGLGAVGGEAQVDDLFDMDWDGFAAHLWGGPEQDDHSAQLRQAAEPMEAAAVAAAAAAATAACTPDDRELEAFETWLLSDSF

SEQ ID NO: 20126 - protein, 341 aa, Nostoc sp. PCC 7120
MLAALLYGQEDLRLEQVADPSPDVGEVVIKVGAATTCGTDLKVWRRGGHAKMLKLPTLFGHEAAGEIVAVGADVTGWQIGDRVVANNSAPCMKCFFCQRQEYSLCPNLTWNNGTFAEYLKIPAPIVQHNLLQVPDELPLSLAAMTEPLACVLHGVARSHIKPQDRVVVLGDGAIGLMFVAVLADKVEVLLWGGNDQRLEIGQKLGATKTFNYHQNPDIPHVVKELTQGWGADVVIEATGVPSVWETAIACARPGAIVNLFGGCPRDTTITVNTEQLHYSELTLKGVFHNTPEYVRAALALIASRKIPFELLISEQRPLKDLEQVFYDMKARKVIKVAMVCS

SEQ ID NO: 20127 - protein, 551 aa, Oryza sativa (japonica cultivar-group)
MGNCCRSPAAAAREDVKSSHFPASAGKKKPHQARNGGVGGGGGGGGGGGGGGGAGQKRLPVLGEEGCELIGGIDDKYALDRELGRGEFGVTYLCMDRDTKELLACKSISKRKLRTAVDVEDVRREVAIMRHLPKSASIVSLREACEDEGAVHLVMELCEGGELFDRIVARGHYTERAAANVTRTIVEVVQLCHRHGVIHRDLKPENFLFANKKENSPLKAIDFGLSIFFKPGEKFSEIVGSPYYMAPEVLKRNYGPEIDIWSAGVILYILLCGVPPFWAETEQGVAQAILRGNIDFKREPWPNVSENAKDLVRRMLEPDPKLRLTAKQVLEHPWLQNAKKAPNVPLGDIVKSRLKQFSRMNRFKRRALRVIADHLSAEEVEDIKEMFKAMDTDNDGIVSYEELKSGIAKFGSHLAESEVQMLIEAVDTNGKDALDYGEFLAVSLHLQRMANDEHLRRAFLFFDKDGNGYIEPEELREALVDDGAGDSMEVVNDILQEVDTDKDGKISYDEFVAMMKTGTDWRKASRHYSRGRFNSLSMKLIKDGSVKLVNE

SEQ ID NO: 20128 - protein, 423 aa, Debaryomyces hansenii CBS767
MTDKHSSNIQEVWPPTESTKINGRNSSAMEQPCKYILSKHKLGDGTFSGVFECKNKLTGQHYAAKMYKKIMVYGLESMLQNEFLVLKKISMNHDNILKLIDHFETASELYLVTEIAYGGELFDKITRSGHLEESQSSAITQSLMNAISYLHANNIVHNDLKAENILFRSRKKDSMNVLVADFGLARILHPEEKLTGVRGTLSYIAPEVLNGSGYDFAIDIWSVGVIVYFMLCGYMPFDCETDEETKSAILAGDYMYEPPEYWLHVSPEAKDFIDCCLKTDPSERLTVDSASIHPFLNPLRAISKPVLKVSSSTDLHESLKAAIMHLHLPIQSAPGANLSVERSTGTSHTVSTVSSKLSLLGSSRTNASYDSKLDGACCDSPDIVSRFTTPVISNVVSRLHSTNNILDYIDTPPGDIDSAKFYI

SEQ ID NO: 20129 - protein, 609 aa, Emericella nidulans
MALDDISAVPKGALDTDPAVERPPPLLDADRSDSERLQPGVKRAEMLRKGWTRQGLIIAFTGLFLATLSINFGDYSTQVYVPYATSAFKQHSAMSAARVVGNITRIAAYPIIAKLGDVFGRAEMFILSIVFQAVGYAIYAGCKNVGQYIAGGIFEAIGSTGFGLTQQVFVADVTNLINRAVWSTLPDSLTVIPALYLGTEIAEAVLEKNEWRWGFGMWAIIEPVCSVLLVGTMLYYQKRARKDPSPAEFASEPTERNVDDGWWKRIYNLVWVQLDAFGAILLLLGLSLFLVPLSLTGSGNSDDWHRGSFIAMLVLGVVIFVAFLAWDTWCAKKPFIPYRMIKNRTVAAACLLGILDFFHYSVFSVFFTSYLQVAAHHGAGPATRIDNSLRVAFQVAGIFAAYFMKFTKRSQVWVFTGVPLCVLGMGVLLYLVDMGEGRVGNEAAFVTAKSLIGIGRGFYQTASQVSVQAKVSRGEVSVVTAVFFAAMSIGGAIGTSVAGAIWRSTLPPKLAQHLPAELKDQAQAIFGSIVVAQKYEVGTPARDAIDMCYRQSQRMLAIAALAALAPMLIIMFFLENVPLTDETTLIELHGNREAVKKNHSGGEGKEARS

SEQ ID NO: 20130 - protein, 490 aa, Oryza sativa (japonica cultivar-group)
MAAAAVLLAAILLALSPLPMSLSAGGGGGGDTGTAEAAADRITALPGQPRVNFSMYSGYVTVDAAAGRALFYWLIEAADPASAPLVLWLNGGPGCSSVGYGASEELGAFRINPDGRSLYLNPYPWNRVANMLFLDSPAGVGYSYSNTTSDLFTAGDNKTAHDSYAFLVNWLERFPQYKYRDFYIAGESYGGHYVPQLSQLVYRNNKDVEKPILNFKGFMVGNAVIDDYHDYVGTFEYWWTHGLISDDTYQKLQVACDFESSAHASEACNKIYEVAEAEQGNIDAYSIYTPTCKKTSFLKRRLIRGNSPWLPRGYDPCTEKYSTKYYNLPEVQKAFHANVTGIPYAWTTCSDDLFYYWKDSPRSMLPIYRELIAAGLRIWVFSGDADSVVPLTATRYSIDALYLPTVTNWYPWYDDEEVAGWCQVYQGLTLVTIRGAGHEVPLHRPRQALKLFEHFLQDKPMPQPEYTAENLTNESCYCYCLVLALDQPEH

SEQ ID NO: 20131 - protein, 329 aa, Bacteroides fragilis NCTC 9343
MDKIIGLGNALVDVLATLKDDTLLDEMGLPKGSMQLIDDAKLQQINERFSRMKTHLATGGAAANTILGLACLGAGTGFIGKIGNDAYGNFFRANLQRNGIEDKLLVSDLPSGVASTFISPDGERTFGTYLGAASTLKAEDLTLDMFKGYAYLLIEGYLVQDHDMILHAIELAKEAGLQVCLDMASYNIVAGDLEFFTLLINKYVDIVFANEEEAKAFTGKEDPKEALELISKKCSIAIVKVGGNGSYIRKGTEEIKVEAIPVKKVIDTTGAGDYFASGFLYGLTCGYSLEKCAKIGSILSGNVIQIVGTTIPGERWDEIKLNINEVLSE

SEQ ID NO: 20132 - protein, 1090 aa, Debaryomyces hansenii CBS767
MTEPKNQQVLHDINGKIEREKKLIQGFQALKRNTDNGEVIQRCNNQIRETQSNIDYLQKTLSKLSLQKSEAELRTKEESNESGKKPVYSRFDLIKYDCPSLGHRILYMLQQLQFKLQVENQYREANEKISHLYRLDGDKSSSIVADTGRLESDQRIQLLNKSLKRYQDMHIDVEDVTRDMEIMNTPKYASKAFSGKLNISVTCIRDIDHIASPTFSKRPESVVSIKIDDVERAKTRGTRSGKWNEEFHIDIDKGNEIEFSVYDKSGSVLVPVAVTWALLSDISEEIRKKKVAQEVGSEGWVLASNLPNNNSKQHNDNYPSGSEFGATSNTTSTFNGSPKNYNSNIPSNMDSPVSGETKQVQINTWLSLEPVGQVLVSVSLDKSNQAGNRQFMGALGRHGAIREKKEEVFKQHGHQFVQKQFYNIMCCAFCGEFLRYTGFQCQDCKFLCHKKCFQKVVTKCISKSSNDLDPDEAKLNHRIPHRFDPVTNHGTKWCCHCGYILPWGRKNVRKCSECGVMCHAHCTHLVPDFCGMSMEMANKILTTIKSTRTPGKPLPPPPAAPLADQPNASSEASKFSSSTSDSKSDTLQNISDDEQEKYYASRLPTETKNQFQKPIESQYKPTGRRPPPNDLSKESTNDLDQEKSESYDHDYTFMSSKSEEMKHGDLDIPESRGTKESNEPNEPTDMQIDNPFANPIENDKSHFDNFDYNNNNKIMVPEIPQKPEHKEPQADYQTQQKSEVPQSKGAVPHKPKRRRRKIGLDDFQFLAVLGKGNFGKVMLAESRHTQNLCAIKVLKKDFIVENDEADSVTSEKRVFLTANKEMHPFLLNLHCCFQTENRIYFVMEYISGGDLMWHIQKSRFSAKRAKFYACEVLLALKYFHDNGIVYRDLKLDNILLTTKGHIKIADYGLCKENMWHKSTTGTFCGTPVFMAPEIIAGKQYERSVDWWAFGVLLFQMLLCQSPFKGDDDDEVFNAIEHDDVKYPISMPRQTVLVLQALLTKDPANRLGSGERDAEEIMEHSYFQDVNFDDILNCRIQAPYLPEVSSEHDYSNFDQEFTSETPRLTPVETVLTSEMQEQFRGFSHISDDAAI

SEQ ID NO: 20133 - protein, 613 aa, Bartonella quintana str. Toulouse
MGTELSLGARAGNVPYHYVDHKFDVVVVGAGGAGLRATLGMAEQGLKTACITKVFPTRSHTVAAQGGIAASLSNMGPDNWQWHLYDTVKGSDWLGDTDAMEYLVRNAPAAVYELEHYGVPFSRTQEGKIYQRPFGGHTTEFGEGPPVQRTCAAADRTGHAILHTLYGQSLKHNAQFFIEYFALDLIMTDDVCTGVVAWNLDDGTMHRFSAKMVVLATGGYGRAYFSATSAHTCTGDGGGMIARAGLPLQDMEFVQFHPTGIYGSGCLITEGARGEGGYLVNSEGERFMERYAPSFKDLASRDLVSRCITLEIREGRGVGPKKDHIHLVLNHIDPMILHERLPGISESARIFAGVDVTKEPIPILPTVHYNMGGIPTNYYGEVLNPTADSPDHVQPGLMAVGEAGCASVHGANRLGSNSLIDLVVFGRAAAIRAGEVIDRDAEIPPLNEEAVDEIMARFDRLRFADGATPTAILREKMQRTMQEDAAVFRTADSLQQGCQRISQIWGELSDLKVTDRSLIWNSDLVETLELENLMANAIMTVYSAEARLESRGAHAREDYPERDDENWRKHTLSHLSKDGKVALSYRPVHVDPLTAEADGGIDLKRIAPKKRVY

SEQ ID NO: 20134 - protein, 1531 aa, Debaryomyces hansenii CBS767
MGRYRDRNRETDENDDTNRQATMTTTLVQQHSRQSLGKFVNPSPTKYESTENMDKVVQSVTNATKRLSQISTNTNSSAKKRKTQNRIGPWKLGRTLGRGSTGRVRLAKNVNSGKLAAVKIVPKSNFKKLENPKYKRNSVDSSGSVKDRLPYGIEREIIIMKLISHPNIMGLYDVWENKNDLYLILEYIEGGELFDYLIKKGKLQEFEAISYFKQIINGIHYLHQFNICHRDLKPENLLLDFNKNIKIADFGMAALEVREKLLETSCGSPHYASPEIVAGKNYHGAPSDIWSCGIILFALLTGHLPFDDENIRKLLLKVQNGKFLMPNNLSSESKDLISKMLKVNPSERITIDAILQHPLLTKYPEPSVRKDKVTEYSDLNIRPIDSINNIDKEILKNLSVLFHNRDEQTIISKLLSPEDCSEKTFYYLLVKYRNEHLTASNNTINNYEDDPDLTGSESKQTITRSTSIVKTTTTDPLTGEKHTTIRKIPNSTSNFSNRSRSPKKKPEVLGNITNTAPTFKASTSFNKKKTLMNNNVISRNNSSKSLRKRPPQQQPPKLSRKISGMPDLNDLRLEKTQLNSLYKQQKLNGSFGNKSLFNFESVCQEIFGNAEQHEGDRKIEPKENLRKDKQMDGRTGKLSNIEKCERELAAKVHEKNDARALKLQHQQKEEDAKLQHKKQLESKKRDQSKLLQEKQRQALEKLGSQIQDNNDNNRRGIAHRTQQRHVTEPAPTSSLDPKLGGGAKSLLRAKSLASPSSYVSLRQNTHTSDNTSKVLQTLGIEVAPLKTSTKFNSNLKTSSSKNLSDYLDNETLYSRSDKSIEHQKENISMNKFNEKEKVNQSIAKPNYSRTSTSKLQPLAISRTTTLNSIGYRSLLDGIDENKVQKDLPKRPNGEKDYDTTLSTIETRKNGLIPNPRFSRFSFNGLLNSRFDNPDVTIQNNLVSSGTVVRKSVNQKEPISSRIIEEDPQTSHLKLETGSLKKSSTNLLGLGIVQNHQGKTSRKVSQNSEYCDSNFISVNLSDTADDSQDNTTLEENAISLSHANSVLKDDHANTTVSNTTISKQQEVLNTNVDQRNKRKSSYLGNLEGSKETLVENDKEDKSFQDSIKSMYKDYAKLYNDKKPKSETNTQELGETDDNIPSEKQTRERQSILRDDRINSIDSDNDLSFAADGSSNIDILDSSSIADTNMIENRSEIQLNDNKYSPTITDNQKDFGDEYEDEIDDQFSQHGDQQEYNHEYDHENNHEYNQEDGQEQHEHDHNQQNDQQLQDSDRLQTGTDLRKSTASTQIFSTMNLPKIRDKNSVVEENKEIKHSEVKSEESNQRHNSIFNKLKPKREAPKPPGFKWDDEKSQGHNRFSRISVSSKFDKQQKLNDNYNDSSKSNWFMKFINSLTANSKTPKGEKRKSLIRKFNSDKLDDNETKNFCVLDSTLQSSELTRVIKDTLELKKIEGSVSKVDIDEDFGMISGVIPARYSGGRRLRFKIEIINLKNSSSLHLSKLKGTDKGFKNLTNTVKFIVSKEEQNINRMSSVEA

SEQ ID NO: 20135 - protein, 704 aa, Debaryomyces hansenii CBS767
MLKFKNKFKFGSSNGNQEPTSPTGGKRSPKTSSESRRTISGNVLSDNLLKLSMTDQETTHSDLSGYQSSVQSGSKMTGQLQGTDKAGQVNVQPMTVQSPRQAGAQGGQGGAVMASTGTSSKSTSPSSGVSDTDQPNTTVSSTPGLLTVKIYNSANLQLPIKINNNKQILHTLATNANNDVTSQQLIKNLNALATKEEEEEAGHAHLPGSISTNFLPSTITIPNGENLIKALLYLTVEFDNNVLVIEPQKGTVNQSVWNQVVSFDVTKKSTSSGTGSNFLNLNLFIRLPNILIPDSEKSSQENLFTKNESAKNSNNIGDLLIGTIKLPLNLNFHIKPIRLMNHEYLSFANFNLSDDTKKALGEIMLTIDFKPILKSHLSINDFDLLKVIGKGSFGKVMQVVKKDTKQIYALKTLRKQHIISRMEVTHTLAERTVLARITNPFIVPLKFSFQSPEKLYLVLSFINGGELFWHLQKEGKFSMNRSRFYIAELLTALESLHELNVIYRDLKPENILLDYQGHIALCDFGLCKLNMTNNDKTNTFCGTPEYLAPELLLNQGYTRSVDWWTLGILLYEMLTGLPPFYDDDVPTMYRKILQNELKFPTWLENTDAQDLLIKLIQKDPSKRLNDAQVIKNHSFFKDIDWQKLLSKNYLPPFKPNVENLLDTSNFDQDFTSEKPQDSVVDDFLSESVQKQFGGWTYNGDNILS

SEQ ID NO: 20136 - protein, 254 aa, Triticum aestivum
MVKESASPGSGSGSPGGAAEKMGRGRIEIKRIENTTNRQVTFCKRRNGLLKKAYELSVLCDAEVALIVFSGRGRLYEYSNNSVKATIERYKKATSDTSSAGTVAEINAQHYQQESAKLKQQITTLQNSNRTLIGDTMATMSHRDLKQLEGRLDKGLGKIRARKNELLCAEIEYMQRREMELQNNNFFLREKVAETERGQQQTLNMMGAASTSNEYEQNMIHCDPRTFLQFNFMQQQPQYYSQQEDRKSLNSVGR

SEQ ID NO: 20137 - protein, 732 aa, Zea mays
  misc_feature (144)..(144): Xaa can be any naturally occurring amino acid
  misc_feature (207)..(207): Xaa can be any naturally occurring amino acid
  misc_feature (211)..(211): Xaa can be any naturally occurring amino acid
  misc_feature (231)..(231): Xaa can be any naturally occurring amino acid
  misc_feature (234)..(234): Xaa can be any naturally occurring amino acid
  misc_feature (236)..(237): Xaa can be any naturally occurring amino acid
  unsure (1)..(732): unsure at all Xaa locations
ESHVSSSAMAAAAPHFVLVPMLAQGHLLPMLDLARLIASHGARATVVLTPINAARNRAFLEQAARAGLTINFAELAFPGPALGLAAGCERVDMLDDISLIIPFYDAVWLLAEPLEAYLRSLPRLPDCLVSDSCMPWTASVTRRXGILRFVVHFPSAFYILAAHILEKRGVYDRADDDEFEPFEVPEFPVRAVVSRATAQGLFQWPEXMEKXRRDTLDAEATADGILFNTWXALXGXXFVERLASELGKKIWVVGPLCLLSSDSDAGAMAGRGNRAAVDADRIVSWLDARPAASVLYISFGSIARLFPAQVAELAAGLEASRRPFIWSAKETAPALDAEFEERVKDRGLVVRGWAPQMTILSHPAAGGFLTHCGWNSILESLCYGVPLMTWPQFVDQFLNEALIVDVLGTGVRSGAKVPATHVTVVKPGEVLEVQVWRDGVDRAVTDLMDEGPAGAARRARAKELGQQMRAAMAKGGSSDTDVRDLVRHVVEVARKKGEHEDTALAVLLESSTPTELSPLLNHSPVNESTDHHSQEQGIPTLITWSQGGDEVFLEGSWDNWTSRRALERSGKDHAVLLVLPSGVYHYRIIVDGELSKNGIIQTCDSFKQQRQANYHLSFSSVFFGQDYVPESLDSVAEFEAPPSPVHSYDLHCPGDEEFAKEPPTLPPQLLVSVLGGDVDSAGHGNQALKPQHVVLDHLFIEKGWGSQSLLALGVTHRFESKYVSFVLYKPLE

SEQ ID NO: 20138 - protein, 128 aa, Coccidioides posadasii
MGADDKANHSTYRYNEVPVYTTSQGCPVMDPESSQRIGENGPLLLQDFHLIDLLAHFDRERIPERVVHAKGAGAHGEFEVTDDISDITTIDMLKGVGKKTKLVTRFSTVGGEKGSADSARDPRGFAVK

SEQ ID NO: 20139 - protein, 326 aa, Zea mays
  misc_feature (214)..(214): Xaa can be any naturally occurring amino acid
  misc_feature (284)..(284): Xaa can be any naturally occurring amino acid
  unsure (1)..(326): unsure at all Xaa locations
MERPAPVRKSHTSTADLLVWPEGAPQELPAGSTPPSNRRPHQPSEALRKVVFGGQVTEAEAESLNKRKPCSAPKWKEMTGSGIFAAGGEGEEDESANVSATSVRTAPKNYQAISTISHISFAEEESISPKKPTSIAEVAKQRELSGTLLSEDDSKMKRQISDLKSKELSGHDIFAPPEDPRPRNSENGSTSQTPGKNAHVLTSDSELTLIIITXTKPTQLQKSCSVAYCWLSCSQQVSNFKFGEADEDSAVKTAKKIPTKKFTDLAGNIFKGDETPPGTAEKHXLSTAKLKEMTGSDIFADGKAPSRDYLGGIRKPPGGESSIALV

SEQ ID NO: 20140 - protein, 333 aa, Desulfitobacterium hafniense DCB-2
MAKMYYDSDASLELLQGKTIAVMGYGSQGHAQAQNLKDSGLNVVIGLRADSRRWKQAEAAGLKVATVAEAAAQADLIQILLPDERQASVYEKEIKPHLTAGKCLVFSHGFNIHFGQIVPPADVDVFMVAPKSPGHLVRRTYEEGAGVPGLIAVHQDASGRAYDLALAYAKGIGCTRAGVLETTFKEETETDLFGEQAVLCGGVSELIRAGFDTLVEAGYQPESAYFECLHELKLIVDLIYEGGISRMRYSISDTAEYGDMMIGKRIITDETRKEMKKVLAEIQDGTFAKNWLLENQINRPSFNAIERKDAEHPIEKVGAELRAMMPFIKKPGE

SEQ ID NO: 20141 - protein, 213 aa, Arabidopsis thaliana
MGLKAGTFVLLLLGLILVSDARSFVDSTISEKVSNKEDVCTLCEEYVTDALSYLEKNVTQAEIIEDLHDRCSQLRGYSQQCISLVDYYVPLFFLQLESFQPHYFCKRMNLCGKVVALVEEARQDSCGVCHRTVSEILIKLQDPDTQLDIVELLIKGCKSLKNYEKKCKTLVFEYGPLILVNAEEFLVKNDVCTLLRACPPEKSVLRQPELADS

SEQ ID NO: 20142 - protein, 638 aa, Streptococcus pneumoniae TIGR4
MKKWFNTNYHYIVPKFEKDTQVKLAGHKIFDEFQEAKELGLNTRPVLVGPFTFLQLSDFEEGVKADDFVDSLVAAYQEVFAKLAELGATRIQLDEAALVKDLTAEEKALFLNLYNKLLADKKGLEVLLQTYFGDVRDVYADLVNLPVDAIGLDFVEGKKTLELVKGGFPADKTLYVGIVNGKNIWRNNYEKSLAVLEQIPAENIVLTSSCSLLHVPFTTANEEFEPALLNHFAFAVEKLDEIRDLDAIRNGQGSEALAANKELFATERVGENAELRARIAGLTDADYTRLPAFAEREAIQEEAFKLPALPTTTIGSFPQTKEVRAKRLAYRKGELSQKEYDAFLAETIDEWIKWQEDIDFDVLVHGEFERNDMVEYFGQNLSGYLFSKNGWVQSYGMRGVKPPIIWGDVTRLNPITVKWSSYAQSRTNKPVKGMLTGPVTILNWSFPREDISIKDSTLQIALAIKDEVLDLEAAGVKIIQIDEAALREKLPLRRSDWYEDYLDWAIPAFRLVHSTVAPDTQIHTHMCYSEFTDIIPAIDNMDADVISFEANRSNLEILDELKAKNFQTEVGPGVYDIHSPRVPNEGEIDNTIEAILAKVPSKKVWINPDCGLKTRGIPETKESLIRLVEAAKAAREKL

SEQ ID NO: 20143 - protein, 460 aa, Bordetella bronchiseptica RB50
MPRSTARAAWKRELAATLALGLPLVLTNLAQMAMTVTDVIFIGRLGSQALAASALGANLFTAIEFFGLGLVAATAPMVAHALGRRGNAVRDVRRTVRQGLWTAVIYSVPGCLLLWHGEAILLAIDQPPELAAQAGAYLRALMWAMPPFLGFLVLRSFVAALQRPRSAFLIALAAIVLNVFGNWVLVFGNLGAPALGLVGAGLASALATLGLFLGMVGVVCLDRRFRRYHLFGDVWQPDWQRLAEFWKLGLPIGAATAFEVTIFNAAAFLMGWLGEPELAAHAIAIQIASVTFMIPYGIAQAATVRVGHAYGARQPDQVARAGWCAFSLGIGSMAIAAALMLLAPGLLVSAFLDIGDPANAQVLRLATAYLAVAALFQIVDGAQVLGAGMLRGLHDTRVPMLYAALGYWGVGLPSGAALAFWAGWRGVGVWSGLAIGLALVAVLMMQRWLRRDRVGLLRRA

SEQ ID NO: 20144 - protein, 1923 aa, Magnaporthe grisea 70-15
MVNSNGSRVPEMDSLPLVFGNIHKMCTGGHGGGHGDGASISRAYPLRADVPVGKRINHLYQKRLPNFSGPGQWEKFNLLAMLYDQKVSEPPHLSMSVWSAPGLTRPTFAEATSPSNEFRPTQIGESFGPSWSTHWFKVEITLPAEMQTAEQVELHWDCNNEGTVWTADGNPLQGLTGRKERVEWIIPDAFRDGAQHTIYIEMACNGMFGNGPGAPIFKNNPGGDSIQPPDPDKKFALATSELVSVYLDARRLLFDYSIISDAAMEFPENSWEQREALTVASQIIDTFKLGDKSSITAARKIAAGYLGPNVDSEAVYADSSRSPDVFAVGHCHIDTCWLWPWEETKRKVARSWSNQCDLMDRYPELNFACSQAQQFAWLKEMYPYVFERVKAKVASGQFHPIGGSWVEHDTNMPSGESLVRQFLYGQRFFESNFGARSTTSFLPDTFGQSPQIPQLCRQAGMDRFVTQKLCFNSVNDFPHTTFNWVSLDGSQVLCHMPPAKTYCANGTFAEIKRSVVEHRTLDKDRTSLILFGKGDGGGGPTWEQIERLRRLRGLSDTTGMLPRVHLGKTVDQFFDQLMPKAHTLPTWHGDLYFELHRGVYTTQANTKLKNRQAEFLLRDIELLATLASIESPESYKYPTKELREMWEGVLLCQFHDCLPGTAIKMCYDDSDKVYAKVFESATGLLQTIYATLGLSQEFDNSRLALNTLPWPRAELVKTKAGKDVVARGSGVLLSTEEFEESESQKAVTVKESSSGVFVLENEAFTVTVEKGCLTSLYDKRAKREVLAGKANQYAIYDDKPVYWQAWDVEVFHLETRQELPGNGTATTTIVEDGPHRVSVATDMKISDVSSINTTISLSASLPDEGYLPYVEFSAEVDWHENMKFLKVEFPVDIRHHEASYDTQYGVIRRPTHYNTSWDMAKFEVCSHKYADLSEHGYGVSILNDSKYGFSTAGNVMRLSLLRSPKAPDDTADMGKHSIRWAIMPHVGPLGPDTVRASFNFNNPLRVVGSGADSVLSKLSTQILTLTGDKNLVLDAVKRGEDDADISIGDLPARPQGQKSVIVRVFDSLGGRGVGTVRSLWNLAKVVKTNILEDDGDVVPLAEDGHVVNVILWGRVTGANLSVGNAAKSACPNLMPPRRKKSWVPQKDPIIHFAQPDFGWAHLIRTVGLAEQYAYPQKSPSHSASQASDAKPMRRCLAWAKKSPDHPLSHHFFVTNNMSDDNKANSFWRKAYRAFAPEAEKGDDGRDNWPSRTAFVLACMGGTVGLGNLLRFPSIAFQNNGLQWFIPYFMAVFLLAIPVVILEVAIGQAYRGGCLVAYDHISRRTKGLGLALVMNGYIVCNYFVPILAWVMIYFRHSFSNPLPWAEDSQDFFDNQVVQAVSGIPGEIVDGSVTSYTSYPEMGMVGEIVGWSAFTWFVVWLCMFSGVGMTGRVVYFTMGMPIVMIIILLGRGASMENAVEGIKLYVAEWHGDKLGRPAIWQAAASHIFFSIGAGMGYYTSYASYNQKFSNAVQDALIIACSNSAIEVSAGFAVFGIVGYLGIRPDSGEVLGTYNLAFITLPAAFVQMPGSNFWAVIFFITIMVLGFSSCFAMLESLVTLVMDTGISKRVSRVAVSTVIIIVSFLLSLMYCTHFGRDLLNAVDAWISDLSLVGIVALESVVSTTVYRFRDVTGQVGLPAFAIFNGGYALAFVLGLIIAHHVSPEAGAGAGFGIFIAALLLCVFMARTPSVPAPRFWGGNPLLNKLWWLAFYSGNQLRRDLNVTVAQGNNWAIPFFWAPVLKYISAPILLIVFSLGYPKFTSRMQDPLEILGFAISHCIIAVVLLGFLLPRWFDVFIPEQRRNEGILPYAPGVTLGTSPEDAARGATEAGVDRNIDGVDDMQESKPVDSGEVDGTRTPSDDLSDKRVDVDDRVQSDPKTKPVMNDVN

SEQ ID NO: 20145 - protein, 823 aa, Saccharomyces cerevisiae
MNFFTSKSSNQDTGFSSQHQHPNGQNNGNNNSSTAGNDNGYPCKLVSSGPCASSNNGALFTNFTLQTATPTTAISQDLYAMGTTGITSENALFQMKSMNNGISSVNNNNSNTPTIITTSQEETNAGNVHGDTGGNSLQNSEDDNFSSSSTTKCLLSSTSSLSINQREAAAAAYGPDTDIPRGKLEVTIIEARDLVTRSKDSQPYVVCTFESSEFISNGPESLGAINNNNNNNNNNQHNQNQHINNNNENTNPDAASQHHNNNSGWNGSQLPSIKEHLKKKPLYTHRSSSQLDQLNSCSSVTDPSKRSSNSSSGSSNGPKNDSSHPIWHHKTTFDVLGSHSELDISVYDAAHDHMFLGQVRLYPMIHNLAHASQHQWHSLKPRVIDEVVSGDILIKWTYKQTKKRHYGPQDFEVLRLLGKGTFGQVYQVKKKDTQRIYAMKVLSKKVIVKKNEIAHTIGERNILVTTASKSSPFIVGLKFSFQTPTDLYLVTDYMSGGELFWHLQKEGRFSEDRAKFYIAELVLALEHLHDNDIVYRDLKPENILLDANGNIALCDFGLSKADLKDRTNTFCGTTEYLAPELLLDETGYTKMVDFWSLGVLIFEMCCGWSPFFAENNQKMYQKIAFGKVKFPRDVLSQEGRSFVKGLLNRNPKHRLGAIDDGRELRAHPFFADIDWEALKQKKIPPPFKPHLVSETDTSNFDPEFTTASTSYMNKHQPMMTATPLSPAMQAKFAGFTFVDESAIDEHVNNNRKFLQNSYFMEPGSFIPGNPNLPPDEDVIDDDGDEDINDGFNQEKNMNNSHSQMDFDGDQHMDDEFVSGRFEI

SEQ ID NO: 20146 - protein, 460 aa, Bradyrhizobium japonicum USDA 110
MSMLPNSQEARDVAYQLHPYTNARAHQQAGPLVIERGEGPYVFDASGKRYFEAMAGLWSVGLGFNEKRLVEAAHKQMLALPFYHTFSAKSHGPSIDLAEKLVALAPVPMSKVFFTNSGSEANDTVLKLIAYRSNALGQPQRKKVISRMRAYHGVTIASASLTGLPNNHRSFDLPLPNILHTGSPHFYKDGAPGESEEAFATRRAEELDALIQKEGPDTIAAFFGEPVMGAGGVIVPPATYWDKIQAVLKKYDILLVADEVICGFGRTGKMFGCETYGIKPDAIVVSKQITSSYFPLSAILMNDRMFEPIADESNKIGVLGHGFTAGGHPVGSAIALENLKIIEERGLVAHAAELGGYMQGKLRELAGHPLVGEVRGVGMIAALELVLDKQRKTAAATPGAVGGIASRMLQERGVISRNMLDAIAICPPLIVNKTQIDELVAAISGVLEDMKAEVAKLTPA

SEQ ID NO: 20147 - protein, 577 aa, Aspergillus parasiticus
MEGETLPLAQYLFKRLLQLGVDSIFGVPGDYNLTLLDHVVPSGLKWVGNCNELNAGYAADGYSRIKDIGAVVTTFGVGELSAINAIAGAYAEKAPVVHIVGTPMRASQESRALIHHTFNDGDYQRFDAIQEHVTVAQVSLSDHRTAPSEIDRILLQCLLHSRPVRIAIPVDMVPVLVPVAGLSSKIQIPPAVRQPQAEEAALNAVLKRIYSSKKPMILVDGETRSFGMLQRVNHFIQTIGWPTFTSGFGKGLVDETLPNVYGVCTLHQKAFVDSCDLVLVFGPHFSNTNSYNYFLKPADEKSVLFSPNSIQVNKDVFRDLPVGYFIEQLTQQLDISRIPTHKHDLVHPSLRTLPEVSPTDLVTQTGGFWKRFSPFLRTGDIILGETGTPGYGVNDFILPPQTRLFKPATWLSIGYMLPAALGASHAQRDLVASDQYHSLSNPRTILFIGDGSFQMTVQELSTIIHQKLNVIIFLINNDGYTIERCIHGRNQAYNDVAPWRYLKAAEFFGADQDGEYKASTWEVRTWADLDRVLNDSQLADGKGLRMVEVFMERLDAPDVLMGLLNNQVLRENAQSRL

SEQ ID NO: 20148 - protein, 397 aa, Colwellia psychrerythraea 34H
MFANIPLPASDEIIDLMARSSKDERPFKVDLTVGVYKDSNDNTLLMKAVMEADQLLANAGRNKSYVGSKGDLEYVQLLQELVFANQTVNGYISGVQTAGGSGGLRAILDLIKLANPTAKIWVSDPTYANHIPTIIAAGLAYEEYPFIDHKTMTLDESGMFDTLEKLGENDVVLLHGSCHNPSGLRLTAQHWQQIAQLSKSTNFLPLIDTAYQGFADGLNEDAAGLLTMAKSVERLALCVSCSKNFGVYSDRVGAAYILSPTLEEANKAQSQLAIMSKTTYWVPPSNGAEIVKTILKTPALKTMWSDELSQINGKIKGIREKLCAAFRQHSGDNYFDYILSQEGMFAMLPATEEQMESLRTEYAVYGLNNGRINLASIPEQDIDYLVESILAVTQVSE

SEQ ID NO: 20149 - protein, 370 aa, uncultured archaeon GZfos1D1
MDISQTIFEEYADDLGPEKIIHIYEPVAKLRAIVVIDNVAAGPVIGGVRMAPNLTTTEIMRLARAMTLKNAAAGLPHGGGKAGILADPKTEGKEHLIRVFARTIEHLHDYIPGPDMCTDESCMAYIFDEIKRAVGLPRVLGGIPLDEIGATGFGVAECAEVAKEYIDLDLNGARLVVEGFGNVGKNTARFLEEKGASLVAASDTSGTVYNMDGIDVSGLIRVKEEKGSVIYHEDAEKLKTGDLLKIPGDIFVPAARPDVIDERNVSTLDTKLVIQGANIAITLGAEKALHERGVLSVPDFIANAGGVIAAAVEYRHGDEKEAFSEIKSKIRANTKKILDKTYSEGLYPRDAAEMIAKERVLSAMSYRRCI

SEQ ID NO: 20150 - protein, 193 aa, Phaseolus vulgaris
MVPSEIRGVNYLAPENPFLVPPNFGLLQNDIPNLHLNTLLSNFPNCHFPPSGLEFVAPHSCLSSNSTSDEADEIQFNIIDERKHRRMISNRESARRSRMRKQKHLDELWSQVVRLRTENHNLIDKLNHMSDSHDRVLQENTRLKEEASDLRQMLADMQIGTSFACTMEELEDLPCNKPGPSNQLITPADMIHE

SEQ ID NO: 20151 - protein, 606 aa, Arabidopsis thaliana
MGGCTSKPSTSSGRPNPFAPGNDYPQIDDFAPDHPGKSPIPTPSAAKASPFFPFYTPSPARHRRNKSRDVGGGGESKSLTSTPLRQLRRAFHPPSPAKHIRAALRRRKGKKEAALSGVTQLTTEVPQREEEEEVGLDKRFGFSKEFHSRVELGEEIGRGHFGYTCSAKFKKGELKGQVVAVKIIPKSKMTTAIAIEDVRREVKILQALSGHKNLVQFYDAFEDNANVYIAMELCEGGELLDRILARGGKYSENDAKPVIIQILNVVAFCHFQGVVHRDLKPENFLYTSKEENSQLKAIDFGLSDFVRPDERLNDIVGSAYYVAPEVLHRSYTTEADVWSIGVIAYILLCGSRPFWARTESGIFRAVLKADPSFDEPPWPFLSSDAKDFVKRLLFKDPRRRMSASQALMHPWIRAYNTDMNIPFDILIFRQMKAYLRSSSLRKAALRALSKTLIKDEILYLKTQFSLLAPNKDGLITMDTIRMALASNATEAMKESRIPEFLALLNGLQYRGMDFEEFCAAAINVHQHESLDCWEQSIRHAYELFDKNGNRAIVIEELASELGVGPSIPVHSVLHDWIRHTDGKLSFFGFVKLLHGVSVRASGKTTR

SEQ ID NO: 20152 - protein, 341 aa, Mycoplana ramosa
MRVIFSEDHKLRNAKTELYGGELVPPFEAPFRAEWILAAVKEAGFDDVVAPARHGLETVLKVHDAGYLNFLETAWDRWKAAGYKGEAIATSFPVRRTSPRIPTDIEGQIGYYCNAAETAISPGTWEAALSSMASAIDGADLIAAGHKAAFSLCRPPGHHAGIDMFGGYCFINNAAVAAQRLLDKGAKKIAILDVDFHHGNGTQDIFYERGDVFFASLHGDPAEAFPHFLGYAEETGKGAGAGTTANYPMGRGTPYSVWGEALTDSLKRIAAFGAEAIVVSLGVDTFEQDPISFFKLTSPDYITMGRTIAASGVPLLVVMEGGYGVPEIGLNVANVLKGVAG

SEQ ID NO: 20153 - protein, 391 aa, Methanosarcina acetivorans C2A
MKKCGDNKMDLEDTLLMMPGPVPVTPRVLRAMSKPMINHRSAEFAGIYTDCRQILADVFQTKNDIFLLSGSGTAGMEAAVGSVAGSGDKVIAIENGKFGQRFKDLAALYADVVPLEFEWGLPVDLEMVKEKLEEGAKAITLVHNETSAGIMNPAVEIGKLAKKHDAIFIMDGVTSLGGDEVKVDEWGVDIAIVGSQKCLAAPPGMSAVSVSEKAFEAINSMKKRPYYNDLKAYKKSGDKPRPETPYTPALPLFYAMQEALHIVKEEGMEVRIKRHRALSEAVRAAAGAMNIEMFPQLNEYSKYSNTVTAMKAPAGVDGEDVKNDMKKRGVIIAGGQEHLKGKIFRIGNMGNVTARDVLSTIQQLEIVLSKQGYIDSVGAGAEAAMRVIDRV

SEQ ID NO: 20154 - protein, 304 aa, Zea mays
  misc_feature (61)..(61): Xaa can be any naturally occurring amino acid
  misc_feature (284)..(284): Xaa can be any naturally occurring amino acid
  unsure (1)..(304): unsure at all Xaa locations
RSICASCRMALLLGLLLLVVASPAIADDDSGIYYQLALMVCIIIIIIISNLIKKKARPPAXLHAWDARVQWPGAYCEQTSAGCCKPTTGVSPARDFYITGFTVLNATTDAAVTGCSNKVPYDPNLITGIQGLNQYWSNIRCPSNNGQSSWKNAWKKAGACSGLSEKDYFETALSFRSRINPLVRLKAKGIEPDFGLYGLKAITKVFKSGINATPVIQCSKGPFDKYMLFQLYFCAAGNGTFIDCPAPQQYTCSKEILFHPFKKWMLKQQLNQDDDPFQLPGVAXWTTDTPYRRLCLRFCQVCME

SEQ ID NO: 20155 - protein, 1755 aa, GIBBERELLA ZEAE PH-1
MAMAAETGDTPVVVEGAAAPAPSTIDLPVRTKQDATLPAGQALTGKQEHYLKRELISEQVKWEINELNSTTALQRFGAPFRSDQGEVPPEESELPILRYIFVHHVRDFPFLDKAREKEFWQDKLQVFLESFAGKQISSSEDRLEETKRRKLAIKARKLVELMMVSGIGTSSGFEERIRFSEIEIVDSNAIETGVMHTMPEGNYINGWDVNVAGVRVTQVKHTIRKHKHAEFILRIKKKGELEHFVGRRYSDFAKLHSRLRTELPGRVVPEMPKKNKSDTTTTIAFTSMFSNGNDSDASSISSVSTRPNGYTSMLSPGHRKKDSSASFRSNRSKGLNSPRLPSPRQTIVLWRENQRISLRAFLRSLLHNPQFANTNAMQEFLSGEPITPTDDDVEDIIRRKALDEKRMQEQKQFYEIARKRAAELDEYMEQFRRDIVERNGLTMLFQEIKEKETIQDLSIQYRKFAEWLRIEIAAVIYHLFLAEDNSPELFAQARRIHSLIPYSVIKNVIRIANPAAVMSAVLDIFLAQPFGTRSLMQRIFSLTLNDGIKSFQKSIDILATKIDDPVFSQKLYKYTHAEEHIKIAIREEAEADDVDIIVAVMRSDLIEPGLTGEQIQRLYNAYVAFNNAVENVDEELRQGAQLFSYMKQYLKLCTRQRDKEMMLQLIEEPVTLQLFRDLFTIFYEPLVRVYKSANVYNSVTDFAVFIDDMIQVVDKCREQDASADPNQTVQAFIDLCQRHEHNFYKFVHEVHTHDNGLFTQLMGWIEGILEFLRKGPKNGTLNVNALFEGGVSAGVLDKEKAMAEINSLIAWQEARKKWHNDKTRQKMAAEGHAGNDLMPAGMNFNSADFGLDSEDLEDMAYDDGSDDEAEAQEEDEMDPIEAERRRRAKRQDRLRRSAGEPAKPPVGEVHKLTENFLIMLRQVLYENRTLKTGPEACLVSSGPAMIQQPSPGQSRSFISSFVSPDPSAHAVLSQFISELGQKRRSRRQNIHPLWHVMSSTDRYWRHGFGFLVGDFSRSIEHCNGIKIESGIIKCTAILNAFMVIDFRLTISSVGYSVESVRCPRRHLASCDGFMETFGCIDFVLSSQEASTPPQCALLTLYSSQGLPGSLPELSLQPDLFVRSSPRSARATSDANGSSAARVITGNGPLRAKEASPFVSNKYAVIDHEYDALVVGAGGAGLRAAFGLAEAGFNTACISKLFPTRSHTVAAQGGINAALGNMHEDDWRWHMYDTVKGSDWLGDQDAIHYMTREAPASIIELENYGCPFSRTEDGKIYQRAFGGQSKEYGKGGQAYRCCAAADRTGHALLHTLYGQSLRHKTNYFIEYFALDLIMQDGECRGVLAYNQEDGTLHRFLANHTVLATGGYGRAYFSCTSAHTCTGDGMAMVARAGLPNQDLEFVQFHPTGIYGAGCLITEGSRGEGGYLLNSEGERFMERYAPTAKDLASRDVVSRSMTMEIREGRGVGAEKDHIYLQLSHLPAEILAERLPGISETAGIFAGVDVRKQPIPVLPTVHYNMGGIPTRYTGEVLTVDEKGEDKVVPGLYACGEAACVSVHGANRLGANSLLDLVVFGRAVSHTIRDKFNPGDALKPTAADAASDHIETLDKVRTADGPKSTAEIRLAMQKAMQTEVSVFRTQESLDEGVRKMKEIDGMYSQVGMKDRSMIWNSDLVETLELRNLLTCAIQTAESAANRKESRGAHAREDFPDRDDENWMKHTLSFQKQPHGKVDLSYRKVIGTTLDEAECKPVPPFKRTY

SEQ ID NO: 20156 - protein, 439 aa, Bacteroides fragilis NCTC 9343
MKNTAKNFMFYVAFVASLGGLLFGFDTAVISGAEKSIQVVYDLSDFSHGFTIAIALIGTIIGAFVCSKPVEKHGRLKALKIIAFLYFVSAVGSAAIIDWYSFLFFRFAGGLAVGASSVVGPMYIAEISPSRWRGRFVAFFQFNIVLGIVLAYFSNYWIHGIAHDWQWMLGVEAIPAIAFALLLYTVPESPRWLVKQDREAEARHVIKKVSNADIEQEIHEIKESLVTIGASGEKLFQHKYRKPILYAFLIATFNQLSGINAILYYAPRIFEMSGVFTDSAMMQSIVIGLTNLTFTMIGMILIDQVGRKKLLYIGSIGMTLSLALVAKGFYQDAFSGYYMLICLMGFIAFFAISLGAVIWVLISEVFPNNVRSKGQVLGSMTHWVWSALLSWMFPVFIRTGGTFIFSFFAIMMFLSFFFALRLPETKNKSLEQIQKELTN

SEQ ID NO: 20157 - protein, 499 aa, Oryza sativa
  misc_feature (275)..(275): Xaa can be any naturally occurring amino acid
  unsure (1)..(499): unsure at all Xaa locations
MGRKPDPSKPHYGGGASPRAARRTQPSPVFLGTALFVLGFVSLFTGHIVTDADWSRIRSRWRSKQVRNNEPINIWKSRYSNLYYGCSRRSVNFRSAVPENSSTGYLLIGTSGGLNQQRIGITDAVVVARILNATLVVPELDHHSFWKDDSDFSDIFDVDWFISYLSKDVTIVKRIPYEVMMSMDKLPWTMRAPRKSMPDFYIDEVLPILMRRRALQLTKFDYRLTNELDEELQKLRCRVNFHALRFTNSIQTLGEKLVRKLRSMSSRYVAVHLRXEPDMLAFSGCYYGGGDKERRELGEIRKRWDTLPELSAEDERSRGKCPLTPQEIGLMLRALGFSNDTYLYVASGEIYGGEETLQPLRDLFPNYYTKEMLAGNDLKPFLPFSSRLAAIDFIVCDGSDVFVTNNNGNMAKVLAGRRRYMGHKRTIRPNAKKLNLLFKRRKQMGWDIFSQKVKKVQRGLMGEPDDIRPGRDDFNEFPSSCICQRIPVNRSVTARAENL

SEQ ID NO: 20158 - protein, 401 aa, Geobacillus kaustophilus HTA426
MDMMPFEPTPTPQPKRRGRFVSWLAASVAGAVIGSAATWYVAPKWIYGETHSQTEAAETTAKSEVLPLQPTANVKTNMIDAINKVADAVVGVVNIQKQVDFFSDQAQDTEAGTGSGVIFKKEGNVAYIVTNNHVIEGANKVEVALPNGKKVNAEIVGADALTDLAVLKIPAEGVTNVASFGDSSKVKIGEPVAAIGNPLGLDLSRTVTEGIVSGKRTMPVSTSAGDWEIDVIQTDAAINPGNSGGALINSAGQVIGINSMKIAETGVEGLGFAIPSENVKPIVEQLMKDGKIKRPYLGVQLVDVADLSDEVRADELKLPSNVTYGAAITSVEPFSPAADAGLKSKDVIVAINGDKIDSVSALRKYLYTKTSVGDRIKLTIYRDGFETTVSVTLKARDSSQS

SEQ ID NO: 20159 - protein, 191 aa, Debaryomyces hansenii CBS767
MQTIKCVVVGDGAVGKTCLLISYTTSKFPADYVPTVFDNYAVTVMIGDEPFTLGLFDTAGQEDYDRLRPLSYPSTDVFLVCFSVISPASFENVKEKWFPEVHHHCPGVPCLIVGTQTDLRNDDVILQRLQRQKLTPISNDMGEKLAKELRAVKYVECSALTQRGLKTVFDEAIVAALEPPVIKKSKKCTIL

SEQ ID NO: 20160 - protein, 793 aa, Ustilago maydis 521
MSFTPRYGSSVTRDYTLLQGHPSSYQHFGALESSQPRHPHSTLTTRASDEDDGHSAHRDRDHDRDDNHAIASASASSIHTDDSTHNDLSSISLPPHQIAVSTSPAFGRTNRLATAPVVSPRNRRPSVNAYSQVVGIPSEYLLGGTTAAPLTHHPTGASNITLGASAVSTLAPPQKPTRRSQEDQGADATETTALLGGRPLAQPDTNSSYRAGTAAASYGGVRRSSVDCASIVSGGAGASGFSGWAAANLIREAPLPGVEQIESIAREPHDHIAWREARVLIGYTIPIFATHLLELSLSVASVFSLGHLGTVELAAASLSSMTANVSGFSVLSGFISALDTLLPSAYTQQPKSVGLWTQRMGVILTAILPLILAVWLNAEAILVRIGQDPEVAYLAGRYLSVLAYGLPGYALFEVCRRYLQAQGLMHAPTIVLMFVSPLNAIANYLLVWGPESIRIGFIGAPLASALSMWLMAILCFLQCVVAPRDAWDGFTTAAFKWDGIKPVLLLGFAGMVSLAAEWWAWEIVGLVTSQLGVIALAAQSVLLVSSSVTYQLPFGASVATAVRVGNLLGANRPDEAKISSRVSLILSLAMGGLNSALFLIFRKQWGWLFSSDIEVIKLVEHILPLLAFFQVADGICGIAGGVLRGTGRQAAGAGINMISYYVIGIPVGLVLTFTRINLGLAGLWWGLTIALLFGSAGMIWFISITDWDWEVKKVQLRMAVDDPSDSSHSARAAPSAHGAIKSDIEALTGPRLAQTSSTVDAINSRDPALSPHCLRPSSLAGSAIEEEEGQVSI

SEQ ID NO: 20161 - protein, 207 aa, Pseudomonas fluorescens Pf-5
MLKIWGRKNSSNVRKALWCAQELGLAYESLDAGGAFGVVDTPAYRALNPNGRIPLIEDGDFVLWESNTIVRYLAARYAADSHWYPADVQLRASAEKWMDWTTSTFAEPFRHLFWGVLRTPAEQQDWAQINAAKATCAELLARVDQALGEQPYLSGQEIGVGDIPLGSFIYAWFEMPIERPSMPHLQAWYERLKQRPAYRQAVMTALT

SEQ ID NO: 20162 - protein, 369 aa, Desulfitobacterium hafniense DCB-2
MSDLRRIVIKVGSSSLNHPEGGLDDQAIQRIAGVIAGIRQLGVECVLVSSGAVAAGVGKLGLKTKPKDMAGKQAVAAVGQGVLIEKYALALEARGLVCAQVLLSRLDLAEASRYRNAQNTLEQLLRYQVIPIINENDTVAVEELCFGDNDRLSALVAGLVHGDLLVILTDVDGLYSANPKLNPQAELIEEVEDLTQVMHIAGGAGSSMGTGGMVTKLKAAEITTRFGMGMFLLHSKRMEEIIELIQGERPLGTYFFPAAHRIMGKKRWIAYGGLSEGSIFIDEGAVKALLKGKSLLASGITGIDGVWERKELVRINNPDGIEVARGLVELSSEELEKVRGKHSEEMLATIPNLEGEEVVHRDNMTLMIE

SEQ ID NO: 20163 - protein, 464 aa, Haloarcula marismortui ATCC 43049
MLVSLTKCMHVFWHQRDLRIPDNRGLTAAAADDEVLPVYVLDTDLLANIGKRQKAFLLAGVRALKQAYRDHGGELLVKKGTAVDVLSNVVDEYDADRVYYNEHYRPARRNRQRRVDEALPTKSLTDLVLVDPAGLDSQYENHSRFYDDWQAHHKLPPVGSPDSGSLVDVSDPTTAPTIETEMDLPTPGYEGARQRYDDFLTGGIETYNDTRDDMQAAVERPTSAVSRMSPYLAAGMIGIREMWRDASDRHTEATGDAQRNIQKYRYELSWREQSYHLLYYNPTLLSENYKTFPNRIEWENDEDNFEAWKHGETGYPFIDAGMRQLEQEGYIHNRPRQNVASFLTKHLLVDWREGARHFRKRLVDHDPANNAASWQWTASTGTDSVDVRIFDPVAQMSKYDSGADYVTEYVPELRGVPSTKIVDWPTLSDGEREELAPDYYHPIVDRNAAYERAQRVFETALGKR

SEQ ID NO: 20164 - protein, 417 aa, Desulfitobacterium hafniense DCB-2
MDFAPELITIGQKAKDAARKLAYAGTAAKNKALLAMAEALLNHEQKILEANRKDVEAAIQKGTKKSLVNRLALTSEGIRQMSDALKEVVNLGDPVGEGEFWTRPNGLRIQRTRVPLGVVAMIYEARPNVTVDAAALCLKSGNAVILRGGSEAIESNKILSKVIAGAAESQGMPTACIQLLENTNRQWVQQLMKMNGYVDVIIPRGGAGLIETVVKEATVPVIETGTGVCHAYVDGEADLAKGVSIVFNAKTQKPGVCNALEAVLVNEAVAQEFLPLLGEKFRDYGVEIRGCEKTCAILPYAAKAKEEDWGIEHLDLIISAKVVQGVDEAMDHIYQYGTKHSETIITENYTTAQRFLNEVDAAAVYVNASTRFTDGGRFGFGAEIGISTQKLHARGPMGLQALTTMKYMVYGEDHIVT

SEQ ID NO: 20165 - protein, 299 aa, Methanosarcina mazei Go1
MDRIISVVGHTALDYIVDVENIAGKNESSPVIDYEEYPGGGAANIAVAIAKLGGKSQLISPVGTDFSSSGYEKLLKEAYVDLSRLYTIEDRKISKAFIFTDREDNQTTYFYWGASSKFKELEPEPVDFVHLATADCVYNAKIAQIAGFVSFDPGQDLVTYSKENLETILAHTDILFANKHEIKRVSEMTGKSFSELRDMIDVIVVTYDAEGSIIYRGGDQWSIPVVSVKALDPTGAGDAYRAGFLLAYTREYSLPTCGKIGSTVASFAVQSRGCQTSLPTWEEMKSRYEASFGNLGAEI

SEQ ID NO: 20166 - protein, 515 aa, Geobacter metallireducens GS-15
MKKRGMNRRKFITAASVGVAGVYATLHAGVVRAMMGSGGMGGGGMGGGGMGGTTTTIVDPPPGASFFDIPNATKNSAGAYELLVKEARLRLNGTAVTLLTYNGMYPGPVIRAARGDMLKVRMVNMLPKTTASNILGHVRNITNIHTHGLHVTPSGMGDNMMMTAAPGTELNYEYDLALEEPGHLNFYHPHVHGSVAEQYWGGLAGPLVIDDAAGSPLSGYETHVMFIKDLTIANGLPEPYTSNSDFMRGKEGNLVMVNGQVNPVLSIRPGQVQRWQIVNACNARFLKLSLDRHSLWLVGTDGGLLDKPYKLSTILLAPGERVDVLVKADQGGGNFKLLSLPYARGGGSLQQVTLLTLAYGGISAGDTLPTAVNPAAARLNMNLSLLPRRQISLSMMMGRGYINGISYTDMDHAYTISSGLGTYEVWEIVNQSGMDHPFHQHVNSCQVLSVTGGDPDYASLYTTIPAWKDVVIIPKMGSATILVPVKDYDGMTMFHCHIVEHEDIGMMGVWDIGMM

SEQ ID NO: 20167 - protein, 490 aa, Petunia x hybrida
MGFESEKNNSVLSKLATNEEHGENSPYFDGWKAYDNDPFHPLKNPNGVIQMGLAENQLCFDLIEDWIKRNPKASICTTEGIKSFRGIANFQDYHGLPEFRRAIAKFMEKTRGGRVSFDPDRVVMAGGATGANETIIFCLADAGDAFLVPSPYYPAFNRDLRWRTGVQLIPIPCESSNSFKITTKAMKEAYENAIKANIRVKGLILTNPSNPLGTTLDRDTLKSLLNFTNERNIHLVCDEIYAATVFNTPQFVSIAEILNDEKSNFNKDLVHIVYSLSKDMGLPGFRIGIVYSYNDAVVNCARKMSSFGLVSTQTQHLLAKMLSDEEFVANFLCESSMRLGKRHKHFTNGLEQVGIKCLKSNSGLFCWMDLRHLLENSTLDSEMSLWRVIINDVRLNVSPGSSFDCQEPGWFRVCFANMDDETVEVALARIRRFVGVGVKENGEETKPVKNKEQWKKSNLRVSFSKRMYDESVLSPLSSPIPHSPLVRART

SEQ ID NO: 20168 - protein, 320 aa, Arabidopsis thaliana
MATAVGGGSDVEVGFAKLQGEDFEYYMQSYSIILGRNSKKATVDVDLSSLGGGMSISRNHARIFYDFTRRRFSLEVLGKNGCLVEGVLHLPGNPNVKLDSQDLLQIGDKEFYFLLPVRSILGGPLGPRHHVSGQTSVVPYHNYQSGPGSGSGKKGVRSRELYEYDDEDDDDDDDEEDDMRGSGKKTRRDGHEVVYASGEKKREGRSKVDREADDQQFLQLEEKDVVSSVATVLSDLCGPGEWMPMEKLHSVILKEYGNVWHHSRVRRYLSQEDWAIPEAKGKPWYGLLMLLRKYPEHFVINTRSKGRVTLEFVSLVTLLS

SEQ ID NO: 20169 - protein, 207 aa, Neurospora crassa
MVTGTIKYAKTNHPLSRECVVVGDGAVGKTCLLISYTTNKFPSEYVPTVFDNYAVTVMIGDEPYTLGLFDTAGQEDYDRLRPLSYPQTDVFLICFSVASPASFENVSQKWAPEVNHHCPGVPFLIVGTQKDLRSDKELRDKLAQRKQSMIEFKQGEKLAQDLDAVKYVECSALTQEGLKNVFDEAIVAALEPPQKKTSKRDKKCLIL

SEQ ID NO: 20170 - protein, 426 aa, uncultured marine proteobacterium ANT32C12
MNKLMLFFVLIFSTHGFSDLKQDLDEQLDPLMERVISWRHDIHQNPELSNREYRTAKKIAVHLKSLGIKVETKIAYTGVVGLIEGGLPGPTIALRADMDALPVIEKTGLPFASKEKTKYLGQTVGIMHACGHDAHVAILMGVAEFLSQNKDQIKGNIVLIFQPAEEGPPEGENGGAKMMLEEGLFEKYNPEVIFGLHVGNGPHGYVSVVSGPAMAAASTYRIKVKGVQAHGSRPWDSIDPVMASVELIQGLNTIVSRRINIINNPAVVSVGIIRSGTRGNIIPEDAEIQGTIRTFDPELRAEIYDEIRQIASGVALGTGAQIDVEFDVGGFYPVTYNNPDLVAKLIPTLKEATDNKFFLSKTPSTGAEDFSFFSDRIPGMYFWLGVNAPGVETAPGNHSPYFVVDDGALDEGLKSLIYLVLEYPEK

SEQ ID NO: 20171 - protein, 398 aa, Ralstonia eutropha JMP134
MLRRFWLFFAQAVTVVLAVWFVVATLKPEWLQRGRVAVQSGSPIVALKEVVPNVAGAAAQASYSEAARQAMPAVVNIFTSKNGSRRSPHPQAEDPWFRFFFGDRLPERQEPVSSLGSGVIVSAEGYILTNHHVVDGADEIEVALTDGRKANAKVVGSDPETDLAVLKISLKELPAITLGRLENVKVGDVVLAIGNPFGVGQTVTMGIVSALGRSHLGINTFENFIQTDAAINPGNSGGALVDAQGNLLGINTAIYSRSGGSLGIGFAIPVSTAKQVMESIISTGSVTRGWIGVEPQDMTPEIAESFGLDAKQGALIAAVVQGGPADKAGVKPGDVLASVDGQPITDTTALLNAIAQLKPGVDIKMKVIRRGKPAELTVTIGKRPPPPRRSLPFDDEEQ

SEQ ID NO: 20172 - protein, 215 aa, Magnetospirillum magnetotacticum MS-1
MTTHAAMANAIRFLTMDAIEKSKSGHPGMPMGMADVATVLFTRFLKYDAKAPKWADRDRFILSAGHGSMLLYALGYLTGFEDLSDIEQIKNFRQMGYRTAGHPEFGHVAIAETTTGPLGQGIANAVGFALGEKMAAARHGAEIVDHYTYVIAGDGCLMEGISQEAISLAGVWNLSKLIVLWDDNHICIDGDTAISTSDDQLARFQASNWDVCRVD

SEQ ID NO: 20173 - protein, 342 aa, Vibrio parahaemolyticus RIMD 2210633
MKTLLPTSTAGSLPKPSWLAEPEKLWSPWKLQGEELIDGKRDALRVALQEQELAGVDIVSDGEQTRQHFVTTFIEHLSGVDFENRKTVTIRNRYEASVPTVVGPVSRTKPVFVEDAKFLRQQTKQPIKWALPGPMTMIDTLYDDHYGSREKLAWEFAKILNQEAKELEAAGVDIIQFDEPAFNVFFDDVNEWGIACLERAIEGLKCETAVHICYGYGIKANTDWKQTLGTEWRQYEEVFPKLQQSNIDIISLECHNSRVPIELLELIRGKKVMVGAIDVATNEIETPEEVANTLREALKYVDADKLYPCTNCGMAPLSREVSTAKLNALSAGAEIVRRELSA

SEQ ID NO: 20174 - protein, 159 aa, Glycine max
QRELKKRLQREVDRLRDSFCRQHALELIFTEEGEARLNALIYLGMDGNVEQPEWFPSPIFQEIFAKLTDVASIAADLFVGRERFATVLLMRLAETVILWLSDDQTFWEEVETGSTPLGPIGLQQLYLDMQFVMIFSSQGPYLSRHLHQAIKNIIERAIN

SEQ ID NO: 20175 - protein, 298 aa, Gloeobacter violaceus PCC 7421
MPPTLRAFWKFTRPHTIYGTAASLVGIFLIASASLGAITAEGLAALLVAQVSCLCANVYIVGLNQLTDIKIDRINKPYLPIASGEISPRTGTALVGILGVAALVIALQNLYLFATVAASVLIGTAYSLPPLRLKRFALFASLCIFTVRGLIVNLGLWGYFLDGAGQPVQFGPAILCLSLFVTLFTFVIAIFKDIPDMEGDRRFAITTFSLRLGKRFVFDLSCWLLAATYLLVSALSTLFLSPAGITFLLVFHTAMLAVFFYRRGQVDLKDNAEITDFYQFIWKLYYVEYLVYPLTWWL

SEQ ID NO: 20176 - protein, 213 aa, Hordeum vulgare subsp. vulgare
MASSASRFIKCVTVGDGAVGKTCMLICYTSNKFPTDYIPTVFDNFSANVVADGTTVNLGLWDTAGQEDYNRLRPLSYRGADVFVLAFSLVSRASYENIMKKWIPELQHYAPGVPVVLVGTKLDLREDKHYLLDHPGMIPVTTAQGEELRKQVGALYYIECSSKTQQNVKAVFDAAIKVVIQPPTKQREKKKKKQRRGCSMMNFSGRKMLCFKS

SEQ ID NO: 20177 - protein, 586 aa, Rickettsia prowazekii str. Madrid E
MVRFIFVTGGVVSSLGKGITAASLAMLLQAKGFRVSVRKLDPYLNVDPGTMNPHEHGEVYVTDDGAETDLDLGHYERFTGVTACKCDNITTGAIYSKLLKDERLGNYTGITVQVIPHVTNIIKDFIMSNTNGFDFIICEIGGTVGDIEGLPFFEAIRQIGNKLKNANCLFIHLTLLPYVKTARELKTKPTQHSVKELRAIGISPNILVCRAERNISKSAIDKIALFCNIKPEYVIPAIDQKNIYLVPIAYHNSGLENKVLNFFNINVVPSKLDKWYDIIDKIKDSNSKVKIAIITKYHKTQDAYKSVIEALNHAGIYYKYKIDVLWINAENLTEENINKKLLDINGILVPGGFGVRATQGKMIAIKYARTNNIPFFGICFGMQLATIEIAQNLIGIQDAVTEEFKIKGTKIIEKINKNCEDATIKIKNAHISKCTYSEAFECDASTVYTNIHEDSNNLSTDKLQIETNFRNMSDIEKTMRLGAYPCNLVANTIAANAYKSLEINERHRHRYKFNNEFQNIFEQHGVVFSGFSQNKQIVEIIELPELRWFVGVQFHPEFKSKPFEAHPLFIQFIKATIEYNKSNEQQ

SEQ ID NO: 20178 - protein, 218 aa, Hordeum vulgare subsp. vulgare
MSGGAGAATAVSRFIKCVAVGDGAVGKTCMLICYTCNKFPTDYIPTVFDNFSANVSVDGSIVNLGLWDTAGQEDYSRLRPLSYRGADVFILSFSLTSRASYENVHKKWMPELRRYAPGIPVLLVGTKLDLREDRAYLADHAADSIITTEQGEDLRRQIGAVAYIECSSKTQRNIKAVFDTAIKAVLQPQRHKEVARKETRTRSSRSVRQYFCGSSCFA

SEQ ID NO: 20179 - protein, 489 aa, Desulfovibrio vulgaris subsp. vulgaris str. Hildenborough
MQRQVVFATSEMYPFSKSGGLGDVLGALPLALHRMGVPTAVVTPFYGRLRTADYPIRLTVSDCHVGYPWAPITCDVFEADYHGMPVYFIHRGEYFDRRYYYNDHKGDYFDNCERFVFFCRALLALMRRLGQPPAVLHAHDWQTALVPAFLYFLRQTDPFWQDTRSVLTIHNLAFQGRFASRLFETSGLPPQAWSVDGAEFWGDFNLLKAGIAYADKVTTVSPSYAREILGPAYGSGLDGILRKRAHALHGILNGADYDIWSPGNDRFLPCRYTPTDLAGKAQCKRALIEELGLDPHLARRPILGFIGRLRGQKGIDLLLDILPRLMESDVGVIILGEGNLTHEARALELMEAYRGRVCTIVSYTEDLAHRIQAGSDIFLMPSRYEPCGLTQMYALRYGTPPVATAVGGLRDTIVPWPSPESTGFTFGRCESAAFLRAILDAVHLWTTAPGDWQGMVRRAMAQAFTWERAGRAYLDLYAQLGVSPGEEGA

SEQ ID NO: 20180 - protein, 117 aa, Brassica napus
  misc_feature (100)..(100): Xaa can be any naturally occurring amino acid
  misc_feature (104)..(104): Xaa can be any naturally occurring amino acid
  misc_feature (106)..(106): Xaa can be any naturally occurring amino acid
  misc_feature (108)..(108): Xaa can be any naturally occurring amino acid
  unsure (1)..(117): unsure at all Xaa locations
NLCEDLQPSQAEWAASGGGRRRCPSPAGGEDAHRRRVSYFYEPSIGDYYYGQGHPMKPHRIRMAHSLVVHYGLHRLLELSRPYPASEADIRRFHSDDYIXFLAXAXGXPLRLPPPSA

SEQ ID NO: 20181 - protein, 232 aa, Zea mays
GCFSVRITYPLEYYYPRCGCCTCPAVTKYGTKVCHHTKHSCCGNTTNLHQHVPDYHLSWIRNTWQKKKKKKGGRSRFSAPPGSGQLAASLHSATNLESSTSTQIDEFFPPLRSRRAPMRAMSSAVNGMLRARLRGAARVRGGGGEGAGRWTTPGHEERPKGYLFNRPPPPPGESRKWEDWELPCYVTSFLTVVILGVGLNAKPDLTIETWAHQKALERLQQQELAAADTQAE

SEQ ID NO: 20182 - protein, 497 aa, Debaryomyces hansenii CBS767
MTSASNIYDVIVVGAGVVGPTIATALARQGRRVLIIERDWSTPDRIVGELMQPGGIKALKELGMIKAINNIEAIHVDGYYVKYGDQVVRLDYPDKQDAMKTNSVKSVPDCVFDGNDKMASDYTLSSKDWDEDERVRGVAFHNGEFLMNLRSMVKSEPNVTWVEGTATKILRDEENPSIVTGVEVKQNQAKKTYTAKLTISCDGIYSKFRKELSAENVPIIGSYFVGLKLIDAKLPMVNRGHVILGSHAPILIYQISPHETRILCAYRSTKPPSQTSDELYNYLRDEVLPALPKETQPSFEKALETRKFRAMPNQYLPAVKQGKETKGLVMLGDSLNMRHPLTGGGMTVGLNDSVLLAKLLHPRYIEDFDNHELLGKQLSTFHRKRKNLDAVLNTLSIALYTLFAADRNALLILQRGCFKYFLLGGDCVSGPIGLLSGILPFPMLLFNHFFSVAFYAIYCNFIDRGLIGFPLALLEAFDTIFTAIIVFTPYLWKELVY

SEQ ID NO: 20183 - protein, 499 aa, Burkholderia fungorum LB400
MTRVRRLNDTFDTGLVWLRRDLRNTDNAALYYALKHCERVWCVFVFDTTILQPLVDAWHARHPDTQPQDRRIEFILAALGELDEALRADGGGLIVLYGNPAELVPKLADELGVDAVFANHDYEPVAIERDGTVRERLAEAGRQWLTFKDQVIFERDEVLTGQSKPFTVFTPYRNAWLRQLSAFDLKPYPVETYAKRLAALPSKFDRQLPTLEQLGFAPSNLGELNLPAGMSGAQRLLDDFMTRIDSYADRRDFPAAKGPSYLSIHLRFGTVSIRTLARLAHEMSLQPDGQGSATWLSELIWRDFYFMILAHHPRLARGASFREEYDRLRWEQGLQADEAFAAWCNGRTGYPLVDAAMLQLNRTGYMHNRLRMVTASFLVKDLGVDWRLGERYFAEQLNDFDFSANNGGWQWAASTGCDAQPYFRIFNPVTQSEKFDAEGRFIKRYLPQLAKLPSKWIHAPWLAGAERLADCGVVLGKDYPAPIVDHAEARARTLARFGK

SEQ ID NO: 20184 - protein, 653 aa, Thermobifida fusca YX
MPQAVDPRRVTEHGSEVMRLVDEIFPLVEGFYVDLHRNPELSHQEHRTSQAVAEWLSRAGYEVTTGIGGTGVVGILRNGEGPTVLLRCAMDALPLAEQTGLPYASTARGTTADGQETPIMHAAGHDAHTACLVGTADLLSSSRKHWSGTLMVVAQPGQETLDGAEAMLADGLYERFGRPDIVLTQRVGPQPAGMIAHRAGVILGMSTTVGVRIFGSPGHGGFQPQTGVDPVVIAASIITRLQTIVAREVNPSEMAVLTTGVVRAGTKADLVPDEAYLEINTRCLNERVADRIYAAIERVVKAEAAASAAPREPEVTEIRRTSLIRNHAQHTRAVSSAHRAYFGDAYVIDLPEPFAVGDDFGAFGLPDDPEPVPYVMWLLGSTPHDVWSAAPGATPFDKLASVPGSHSSQFAPDREATLRAGIAALTIGALTYLGRTSGPGRATSGLAQIASSRITEDESTQSADMEALLADDDEGESTQSADMEALLADDDEGESTQSADMEALLADDDEGESTQSADMEALLADDDEGESTQSADMEALLADDDEGESTQSADMEALLADDDEGESTQSADMEALLADDEGETTQRANMAELLNDPPPPPRGPTQGPQTGPAPSFRPPSGPPLAAPPPMGPPVDAPPPPETPPHSDEPPYRY

SEQ ID NO: 20185 - protein, 411 aa, Enterococcus faecalis V583
MNRVVITGYGVTSPIGNEPETFLESLKTGKNGIGPISKFDVSETGVTLAAEVKDFPMEKYFVKKDGKRMDKFSLFGIYAALEAMAMSGLDTSQLDVDRFGVMVGSGIGGLETIQNQVIRMHDKGPERVAPLFIPMAIGNMVAGNIALRVGAKGICTSTVTACASATHSIGEAFRNIKHGYSDVIIAGGAEAPITEIGISGFASLTALTKATDPEKASIPFDKERSGFVMGEGAGVFILESLDHALERGATILGEVVGYGANCDAYHMTSPTPDGSGAAKAMVLAMEEAGISPEKIGYINAHGTSTQANDSAESKAIELALGDAAKTAYVSSTKSMTGHLLGAAGGIEGIATLNALQHQFIPPTINVENQDEAITVNVVLNESKEHKFDYALSNSLGFGGHNAVICLKRWED

SEQ ID NO: 20186 - protein, 500 aa, ASPERGILLUS NIDULANS FGSC A4
MGLSKTNRIMILLVIDTAFFLLELIAGYSVHSLALVADSFHMLNDVISLLVGLWAVKVANRETSSKMYTYGWQRAETLGALVNGVFLVALSLSIFLEAIQRLVEPQEVRNPKLVCGVGCAGLLSNILGLVLFHDHSHGHGHGHGHSHEDAEGVDAAEQGQVHDHGHSHAGRDVAGAITEPTAAYSRRRTIDSQHRSSRRGFEDIGGHPASMRQDIIFAANRNKFPDEDDSYESDERAEDGAGDNGGPTERSTLLGHTDRAANYTDEHAPVRDQTKKDPHETHNHAQPKPKDKKHGHDLNMRGVFLHVMGDALGNIGVILSALVIWLTDYSWRFYVDPGISLVITVIILASAIPLCKAASRILLQAVPHGLSIDHIKEDIESLPGVKGSHHLHVWQLSDTKTVASIHIQVDTEIKGEGSERYMHLAKQVRQCLHAYGIQSSTIQPEFPRDSDTEDNQVGSAHLPSGSPSRTPSIRDGDPQACLLECGDECAGGHCCPTKPT

SEQ ID NO: 20187 - protein, 726 aa, Oryza sativa
MGENTGDNPNMSILQRIATSDVPLVKEYGLPGIIGAILLAVVIPIMLSSIFNKKGKKRAVQADVGGEAGLAMRNSRFSMLVEVPWEGATTMAALFEMASKKYPRHRCLGTRKLINREFVESPDGRKFEKLHLGEYEWDTYAEAFSRACNFSSGLIKLGHQRDSRAAIFADTRTEWIIAAQGCFRQNLTVVTIYASLGEDALVHSLNETQVSTLICDSKQLKKLPAISSKLQSVKHVIYIEDEPVEAEVLNQMKHWTTFSFGEVEELGKTSHTDARLPSSTDTAVIMYTSGSTGLPKGVMITHGNMVATTAAVMTIIPKLGTGDVYLAYLPLAHVFELAAETVMLASGAAIGYGSALTMTDTSNKIKKGTKGDVSALKPTLMISVPAILDRIRDAVFKKVGEKGGLTKKLFDIAYKRNLGAIEGSWFGSWAPERMIWDNLIFKPIRSMLGGRIRFVLCGGAPLSSDTQRFMNICLGVPVGQGYGLTETCAGAAFSEWDDTSVGRVGPPLPCCYVKLVSWEEGGYKISDSPMPRGEVVVGGYSITKGYFNNEAKTNEVYKVDERGMRWFYTGDIGQFHPDGCLEIIDRKKDIVKLQHGEYVSLGKVESALTTSNYVDSIMVYADPFHNYCVALVVPAHQALEQWAQNSGINYKNFDELCHNDQAIKEVQQSLSKAAKAARLEKFEIPAKIVLLPEPWTPESGLVTAALKLKREQIKTKFKDDLGKLYH

SEQ ID NO: 20188 - protein, 358 aa, Oryza sativa
MSAYCGKYKDELIKNAAYIGTPGKGILAADESTGTIGKRFASINVENVEDNRRAFRELLFCTPGALQYISGVILFDETLYQKTKDGKPFVDILKEAGALPGIKVDKGTIEVAGTDKETTTQGHDDLGKQCAKYYEAGARFAKWRAVLKIGPNQPSQLAIDLNAQGLACYAIICQENGLVPIVEPEILVDGPHDIDRCAYVSEVVLAACYKALNEHHVLLEGTLLKPNMVTPGSDAKKVAPEVIAEYTVRTLQRTVPPAVPAIVFLSGGQSEEEATLNLNAMNKLSAKKPWSLSFSFGRALQQSTLKAWAGKTENVEKARAAFLVRCKANSEATLGTYKGDAVLGEGAAESLHVKDYKY

SEQ ID NO: 20189 - protein, 349 aa, Lupinus angustifolius
MALVTTPTVNDGPLFAEVNMSSDFNAPTVRATVVQASTIFYDTPATLDKAERLLAEAASYGAQIVVFPEAFIGGYPRGSNFGVSIGNRTAKGKEDFRKYHSAAIDVPGPEVDRLAALAGKYKVYLVMGVIERDGYTLYCTVLFFGAQGRYLGKHRKLMPTALERIIWGFGDGSTIPVFETPIGKIGAAICWENKMPLLRTAMYAKGVEIYCAPTADSREVWQASMTHIALEGGCFVLSANQFCRRRDYPPPPEYVFEGTEENLTPDSVVCAGGSVIISPSGAVLAGPSYEGEALISADLDLGEIARAKFDFDVVGHYSRPEVLSLVVKDHPTNPVTFTSASTKIEDKTK

SEQ ID NO: 20190 - protein, 580 aa, Magnaporthe grisea 70-15
MKYIVVNGGVISGVGKGIIASSTGLLLKSVGLKVTAIKIDPYLNVDAGTMNPLEHGECFVLSDGGEVDLDMGNYERYLNVTFTRGHNITTGQIYKEVIDKERRGDFLGKTVQIVPHITDAIQERIERVARIPVDNSGQEPDVCIIELGGTVGDIESMPFVEALTQLRHKYGRSGFFSIHVSFVPAIHGEQKTKPTQHSVKTVRSAGLIPDLLCSRCNKGLEQSTVNKIAQMCQLEPEQVLVVYDMPSIYQVPMLLDQQGLVTQLKASLGLDSIPRDPARLQHGSEMWNVWKDTVGAMDSEGKVTIALVGKYTELHDSYLSVIKALEHSSMKCRRKLDLQWVDSEHLEPKTDKEQFDAAWEKVKSADGILVPGGFGNRGTEGMIAAAKWAREQSKPYLGVCLGMQLAVVEIARNICKLEGATSEEFNGLAEHKVIIFMPEIDKTTMGGTMRLGLHDTHFQPGSEGSKIRALYGNGPVARERHRHRYEVNPQYIDQLQKEAGLQFLGKDDKGERMEIIELKGHPYFVGVQYHPEYLSRVLDPSKPFLGLVAAASGCLEKVTTDVLAEHKNGVNGVNGNGRHF

SEQ ID NO: 20191 - protein, 542 aa, Listeria innocua Clip11262
MAKDIKFSEDARRAMLRGVDQLANAVKVTLGPKGRNVVLEKKFGSPLITNDGVTIAKEIELEDPFENMGAKLVSEVASKTNDVAGDGTTTATVLAQAMIQEGLKNVTAGANPVGVRRGIEKAVATAIEELKAISKPIESKESIAQVAAISSGDEEVGKLIAEAMERVGNDGVITIEESKGFATELDVVEGMQFDRGYTSPYMVTDSDKMEAVLEKPYILITDKKINNIQEILSVLEQVVQQGRPMLIIAEDVEGEAQATLVLNKLRGTFNVVAVKAPGFGDRRKAMLEDIAVLTGGQVITEDLGLELKTATVDQLGTANKVVVTKDDTTIVEGAGDSTQISARVNQIRAQMEETTSEFDREKLQERLAKLAGGVAVVKVGAATETELKERKLRIEDALNSTRAAVEEGIVAGGGTALVSIYNKVAALEAEGDVETGINIVLRSLEEPVRQIAHNAGLEGSVIVERLKHEAVGVGFNAANGEWVNMIDAGIVDPTKVTRSALQNASSVAALLLTTEAVVADQPDENGPAAGPDMGMGGMGGMM

SEQ ID NO: 20192 - protein, 361 aa, Zea mays
MSAFVGKYTDELIKTAKCLATPGKGILASDESTGTIGKRLSSINLENVESNRQALRELLFTAPGVFDYLSGVILFEETLYQKTSDGKPFVDVLIAGGVVPGIKVDKGTVEIAGTDGETTTQGLDSLGARCAKYYEAGARFAKWRAVLKVGPAGQGQPSELAVRQNVEGLARYALICQENGLVPIVEPEILTDGGHDIGTCAAATERVLAALYKSLSDHKVLLEATLLKTNMVTPGSDSPKVSAEVIAEYTVAALRRTVPPAVPGVVFLSGGQSEEEATQNLDAMNKLEVLKPWTLSFSFGRALQQSTLKKWVGKKENVAAAQATFVIRCKANSEAALGKYAGSGAGDAAASESLYVKGYKY

SEQ ID NO: 20193 - protein, 324 aa, Arabidopsis thaliana
MLTDEREVVCVTGASGCIGSWLVHQLLLRGYSVHATVKNLQDEKETKHLEGLEGAATRLHLFEMDLLQYDTVSAAINGCSGVFHLASPCIVDEVQDPQKQLLDPAVKGTINVLTAAKEASVKRVVVTSSISAITPSPNWPADKIKNEECWAAEDYCRQNGLWYPLSKTLAEKAAWEFAEEKGLDVVVVNPGTVMGPVIPPSLNASMHMLLRLLQGCTETYENFFMGSVHFKDVALAHILVYEDPYSKGRHLCVEAISHYGDFVAKVAELYPNYNVPKLPRETQPGLLRDKNASKKLIDLGLKFISMEEIIKEGVESLKSKGFIS

SEQ ID NO: 20194 - protein, 267 aa, Salmonella enterica subsp. enterica serovar Typhi Ty2
MAEPLTVSPELTANYAYFFDLDGTLAEIKPHPDQVVVPHKILQLLDRLAAHNAGALALISGRSMTELDALAKPFRFPLAGVHGAERRDISGKTHIVRLPEAVVREVEALLRSTLAALPGTELETKGMAFALHYRQAPEHEAALLALAQHVTQHWPQLALQPGKCVVEIKPKGTNKGEAIAAFMQEAPFTGRIPVFVGDDLTDEAGFGVVNHAGGISVKVGVGATQAAWRLESVPDVWRWLEQINYPQQEQQVMNNRRDGYESFSRSI

SEQ ID NO: 20195 - protein, 473 aa, Salmonella enterica subsp. enterica serovar Typhi Ty2
MSRLVVVSNRIAPPDNKGGAGGLAVGVLGALKAAGGLWFGWSGETGNEDEPLKKVTKGNITWASFNLSEQDYEDYYCQFSNAVLWPAFHYRLDLVQFQRPAWEGYMRVNALLADKLLPLIKENDIIWVHDYHLLPFASELRKRGVNNRIGFFLHIPFPTPEIFNALPPHDELLEQLCDFDLLGFQTENDRLAFLDSLSSQTRVTTRSGKQHIAWGKDFQTEVYPIGIEPDEIALQAAGPLPPKLAQLKAELKNVKNIFSVERLDYSKGLPERFLAYEALLENYPQHRGKIRYTQIAPTSRGEVQAYQDIRHQLETEAGRINGKYGQLGWTPLYYLNQHFDRKLLMKIFRYSDVGLVTPLRDGMNLVAKEFVAAQDPANPGVLVLSQFAGAANELTSALIVNPYDRDDVAAALNRALTMPLAERISRHAEMLDVIVKNDINRWQERFIHDLKEVTPRSPERQQQNNVATFPKLA

SEQ ID NO: 20196 - protein, 246 aa, Glycine max
QIRSPPQRRNDAQNDYFSVVSQGIGKLSFVAASAANVVQVGTKEFTSKVKEGGYDHKVNETVNVVTQKTSEIGQRTWGIMKGVMAMASQKIEEYTKDDPNWKNDNWQRNENDTNGYYQDFNREKKGWNSSTGREQSSSGEYKTESSSSWDDWDHKDSRKEEPAKGSTHSSGGQFSTYNSSSWDDWEHKDSRKEEPAKGSAPHNNDDWAGWDNAKDDGFDNIYEGANKKGVGHKGKSDGTWTEEGFL

SEQ ID NO: 20197 - protein, 451 aa, Oryza sativa
MASMPQLEEKDSSDLAINKGPSLDLVKSPLMMNDASATVTAMQPNEGMEEFPVKVRKPYTITKQREKWTEEEHDKFLEALKLYGRSWRQIQEHIGTKTAVQIRSHAQKFFSKVVREPGSNNAIEIPPPRPKRKPLHPYPRKCANSGSDANPATAQLKLAPGSSSSGSDQENGSPISVLSAMQSDAFGSSVSNPSTRCTSPASSDDGNNIPTFTSGEDNNVPCEPTVIDPSQSHKEIDQDRKDVNNMSEEDSSEEEVQETSLKLFGRTVVIPDPRKRSSSDPKHESEEQISQPSNEEMLQASSSVGEIPAAYCAPNGWFMSYNSFPFQFGESAADARIPPLHVWWPYYGFAPISHPRGLSTVMQQTEGSDESDGVKSHSSESSSDSGENVQMTAPQSSRIVESLGAIYVRDSGSSFELKPSANSAFVRVKPSNSGDEEVIRGFVPYKRCKFQ

SEQ ID NO: 20198 - protein, 170 aa, Schizosaccharomyces pombe
MQIAIIAAGCFWGVQEVYLRKFIPAAAILKTSVGYTGGITADPTYKEVCTNTTNHAEALKIEFDEKLTSYDKIIEFFFAMHDPTTSNQQGNDIGTQYRSAIFTTNPEQATIAKRVMNEVQAKHYPNKKIVTQILPAGKWWDAEDYHQLYLEKNPDGYRCSSHFLRWNVFE

SEQ ID NO: 20199 - protein, 413 aa, Arabidopsis thaliana
MSPDGELVPVDSSAVVTAKRKTSQLSRSWISIDATGQKTVLDVDKHVIMHRVQIHARDLRILDPNLFYPSAILGRERAIVLNLEHIKAIITAEEVLIRDSSDENVIPVLEEFQRRLPVGNEAHGVHGDGDLGEEDESPFEFRALEVALEAICSFLAARTTELEKFAYPALDELTLKISSRNLERVRKLKSAMTRLTARVQKVRDELEQLLDDDGDMADLYLTRKLVGASSSVSVSDEPIWYPTSPTIGSMISRASRVSLVTVRGDDETDVEELEMLLEAYFMQIDSTLNKLTELREYIDDTEDYINIQVTKNEKSEFLKCCENVISLTGYNHCLFAVRQSSKSADSVRANVKRRNRLCISVLYDRRNIRHEHSQHMEPRPWLHFQMGTSHISVSTRMEHLNLMISLVCVFCCC

SEQ ID NO: 20200 - protein, 218 aa, Bartonella henselae str. Houston-1
MKFFVDSANIEEIQELQNLNLVDGVTTNPSLILKSGRNILEVTKEICTLVVHGPVSAEVAATEFEDIMKEAAVLANIADNICIKLPLTFDGLKACKALTAQGLKTNLTLCFSANQALLAAKAGATFISPFVGRLDDYGINGSDLLHEIRTIYNNYSFETQILAASIRTINHVKEAALSGADVATIPPTILKALIKHPLTEKGLQSFLEDWKKTGQNIA

SEQ ID NO: 20201 - protein, 321 aa, Burkholderia pseudomallei K96243
MDTIVPFLSDSTARWLPLALSEQVSGKAPLAVMCMGQAIVLFRDAAGAVRAMEDRCAHRRAPLSLGRVTPEGRLQCGYHGWTYDGASGTCVAIPNLSPHERVPAHYAARAYETLERDGYVWARAARGVDTREPAAAAARATRCAQRFAGCATVSLAYDDYVAALADGPHLLMRIAGLRITDYVIADPEPRGGRLAMERGVTWAARRHDHRFGAHYPWTLRLTPPQDGAPASVEIDTRDGAPMLWASVAIAPAARGATNLLWRGGVAADTGGAGPALFRLWARLRRSPFAMLEHVDGHALAKLDASCSRAWPRAQHARVIPV

SEQ ID NO: 20202 - protein, 121 aa, Zea mays
  misc_feature (17)..(17): Xaa can be any naturally occurring amino acid
  unsure (1)..(121): unsure at all Xaa locations
QVLAATQMPEEPAGWFXGYSHKSIDNIVILSGDQLYRMNYMELVQKHVEDDADITISCAPVDESRASKNGLVKIDHTGRVLQFFEKPKGADLNSMRVETNFLSYAIDDAQKYPYLASMGIY

SEQ ID NO: 20203 - protein, 189 aa, Bradyrhizobium japonicum USDA 110
MMNRRTMLIAALAGAVAPVTRAVAGGGMSRISAYAFSFPALSGDDIRLAAFTGKPLLVVNTASLCGYTPQYAGLQELWSEFGERGLTVIGVPSNDFGGQEPGGTSEITETAHHQYGVTFPIAAKATVIGARAHPFYKWAADARPKDVPRWNFHKYLIGRDGYIAEVFASNIEPTDTRIKTAIAKTLADT

SEQ ID NO: 20204 - protein, 165 aa, Triticum aestivum
MALASFAVSPPIAAVLRRAMSFSSVSAASQARVGVVQMTSVGDLDANYATCSRLTKEAAAAGVKFLCFPEVFSFIGSKDGESVKLAEPLDGPIMQRYCSLANESSMWLSLGGFQERGPDDSHQYNTHVLIDESGKVRSSYRKIHLFDVDVPGNMVYKESRFTTAG

SEQ ID NO: 20205 - protein, 665 aa, Geobacter metallireducens GS-15
MCGITGFMDFSLQCGPDAMRANARRMADALMHRGPDDSGAWCDQGAGVGLAHRRLSILDLTPAGHQPMESRSGRFTIVFNGEIYNHQALRKELAAFEPWRGHSDTETLLAGFEAWGIEATLKRTVGMFALAVWDNAERTLTLARDRMGEKPLYYGWNQGVFLFASELKALRAYPGFDAEINRDAIALLMRHSCIPTPHSIYRGIYKLWPGTILTLRNTGRGIAPWDAADPPFKLFQGEGVSLRPYWSLLEAAEQGHARPFEGTESEAIGELERVLTEAVLAQQISDVPLGAFLSGGVDSTAIVALMQAHSSRPVKTFTIGFHEDDCNEAKYAGEIASRLGTDHTELYVSPGDSLAVIPRLPQLYDEPFSDPSHIPTFLVSLLAREHVTVSLSGDGGDELFGGYVRHTLLHRIWNNIGWCPLPMRKALSDKIRFLSPGQLQAVLRNLPFIDRVHAPVYKAYRLAELIRADSPASMYEICISHWQQDDPVVVGGQSPFHASSGRMPRQLDSFSLPEKIMLMDSVTYLPDDILVKIDRAAMGVSLETRVPFLDHRVVEFAWRLPLGLKIRGGQSKWILRQVLNRHIPKELVERPKHGFGIPLGTWLRGPLREWAEELLNESRLLREGFLDPRPVRQKWLEHVSGRRDWEFHLWDVLMFQSWLEQERRP

SEQ ID NO: 20206 - protein, 336 aa, Colwellia psychrerythraea 34H
MKPVICFGEALIDFLNTGSQEDGCLTLNNYRQYPGGAPANAAVAVSRLGGKAFFAGQVGDDAFGDFLINALHTYQVDTQFVSKHPHAKTALAFVLLDEMGERSFSFHRHQTADLLFEKSQVDEIWFCESPIFHFCSNTLTEKDIADCTEYAVERALVHGAIISFDVNLRHNLWATGKVSISVVNKLVKQAHVLKFSSEELTYLAQGNIESYIQSCFDANCQLLIITDGENVLTYYTAAILDAISPPKVITVDTTAGGDAFIGALLFALSHFEQLTELLDDNELLKQIINFSASCGALTVTKAGAFPALPNFEQAVAFVKELGLKQTQLLDIFSRSR

SEQ ID NO: 20207 - protein, 94 aa, Listeria innocua Clip11262
MLKPLGDRVVIEVLEAEEKTASGIVLPDSAKEKPQSGKIVAVGSGRVLDNGTKEPLEVAEGDTVIFAKYSGTEVTYEGTDYLILRESDILAISK

SEQ ID NO: 20208 - protein, 476 aa, Helicobacter pylori J99
MMKKTFFVSLALALSLNAGNIQIQNMPKVKERISVPSKEDTIYSYHDSIKDSIKAVVNISTEKKIKNNFIGGGVFNDPFFQQFFGDLGGMIPKERMERALGSGVIISKDGYIVTNNHVIDGADKIKVTIPGSNKEYSATLVGTDSESDLAVIRITKDNLPTIKFSDSNDILVGDLVFAIGNPFGVGESVTQGIVSALNKSGIGINSYENFIQTDASINPGNSGGALIDSRGGLVGINTAIISKTGGNHGIGFAIPSNMVKDIVTQLIKTGKIERGYLGVGLQDLSGDLQNSYDNKEGAVVISVEKDSPAKKAGILVWDLITEVNGKKVKNTNELRNLIGSMLPNQRVTLKVIRDKKERTFTLTLAERKNPNKKETISAQNGVQGQLNGLQVEDLTQKTKRSMRLSDDVQGVLVSQVNENSPAEQAGFRQGNIITKIEEVEVKSVADFNHALEKYKGKPKRFLVLDLNQGYRIILVK

SEQ ID NO: 20209 - protein, 475 aa, Helicobacter pylori J99
MEHQNTTQKQGELKRDMKMRHLLMIAFGGAIGTGLFVGTGGNIASAGPLGTLIAYCFGGLVVYCIMLSLGELASVYPTTGSFGDYAAKFIGPGTGYMVFWMYWLGWVITVALEYIAIGMLMQRWFVNIPIHYWVISCIALVFLLNFFSVKIFAEGEFFFSLIKVLAVIAFISIGVIGIIYQIYLHGFSSIFDNFHFGDKGFFPNGSEAVFSAMLAVIFAFTGTEVIGVAVGETKNASEVMPKAIKATLWRIVFFFLGSVFVISVFLPMSDSSIAQSPFVSVLERINLPFIGMGIPYVADIMNAVIITAMFSTANSGLYGASRMIYGLSKQKMFFKVFSQLNRQGTPTYAMFFSLSFSLIGLLVQIYAKENVVEALINVISFTVIIVWVSVSISQYSFRKQYLKAGHSLEDLPYKAPFLPFLQLIGITGCIIGVIGSAMDKDQRIGMILTIVFAVVCYIGYYFTQKANENNKKDLI

SEQ ID NO: 20210 - protein, 212 aa, Tradescantia virginiana
MSSSVSRFIKCVTVGDGAVGETCMLICYTSNKFPTDYVPTVFDNFSANVIVENTTVNLGLWDTAGQEDYNRLRPLSYRGADVFVLAFSLVSRASYENVLKKWIPELQHYAPGVPLVLVGTKLDLREDKQYLADHPGLMSVSTAQGEELRKQIGAAYYVECSSKTQQNVKAVFDAAIKVVIQPPKHKDKKKKRPRHGCSILNIFCGRKLVCFK

SEQ ID NO: 20211 - protein, 622 aa, Magnaporthe grisea 70-15
MGCIPLDLQTDASNRLYGKLPWWKDAVFYQVYPASFVDSNGDGWGDIPGLVTKLDYLANLGVDCVWLSPVFDSPQADMGYDVSDYQSIYAPYGTVADVDALLAGCHARGMKLILDLVVNHTSVEHSWFKEGRSSRASSKRDWYIWRPARYDPITGGRLPPTNWRGYFAGSTWTWDEQTQEYYLHLYAPEQPDLNWDNEDCRMAIYKDTMNFWLDRGVDGFRIDTVNKYSKRDYVDVPVTDPSSYTQPAPDMWCNGPCIHEYIREMAAETLHRYPGAVSVGELSNMTKGPSQVLEYVSASRSELDMVFEFSAIRLGTGDGFGAKYIYTPFPLSHLKRITETWQAFIEGTDGWTTAFVENHDNGRAVSRFGDDRSPEAWRASARCIALWQATLTGTLFLYQGQEIGMTNMPENWDIDEYKDVESQGFYKEAVGSGDVDSIKKTMHGLRILARDHSRLPMRWDGGAPNAGFGQSTDGCKPWMRVVQDAECRGGGAEVSVAAQTGRKESVLEFYRLVLALRKKHRELMVHGSFRLLDPEDEYIFAYVKEASQGVNAKENDRTVKKCVVVLNFSGEAQECVDVAAAMGCGLTDVRLLVDTIVGEPEDGRVISIPALGAWEGRVYVNF

SEQ ID NO: 20212 - protein, 361 aa, Triticum aestivum
  misc_feature (240)..(240): Xaa can be any naturally occurring amino acid
  misc_feature (259)..(259): Xaa can be any naturally occurring amino acid
  unsure (1)..(361): unsure at all Xaa locations
LLGSPGLQEFARDHYLEILIGGHIRSNPVPHPISPGNLRSKRSQGSLVLLLKMQIFVKTLTGKTITLEVESSDTIDNVKAKIQDKEGIPPDQQRLIFAGKQLEDGRTLADYNIQKESTLHLVLRLRGGMQIFVKTLTGKTITLEVESSDTIDNVKAKIQDKEGIPPDQQRLIFAGKQLEDGRTLADYNIQKESTLHLVLRLRGGMQIFVKTLTGKTITLEVESSDTIDNVKAKIQDKEGXIPPDQQRLIFAGKQLEDGXRTLADYNIQKESTLHLVLRLRGGMQIFVKTLTGKTITLEVESSDTIDNVKAKIQDKGGHSPRTQQRLHLLLGKQLEDGRTLADYNIQKESTLHLVLRLRGGQ

SEQ ID NO: 20213 - protein, 466 aa, Arabidopsis thaliana
MKNLVIFAFLFLSITTVINGGITSKFVRQALPSIEMSLDTFPSPGGYNTPEQVHLTQGDHDGRGMIVSWVTPLNLAGSNVVTYWIATNGSDVKPAKKRAHASTKSYRFYDYSSGFLHHATIKGLEYDTKYIYEVGTDKSVRQFSFTTPPKIGPDVPYTFGIIGDLGQTYASNEASYHYMSNPKGQAVLFAGDLSYADDHPNHDQRKWDTWGRFMEPCAAYQPFIFAAGNHEIDFVPNIGEPHAFKPYTHRYPNAYKASQSTSPLWYSVRRASAHIIVLSSYSAYGKYTPQYIWLEQELKNVNREETPWLIVIVHSPWYNSNNYHYMEGESMRVMFESWLVNSKVDLVLSGHVHAYEGSERISNIKYNITNGLSSPVKDPNAPIYITIGDGGNIEGIANSFVDPQPSYSAYREASFGHAVLEIMNRTHAQYTWHRNQDNEPVTADSIMLHNRHFFPVEEIVSSNIRA

SEQ ID NO: 20214 - protein, 1146 aa, Burkholderia fungorum LB400
MESPNGYAPRIYFFHSLLVGPLDAWPAQFAHAAGLGFDHALIGSLFEPGQAGHGQVVGNHARLHPVFEAQQPATEAIRTLANAAAQNGLTLLADLVIDRMAADGALYAEHADWFHPFESEEARLDPRHVHREDNVAYANFNDPGSSAALAGWWTQQLLTLADAGVGGFRFDSPHRVPGAVWRQLRDAVRAKHPEVRFLAATPGLAREDLRGLEGAGFDSVFSSVRWWDFRSSWMVEEHAALARIGAPIAFPEAPYGTRLAAELSDAHDAAIVERAYRRALFASVAIGTGWMMPMGFEYGITEPMSQTRGDASQFALAAQAKQFDLSERITHVNQVVRNTKTLHANGELRPLSGPGAPAAILLRADQPDLRDAREAVLIAINPELGAPLRVDPARFLAGVPGNFTRFVPLDAPANASPATLTPFTLAPGAVRLLRAVAEKPIRLAPPIDKANSKRSGRKTVLEAINAPRVAIESVTPSVDNGRFAAKRTVGEHAEITAAIFAEGHDKIAAAVIWRAADETAWHEVPMTPAEPAGLDIWKARIPLERLGRHEFTVIAWRDDFASLVEHIQKKLKAGQTVELELDEAAHLFALVLAEVETSEGAVTAPLEHIVKEFTKADAETKLALLLAPTTARAMTAARHRPFLSRDPVIYKIDADRTAARFASWYEIFPRSMSDDESRHGTFADVTKKLPRIRDMGFDVLYFPPIHPIGVANRKGRNNTLNAQPGDVGSPYAIGGVEGGHTAVHPQLGTLDDFKAMLAAAHEHGLEIALDFAVQCSPDHPWLKEHPTWFAWRPDGTLRYAENPPKKYQDIVNPDFYAHDAKPDLWLALRDVFLFWIEAGVHIFRIDNPHTKPLPFWEWVIGDIRARYPDTIFLAEAFTRPRMMNRLGKIGFSQSYTYFTWRESKRDFIEYMTELTQTGARDSYRPNFFVNTPDINPRHLQSQGRTGFLIRAALASTLAGLWGVYSGFELCEAAALPNSEEYLDSEKYQLRAWDWNRPGNIVGEISALNRIRRANPALQTHLGLTFLPAHNDNVLFFEKATESRDNVIVVAINLDPFNEQGADIELSWETFQKWNLPDHGPLEVTDQMTGARFEWHGRWQHVQLGSGQPFSIWRIAPLGGLPAERPDEADSDYHADAGNPTPTEGAT

SEQ ID NO: 20215 - protein, 1154 aa, Burkholderia fungorum LB400
MKRDDPAQTTSQAHSSAATGGVAKARTHRRGKPAALSDDPLWYKDAIIYQVHIKSFFDANNDGVGDFPGLIAKLDYIAELGVNAIWLLPFYPSPRRDDGYDIADYRNVHPDYGNLSDVKRFIQEAHARGIRVITELVINHTSDQHPWFQRARRAKPGSNHRNYYVWSNTDQKYLETRIIFIDSEPSNWTHDPVAGAYYWHRFYSHQPDLNFDNPAVLREVLQVMRFWLDMGIDGLRLDAVPYLVEREGTNNENLPETHAVLKKIRATIDAEYPNRMLLAEANQWPEDVKEYFGDEDECHMAFHFPLMPRIYMSIASEDRFPITDIMRQTPDLAETNQWAIFLRNHDELTLEMVTDSERDYLWNTYASDRRARLNLGIRRRLAPLMERDRRRIELINSLLLSMPGTPVIYYGDELGMGDNIHLGDRDGVRTPMQWSSDRNGGFSRADPEQLVLPPVMGSLYGFDAVNVEAQSRDPHSLLNWTRRMLATRRAKQTFGRGTIRFLKPENRKILAYLREMPGEPPILCVANLSRAPQAVELDLSEFDGSVPIEMTADSVFPPIGQLTYLLTFPPYGFLWFMLCPGGQRPTWAQAPSEPLPEFVTIVIREGQVGPTPENVRLLESEVLPSWLSRRRWFASKDQKLNAVRLAALTTIPNGGFAFTEIEADVGKHTERYVVPIAITWGGETTFPLFKQLALARVRRGRNVGHLTDAFALPIFAHGVMRKLRERAVVPTVQKSEIRFLPTERFAELEGLGERPEIRWLAAEQSNSSLIIADAAVLKLVRRLVSGIHPEAEISRYLTQLGYANTAPLYGEVVRVDPEGVPHTLCILQGYIDNQGDAWNWSLDYLRRSVDELAIAVDTETQSVPDRSNEAILVEGYSTLAGIIGRRLGELHVALASPTDDPAFAPEPASAEQVKAWVDGTQAMLASALDLLAPRIEQMSDTETRALAQSLIDRRAALVAAVDSLVSANAGALRIRIHGDFHLGQVLVAQGDAYLIDFEGEPARTLEQRRQKSSPLRDVAGLLRSLSYASAAAQSTTEAAPQQTADRKRALFDRFRAHAAEKFLNEYRAAAAEAATPLVAPEAEQALLDLFLIEKAAYEIRYEAANRPTWLSLPVRGLAALTSRLLGDTGAPGHDSSNQAPGAATPPNPAEGDYE

SEQ ID NO: 20216 - protein, 476 aa, Gonyaulax polyedra
QSTPHAPMSAHSWAADVLSGGPPRAPSTAGAGCEVPRESCCESSDSKGCPCLEASVAFRRAWQAAQARPADAAAAPQAAAVAERVERCGSSEASYGLGRCPSTANLQGLCLPRPVGPSLARESDTVAHSELLCDSLLQAHEPAEVEHQDAAAAGPAKSTRPNSRAPLGEITNTRVATAAGDEPKHAKPCPPTPPDHDPQLVKEYTSDVMRSMLQREEHFMPRPNYMQDQPQINAKMRSILNDWLFEVHRLYGLRRETLFLTVSITDRYLSHVPVSRQRLQLVGVSALLIAAKFEEIEPPELADLVYVTADSYTKQEIVDTEMAMLSVLSFEVAAPTAANFMRHFQAHGRILAALHFESQHPELAHAGGLPPPAVGACDEARGDLAWYLLELALLDIRAVRHAPSHLAAAALLLANRLSGQRPAWPASLARLSGYVEKELEACACELGQLLEAARRAFLQAMRSKYRHTEMLYRHPA

SEQ ID NO: 20217 - protein, 422 aa, Saccharophagus degradans 2-40
MTVQDYMLTLGKQARAASRQMASADTGKKNAALLAIADAINSARDTIAAENARDMEAGRANGLDAALLDRLELTPERIDGMIEGLNQVAALPDPCGEITDLKYRPSGIQLGKKRTPLGVVGIIYESRPNVTVDAASLCLKSGNAAILRGGSEAIHSNKAVAVCIAAGLKAAGLPETAVQVVETTDRAAVGELITMTKYVDVVVPRGGKSLIERISADARVSVIKHLDGICHVYVDKTANLDKAFNIVINSKTHRYGVCNAMETMLVDEAIAADFLPRAAKEFAARGVELRGCEKTVALLTASDIPVVAALEEDWDTEYLAPILSIKLVANMDEAIEHINNHGSHHTDALVSENYTLARKFLTEVDSSSVMINASTRFADGFEYGLGAEIGISTDKIHARGPVGLEGLTSQKWIVFGDGHIRN

SEQ ID NO: 20218 - protein, 123 aa, Triosteum himalayanum
VMSAKPVIKEALQAEVGLPVDRDIPVIGFIGRLEEQKGSDILVEAISQFIGDKVQIIVLGTGKKVMEKQLEQLEVDYPDKARGVAKFNVPLAHMIIAGADFILVPSRFEPCGLIQLHGMRYGT

SEQ ID NO: 20219 - protein, 163 aa, Zea mays
  misc_feature (3)..(3): Xaa can be any naturally occurring amino acid
  misc_feature (5)..(5): Xaa can be any naturally occurring amino acid
  misc_feature (12)..(12): Xaa can be any naturally occurring amino acid
  misc_feature (20)..(22): Xaa can be any naturally occurring amino acid
  misc_feature (28)..(28): Xaa can be any naturally occurring amino acid
  misc_feature (32)..(32): Xaa can be any naturally occurring amino acid
  misc_feature (34)..(34): Xaa can be any naturally occurring amino acid
  misc_feature (36)..(38): Xaa can be any naturally occurring amino acid
  misc_feature (47)..(47): Xaa can be any naturally occurring amino acid
  misc_feature (50)..(50): Xaa can be any naturally occurring amino acid
  misc_feature (55)..(55): Xaa can be any naturally occurring amino acid
  misc_feature (59)..(60): Xaa can be any naturally occurring amino acid
  misc_feature (66)..(66): Xaa can be any naturally occurring amino acid
  misc_feature (71)..(71): Xaa can be any naturally occurring amino acid
  misc_feature (73)..(73): Xaa can be any naturally occurring amino acid
  misc_feature (77)..(77): Xaa can be any naturally occurring amino acid
  misc_feature (79)..(80): Xaa can be any naturally occurring amino acid
  misc_feature (82)..(82): Xaa can be any naturally occurring amino acid
  misc_feature (85)..(85): Xaa can be any naturally occurring amino acid
  misc_feature (91)..(91): Xaa can be any naturally occurring amino acid
  misc_feature (95)..(97): Xaa can be any naturally occurring amino acid
  misc_feature (99)..(100): Xaa can be any naturally occurring amino acid
  misc_feature (102)..(103): Xaa can be any naturally occurring amino acid
  misc_feature (108)..(108): Xaa can be any naturally occurring amino acid
  misc_feature (118)..(118): Xaa can be any naturally occurring amino acid
  misc_feature (120)..(120): Xaa can be any naturally occurring amino acid
  misc_feature (122)..(123): Xaa can be any naturally occurring amino acid
  misc_feature (136)..(136): Xaa can be any naturally occurring amino acid
  misc_feature (139)..(140): Xaa can be any naturally occurring amino acid
  misc_feature (162)..(162): Xaa can be any naturally occurring amino acid
  unsure (1)..(163): unsure at all Xaa locations
KGXPXSSHDTTXTTTNAGAXXXNDNEAXTGGXRXPXXXEDYGGSEKXAHXARERXPERXXHARGAXAKGFXEXTHDXTXXTXADXRRAPGXRTPXXXRXXTXXHERGXPETNRDPRGXAXKXXTREGNGDRRGNNXPGXXNRDGNKDPDGNHADKPNPRAHXQ

SEQ ID NO: 20220 - protein, 218 aa, Medicago sativa
MDHDAIIFEEECDYLFKAVLIGDSGVGKSNLLSRFAKDEFRLDSKPTIGVEFAYRNIKVRDKLIKAQIWDTAGQERFRAITSSYYRGALGALLVYDITRRSSYESVGRWLVELREFGGEEMVVILVGNKCDLGESREVEEEEAKGFAEAEGLCFMETSALKNLNVEQVFLQMITTIFDITNQRSLDAKMDETPINLSNGKEIHIADEVTATKQAPCCS

SEQ ID NO: 20221 - protein, 139 aa, Methylococcus capsulatus str. Bath
MAYSDKVIDHYENPRNVGSFDKDEDGVGTGVVGAPACGDVMKLQIKINEEGVIEDAKFKTYGCGSAIASSSLVTEWVKGKTVDEALAIKNSDIAEALALPPVKIHCSVLAEDAIKAAVSDYKAKLGVADDGYEIRKSAA

SEQ ID NO: 20222 - protein, 169 aa, Streptococcus agalactiae NEM316
MERAIFAGGCFWCMVQPFEELDGIESVLSGYTGGHVENPTYKEVCSKTTGHTEAVEIIFNPEKISYANLVELYWAQTDPTDAFGQFEDRGDNYRPVIFYENEEQRQIAQKSKDKLQASGRFDRPIVTSIEPADTFYPAEDYHQAFYRTNPARYALSSARRHAFLEENWH

SEQ ID NO: 20223 - protein, 166 aa, Clusia uvitana
GNPCNTNALICLKNAPNIPAKNFHALTRLDENRAKCQLALKAGVFYDKVSNMTIWGNHSTTQVPDFLNARINGLPVKEVIKDHKWLEEEFTEKVQKRGGVLIQKWGRSSAASTAVSIADAMKSLVNPTPEGDWFSSGVYTNGNPYGIEEDIVFSMPCRSKGDGDYE

SEQ ID NO: 20224 - protein, 326 aa, Methanosarcina acetivorans C2A
MQNRKVQNRKVQNRKVQNRNKAVKPVNDMKALTFGEALFDIIKGTVHLGGAPLNLAAHLAKLGAKPAVLTAVGKDELGKTLLSRAEEMGVDTSYILLDEKRPTGTVTVELQAEGIPIFTINEGVAWDAITPDEREFEALAAEEWDVFCFGTLAQRSEENRKTLKRLLSEIKAKHFFYDVNLRAGFYRKEWILSSLERCTILKMNEEEAAKISGMLFGTTYACRTLCRLLTDRYPKISVICITKGPEGAAVYQDGVYEEIKTTPVEVADTVGAGDAFSAGFLYTFLSGYGVSKAVSVAIMLGTYVASKPGSVPEYSEELRKELGILE

SEQ ID NO: 20225 - protein, 341 aa, Colwellia psychrerythraea 34H
MKSLAKLKAEPGIWLTRTEKPKLGHNDLLIKIKKTAICGTDIHIYNWDEWAQKTVPTPMVVGHEYAGEVVGIGQEVKGFTLGDRVSGEGHITCGHCRNCRGGRTHLCRNTVGVGVNRAGSFAEYLVIPAYNAFKLPDEISDDLASIFDPFGNAVHTALSFDLVGEDVLITGAGPIGIMAAAVAKHVGARHVVITDINEYRLDLARKMGATRAVDVSKESLKDVMTDLGMTEGFDVGMEMSGVPMAFTSMLESMNNGGKIAMLGIPGSDMAIDWSQVIFKGLTIKGIYGREMFETWYKMASLIQSGLDLTPIITHHYNIDDFQQGFDMMRSGQSGKVILDWT

SEQ ID NO: 20226 - protein, 221 aa, ASPERGILLUS NIDULANS FGSC A4
MPDPSDRKAVTRYLEQTHDKIFESNRAWVASKKGADPEFFNKLAAGQSPEYLRVPANEIMGLDAGEVFVHRNIANVVPTIDLSSMSVINYAVGHLKVKHIVVCGHYNCGGVQAALTPTDLGILNPWLRNIRDVYRLHEKELDAIEDDGERFNRLVELNVIESCRSVIKTAVVQQSYEENGFPIVHGWVFNLKDGLLKDLNIDFPGILADIQKIYNLTKGSS

SEQ ID NO: 20227 - protein, 221 aa, Saccharophagus degradans 2-40
MIKGIIFDHDGTLVKSEHEHYKIWRSIVQEYGHDLSEEVYIASYSGVPTVQNAELLINSFGLPLTVEALCERKKQDMAAFLATGSFETMPYAKEILARCQALGLKQAIASGAKRAEIDHSRAAHNYDAYCEAFVTYEDVAQSKPAPDAYILAARLLGLEINECIAVEDSFSGVTSAKAANMYCIAIPNAYSAKQDLSAADIQLPSLEAACEHIETLVTKSA

SEQ ID NO: 20228 - protein, 393 aa, Geobacillus kaustophilus HTA426
MISSSSFRYHVGIAGAGAFAEFLAGALAPLPSFHLAAVAGRTDEKRQRVIDAYRRRQAQAGDVREYREAEELIVDPHVDIVILTTPPHLHAPLAKRALEEGKHVLLEKPGGLTAEALRANIQLAARQNRALAVNLVLRYHPLAEAVKQLIHRAFLGPVDYASLHNAAHRVAEGHWFWDERRSGGILIEHGVHFFEVGRDWFGEAASARGFALREPDGTRPRVGATVIHESNGWRIPVHYYHGFTMDPAASESTHWDIHTARGRIVLEGWIPTQLSVSGLVSTDEAAHMDALLDAIPKQPSSRAIEQVRQAANRLLPSVPRSDAPRIPYERTVVLSDRHGWYEAIAQTRFLDFCRLIENPSWRVLVTAEDAAADLALAEACTVADEETDPLGIR

SEQ ID NO: 20229 - protein, 236 aa, Zea mays
HASGVELANGCVCCSVKHSLVQALEQLVQRKDRMDHILLETTGLADPAPLVSVLWLDDQLESSIVLDSIITVIDAKNFRVQIDEHKNSSSFPEAFHQIAFADVVILNKIDLVEDSLEDLEKHIRDVNALVTVVRSVRCQVDLNEVFNRQAYGAKVESWLEDLLWEKKSIMDIYRCKGILYIHDSDQVHTLQAVREVYEVVPARKWSETESRMNKIVVIGRNLDINVLQDSFSGCKS

SEQ ID NO: 20230 - protein, 123 aa, Triosteum perfoliatum
VMSAKPVIKEALQAEVGLPVDRDIPVIGFIGRLEEQKGSDILVEAISQFIGDKVQIIILGTGKKVMEKQLEQLEVDYPDKARGVAKFNVPLAHMIIAGADFILVPSRFEPCGLIQLHGMRYGT

SEQ ID NO: 20231 - protein, 347 aa, Geobacillus kaustophilus HTA426
MKALLLAGGLGTRLRPLTENIPKPMAPIANRPWLEHLIVHLRDQGVNEFVIAAHHCSEVIRRYFEDGKRWNVKITYALEPFPLGTAGAIKNAERWLKERFLVFNADIVHLPQLIPLLDFHRQHGGLATIVLTEVDDPSSYGVVEQDDRGQILRFVEKPRREEAPSNRINAGMYIFEPDVMRYIPAEREVSIERETFPLLIEKNVGVYGIVSTGYWRDMGTPARYRQVHWDALSREFPIPLKGREIQPGVFVGENVEIGSGVLFVPPVLIGDHVKIGPQAVIGPNAVIGDRCQIGARVHCAQTIVWDRSVIRDRSRLQNSIFGYRTVTPAGEVFEDSIINQFKEAVQA

SEQ ID NO: 20232 - protein, 123 aa, Triosteum angustifolium
VMSAKPVIKEALQAEVGLPVDRDIPVIGFIGRLEEQKGSDILVEAISQFIGDKIQIIILGTGKKVMEKQLEQLEVDYPDKARGVAKFNVPLAHMIIAGADFILVPSRFEPCGLIQLHGMRYGT

SEQ ID NO: 20233 - protein, 123 aa, Triosteum sinuatum
VISAKPVIKEALQAEVGLPVDRDIPVIGFIGRLEEQKGSDILVEAISQFIGDKVQIIVLGTGKKVMEKQIEQLEVDYPDKARGVAKFNVPLAHMIIAGADFILVPSRFEPCGLIQLHGMRYGT

SEQ ID NO: 20234 - protein, 1081 aa, Saccharomyces cerevisiae
MYFDKDNSMSPRPLLPSDEQKLNINLLTKKEKFSHLDPHYDAKATPQRSTSNRNVGDLLLEKRTAKPMIQKALTNTDNFIEMYHNQQRKNLDDDTIKEVMINDENGKTVASTNDGRYDNDYDNNDINDQKTLDNIAGSPHMEKNRNKVKIEHDSSSQKPIAKESSKAQKNIIKKGIKDFKFGSVIGDGAYSTVMLATSIDTKKRYAAKVLNKEYLIRQKKVKYVSIEKTALQKLNNSPSVVRLFSTFQDESSLYFLLEYAPNGDFLSLMKKYGSLDETCARYYAAQIIDAIDYLHSNGIIHRDIKPENILLDGEMKIKLTDFGTAKLLNPTNNSVSKPEYDLSTRSKSFVGTAEYVSPELLNDSFTDYRCDIWAFGCILFQMIAGKPPFKATNEYLTFQKVMKVQYAFTPGFPLIIRDLVKKILVKNLDRRLTISQIKEHHFFKDLNFKDGSVWSKTPPEIKPYKINAKSMQAMPSGSDRKLVKKSVNTLGKSHLVTQRSASSPSVEETTHSTLYNNNTHASTESEISIKKRPTDERTAQILENARKGINNRKNQPGKRTPSGAASAALAASAALTKKTMQSYPTSSSKSSRSSSPATTSRPGTYKRTSSTESKPFAKSPPLSASVLSSKVPMPPYTPPMSPPMTPYDTYQMTPPYTTKQQDYSDTAIAAPKPCISKQNVKNSTDSPLMNKQDIQWSFYLKNINEHVLRTEKLDFVTTNYDILEKKMLKLNGSLLDPQLFGKPRHTFLSQVARSGGEVTGFRNDPTMTAYSKTEDTYYSKNIIDLQLLEDDYRIEGGDLSELLTNRSGEGYKCNQNSSPMKDDDKSESNNKGSSVFSGKIKKLFHPTSAAETLSSSDEKTKYYKRTIVMTSFGRFLVFAKRRQPNPVTNLKYELEYDINLRQQGTKIKELIIPLEMGTNHIVVIQTPYKSFLLSTDKKTTSKLFTVLKKILNSNTNKIEKELLQRNQKVIERRTSSSGRAIPKDLPTSKSPSPKPRTHSQSPSISKHNSFSESINSAKSNRSSRIFETFINAKEQNSKKHAAPVPLTSKLVNGLPKRQVTVGLGLNTGTNFKNSSAKSKRS

SEQ ID NO: 20235 - protein, 273 aa, Brassica napus
MVLSQTTTESNEPVSSTFGSRYALTALPKYEIGESSIPKDAAYQIIKDELMLDGNPRLNLASFVTTWMEPECDKLIMDSINKNYVDMDEYPVTTELQNRCVNMIARLFNAPLGDTETAMGVGTVGSSEAIMLAGLAFKRNWQNKRKAEGKTYDKPNIVTGANVQVCWEKFARYFEVELKEIKLSEGYYVMDPEKAVEMVDENTICVAAILGSTLTGEFEDVKRLNHLLVKKNDATGWNTPIHVDAASGGFIAPFIYPELEWDFRLSLVKSINV

SEQ ID NO: 20236 - protein, 381 aa, Zea mays
MQIFVKTLTGKTITLEVESSDTIDNVKAKIQDKEGIPPDQQRLIFAGKQLEDGRTLADYNIQKESTLHLVLRLRGGMQIFVKTLTGKTITLEVESSDTIDNVKAKIQDKEGIPPDQQRLIFAGKQLEDGRTLADYNIQKESTLHLVLRLRGGMQIFVKTLTGKTITLEVESSDTIDNVKAKIQDKEGIPPDQQRLIFAGKQLEDGRTLADYNIQKESTLHLVLRLRGGMQIFVKTLTGKTITLEVESSDTIDNVKAKIQDKEGIPPDQQRLIFAGKQLEDGRTLADYNIQKESTLHLVLRLRGGMQIFVKTLTGKTITLEVESSDTIDNVKAKIQDKEGIPPDQQRLIFAGKQLEDGRTLADYNIQKESTLHLVLRLRGGY

SEQ ID NO: 20237 - protein, 414 aa, Pseudomonas fluorescens Pf-5
MSRRRVVVTGMGMLSPLGTDVPSSWQGILAGQSGIGLIEHTDLSAYSTRFGGSVKGFNVEEYLSVKEARKLDLFIQYGLAAGFQAVRNAGLEVTDANRERIGVAMGSGIGGLTNIEETSRILHDSGPRRISPFFVPGSIINMISGFLSIHLGAQGPNYAISTACTTGTHCIGMAARNIAYGEADVMIAGGAEMAACGLGMGGFGASRALSTRNDEPTRASRPWDKGRDGFVLSDGAGALVLEELEHAKARGATIYAELIGFGMSGDAYHMTSPPADGAGAARCIANALRDAKLNVDQVQYINAHGTSTPAGDLAEAEAIKSVFGDHAYKLAVSSTKSMTGHLLGAAGAIEAIFSVLAINSQAAPPTINLDEPDEGCDLDFVPHTARSMDIDVVLSNSFGFGGTNGSLVFRRFSE

SEQ ID NO: 20238 - protein, 324 aa, Ehrlichia ruminantium str. Gardel
MVKAVVIDKTGGVEVLKYVDCNVNEPKDDEVLIKHTAIGLNRYDLECCNGTRKIKKFPAVLGSEAVGIIEKLGKNVEVFNIGDRVGYCTVSGGAYSEKRVINQKYLVKIPDDITDQIAAAVLFKGMTAHYLTHVVYSTRPKSFALVHGATGGVGQILCQWASYKGSKVIGVTSSDDRANIALRSGCSYIINSNSESFVKQVMEITNGAGVNVVYDPIGALVGKVSFESLGLFGIYISYGQISGPLVNISASMMSSRSLFFTAPLIFHYKRSSFDLSMTAMELFEVMRKGHIKVNINKTYRFDDIITAHQDLEKRNLTGSNVILL

SEQ ID NO: 20239 - protein, 214 aa, Glycine max
MADETQNKYESSEVEVQDRGVFDFLGKKKDEEDKPHPQEEVIATEFQKVTVSDQGENKHSLLEKLHRSDSSSSSSSEEEGEDGEKRKKKKKEKKGLKEKIEEKIEGDHHHHKDEDTSVPVEKVEVVETAHAEEKKGLLDKIKEKLPGHKKTEEATATTPPPPPPVASLEHGEGAHHEGEAKEKKGILEKIKEKLPGYHSKTEEEKEKEKESGAH

SEQ ID NO: 20240 - protein, 250 aa, Zea mays
  misc_feature (186)..(186): Xaa can be any naturally occurring amino acid
  misc_feature (196)..(196): Xaa can be any naturally occurring amino acid
  unsure (1)..(250): unsure at all Xaa locations
MASRPVTRALRQSARQLAAAPAQKRTFVSALSAGAKKAAPRAAVTSQFQQTRGVKTIDFAGTKETVYERADWPKEKLLEYFKNDTLALIGYGSQGHGQGLNMRDNGLNVIVGVRKNGTSWKEAEQDGWVPGKNLFDIDEAIGKATIVMNLLSDAAQSETWPAIKPRLTKGKTLYFSHGFSPVFKDXLTKVEVPKDXTSSLVAPKGSGRTVRTLFREGRGINSSIAVYQDVTGKAKEKAVALRVAVGSGYM

SEQ ID NO: 20241 - protein, 234 aa, Brassica napus
  misc_feature (104)..(104): Xaa can be any naturally occurring amino acid
  unsure (1)..(234): unsure at all Xaa locations
MLGIFSGAIVSLPEELVAAGSRTPSPKTTGAALVNKFVEKNPSAVTVQVGDYVQLAYTHHKESPLRPRSFGAKDEIFCLFQGSLDNLGSLKQQYGLAKNANEVXLVIEAYKTLRDRAPYPANHVVAHLSGDFAFVVFDKSTSTLFVASDQVGKVPLYWGITADGYVAFADDLDLLKGACGKSLASFPQGCFYSTALGGLRSFENPKNKITAIPAKEEEIWGATFKVEGATVLAD

SEQ ID NO: 20242 - protein, 349 aa, Solanum tuberosum
MGVQEKYPLLQLSLPPGFRFYPTDEELLVQYLCKKVAGHDFPLQIIGEIDLYKFDPWVLPSKATFGEKEWYFFSPRDRKYPNGSRPNRVAGSGYWKATGTDKIITSQGRKVGIKKALVFYVGKAPKGSKTNWIMHEYRLFESSKKNNGSSKLDEWVLCRIYKKNSSGPKPLMSGLHSSNEYSHGSSTSSSSQFDDMLESLPEMDDRFSNLPRLNSLKTEKLNLERLDSANFDWAILAGLKPMPELRPANQAPGVQGQGQAQGNVNNHNNNNMNFLNDVYAHPTTNFRGNTKVESINLDEEVESGNRNRRIDQSSYFQQSLNGFSQAYTNSVDQFGIQCPNQTLNLGFRQ

SEQ ID NO: 20243 - protein, 394 aa, Arabidopsis thaliana
  misc_feature (317)..(317): Xaa can be any naturally occurring amino acid
  unsure (1)..(394): unsure at all Xaa locations
MAIMSDLPRDLLAEILSRVPLASLRSVRFTCKKWNDLSKDRSFLKKQIVEAKKKQLKSKEFEVIMMRNFRVYLTSVDLHNDVNPSFTPKGTLTSFSDDANQHQVDNVSSVFHCDGLLLCITKDLNFRLVVWNPYFGQTRWIQPRNSYHIKDIYAIGYDENKNHKILRLKDQYYDYDSHPRARICEFELYSFESNSWKVVLDVSPDWYIHSYHRGLSVKGNTYWYATEKHGYVNFLICFDFTTEKFGPRLPLPFNATESFTYDDVVTLSSVGEEQLALLFQSDATLMMEIWVTSKVDPTEVLWNKLFLAVDHDMIEFXYELKFVADAGSFFIDQKKNVVVVFDKDMNEHTHRGMAYIVGKNGYFKRVDIGEEAYTSCFPLVCSYVPSSVQIRQLT

SEQ ID NO: 20244 - protein, 273 aa, Solanum tuberosum
MPIEALKSPTAALPPLEEIDDSHNLDSWAKGKRSKRPRIDNPPTRDQYLALCLLMLANDDGTGFGKGKGKGTGSIDVVIEQQQEKKLKPVFIKEKTEQLFKCSECPKVFTSYQALGGHKASHRKINVTATGDDDNNPSTSTSTSGGVNISALNPSGRSHVCSICQKAFPTGQALGGHKRRHYEGKLGGNNRYISGGGCGEGVHSGSVVTTSDGGSGNGGAASTPIARDFDLNMPALPGWQLDLTIDCGGRSQFPIEQEVESPMPAKKPRLFFD

SEQ ID NO: 20245 - protein, 341 aa, Clostridium perfringens
MNELGFRSKKVLGFGEIMLRLTPPNNQKIIQANSFEAVYSGGEANVIASLAILGHDTKFVTKLPDNYLGKKVISKFRGYNVDVNDIVIGEGRLGVYYSEIGHGLRSTEVIYDRKYSAISMASKDEFNIDNMLKGVGLVHLSGITPALSKDLKMLIIEIAKECKKKGILVSYDSNYRSKLWSIDEAKEVLEEILNYVDFAFLGSLDMINILKFEDNSLDFDEKLQYHYEMLFKKYPNLRYAACTKRIVNSINNNTLKGYLFNGKELLKSNSYTFDILDRVGGGDAFTAGILHGILNEMPNERVVEFGTCASSLKHSIIGDINIIDEDTINSVIDNGLCNVKR

SEQ ID NO: 20246 - protein, 186 aa, Arabidopsis thaliana
MDPSPIAQGNDDDTPAPGNQFAQFGAGCFWGVELAFQRVPGVTQTEAGYTQGTVDNPSYGDVCSGTTGHSEVVRVQYDLNDCTYESLLDLFWSRHDPTTLNRQGNDVGTQYRSGIYFYTPEQEKLARESLERHQQQMERKIMTEILPAKKFYRAEEHHQQYLSKGGRFGQGQSTAKGCNDPIRCYG

SEQ ID NO: 20247 - protein, 344 aa, Bradyrhizobium japonicum USDA 110
MTKYKLEYIWLDGYTPTPNLRGKTQIKEFASFPTLEQLPLWGFDGSSTQQAEGHSSDCVLKPVAVFPDAARTNGVLVMCEVMMPDGKTPHASNKRATILDDAGAWFGFEQEYFFYKDGRPLGFPTSGYPAPQGPYYTGVGFSNVGDVARKIVEEHLDLCLAAGINHEGINAEVAKGQWEFQIFGKGSKKAADEMWMARYLMLRLTEKYGIDIEFHCKPLGDTDWNGSGMHANFSTEYMRTVGGKEYFEALMAAFDKNLMDHIAVYGPDNDKRLTGKHETAPWNKFSYGVADRGASIRVPHSFVNNGYKGYLEDRRPNSQGDPYQIASQILKTISSVPTEKKAVA

SEQ ID NO: 20248 - protein, 150 aa, Triticum aestivum
STHASALLKDEFPDVRLNIISKLDQVNQVIGIDLLSQSLLPAIVELAEDSQQRDVLNDCKTNPPVPILDLWVVEARLLPNMDMFSEHIRRCFASCGTASSCAPRQPPPNSRGVREAGSRRHHHRRIITSDPYDTLSVAGAVLASTAVIPK

SEQ ID NO: 20249 - protein, 113 aa, Arabidopsis thaliana
TREDHSLEHRCVESAKIRAKYPDRVPVIVEKVSGSQIVDIDKRKYLVPSDITVAQFMWIIRKRIQLPSEKAIFLFVDKTVPQSSLTMGQLYEKEKDEDGFLYVAYSGENTFGF

SEQ ID NO: 20250 - protein, 347 aa, uncultured marine gamma proteobacterium EBAC31A08
MKIYYDEDANIEIIKGMNVSIIGYGSQGNAHANNLHESGVSVTVGLREGSSSWAKAEEAGLKVQTVADSVIQADLVMILAPDEFQKNIYETEIKPNLKTSAILAFAHGFNIHFEKIVPEATNSVIMIAPKGPGHTVRSTYTNGGGVPSLIAIYEDALSDEDYSAKDVALSYAKANGGTRAGVLETSFKEETETDLFGEQAVLCGGLTALIKAGFETLVEAGYSEEMAYFECLHETKLITDLIQEGGIANMHYSISNTAEYGDYVSGPKVITSDTKKAMKGILENIQSGKFADDFLNDCRQSNDGTGGPVMKSNREATKIHPIESVGAELRSKMKFLNSQKLVDKEIN

SEQ ID NO: 20251 - protein, 404 aa, Streptococcus agalactiae NEM316
MANASLRHQLFEKLDQKCDQMVAIRRYLHENPELSFKETKTAAYISDFYKGKDCHVQTQFGGMNGVVVDIYGDKATDKPIKHIALRADFDALPIQEETGLSFASKTAGVMHACGHDAHTAYLLILAESLIELKSEFSGHIRILHQPAEEVPPGGAKAMIEAGCLDGIDAVLGIHVMSTMEEGTVQYHAGPIQTGRATFKVILQGKGGHGSMPHRANDTIVAASSFVIAAQTIVSRRVNPFDTAVVTIGSFDGKGSANVIKDSVTLEGDVRVMSEETRGVVEEEFKRILDGIAQTYGVSYQLDYQNDYPVLVNNSEVTQKVANSLKSVAIKEILDVIDCDPQTPSEDFAYYAQTIPACFFYVGAHEEGQPYYPHHHPKFQIAESSLMVSAKSMATAALAMLEEGE

SEQ ID NO: 20252 - protein, 727 aa, Candida albicans SC5314
MSIIPYNNNKDVLYHNPNDGIVVVHDPRENTIKLLSTVASEARGESNGSQRTRRPSQAFNNDQFPHTTSMTKCPNCGFTWNEFNKSGPRRSSSHSSSGLFNISLPQEYLSQSFIHTDYFKLLGKLPSNEEHACKSTLNNSLPEGVFNQGYFKRFFKKIDPYTLGSGAHAQVYKVNHILNNIVLGTYAVKRINIGGQLEFLQQVLNEVLILYELSTTGANENNLIRYNHVWLEMGELDDSNSIFFPTPKLADRRDMKVPYVFILQQYCDGGHLEDLIKCNFTIEENLTWKEKVELERKKRRAVKVGDETLPKRKQWLSTFEIWKFFHDVANGVNYLHQNGILHRDMKPSNCLLDVKYVPQEMKSTFESQEDFESHLYNLPRVLVSDFGEGKFIEKRQNVNLENLSDRQGNTGTLEFTAPELWLYSRDPKFGKDGKKFYNDFTYESDIYSLGLILCYLCIGKLPFSDMIRDENDPQEARSKIMNWYNNLSSASFSEWFESQIHDREGVMDECMEDFQKLAFKMIKGEDEVVDNGTTSRIGSKDILLYLNNIKWERFIITGHTFISGNSWSMSNELAIIEKDDSDLHSFNKDRVPSLLQNEVFSDDEDDDIEYEGRHDSDHINLTEDEFEEDISRTYFDSTDSVKSNFFQTHKFKTVPVYCSELLLLEYLSFYSPSFSKSTLKLCIFCFIGLDIFVVERTKLRTMLFLLVSVVLSILLAYELGHSNPYIV

SEQ ID NO: 20253 - protein, 320 aa, Arabidopsis thaliana
MALEAVVYPQDPFSYISCKDFPFYDLYFQEEEDQDPQDTKNNIKLGQGQGHGFASNNYNGRTGDYSDDYNYNEEDLQWPRDLPYGSAVDTESQPPPSDVAAGGGRRKRRRTRSSKNKEEIENQRMTHIAVERNRRKQMNEYLAVLRSLMPPYYAQRGDQASIVGGAINYLKELEHHLQSMEPPVKTATEDTGAGHDQTKTTSASSSGPFSDFFAFPQYSNRPTSAAAAEGMAEIEVTMVESHASLKILAKKRPRQLLKLVSSIQSLRLTLLHLNVTTRDDSVLYSISVKVEEGSQLNTVEDIAAAVNQILRRIEEESSFS

SEQ ID NO: 20254 - protein, 405 aa, Silicibacter sp. TM1040
MWTPMRDGPPKGMHGGKSERPISPRMKPSGLRIWTGSPRAANSERASDEALSCTHIQTCVARLRDTFPSGTVERGQHGGTTVNLIDGIKGNRFAVFGRAGMDMFADPIGTKSEDATTFRADLGGSSANICAGLVKLGAEAALVTSVSDDAVGRFCVNRLRDYGVETRYVRAVGGEARTSLAVYESRIDDFQNVIYRNGAADFQVTKADMDAVDYSAFSALITAGTVFAAEPSRSATFRAFEHARTAGLPVIFDIDYRPYSWPSPEVASEVLTRAGEASDLIVGNDEEFGFMAGHIDKGLEKARALAAQGRMVIYKMGEAGAITIAEGQEIRTGIYPVTAVKPNGAGDSFMAGLLASIAQGHALSDAVLRGSACASIVVSQPGCANAMPTTAELEAFLASHPGPTV

SEQ ID NO: 20255 - protein, 590 aa, Ajellomyces capsulatus
MQRALSSTSRASVLSSAPTRAPVSRFRSAGLSLQQQRFAHKELKFGVEGRAALLKGIDTLAKAVCTTLGPKGRNVLIESSYGSPKITKDGVTVAKAVTLQDKFENLGARLLQDVASKTNEVAGDGTTTATVLARAIFSETVKNVAAGCNPMDLRRGIQAAVEAVVEYLQANKRDITTTEEIAQVATISANGDTHVGKLISNAMEKVGKEGVITVKDGKTIEDELEVTEGMRFDRGYVSPYFITDTKAQKVEFEKPLIVLSEKKISAVQDIIPALEASTTLRRPLVIIAEDIEGEALAVCILNKLRGQLQVAAVKVPGFGDNRKSILGDIGILTNATVFTDELDMKLEKATADMLGSTGSITITKEDTIILNGDGSKDSIAQRCEQIRGVIADPTTSDYEKEKLQERLAKLSGGVAVIKVGGASEVEVGEKKDRVVDALNATRAAVEEGILPGGGTALLKAAANGLASVKPTSSDQLRRISSLVSAITRPARTIVENAGLEGSVIVGKLTDEHASDFNRGFDSAKGEYVDMIASGIVDPLKVVRTALVDASGVASLLGTTEVAIVEAPEEKGPAGPPGGMGGMGGMGGGMF

SEQ ID NO: 20256 - protein, 176 aa, Triticum aestivum
  misc_feature (163)..(163): Xaa can be any naturally occurring amino acid
  misc_feature (170)..(170): Xaa can be any naturally occurring amino acid
  unsure (1)..(176): unsure at all Xaa locations
MGPTLMASSATSVAPFQGLKSTAGLPVSRRSNGASLGSVSNGGRIRCMQVWPIEGMGGWGSLSYLPPLTHKTLLKQVDYLIRSKWVPCLEFSKVGFIFREHNASPGYYDGRYWTMWKLPMFGCTDATQVINEVEEVNKEYPDAYVRIIGFDNMRQVQCVSFIXAFKPPGXEESGKA

SEQ ID NO: 20257 - protein, 447 aa, Zea mays
MGKEKTHINIVVIGHVDSGKSTTTGHLIYKLGGIDKRVIERFEKEAAEMNKRSFKYAWVLDKLKAERERGITIDIALWKFETTKYYCTVIDAPGHRDFIKNMITGTSQADCAVLIIDSTTGGFEAGISKDGQTREHALLAFTLGVKQMICCCNKMDATTPKYSKARYDEIVKEVSSYLKKVGYNPDKIYFVPISGFEGDNMIERSTNLDWYKGPTLLEALDLINEPKRPSDKPLRLPLQDVYKIGGIGTVPVGRVETGVIKPGMVVTFGPTGLTTEVKSVEMHHEALQEALPGDNVGFNVKNVAVKDLKRGYVASNSKDDPAKEAASFTSQVIIMNHPGQIGNGYAPVLDCHTSHIAVKFAELVTKIDRRSGKELEKEPKFLKNGDAGMVKMVPTKPMVVETFSQYPPLGRFAVRDMRQTVAVGVIKSVEKKDPTGAKVTKAAAKKK

SEQ ID NO: 20258 - protein, 330 aa, Flaveria bidentis
MSAASAFAMNAPSFVNASSLKKASTSARSGVLSARFTCNSSSSSSSSATPPSLIRNEPVFAAPAPIITPNWTEDGNESYEEAIDALKKTLIEKGELEPVAATRIDQITAQAAAPDTKAPFDPVERIKSGFVKFKTEKFVTNPALYDELAKGQSPKFMVFACSDSRVCPSHVLDFQPGEAFVVRNVANMVPPFDKTKYSGVGAAVEYAVLHLKVQEIFVIGHSRCGGIKGLMTFPDEGPHSTDFIEDWVKVCLPAKSKVVAEHNGTHLDDQCVLCEKEAVNVSLGNLLTYPFVRDGLRNKTLALKGGHYDFVNGTFELWALDFGLSSPTSV

SEQ ID NO: 20259 - protein, 270 aa, Burkholderia fungorum LB400
MSRIKNTFAALSAQGKKGLIPFMTAGDPDPARTVEFMHALAAGGADVIELGVPFSDPMADGPVIQQSSERALAQGVSLRHVIADVKRFRETNDTTPVVLMGYANPIERMGTEAFARAAKEAGVDGVLVVDYPPEECANFAEQMRSAGIDPIFLLAPTSTDERIAEVGKIASGYVYYVSLKGVTGAANLDVSSIASKIPAIKSRVPLPVGVGFGIRDAQTARAVAEVSDAVVIGSRIVQLLEQAAPESAAATLTRFIAEVREALDSVATAR

SEQ ID NO: 20260 - protein, 189 aa, Oryza sativa (japonica cultivar-group)
QRLIFAGKQLEDGRTLADYNIQKESTLHLVLRLRGGMQIFVKTLTGKTITLEVESSDTIDNVKAKIQDKEGIPPDQQRLIFAGKQLEDGRTLADYNIQKESTLHLVLRLRGGMQIFVKTLTGKTITLEVESSDTIDNVKAKIQDKEGIPPDQQRLIFAGKQLEDGRTLADYNIQKESTLHLVLRLRGGL

SEQ ID NO: 20261 - protein, 517 aa, Triticum aestivum
MDKAYIAVLSFAFLFLLHYILGKKSNGSKGAVQLPPSPPAIPFFGHLHLVEKPLHAALCRLGARYGPVFSLRLGARNAVVVSSPACARECFTEHDVAFANRPQFPSQMLVSYGGTSLVSSSYGPHWRNLRRVAAVRLLSAHRVAGMSGVIAAEVRAMARRLCRAAAASTGGGAARVELKRSLFELSLSVLMETIAQTKGTRPEADGDTDMSLEAQEFKQVVDEIIPLIGAANVWDYLPVMRWFDVSGVRSRILATVSRRDAFLHRLIDAERRRMDEGGAGDEGEKKSMIAVLLTLQKTEPELYTDQMIIALCANLFVAGTETTSTTIEWAMSLLLNHPAALKKAQAEMDASIGASRMVAADDVPRLSYLQCIINETLRLYPAAPLLLPHESSADCKVGGYDVPSGTMLIVNAYAIHRDPAVWEDPAAFRPERFEDGKADGLLLMPFGMGRRRCPGETLALQTVGVVLGTLVQCFDWDRVDGAEVDMTEGVGITMPKAVALEAVCRPRAAMGDVLQKL

SEQ ID NO: 20262 - protein, 395 aa, Brassica napus
  misc_feature (145)..(145): Xaa can be any naturally occurring amino acid
  misc_feature (190)..(190): Xaa can be any naturally occurring amino acid
  unsure (1)..(395): unsure at all Xaa locations
MAIRLSLICLLVSVTAIAADLTPERYWNSALPNTPIPNSLRHLFTSDFSDEKSTNVQVGKGGVNVYTGKGKHGGGTAVNVGKGGVHVDTGKGKGTHVSVSGGKGHGGGVGVHTGKPGKRTDVGVGKGGVIVHTRHKGKPARHPRXRPVYVGVTPGPHPFVYNYAASETQLHDDPKAALFFLEKDMVPGKXMNLRFNAEDGYDGKTAFLPRGEAETVPFRSEKFSEILNTFSVKPGSGEAEMMKKTIEECEAKRVGGEEKYCATSLESMVDFSVSKLGKYHVRAVSTEVAEKNAPMQKYKIAAPGINKLSDDKSVVCHKQKYPFAVFYCHKAMMTSVYAVPLEGENGLRAKAVAVCHKNTSAWNPNHLAFKMLKVKPGTVPICHFLPETHVVWFSY

SEQ ID NO: 20263 - protein, 841 aa, ASPERGILLUS NIDULANS FGSC A4
MSSAEAIPSFSQGHGLGHSRGRGHSRRSTPISQPIPSYALPAAQQQSQHSVADVNNTNSNAEDLKNGGHHHSHCHSSDHHDHFESAPVAHSHAHKIMGIQTETAPRQLDEVVAGIMVALPWIALSWFYEHYAQWTQPEPDSTASIGRIDRATSRTLGLTAATLILYGGWALIRPNRRSGGESALKMPSLELNTGITALSGFLVAFALALAVGSGLPTVVRGQTSASSGKERQSFKKLSAAFILIVLALSFFGMNAVWDNAPFVGYMALLASIFLIRPPFPAISGSNHASERALGISIPDRPNDSVTTLELQNSSQDPLIAALTGAVLGLLTFIITGNPSFAISDIIHILAAAGSLATCLTYLDISSIYSPRKIGVAVATGSAALFCSPPVQDNIYTVYFIRALLAIASFFAARLDDKRSVSEEHAHHHHHAHATSKPSRATKIILRYTESYPLLYSILKERDSRRIFYFMSLNFGFMLVQLSYGFATGSLGLLSDSIHMFFDCLALVVGLCAAVMSKWPPSTRFPYGYGKVDTLSGFANGIFLMIISVEIIYEAVERLSSGSQMHRLGELLAVSVAGLLVNLVGIMAFDHGHAHGHDHGHGHGHSHSHSHGNENMHGIFLHILADTLGSVAVVISTILVHYSGWAGYDPIASCMIAILIFASAVPLVSSTAKSLLLTLPADVEYNVRETLAGVSTLRGVVGYTVPKFWLDDTEKSSGHSHGHDHGHSHSHSHLSHSHGCDHDHGHNNSIHSHDHHSHGRDHGHAHENDTPPVLGVIHVTASRAADLEDVRKRTVDFLREKGIDILVQVDREGEGRCWCGGGGSGSGSGSGRIGGGNNLKAS

SEQ ID NO: 20264 - protein, 306 aa, Pseudomonas fluorescens Pf-5
MPRLLHTGQVIVDLVMAVERLPASGGDVLAQSAGFEAGGGFNVMAAAARNGLPVVYLGRHGQGRFGDLARAAMQGEGIQMSLEPGRGADTGLCVALTEASAERTFISHIGAEGELSAEDLARVRVEAGDYLYVSGYSLLQECKARALLDWLLALPRSIPLMFDPGPLAGSVDSPLMAALLPRIDIWSSNRAEALQLTGTSQIAQALAQLESWLSPAALLVLRDGPRGCWVSRQGQAVQVPGFKVEAVDSNGAGDAHAGVLVAGLAAGLEPLMAARRANAAAAIAVTRRGPATAPGSAEVDALLARG

SEQ ID NO: 20265 - protein, 373 aa, Petunia x hybrida
MPLHLRCSATVCVTGAAGFIGSWLVMRLLERGYNVHATVRDPENKKKVKHLLELPKADTNLTLLKADLTVEGSFDEAIQGCQGVFHVATPMDFESKDPENEVIKPTVRGMLSIIESCAKANTVKRLVFTSSAGTLDVQEQQKLFYDQTSWSDLDFIYAKKMTGWMYFASKILAEKAAMEEAKKKNIDFISIIPPLVVGPFITPTFPPSLITALSLITGNEAHYCIIKQGQYVHLDDLCEAHIFLYEHPKADGRFICSSHHAIIYDVAKMVREKWPEYYVPTEFKGIDKDLPVVSFSSKKLTDMGFQFKYTLEDMYKGAIDTCRQKQLLPFSTRSAEDNGHNREAIAISAQNYASGKENAPVANHTEMLSNVEV

SEQ ID NO: 20266 - protein, 141 aa, Desulfovibrio desulfuricans G20
MNVLLVDDEVAFVEALARRLTRKNMTVHTVHNGPEALDFLRKNPSVDAVVLDVVMPGPDGLKVQEIIRKEFPLVEVIMLSGNSTTAMAVQGMKQGAFDYLSKPCSTEELIEKLHEAKRRRDTYCEELAALKAGDIVLRRGD

SEQ ID NO: 20267 - protein, 686 aa, Bacillus circulans
APDTSVSNKQNFSTDVIYQIFTDRFSDGNPANNPTGAAFDGTCTNLRLYCGGDWQGIINKINDGYLTGMGVTAIWISQPVENIYSIINYSGVNNTAYHGYWARDFKKTNPAYGTIADFQNLIAAAHAKNIKVIIDFAPNHTSPASSDQPSFAENGRLYDNGTLLGGYTNDTQNLFHHNGGTDFSTTENGIYKNLFDLADLNHNNSTVDVYLKDAIKMWLDLGIDGIRMDAVKHMPFGWQKSFMAAVNNYKPVFTFGEWFLGVNEVSPENHKFANESGMSLLDFRFAQKVRQVFRDNTDNMYGLKAMLEGSAADYAQVDDQVTFIDNHDMERFHASNANRRKLEQALAFTLTSRGVPAIYYGTEQYMSGGTDPDNRARIPSFSTSTTAYQVIQKLAPLRKCNPAIAYGSTQERWINNDVLIYERKFGSNVAVVAVNRNLNAPASISGLVTSLPQGSYNDVLGGLLNGNTLSVGSGGAASNFTLAAGGTAVWQYTAATATPTIGHVGPMMAKPGVTITIDGRGFGSSKGTVYFGTTAVSGADITSWEDTQIKVKIPAVAGGNYNIKVANAAGTASNVYDNFEVLSGDQVSVRFVVNNATTALGQNVYLTGSVSELGNWDPAKAIGPMYNQVVYQYPNWYYDVSVPAGKTIEFKFLKKQGSTVTWEGGSNHTFTAPSSGTATINVNWQP

SEQ ID NO: 20268 - protein, 208 aa, Boechera drummondii
MATIEESSDLEAIQKHLFEDLMVSDGFMGDFDFDASFVSELWCIEPQVPKQEPDSPVFDPDSFVNEFLQVEAKSSPELNSSSSTYETDLSVKKAERFEEEEEEEEEEARHYRGVRRRPWGKFAAEIRDPAKKGSRIWLGTFESDVDAARAYDCAAFKLRGRKAVLNFPLEAGKYEAPANSGRKRKRSDVKEELQRTQSNSSSSSCDAF

SEQ ID NO: 20269 - protein, 336 aa, Petroselinum crispum
MKMKIGINGFGRIGRLVARVALMSDDIELVAVNDPFITTEYMTYMFKYDSVHGQWKKDELKVKDSKTLLFGDKPLTVFGVRNPEEDPWGEAGAEYVVESTGVFTDKDKAAAHLKGGAKKVVISAPSGNAPMFVVGVNEKEYKKDIDIVSNASCTTNCLAPLAKVLNDKFGIVEGLMTTVHSITATRKTVDGPSMKDWRGGRAASFNIIPSSTGAAKAVGKVLPALNGKLTGMAFRVPTVDVSVVDLTARLEKAATYDEIKAAIKHESETSLKGILGYTEDDVVSTDFVGDSRSSIFDAKAGIALNGNFVKVVSWYDNEWGYSNRVIDLIRHMASVA

SEQ ID NO: 20270 - protein, 393 aa, Arabidopsis thaliana
MSSTSFTDLLGSSGVDCYEDDEDLRVSGSSFGGYYPERTGSGLPKFKTAQPPPLPISQSSHNFTFSDYLDSPLLLSSSHSLISPTTGTFPLQGFNGTTNNHSDFPWQLQSQPSNASSALQETYGVQDHEKKQEMIPNEIATQNNNQSFGTERQIKIPAYMVSRNSNDGYGWRKYGQKQVKKSENPRSYFKCTYPDCVSKKIVETASDGQITEIIYKGGHNHPKPEFTKRPSQSSLPSSVNGRRLFNPASVVSEPHDQSENSSISFDYSDLEQKSFKSEYGEIDEEEEQPEMKRMKREGEDEGMSIEVSKGVKEPRVVVQTISDIDVLIDGFRWRKYGQKVVKGNTNPRSYYKCTFQGCGVKKQVERSAADERAVLTTYEGRHNHDIPTALRRS

SEQ ID NO: 20271 - protein, 435 aa, Desulfovibrio desulfuricans G20
MSRNTELHLTVGVDEPVSPLKAFALGLQHVLAMDVYIAPFVMAGLLSLSVPETATFIQMTFVAAGLATLIQAGFGIRLPVMQGPSYVPIGALAAIGNSLGLGAMFGSLLPGALVMTLLGKPLRVFSRIVRFFIPPLVGGTVIVIVGIALMPVALKGCYGYFGDPAHNAVVALVSAAVLVVLTVAGSRPGRFNQVVRMGSVVFSMAAGTLTAAAFGMVNFDSVAAAPWLALPVIFPYGTPHIDVSAALTLVFIYLVVLVETTGTWFAVEAVTGSRLDDERINGGTFGEGVGCFLGAMLGGTPVTGYSTNAGIIAITGVASRWAIMAGGGILLVLGMVPKLMNVIASIPGPVISGVFAVICVVIAMNGFRVVRTVTLSERNMLVMGLPILLTLAAVFMPAELRDRLPALVRYLVESGIAVGAVSAVVLNLILPKDAE

SEQ ID NO: 20272 - protein, 556 aa, Zea mays
MGETNELPPPPVAAPPPMMPMQSMMVGAGAIHPPHEQFHHLNYCVHSNPSWVQVAALAFLHYLVMLGSTVMLATAIVPAMGGNAGDKARVIQSFLFMSGINTLLQTLIGTRLPTVMNASFAFVVPVLSIAKEIESNNFLNDHERFKHTMRTAQGALIVASILNMILGFSTIWGAYAKKFSPVIMTPVVCVVGLGLFQLGFPQVGKCVEIGLPMLILAVVVQQYVPNYFSYIHQRVTFLFERYSLLLCMGIVWAFAAILTAAGAYDHASPKTQQHCRTDKSFLMSSAPWIKIPLPFEWGPPIFTAGHSFGMMGAVLVAAFESTGAHFATARLAGATPPPAYVLSRSVGLQGIGMFLEGIFSVPAGSSVSVENIGLLGLTKVGSRRVIQISTGFMIFFSIFGKFGAFFASIPLPIFAAIYCILFGIVAAVGVSFMQFANKNSMRNIYIIGLSLFLGISVPQYFNGYTSSAGGHGPARTNAGWFNAIINPVFASGPTVALIVASVLDNTLEFRGYEAARGLSWFQPFLRRHKGYSDPRNEEFYSFPISVYDVIPDRFRR

SEQ ID NO: 20273 - protein, 396 aa, Pseudomonas syringae pv. phaseolicola 1448A
MSFDLRTRLDARRAEHLYRQRPLLQSPQGPQVVVDGQPLLAFCNNDYMGLANHPEVIAAWQAGAERWGVGGGASHLVIGHSTPHHELEEALAELTGRPRALLFSNGYMANLGAVTALVGQGDTVLEDRLNHASLLDAGLLSGARFSRYLHNDVTSLASHLEKSVGDTLVVTDGVFSMDGDIADLPALAQAAKAKGAWLMVDDAHGFGPLGANGAGIVEHFGLSMEDVPVLVGTLGKSFGTSGAFVAGSEELIETLIQFARPYIYTTSQPPALACATLKSLQLLRTEHWRREHLASLIQQFRQGAEQIGLQLMDSFTPIQPILIGDAGRALRLSQLLRERGLLVTAIRPPTVPAGSARLRVTLSAAHSKADVQLLLEALEQCYPLLDASESTEPVHA

SEQ ID NO: 20274 - protein, 377 aa, uncultured archaeon GZfos22D9
MEDIFRFADELGPAKVIHVYEPSVGLKAVLVVDNVARGPAIGGLRIAPDVSPEECFRLARAMTLKNAAADLPHGGGKSVIYGDPKMPTKEKEKLIRALASSLREIQEYIFAPDMGTDEECMAWVKDEIGRVVGLPSDFGGIPLDEIGATGWGLSHATEVALEYCDFDMEGAQVVVQGFGAVGKHTARFLTEKGAMLVGVADSRGTIYNPQGLDVLALIELKKAGKSVADYPDGKKLDRDAVINIECDIWIPAARPDVIDKNNVNLLKTKLVIEGANIPITEGAEKHLHEKGVLYVPDFIANAGGVICAAMEYQGADQSAAFHAIEEKLCRNTRLVLDEAASRGILPREAAVDLAVQRLKKSMSYRRWSLFSSAPGFV

SEQ ID NO: 20275 - protein, 559 aa, Methanosarcina acetivorans C2A
MLHKRFRRYSMLKRYGQIIEVLQKYGFGYIVDQIGLGSFGDFTSRLKKQEKRDEHNLSGPVRTRRILEELGPTYIKLGQLLSMRRDLVPLEYAAEFSKLQDDAPSFGFEEVELIIREELGLPVEDLFESFEKKPLACASIGQVHRAKLKNGDDVVVKVQRPGIKEVIESDLDIMYSLSRLLTEHIPEARLYRPVELVDELSRSILAEIDYSQEGWNTDRFAENFKDSEQIHIPKVYWDYTGTRVLTLEYIEGIKGGRVDLLEKQGFDRSAIALAVAGSFLKQVFEDGFFHADLHPGNILIMEDGIVAFLDFGMVGHLSSETRDMFLNGMTAMVKGDSSLFVEVLRDMGGIDSHVDTKVLKVDFDYFRSKYYGRALKNLDASVIIEELIEVLRKNQVKVPYNITLLVRGTLAVEGFGLIIDPDLNLAELVEPYAKNAIKESFYPQNIARVLYDNISSWSRIFQRAPTKISHILDNAENGYLGIKLESEETKRLISEINTASNRLSFSLIISAIIVASSLITQTNMKPLLWGVPLLGIFGFLLASIFGMWLIFNIFRTGRI

SEQ ID NO: 20276 - protein, 294 aa, Nicotiana tabacum
MDQYEKVEKIGEGTYGVVYKARDRVTNETIALKKIRLEQEDEGVPSTAIREISLLKEMQHANIVRLQDVVHSEKRLYLVFEYLDLDLKKHMDSSPEFSKDPRLVKMFLYQILRGIAYCHSHRVLHRDLKPQNLLIDRRTNALKLADFGLARAFGIPVRTFTHEVVTLWYRAPEILLGTRHYSTPVDVWSVGCIFAEMVTQRPLFPGDSEIDELFKIFRVMGTPNEDTWPGVTTLPDFKSAFPKWPSKDLATIVPNLDGAGLDLLDKTSRLDPSKRITARNALEHEYFKDIGYVP

SEQ ID NO: 20277 - protein, 634 aa, Glycine max
MGSNRTIVWFRRDLRIEDNPALAAAAKEGSVLPVYIWCPKEEGQFYPGRVSRWWLKQSLAHLDQSLKSLGSRLVLIKTHSTVMALVECVKAIQATKVVFNHLYDPVSLVRDHNIKEKLVEQGISVQSYNGDLLYEPWEVNSESGRAFTTFNAFWKKCLHMQMDIVSVVPPWQLIPAEGKIEECSLEELGLENESEKPSNALLGRAWSPGWRNADKALREFVELHLLHYSKKRLKVGGESTSLLSPYLHFGELSARKVFQVTRMKQILWTNEGNSAGEESVNLFLRAIGLREYSRYLCFNFPFTHEKALLGHLKFFPWNPDADIFKNWRQGRTGFPLVDAGMRELWATGWIHNRIRVIVSSFAVKMLLLPWKWGMKYFWDTLLDADLESDILGWQYISGGLPDGHELERLDNPEIQGAKFDPEGEYVRQWLPELARMPTEWIHHPWDAPLTVLRAAGVELGQNYPKPIIDIDLARERLTEAIFKMWESEAAAKAAGSEPRDEVVVDNSNSLENLDTRKVVVLGKAPCATISANDQKVPALQDSKNEPPTRKRPKHMIEEGQNQDHSQNHNKDTGMSSIDQDICSTADSSSCKKQCASTSSYSFSVPQQCSSSSNLKWPWQDQIDMEQSSSKDGAM

SEQ ID NO: 20278 - protein, 758 aa, Zea mays
MARLKSRIGWIKEGDANTSLFHAQTRFRKKNFIAARASEEGLLQPLSTRNMQHRISLYADDAVLFLSPTAPDISVVMDILHLFGSASGLRTNIQKSSVFPICCGEEEKLTRDQVQAIVDRVASLLPGWKAELMTRVGRAIHVQFVMTAKMIYAALALDLPVWAIKAIDKLRKGFLWRGRKEFCGGHCLLAWPKVTRPKELGGLGISELKSLCWALRARWPWLQKTDPSRPWTDFPTDVCKVVQNLIAVAVTTKLGDGANTLFWKDRWLDGRCIRDIAPAMFDMVPMRLANKRLVKDALPNLHWISDVKGAISVRVIAEFLELCEVLEAVVLQPGIRDRHIWKFSASGDYTASSAYKALFHGSVQFEPVEPVIFLGSSHIAWKSKKQTVVSRSTAEAELRALATTTSEIIWLRWLLADLGVSCDTPPLRCGDAEDPNVTCSDTLPDEVQVNLHMLRDLMLHGIDGEIDGTDVVAVDEGDAPKGAVELMEEPAHPGKVQNGPRYTETLLKSLSKKTFRLMQSKDRSSVVSSHMSGVWGRNNRGKPYPCILQRGYVELKTFGSVERLPITVPPLPSLPLSLCTIDPKIPKGRREGRQGPDILCDKMDATLEQLLPIFLSLLKDEFPDVRLNIISKLDQVNQVIGIDLLSQSLLPAIVELSEDRHWRVRLAIIEYIPLLASQLGVGFFDDKLGALCMQWLEDKVFSIRDAGANNLKRLTEEFGPEWAMQHIIPQVICAKPMHIISYARATMESSVKGPLAEM

SEQ ID NO: 20279 - protein, 459 aa, Burkholderia sp. 383
MTQHFDAIVIGTGQAGPPLAARLSAAGMKVAIIERGRFGGTCVNTGCIPTKTLIASAYAAHLARRGSEYGVSVGGPVTVDMKAVKARKDQISGRSNQGVEQWVRGLANTTVFQGHARFERADAVRVGDALLEAERIFINVGGRAQVPAMPGLDTVPYLTNSTMMDVDFLPDHLVIVGGSYIGLEFGQMYRRFGSKVTIVEKGSRLIRREDEDVSQAVRDILEKEGIDVQLDATCLSARRNGDGIAVGLDCVGGGREVAGSHLLLAVGRVPNTDDLGLDRAGVATDARGYIEVDEQLRTNVPGIWALGDCNGRGAFTHTAYNDFEIVAANLLDGDPRKVSDRIAAYALYIDPPLGRVGMTFAEAKQTGRRLLVGTRPMTRVGRAVEKGESQGFMKVIVDADSHAILGASILGVTGDEVVHGMLDVMAAGAPYTTISRAMHIHPTVSELVPTLLQDLHPVE

SEQ ID NO: 20280 - protein, 382 aa, Oryza sativa
MAITVSIYLVKMPIYLETRGTSRISLVVHHIRRRTHSSSSSRLRFQRGGGAEQRRGMAAAQGSGVPAALALSSGHTMPSVGLGVWRMDSPAIRDLIHSALRIGYRHFDCAADYQNEAEVGDALAEAFQTGLVKREDLFITTKLWNSDHGHVVEACKDSLKKLRLDYLDLYLIHFPVATRHTGVGTTASALGDDGVLDIDTTISLETTWHAMEDLVSMGLVRSIGISNYDIFLTRDCLAYAKIKPAVNQIETHPYFQRDCLVKFCQKHGILVTAHTPLGGSTANTEWFGSVSCLDDPVIKLTSMPVQSLAEKYGKTPAQLVLRWGLQRNTVVIPKTSKEERLQENFAVFDFAISDEDMEKMRSIDRKYRTNQPAKFWGIDLFA

SEQ ID NO: 20281 - protein, 401 aa, Shewanella oneidensis MR-1
MSSSLESKLASKIRARQQALAEQGLLRQRQALSIDAVLSDAEPQFCFEGQTYLNFSSNDYLGLSRAPELIAALHRGAQQYGVGSGASPLVTGYSEAHLALETKLCKITGFEAALLFSSGFSANTTLCKTLFDKQDVVLADKLVHASIIDGLRDSGADFKRFLHNSTESAERLLAKNTVSALITESVFSMDGDIAPIKALSSLCRAHNVWLIVDDAHGFGVSDIFNQPAANLIDIQIVTFGKALGCQGAAILGSRELIAFLVSNAREYIYSTALSPANAALALAAVEHCEAQPELRQKLQRNISLFKQLCQDADIPLLGSDTPIQPLIIGDAKQTLLVAQKLKAMGIWVGAIRPPTVPVGSARLRITLSASHSEAAIRRCVNGITQVLAECVLPRVSERPER

SEQ ID NO: 20282 - protein, 204 aa, Agrobacterium tumefaciens str. C58
MPEQVPIDETHRQAPINPYGRTKWVVEQALKDYSTYEGLRSVMLRYFNAAGADFEGRIGEWHKPETHAIPLAIEAALGRRQGFKVFGTDYDTRDGTCVRDYIHILDLADAHVRAVDYLLDGGETVELNLGTGTGTTVKELLAAISEVSGRPFPVEYTGRRDGDSTTLVANNDKAREVLGWEPRYSLSDIIKSAWAWHSSRNAGD

SEQ ID NO: 20283 - protein, 337 aa, Petunia x hybrida
MAKIKIGINGFGRIGRLVARVALQRDDVELVAVNDPFISVEYMTYMFKYDSVHGQWKHHELKAKDDKTLLFGEKPVTVFGIRNPEEIPWGEAGADYVVESTGVFTDKDKAAAHLKGGAKKVIISAPSKDAPMFVVGVNEKEYKSDLTVVSNASCTTNCLAPLAKVINDRFGIVEGLMTTVHSMTATQKTVDGPSAKDWRGGRAASFNIIPSSTGAAKAVGKVLPALNGKLTGMAFRVPTVDVSVVDLTVRLEKEATYDEIKAAIKEESEGKLKGIPGHTEDDVVSTDFIGDNRSSIFDAKAGIALSKNFVKLVSWYDNEMGYSTRVVDLIKHIASVE

SEQ ID NO: 20284 - protein, 486 aa, Burkholderia pseudomallei K96243
MYLEHALKDPSLLRHQAYIGGEWQAADSDATFEVFDPATGESLGTVPKMGAAETARAIEAAQAAWAGWRMKTAKERAAILRRWFDLVIANSDDLALILTTEQGKPLAEAKGEIAYAASFIEWFAEEGKRVAGDTLPTPDANKRIVVVKEPIGVCAAITPWNFPAAMIARKVGPALAAGCPIVVKPAESTPFSALAMAFLAERAGVPKGVLSVVIGDPKAIGTEITSNPIVRKLSFTGSTAVGRLLMAQSAPTVKKLTLELGGNAPFIVFDDADLDAAVEGAIASKYRNNGQTCVCTNRFFVHERVYDAFADKLAAAVSKLKVGRGTESGATLGPLINEAAVKKVESHIADALAKGASLMTGGKRHALGHGFFEPTVLTGVKPDMDVAKEETFGPLAPLFRFASEEELVRLANDTEFGLAAYLYSRDIGRVWRVAEALEYGMVGINTGLISNEVAPFGGVKQSGLGREGSHYGIDDYVVIKYLCVAV

SEQ ID NO: 20285 - protein, 165 aa, Malva pusilla
RNSARAAFEDGDLKLFESGAINHYVAHEYADKGTQLLITGSNKETAVLQLWREVEAHQFDPPCSKIVWEVYYKPIFGMVTDAAAVEENEAKLVKVLDVYETRLSQSKYLACDYFTLADLNHLPNIQCLLATPSKKLIDSRPHVSAWVKDITARPAWTKVVAMQKQ

SEQ ID NO: 20286 - protein, 224 aa, Glycine max
MGSRVFALFITGVVLLGSRILALDHTVVEKRLNENTVSLTTKGSPQLCQLCEQFATETLFYLKENETRIEIIDTLHQACLKFHSLKLECTKLVDYYAALFFAQIDSLSPEEFCVSASLCEEVTYIRLPGHEHACTLCHEVVDEIRTGLEDPEMELKIIEILLKGCNNTESFVQKCKKMIIQNAPLILEDIKKFLEKRDFCDSIRVCGGKIARPPGGGLRGLSTV

SEQ ID NO: 20287 - protein, 149 aa, Glycine max
MADQLTDEQISEFKEAFSLFDKDGDGCITTKELGTVMRSLGQNPTEAELQDMINEVDADGNGTIDFPEFLNLMARKMKDTDSEEELKEAFRVFDKDQNGFISAAELRHVMTNLGEKLTDEEVDEMIREADVDGDGQINYEEFVKVMMAK

SEQ ID NO: 20288 - protein, 191 aa, Desulfovibrio desulfuricans G20
MKPNYILLLDFAAVFSYLSFVTGSAAQSGAHTPQNTPAVSGKTWHGSTLPDKEELKAKLSPLQFAVTQHDETEPPFKNEYWDNKQPGIYVDIVSGEPLFSSTHKYDSGTGWPSFYQPLAAGHIVEKEDRGLFFTRTEVRGRLADSHLGHVFSDGPPPTGLRYCINSAALRFIPADALDKECYGELLYLFDQ

SEQ ID NO: 20289 - protein, 365 aa, Prunus persica
QMGLAENQLSFDLIEDWIRKNPKASICTPEGVEELKNVAIFQDYHGFPEFRKAVAMFMSKARGGRVTFDPNRVVMNGGATGANELVMFCLADPGDAFLVPSPYYQHFTRDLGWRTGVQIVPVDCDSSNNFQITKEALAAAYEKAQKNNISVKGLIITNPSNPLGTTLGRDTLESLVEFISQKNIHLVCDEIYAATVFSSPTFTCISEVIQNTDCNPNLIHIVYSLSKDMGLPGLRVGIVYSYNDDVVNIGRKMSSFGLVSSQTQHVLASMLLDEEFVARFLETSSKRLAKRHGVFTKGLEEVGINCLRSNAGLFCWMDLRRLLKDLTFDGEMVLWRVIVNEVRLPVSPGSSFKCVEPGWFRVCFA

SEQ ID NO: 20290 - protein, 335 aa, Burkholderia pseudomallei K96243
MTDTQRDLVLVTGASGFVGSAVARAARRQGYRVRVLVRPTSPRTNVADLDAEIATGDMRDEASMRAALRGVRHLLHVAADYRLWAPDPLEIERANLEGAVATMRAALAEGVERIVYTSSVATLKVTPSGASADESSPLAAGQAIGVYKRSKVLAERAVERMIAEDGLPAVIVNPSTPIGPRDVKPTPTGRIIVEAALGKIPAFVDTGLNLVHVDDVAQGHLLALERGRVGERYILGGENLPLQAMLADIAQSTGRKPPTIALPRWPLYPIALGAEAVAKLTKREPFVTVDGLRMSKNKMYFTSAKAERELGYRARPYREGIRDALDWFRQAGYLR

SEQ ID NO: 20291 - protein, 716 aa, Oryza sativa (japonica cultivar-group)
MASVDPSRSFVRDVKRVIIKVGTAVVSRQDGRLALGRVGALCEQVKELNSLGYEVILVTSGAVGVGRQRLRYRKLVNSSFADLQKPQMELDGKACAAVGQSGLMALYDMLFNQLDVSSSQLLVTDSDFENPKFREQLTETVESLLDLKVIPIFNENDAISTRKAPYEDSSGISWDNDSLAGLLALELKADLLILLSDVDGLYSGPPSEPSSKIIHTYIKEKHQQEITFGDKSRVGRGGMTAKVKAAVLASNSGTPVVITSGFENRSILKVLHGEKIGTLFHKNANLWESSKDVSTREMAVAARDCSRHLQNLSSEERKKILLDVADALEANEDLIRSENEADVAAAQVAGYEKPLVARLTIKPGKIASLAKSIRTLANMEDPINQILKKTEVADDLVLEKTSCPLGVLLIVFESRPDALVQIASLAIRSGNGLLLKGGKEAIRSNTILHKVITDAIPRNVGEKLIGLVTTRDEIADLLKLDDVIDLVIPRGSNKLVSQIEASTKIPVLGHADGICHVYIDKSADMDMAKHIVMDAKIDYPAACNAMETLLVHKDLMKSPGLDDILVALKTEGVNIYGGPIAHKALGFPKAVSFHHEYSSMACTVEFVDDVQSAIDHIHRYGSAHTDCIVTTDDKVAETFLRRVDSAAVFHNASTRFSDGARFGLGAEVGISTGRIHARGPVGVEGLLTTRWILRGRGQVVNGDKDVVYTHKSLPLQ

SEQ ID NO: 20292 - protein, 293 aa, Nicotiana tabacum
MDQYEKVEKIGEGTYGVVYKARDRVTNETIALKKIRLEQEDEGVPSTAIREISLLKEMQHANIVRLQDVVHSEKRLYLVFEYLDLDLKNTWITTPEFSEDPRLVKMFLYQILRGIAYCHSHRVLHRDLKPQNLLIDRRTNALKLADFGLARAFGIPVRTFTHEVVTLWYRAPEILLGSRHYSTPVDVWSVGCIFAEMVTQRPLFPGDSEIDELSRFRVMGTPNEDTWPGVTTLPDFKSAFPKWPSKDLATIVPNLDGAGLDLLDKIVRLDPSKRITARNALEHEYFKDIGYVP

SEQ ID NO: 20293 - protein, 652 aa, Candida albicans SC5314
MSASRTNIPFSRDSLEQTLKRRFFFAPSFEIYGGVAGLFDFGPPGCAFQNNVIDAWRKHFILEEDMLEVEATMLTPHDVLKTSGHVDRFSDWMCKDLKTGEIFRADHLVEEVLESRLKGDKLARGVKIVEEEDEDKKKRKKKVKEIKNVKLEDEVVKEYESILAQIDGFSGPQLGELIVKYDITNPSTGGKLEPPVEFNLMFDTAIGPSGNLKGYLRPETAQGQFLNFNKLLEFNNDKMPFASASIGKSFRNEIAPRAGLLRVREFLMAEIEHYVDPESKSHPKFEDVKDIKLKFLPKNVQESGSTELIEESIGKAVSSGMVDNETLGYFIARIYLFLVKIGVDTNRLRFRQHMSNEMAHYASDCWDAELETSYGWIECVGCADRSAYDLSVHSARTGEKLVARQTLAEPRTVENFEIEIAKKKFGPKFRKDAGTVEKWLTSRTQCELEELGKELSEKGKIVVQIKGVEGDVELDGDLIKIDKVKRTEHVREFVPNVIEPSFGIGRILYSIFEHQFWCRPDDADRGVLSLPPIVAPTKVLLVPLSNNSELQPIVKKVSQALRKEKIPFKVDDSSASIGKRYARNDELGTPFGITIDFDSVKDDSVTLRERDSTKQVRGSIQEIVEAIKDITYNDGTWEEGTAKLKPFEGQSA

SEQ ID NO: 20294 - protein, 452 aa, Burkholderia pseudomallei K96243
MEIRHGINLARARALLARERDAFERAMPKSRARSAEAAQHLLFGVPLHWMRDWSTPFSLYVDHARGAHFTDIDGHRYADFCLGDTGAMFGHAPEPVARALAEQAARGYTTMLPSEDAAWVAAELARRFRLPYWQFALSASDANRFVLRWARAATGRKHIVVFNGCYHGTVDDVFVDLADGRPVQRDSLLGQAHDLSAYTRVVEFNDLAALEAALKDGEVACVLAEPALTNIGMVLPDAGFWREARALTRRHGTLLAIDETHTISSGPGGYARAHGLEPDLLVVGKPIGGGVPCAVYGFSASCAERAQHAKASAPPGHSGIGTTLAANMLAMRAIRATLADVMTDTAYAHMFDLAARLAAGLEQTIARRGLPWCVTRIGARTEFQFAPAPPRNGTIAGLQLDGELEHIVHLYLLNRGVLITPFHNMMLVCPQTSAEDVDRLVAAFDACLGELL

SEQ ID NO: 20295 - protein, 360 aa, Methylococcus capsulatus str. Bath
MRVGKFEVDHMALLLVFVPVSIVLEWVHADPVWIFAASALAIVPLAGQMGKATEYLAEHLGSGLGGLLNASFGNAAELIIGFFALRAGLIDVVKASITGSIIGNILLVLGASVVVGGLKHETQYFNRTAAGLGVTLAALSAIALVVPAIFHLVVQGHPEPHERELSLEIALVLFVTYILSLVFTLRTHRHLYVGESSEETDEALGVGAWSMRKSLLILLVATALVAWMSELLVGAVEHAAHDLGMTNVFIGVILVAIVGNAAEHSTAVMMAAKNHMDLAMNIAIGSSIQIALFVAPLLVFAGHVMGQPMDLVFSTFEVVAVAIAVAAVVLIAMDGESNWMEGVNLLAVYVILAIAFYFLP

SEQ ID NO: 20296 - protein, 735 aa, Thermoproteus tenax
MGGQVRLIVVSNRLPVTISPSGEIRESVGGLATAMKSFLGAVNGGRELGLEEVVWVGWSGVPSERESNDLRERLRGMGLEPVPLSSEEVEGFYEGFSNSTLWPLFHGFSEYATYEEKHWRAYRGVNEKYAKAVVALARPGDLVWIHDYHLMLAPAIVREAAEVGVGFFLHIPFPPAELLQLLPSEWRREILEGLLGSDLVGFHTYEYSANFSRSVVRFLGYKVEMGAIAVGHRRVRVGVFPIGIDFDRFYNSSQDPSVVEEMAKLREMLGRAKVVFSIDRLDYTKGVLRRVAAWERFLREHPEWRGRAVFVLVVVPSRTGVPMYEEMKRQIDREVGRINGELGELNWVPIVYLYRFIPSPTLMALYNIADVALITPLRDGMNLVAKEFVASKRDCRGVLILSELAGASKELAEALVINPNDVGGTAEAIAEALSMSEDEQCRRIRAMQERLRMRDVVRWGTDFIYSLISAKSAREEVEKALRYMEELSVDKLKSDFAKAKRRLLLLDYDGTLVPHYPYPHMAVPDGDLLELLSRLAALPETAVYVVSGRGRDFLDGWLGRLPVGLVAEHGFFLKHPGGEWKSLGKVDPSWRQYAKGIMEDFASNVPGSFVEVKEAGIAWHYRNADETIAEKAVVELIDALSNALAGSGLSILRGKKVVEVRPAGYTKGTAAKMLLDELSPDFVFVAGDDETDEGMFEVAPQSAYTVKVGPGPTLAKFRVGDYRGLRSLLEQLRPP

SEQ ID NO: 20297 - protein, 97 aa, Zea mays
  misc_feature (15)..(16): Xaa can be any naturally occurring amino acid
  misc_feature (26)..(26): Xaa can be any naturally occurring amino acid
  misc_feature (31)..(32): Xaa can be any naturally occurring amino acid
  misc_feature (37)..(37): Xaa can be any naturally occurring amino acid
  misc_feature (49)..(49): Xaa can be any naturally occurring amino acid
  unsure (1)..(97): unsure at all Xaa locations
MDYMNGPGRHHLFVXXPSDIPENSIXAMNPXXRDYRXTASPDLRKHWLXDGKKIFRTPSGTPFIVPTTGNWAWEKGLNKTLFLETDPPVLIGKLTWF

SEQ ID NO: 20298 - protein, 234 aa, Silicibacter sp. TM1040
MNDASAHPDDPHYVNRSGWLRAAVLGANDGIVSVSSLVVGVAAADPGPRPVLIAGIAGLVAGAMSMAAGEYVSVSSQSDVEQADIERERRALSETPEAELEELIEIYEGRGLSRPTAEAVAKELTEKDALGAHIRDELGLSEVHTANPLQAALASGATFSVAAAIPVLAAILSPASAIIPVVLIVTIFALAILGALGAIAGAAPIAPAVIRVVGWGVFAMVVTAVIGWLFGVSV

SEQ ID NO: 20299 - protein, 312 aa, Catharanthus roseus
MIGSVKRPVVSCVLPEFDFTESTGLGKKSSSVKLPVNFGAFGSGGGEVKLGFLAPIKATEGSKTSSFQVNGKVDNFRHLQPSDCNSNSDSSLNNCNGFPGKKILQTTTVGNSTNILWHKCAVEKSERQEPLQQRGCVIWITGLSGSGKSTLACALSRGLHAKGKLTYILDGDNVRHGLNSDLSFKAEDRAENIRRIGEVAKLFADAGVICIASLISPYRKPPDACRSLLPEGDFIEVFMDVPLKVCEARDPKGLYKLARAGKIKGFTGIDDPYEPPLKSEIVLHQKLGMCDSPCDLADIVISYLEENGYLKA

SEQ ID NO: 20300 - protein, 218 aa, Arabidopsis thaliana
MEQPMSPGTKSVDLRECMESLLRFSLRSHLNESVPSFDLDLTRDFCLHLLGEATDSTEKSAVYKLLATALSECLASEGDKNSNLEKYSKLIHGLGYDLINMLKEVNFELHVQEPYFTQLKDGLKTVEGRCAVGDYMRISSGDFLLFNKCLLLEVQDVHRYTSFSEMLKVEGLAKVLPGVESIEEGVQVYRNFYSEEKERMNGVVAIRVAKPANQPSAA

SEQ ID NO: 20301 - protein, 218 aa, Enterococcus faecalis V583
MKKFDGVIFDMDGLLFDTELIYYTSTQKVADAMGLPYSKEVYLDYVGISDEEVQENYRRIYASYGHDTVEEFIRRSYDDTLQEFRSGNVPLKPGVVEFLDFLDDQKIPRLVASSNVRPAIEMLLSHAGIQDRFVGIVSAEDVKRAKPDPEIFQKARQLLGTEAPKTLIFEDSFHGVSAAHSAGIPVIMVPDLLQPTEVIQEKTLHVLESLHQAPHYLK

SEQ ID NO: 20302 - protein, 78 aa, Asparagus officinalis
AKKRKKKTYTKPKKIKHKKKKVKLAVLQFYKVDDTGKVIRLRKECPNAECGAGTFMANHKDRHYCGKCGLTYVYQKGE

SEQ ID NO: 20303 - protein, 457 aa, Silicibacter sp. TM1040
MSRRDEGNMVADAGALLPNGDTVSTDAIKVPAGRVNRLMRLGGLAAGIAGGATLQAIAGIARGTRPDARSLLASPANVRRVADELARMRGAAMKIGQLLSMDAGEVLPPELAQILARLRDRAHIMPPSQLGQVLEREWGAGWRRQFKRFDVRPIAAASIGQVHRARTRDGRDLAIKVQYPGVARSIDSDVSNVGALLRLSGLLPKGFDISPYLAEARRQLHEETDYAREGAQLKRFAEWLTDSDTFVVPQYHADLSTAQILAMSYVAGQPIETLADADAATRNRVMTALVDLSLREVFHFGAMQSDPNFANYRYVPQSGRIVLLDFGAARDLHPLVTKSYADMLRSGLVGDDHGIWDAARALGLISDGPDIGSSEARLLALIAGVFEVLRAQEFDFADQTLIRALNEEGMALAQSGYHPPSLPMDVLYLQRKFGGLFLLGNRLRTKLCLRDIIDPYL

SEQ ID NO: 20304 - protein, 772 aa, Bradyrhizobium sp. BTAi1
MNWPGDTSSSKRTAGGNPLSAFFLWIGGFSAIEGLDDESLTERDRRRIRARQIDAVASLVPVTIGINFANAAIILGVFWNHISNAFLTAWGLSIAVAGGLALRGWWRARKSRPKEASERGLRRMTLQAFFLAAVWGSLPLILMPQIEPELQIIVGSLMTGMISGGAFAMSSVPRAGLTYTWTLMLASVGSLLLCGGTTYLVLVVFLLLYSSFMVRHLVSHGNVFLENLKAQIRHERQNETISLLLKEFQENAASWLWQTDAEGRLIDAPQRFADVAQLPLDQLKGERLVDTLEYLCPTDTATLATFADRMARRLSIPEILIHVVVAGGERRRWALTARPARDYEGKFAGYRGFGRDVTERWRAEQAEAESRAKSEFLAMMSHEIRTPMNGVLGLASTLLETKLDPEQRHAVMTIRESGDNLQRILNDILDLSKLNAGKLEFESVDFSPAALVEAVTAIIGVNAKTKSLLVNADIDPKLPPALKGDVARIRQVLINLASNAVKFTERGGLTIAVACRTRDDHKATIEWRVSDTGIGIPADRVGKLFTDFAQADASINRRFGGTGLGLAISRRIIEQMGGAIAVSSVQGEGSTFRFSLTLPWSDKQISDQRGDRVGAGDLKERIEALGRPLRVLIAEDDATNRMVVSKMLQEFAVEKCIVPDGLQAVNAAGEQEFDLVLMDVRMPEMDGITATRTIRAKGGRLAELPIIALTANAFPDDIKQCREAGMSDFLAKPLRKPAMVAAMLKALGPAAPTVAAPSLAPSEDGASVAAEA

SEQ ID NO: 20305 - protein, 399 aa, Zea mays
MDSSLASAAAIADQRQKIEQYRHILASVLSSSPPDISQAKRFLDHMVSDEVPLVVSRQLLQTFAQDLGKLESDAQKEVAHYALTQIQPRVVSFEEQVVVIREKLAELYESEQQWSKAAQMLSGIDLDSGIRMLDDTNKLSKCVQIARLYLEDDDAVNAEAFINKASFLVTNSHQEVLNLQYKVCYARILDLKRRFLEAALRYYDISQIEQRKIGDEEIDENALEQALSAAVTCTILAGAGPQRSRVLATLYKDERCSKLKIYPILQKVYLERILRKPEIDAFAEELRPHQKALLPDKSTVLDRAMIEHNLLSASKLYTNISFDELGTLLGIDPRKAEKIASRMIYEDRMRGSIDQVEAVIHFDDDTEELQQWDQQIAGLCQALNDILDSMSSKGITIPV

SEQ ID NO: 20306 - protein, 237 aa, Thermobifida fusca YX
MGLRTTESEWATPRAALFDLDGTLINSEPRSVAVWARVLQDRGVEPDEALLCKFMGRRGEDVINELAHLFPGESVEDIFADRWRYGQDPDLPPVEQLPESVAFLKYLHAQGVPFALVTSAGRQWAESTLEWLGVRDMFRGIISADDVTVGKPHPEGYLSGAELVGYGPEHIVVFEDTPAGIMAGRNAGMRVVGVTTTHPPQALAHAHLVVEHLGQVGWPQLVLRDPEPPQTALAGQG

SEQ ID NO: 20307 - protein, 741 aa, Arabidopsis thaliana
MASTSSLALSQALLARAISHHGSDQRGSLPAFSGLKSTGSRASASSRRRIAQSMTKNRSLRPLVRAAAVETVEPTTDSSIVDKSVNSIRFLAIDAVEKAKSGHPGLPMGCAPMAHILYDEVMRYNPKNPYWFNRDRFVLSAGHGCMLLYALLHLAGYDSVQEEDLKQFRQWGSKTPGHPENFETPGIEVTTGPLGQGIANAVGLALAEKHLAARFNKPDAEVVDHYTYAILGDGCQMEGISNEACSLAGHWGLGKLIAFYDDNHISIDGDTEIAFTENVDQRFEALGWHVIWVKNGNTGYDEIRAAIKEAKTVTDKPTLIKVTTTIGYGSPNKANSYSVHGAALGEKEVEATRNNLGWPYEPFQVPDDVKSHWSRHTPEGATLESDWSAKFAAYEKKYPEEASELKSIITGELPAGWEKALPTYTPESPGDATRNLSQQCLNALAKVVPGFLGGSADLASSNMTLLKAFGDFQKATPEERNLRFGVREHGMGAICNGIALHSPGLIPYCATFFVFTDYMRGAMRISALSEAGVIYVMTHDSIGLGEDGPTHQPIEHIASFRAMPNTLMFRPADGNETAGAYKIAVTKRKTPSILALSRQKLPHLPGTSIEGVEKGGYTISDDSSGNKPDVILIGTGSELEIAAQAAEVLRKDGKTVRVVSFVCWELFDEQSDEYKESVLPSDVSARVSIEAASTFGWGKIVGGKGKSIGINSFGASAPAPLLYKEFGITVEAVVDAAKSFF

SEQ ID NO: 20308 - protein, 502 aa, Methanosarcina barkeri str. fusaro
MKCINSLRMKAIDRNCECLGLLPVQLMENAGAIIAQHIREKLESGRVLFLAGRGNNGGDAFVAARHLAGSSGYTVKVMLLGKARDIRTKEALHNFSLLKFSRVDVLEITDSSQLEASASEAFQEADLLVDAVFGTGIRGKLRELESMAIDFINREGEAGKTIISIDIPSGLDPDGGDFEKTVHAGLTVTFHHMKTGLLSEKAKEYTGIIKVADIGICADAEQYVGPGDLMMLHRRESGEHKGDSGKILVIGGGPYSGAPALASLAALKAGADLVTVAVPAPVAEIVASYSPNLIVRKLSSNILCPEDLSILMDPINSHDVVVMGMGLGRATETLEAVRKILPFCRKAVLDADALSALSGAIFESLAGNCELIVTPHAGEFTRLRNLETPESLESRIKAVREFSEEKGVVTLLKGKIDITSDGKQTLLNRTGNPGMTVGGTGDVLAGLTGSLFSRNPAFLAAACAVHINGSAGDLAFEKAGNGLLATDVLEKIPEIIKAAEIG

SEQ ID NO: 20309 - protein, 51 aa, Debaryomyces hansenii CBS767
MPSQKSFRTKQKLAKAQKQNRPLPQWIRLRSGNTIRYNAKRRHWRRTKLNI

SEQ ID NO: 20310 - protein, 292 aa, Zea mays
MASAQAVGQGERGHFVLKSGHTIPAVGLGTWRAGSDTAHSVRTAIAEAGYRHVDTAAQYGVEKEVGRGLKAAMEGGINRKDLFVTSKLWCTELAPDRVRPALEKTLKDLQLDYLDLYLIHWPFRLKDGAHMPPEAGEVLEFDMEGVWREMEGLVKDGLVKDIGVCNYTVAKLNRLMRSANVPPAVCQMEMHPGWKNDRIFEACKKHGIHVTAYSPLGSSEKNLAHDPLVEKVANKLDKTPGQVLVRWALQRGTSVIPKSTRDGRIKENIQVFGWEIPEEDFRALCGIKDEVR

SEQ ID NO: 20311 - protein, 433 aa, Clostridium acetobutylicum ATCC 824
MMDDLNNNNVNNNDTDNTTEMNNNNNDNTVNMNMPIEYKKESNKNRKPFNKKIASYIAVGLTCAILGGGISTASALYLLPKSNFFKSTPLYKTMANGGSSSLGYINASPTSTKTSSATGSGLTVSQIVKKVSPAVVGVSTKTTVTQNDFDSFFGSSNGNGSSTQEGMGSGIIFNNDGYILTNYHVIKGADKIAVILNNKKEVSAKVVNYDEANDIAVIKMTGSFTVPGVAELGSSASLNVGDSVVAIGNPLGKEFLGTVTTGVVSAVNREVAVSEGQKQTYIQTDAAINPGNSGGPLVNSFGQVVGINSAKISENGVEGIGFSIPIDTVKSKIQNLSKPILMLGISGEAVDKSTAEQHNIPQGVYIEQIQDFSSAQKAGMQVGDVITKFDGKKVTSTSDIDSIKSKHNSGDTVQVEVYRDDAYKTLSLKLSDK

SEQ ID NO: 20312 - protein, 139 aa, Debaryomyces hansenii CBS767
MRLGMVIVGSDGSQVFGVARIFASFNDTFVHVTDLSGQETIARVTGGMKVKADRDESSPYAAMLAAQDVAQKCKEVGITAVHVKLRATGGTKTKTPGPGGQSALRALARSGLRIGRIEDVTPVPSDSTRRKGGRRGRRL

SEQ ID NO: 20313 - protein, 286 aa, Arabidopsis thaliana
MSGLYNNSSYFSPARAASPQIRSTPEIDSSQYLTELLAEHQKLTPFMQVLPICSRLLNQEMFRVSGMMSNQGFGDFDRLRHRSPSPMASSNLMSNVSNTGLGGWNGLSQERLSGTPGMTMDWQGAPGSPSSYTVKRILRLEIPVDNYPNFNFVGRLLGPRGNSLKRVEATTGCRVFIRGKGSIKDPEKEDKLRGRPGYEHLNEQLHILIEADLPASIVEIRLRQAQEIIEELLKPVDESQDFIKRQQLRELALLNSNNLREESPGPSGGGSVSPFNSSGKRPKTGC

SEQ ID NO: 20314 - protein, 137 aa, Glycine max
  misc_feature (125)..(125): Xaa can be any naturally occurring amino acid
  misc_feature (130)..(130): Xaa can be any naturally occurring amino acid
  unsure (1)..(137): unsure at all Xaa locations
FFFSPCQVIDFPGGKVGFTSEMRFISESPEKRVPCYRVLDDNGEIVKYSNYVQVSKEMGVKMYSDMVTLQTMDNIFYEVQRQGRISFYLTQMGEEAVNIASAAALAPDDIILPQYREPGVLLWRXFTLQXFVHQCFG

SEQ ID NO: 20315 - protein, 154 aa, Brassica napus
MTLRSLILEMRSRSHRVVHDLASAADSTPPASSETNRWSDIPEELLREILIRVEAADGGNWPSRRSVVACAGVCRGWRLLMNETVGVPEISSKLTFPISLKQPGPRESLIQCFIKRNRATQSYHLYLGLTNSLTDEGKFLLAASKLKHTTCTDY

SEQ ID NO: 20316 - protein, 524 aa, Oryza sativa (japonica cultivar-group)
MATCSWAATTAAAAPPRPPARCRSRVAALRRTAAASAAAASCVLAEAPKGLKVEQADAVEPAAAAAARRDVGPDTVASIILGGGAGTRLFPLTRTRAKPAVPVGGCYRLIDIPMSNCINSKINKIYVLTQFNSQSLNRHIARTYNIGEGVGFGDGFVEVLAATQTTGESGKRWFQGTADAVRQFLWLFEDARLKRIENILILSGDHLYRMDYMDFVQKHVDKGADISVACVPVDESRASDFGLMKTDKNGRITDFLEKPKDESLKSMQLDMGTFGLRPEVADTCKYMASMGIYVFRTDILLRLLSLRYADTLSLCSVSFRGHYPTANDFGSEVIPMAAKDYNVQAYLFDGYWEDIGTIKSFFEANLALTDQSPNFYFYDPVKPIFTSPRFLPPTKVENCKVLNSIVSHGCFLTECSVDRSVIGVRSRLEPGVQLKDTMMMGADYYQTEAERFSELSDGKVPVGVGENTIIRNCIIDKNARIGKNVMIMNSQNVQEAERPLEGFYIRSGITVVLKNAVIPDGTVI

SEQ ID NO: 20317 - protein, 421 aa, Petunia x hybrida
MGRSPCCDKVGLKKGPWTPEEDQKLLAYIEEHGHGSWRALPAKAGLQRCGKSCRLRWTNYLRPDIKRGKFTLQEEQTIIQLHALLGNRWSAIATHLPKRTDNEIKNYWNTHLKKRLVKMGIDPVTHKPKNDALLSHDGQSKNAANLSHMAQWESARLEAEARLVRQSKLRSNSFQNPLASHELFTSPTPSSPLHKPIVTPTKAPGSPRCLDVLKAWNGVWTKPMNDVLHADGSTSASATVSVNALGLDLESPTSTLSYFENAQHISTGMIQENSTSLFEFVGNSSGSSEGGIMNEESEEDWKGFGNSSTGHLPEYKDGINENSMSLTSTLQDLTMPMDTTWTAESLRSNAEDISHGNNFVETFTDLLLSTSGDGGLSGNGTDSDNGGGSGNDPSETCGDNKNYWNSIFNLVNSSPSDSAMF

SEQ ID NO: 20318 - protein, 340 aa, Glycine max
MGVPERDPLAQLSLPPGFRFYPTDEELLVQYLCRKVAGHHFSLPIIAEVDLYKFDPWVLPGKAAFGEKEWYFFSPRDRKYPNGSRPNRVAGSGYWKATGTDKIITTEGRKVGIKKALVFYVGKAPKGSKTNWIMHEYRLLDSSRKHNLGTAKLDDWVLCRIYKKNSSAQKVEANLLAMECSNGSSPSSSSHVDDMLESLPEIDDRCFTLPRVNSVRTMQQQDEKFGFQNMGSGFFTDWVNPTDLDSVSEFGSGCQTQGMVNYDCNDLFVPSVPPFGHSHVNYMVGAPPSEEEVQSGVRTQQADGAACFQQNPNARLLPGSGDPFGFGFIMGQQVEFGFRD

SEQ ID NO: 20319 - protein, 219 aa, Magnetospirillum magnetotacticum MS-1
MGHVRRRGLDVVETAVGRVGALACWEHYNPLARYALMARHEEIHAAQFPGSLVGQIFADQMEVTIRHHALEADCFVVNATGWLTNEQVAQVCPDERLRGACRGGNCTAIVSPEGKHLADPLGPGEGILIADMDLALVTKRKRMMDSVGHYARPELLSLLHDDRPASFVHQPIRSQTASRSLDHEQQPASDEPSFDPAGRGGPGRDADGAPDQRVAILRR

SEQ ID NO: 20320 - protein, 211 aa, Penicillium chrysogenum
MSTNITFHASALTRSERTELRNQRGLTIWLTGLSASGKSTLAVELEHQLVRDRRVHAYRLDGDNIRFGLNKDLGFSEADRNENIRRIAEVAKLFADSNSIAITSFISPYRKDRDTARQLHEVATPGEETGLPFVEVYVDVPVEVAEQRDPKGLYKKAREGVIKEFTGISAPYEAPANPEVHVKNYELPVQDAVKQIIDYLDTKGYLPAKKE

SEQ ID NO: 20321 - protein, 298 aa, Escherichia coli O157:H7
MSQNTLKVHDLNEDAEFDENGVEVFDEKALVEEEPSDNDLAEEEVYFARRALRGDVASRRRMIESNLRLVVKIARRYGNRGLALLDLIEEGNLGLIRAVEKFDPERGFRFSTYATWWIRQTIERAIMNQTRTIRLPIHIVKELNVYLRTARELSHKLDHEPSAEEIAEQLDKPVDDVSRMLRLNERITSVDTPLGGDSEKALLDILADEKENGPEDTTQDDDMKQSIVKWLFELNAKQREVLARRFGLLGYEAATLEDVGREIGLTRERVRQIQVEGLRRLREILQTQGLNIEALFRE

SEQ ID NO: 20322 - protein, 638 aa, Candida albicans SC5314
MFTKCSRQAVNRSGRFFSNSSITFQTIGRIKGTEANSKKYLQQKYVVIDHEYDCVVVGAGGAGLRAAFGLAESGFKTACISKLFPTRSHTVAAQGGINAALGNMHKDDWHWHFYDTVKGSDWLGDQDAIHYMTKEAPDSIYELEHFGVPFSRNDEGRIYQRAFGGQTKEFGKGGQAYRTCAVADRTGHALLHSLYGQALRHDCHFFIEFFAMDLLMQDGECVGVIAYNQEDGTIHRFRSHKTVIATGGYGRAYFSCTSAHTCTGDGYAMASRAGLPLQDLEFIQFHPSGIYGSGCLITEGARGEGGFLVNSEGERFMERYAPTAKDLACRDVVSRAITMEINEGRGVGSEKDHMYLQLSHLPAAVLKQRLPGISETAHIFAGVDVTKEPIPILPTVHYNMGGIPTNWQGEVLKKGTDGKDEVVPGLLACGEAACASVHGANRLGANSLLDLVVFGRAVSHTIRDNLTPGAPLHASPADLGKASIENLHRLRNAEGTKSTAEIRLDMQKTMQKGCAVFRTEETLEECVDNINEVDKSFANVKTTDRSMIWNSDLVETMELQNLLTCATQTAASALARKESRGSHSREDYPDRDDVNWWKHTLSYQNSVGSKVKLDYRDVIKTTLDTTDCQPVPPAVRKY

SEQ ID NO: 20323 - protein, 521 aa, Pycnoporus cinnabarinus
MISMGFRLFSLFVAIAAISGTLAAIGPKADLVISDAVVNPDGTPRAAVVVNGAFPGPLISGKKGDHFQLNVINKLTNHTMLKTTSIHWHGLFQEHTNWADGPAFVNQCPIASGHSFLYDFHVPDQAGTYWYHSHLSTQYCDGLRGPLVVYDPHDPQAHLYDVDNDDTVITLADWYHVAAKLGPQFPRGANSTLINGLGRAATDSTSDLTVIAVEHGKRYRFRLVSISCDPNHTFSIDGHNMTIIEVEGVNSKPLTVDSIQIFAAQRYSFVLNANQPVDNYWIRANPSGGTVGFEGGINSAILRYKGAPDAEPTNPTAPTSVIPLVETNLHPLKPMQVPGRSGIGNVDYAKTLNFNFNGTNFFINNATFTPPTVPVLLQILSGAHNAQDLLPAGSVYTLPPHSAIEITMPATTLAPGSPHPFHLHGHVFAVVRSAGSTEYNYHGPIFRDVVSTGLPGDSVTIRFMTDNPGPWFLHCHIDFHLEAGFAIVFAEDVNGIKYANPVPPSWAELCPIYDKLPESDH

SEQ ID NO: 20324 - protein, 141 aa, Arabidopsis thaliana
  misc_feature (46)..(46): Xaa can be any naturally occurring amino acid
  unsure (1)..(141): unsure at all Xaa locations
QFPPKGLKPPKGNNGKNRNPPGPLTSTARRAPRGEFPLGEYWNSKXPWEYINCVCCDTPLFDSSTKFDSGTGWPSYYQPIGNNVKTKLDLSIIFMPRQEVVCAVCNAHLGHVFDDGPRPTGKRYCLNSAALKLNALEKTRD

SEQ ID NO: 20325 - protein, 428 aa, Phaseolus vulgaris
PERVVHARGASAKGFFEVTHDISHLTCADFLRAPGVQTPLIVRFSTVIHERGSPETLRDPRGFAVKFYTREGNFDLVGNNFPVFFVRDGLKFPDMVHALKPNPKSHIQENWRILDFFSHHPESLHMFSFLFDDVGIPQDYRHMDGFGVNTYTLISKAGKPHYVKFHWKATCGEKCLLDEEAVRVGGFNHSHATQDLHDSIAAGNYPEWKLYIQTLDPEQEDKFDFDPLDVTRICPEDVLPLQPVGRMVLNKNIDNFFAENEQLAFCPAIIVPGVYYSDDKLLQTRIFSYADSQRHRLGPNYLQIPANAPKCAHHNNHHEGFMNFMHRDEEVNYFPSRYDPVRHAERIPVPPRILDGKREKCMIEKENNFKQPGERYRSWASDRQERFLRRWVDALSEPRVTHEIRSIWISYWSQADRSLGQKIASHLN

SEQ ID NO: 20326 - protein, 346 aa, Synechocystis sp. PCC 6803
MLGKIMLNYTKNIRAAAAQISPVLFSQQGTMEKVLDAIANAAKKGVELIVFPETFVPYYPYFSFVEPPVLMGKSHLKLYQEAVTVPGKVTQAIAQAAKTHGMVVVLGVNEREEGSLYNTQLIFDADGALVLKRRKITPTYHERMVWGQGDGAGLRTVDTTVGRLGALACWEHYNPLARYALMAQHEQIHCGQFPGSMVGQIFADQMEVTMRHHALESGCFVINATGWLTAEQKLQITTDEKMHQALSGGCYTAIISPEGKHLCEPIAEGEGLAIADLDFSLIAKRKRMMDSVGHYARPDLLQLTLNNQPWSALEANPVTPNAIPAVSDPELTETIEALPNNPIFSH

SEQ ID NO: 20327 - protein, 365 aa, Ipomoea batatas
MVGGGDFLAVQTHGGQYVQYDIFGNLFEVTSKYAPPITPIGRGAYGIVCSALNAETNEMVAIKKIADAFDNYMDAKRTLREIKLLRHLEHENVIAIKDVIPPPLRREFNDVYIATELMDTDLHQIIRSNQGLSEEHCQYFLYQILRGLKYIHSANVIHRDLKPSNLLLNSNCDLKICDFGLARTNLDNEFMTEYVVTRWYRAPELLLNSSDYTAAIDVWSVGCIFMELMNRKPLFQGKDHVHQMRLITELLGTPTDSDLGSIQNENARRYIRQLPLRPRQQLANGFPHVHPLAIDLMDKMLTFNPSKRITVEEALAHPYLAQLHDKSDEPICPVPFTDFEKQAYGEEQIKDMIYQEALAMNPGYA

SEQ ID NO: 20328 - protein, 279 aa, Pseudomonas aeruginosa UCBPP-PA14
MTTAAPTPSLFGQCLAEFLGTALLIFFGTGCVAALKVAGASFGLWEISIIWGVGVSMAIYLSAGVSGAHLNPAVSIALWLFAGFEGRKLPFYITAQVAGAFCAAALVYTLYSSLFIEFEQAQNIVRGSQDSLALASVFSTYPHPALSVGQAFLVEVVITAILMAVIMALTDDGNGLPRGPLAPLLIGLLIAVIGSAMGPLTGFAMNPARDFGPKLMTYLAGWGPIAFTGGREIPYFLVPIFAPILGACLGAGGYRVLIARHLPSAAAPAEAEPEKVRAS

SEQ ID NO: 20329 - protein, 355 aa, Thermosynechococcus elongatus BP-1
MKRLVSIVFLLFIPLSIAAEQLEWGALTVFILAALAIVPLAIWLSTATEEVALATGPTIGGLLNALFGNATELIIAIVALRAGLVDIVKASITGTLMANLLLVMGLSMLLGGIRYKEQSFAPVVARVNASSMTVAIAAMLLPAMVIYTSDRVPPGAISQMSVVAAIILILVYGLTLIFSLKTHSYLYDVSEVELGGEAGHHEKPNLPLWLTVLIIATIGVAFESEIFVGAVEEATAGLGLTPLFTGVILLPLVGGAAEYVTAVGVALKNNMDLSVSIALGSSLLVALLVAPILVLIGQFIGQPMDLNFSLFEVVTVIIAVVIANVISLDGRSNWLEGALLLATYGILGTAFFFHT

SEQ ID NO: 20330 - protein, 591 aa, Listeria innocua Clip11262
MEKAGIYHQPASSYAYSYDAKTLHIRIRTKRLDISKVTLIAADPYLWKNEKWQSESYSMRKIAETEEHDYWFFAITPEHRRLQYGFLLTDTEGETTFYGGRGFFEPTEANLATMDYYFKFPFIHAVDTFEAPEWVGNTIWYQIFPERFANGNPAISPENALPWGSKDPNTTDFFGGDLEGIIQHLDYLAELGINGVYLTPVFEAPTNHKYDTIDYKKIDPHFGDKETFRKLVQEAHKRGIRIMLDAVFNHIGDTSLEWQDVVEKEEKSAYRDWFHIHSFPVRQNENGNIEGEPTLSYDTFAFTTHMPKLNTANPEVQKYLLDIATYWIREFDIDGWRLDVANEVDHAFWKEFKKAVQAEKEDIYILGEIWHDSWIWLLGDEFHAVMNYPFTQTIIENFIEEKITPEQMVSGINEQYMRYPNQVNEVMFNMLDSHDTARILTRANNDEDKVKQALAFMFAHTGSPCIYYGTEIGMDGGNDPGCRKCMEWDETKQNQDMLAFTKQLIALRKDNQAIITSGELNWLGASSETGITAFSKELNGEKLHFLFNQAKEDKDFTISFENTATDIWNNRAVTENLVVPAKGFLVIKENS

SEQ ID NO: 20331 - protein, 132 aa, Triticum aestivum
MGRPPCCDKLGVKKGPWTPEEDIILVSYIQEHGPGNWRSVPVSTGLMRCSKSCRLRWTNYLRPGIKRGNFTSHEEGVIVHLQSLLGNRWAAIASYLPRRTDNDIRTMEPPSRKLRSTAWEHFAVRRYHQRER

SEQ ID NO: 20332 - protein, 573 aa, Debaryomyces hansenii CBS767
MSSSSSSGSYSLSKISPKLLRRIYRACRPSLNEPNLALNLEICDYVNAKQGSTPREAAIAVAKLISQRDSQTSELAISLLDNLVKNCGYPFQLQISRKEFLNELVKRFPERPPLRYTRVHRLILSQLEEWYQTICKTSKYKEDFGYIRDMHRLLSNKGYIFPEVKVEDAAVLNPSDNLKSLEELQKEESIVHSAKLQELIRRGRPQDLQEANKLMKIMAGFKDDNIEENKKQVTDDIARLKRKVEILGEMLHNIEASGAKIDDSNEAVIELYSSVKSSQPIITKIVEEHDDDNKVNELLALNDDVNQLVQKFQLLKSGDINEASKIQVQSGSSNNDTLNLIDFDDDAPISNDKSGRDDQGYNDLLSDLSNLQFTNTDNNTNVNLFGAGGSIALGGNPQTSIQQPLPTSGNLSNFDILSGLNSPSPQLQSNTTTSTNNQLDPFGLNFPSSTPSHVQNQTNFQSTNLINQSSALKIETGIFNSSTSTNLSGKLLFSNLQSTALTNFKFMLAVPKSCKLNLKPQSSDVIHGNNKQSVTQEFSIENNMNKQLRVKWKAEYNIGNEHREETGVSLLNN

SEQ ID NO: 20333 - protein, 250 aa, Arabidopsis thaliana
LRCSRGSYLIEAMRPLSSSLRPSSSVSFSTGKPIKRAYDGLLLDAGGTLLQLSKPVHETYASLGQKYGLKTTPAEIKEGFKRVFSAPWPEKLRYQGDGRPFWKLVVSEATGCSDNDYFEDVYQYYANGEAWHLPEGAYETMSLLKDAGVKMAVVSNFDTRLRKLLKDLNVIDMFDAVIVSAEVGYEKPDERIFKSALEQISVDVNRAVHVGDDEGADKGGANAIGIACWLWGEDVQTFSDIQKRILVSEL

SEQ ID NO: 20334 - protein, 446 aa, Bacillus licheniformis ATCC 14580
MSFLIKPDLHASYPVVQYAKGSWIVDHSGKRYLDGCSGAVTCNLGHGVQEVIEPLKEQLDAVSFVYRSQFTSEPAEQLAELLAEWLPGDLNWSFFVNSGSEAVETAMKIAVQYWQEKGQNDKTIFLSRWNSYHGITNGALSLSGFYERRYRFTHMLHKYPAASAPNCYRCRLSHPECQEACVKEIELAVKRIGKQFIAGFVAEPVIGAAGAAITAPAGYYKKVKEICEDNEILFIADEVMSGIGRTGRMLAIEHWGVTPDIAVLGKGLSAGYSPIAAAVMSDGMMETVKNGSGAIMSGHTYSANPFSARAALAVLRYILKHDLVKQAEIKGEKLKRMLKEVMKQSSIIGDVRGKGLLLGIEFVADQKSKKTFPSSMPVSALVISEAKKRGLLLYPSQAGIDGGGGDAVIIAPPLTISDKEMEELIEIFKHAVYEIEKQAEKVMRER

SEQ ID NO: 20335 - protein, 197 aa, Solibacter usitatus Ellin6076
MATKQDTADDRQNAQRQENTQIARKSPGWMFRNEPGILGSRGSFFTNPYQLMRRMTEEMDRTFGFGGSGEVGPWSPATEVVERDGKYIVRSELAGLKPEEVKVEVTDGELIIQGERKSEHEETQGRYRRSEHRYGQFYRSIALPEGVDPAQVHARFENGMLEVTIPAPPQQQSQRRQIPIEGTSGGRNPNPSPEPHG

SEQ ID NO: 20336 - protein, 151 aa, Bacillus licheniformis ATCC 14580
MTNNKEERLKQLTRMQYEVTQKNGTEPPFQNEYWDLHEDGIYVDIVSGKPLFSSLDKFDAHCGWPSFTKPVDAGEIEEKLDTSHGMIRTEVRSKSADSHLGHVFPDGPGPDGLRYCINSAALRFVPKDDLEKEGYGEYVKLFERKKSGEES

SEQ ID NO: 20337 - protein, 181 aa, Bacillus licheniformis ATCC 14580
MAEKRELATFAGGCFWCMVKPFDEQPGILKVESGYTGGHTENPTYEEVCSNTTGHREAVQITFDPRCLSYEKLLELYWQQIDPTDSGRQFTDRGESYRTAIFYHNDKQRKLAEESKKKLGESGIFKDPIATDILEAGPFYPAEEYHQDYHKKHPERYTQYRIGSGREGFLQQHWGRKHDEQ

SEQ ID NO: 20338 - protein, 494 aa, Secale cereale
MDPCKFRPSSSFDTKTTTTNAGQPVWNDNEALTVGPRGPILLEDYHLLEKIAHFARERIPERVVHARGASAKGFFECTHDVTGLTCADFLRAPGARTPVIVRFSTVIHERGSPETIRDPRGFAVKFYTREGNWDLLGNNFPVFFIRDGIKFPDVIHAFKPNPKSHVQEYWRVFDFLSHHPESLHTFFFLFDDVGIPTDYRHMDGFGVNTYTFVTRAGKSHYIKVHWRPTCGVSCLMDDEATLVGGKNHSHATQDLFDSIDAGNFPEWKLFVQVIDPEEEDRFDFDPLDDTKTWPEDLVPLQPVGRLVLDRNVDNFFNENEQLAFGPGLVVPGIYYSDDKMLQCRVFAYADTQRYRLGPNYLMLPVNAPKCGFKNNHYDGAMNFMHRDEEVDYYPSRHAPLRQAEPASFPVPTRPVVGKREKTRIKKENDFVQPGERYRSWAPDRQDRFVRRFADALAHPKVSHELRVIWIDFLSKCDKSCGMKVANRLNVKPSM

SEQ ID NO: 20339 - protein, 618 aa, Solibacter usitatus Ellin6076
MNERSLARRGVRSVLLALRLRGPLSADPTAQILHALVLALTIWSAIWTIFTLPLYPNLMARLVRLRFIMVADLVPVTTLILLRLGHFRQATYVYLTGQWAQATYNIAINGSIEITSTAFYITLPILATWLLGFREAFWTAGVCLGSALILALRQGPTSVFLPTAPLRPPLLIWANLVQLTLTAAAPVAHILQTLQQYKEHLEQVVEQRTAELVIARDQADSANRAKSTFLANMSHELRTPLSVILASSDLLNESDPTPDQREDIDRISHSGKHLLGLIDNVLDVAKIESGKQELAIAASDLLSTVRMVIEMMRGRAEDKHLALIYYQAPDVPRYVRVDAPKLRQILINLLGNAIKFTREGAVELRLSAKPGDEPGYAQFCFDINDTGVGMPQHDLDRIFEPFQQVGNPSQQAGTGLGLTITRRFVELMGGTLLVESEVGRGSCFVVKLPLELARASETYGVELAAGYPFILESGQPDWRVLIVEDDPESATVLQKMLTRAGFQVRVAENGVLAVEAFQHWQPHFIWMDLGLPQLSGTEATRRIRQLDGGAETKIAAITAAADASGYDGMRCAGFDDIAFKPFRQTEIFFCMARHLGVCYSSSEGEGKNSHQQAGGRPS

SEQ ID NO: 20340 - protein, 286 aa, Oryza sativa
MAKAAAEMDVGGGEGRRWKRTRGRQRIEMKLIENKEARQVCFSKRREGVFKKASELSVLCGARVAVVFFSPAGRPHCFGHPSVSAVADRFLLGRSPADAAAAAAEEEEAVVREFNRVEERLKDALGAAARRRDALDEAARVAGVWNDADVRRAGLADLVSMLAALQRVQAEASERVHDIIVEEAMTHYTGAAAAAANLIDYLDAGPLVSHSPGSHDTTTKLIGGNAVHAPPLSFPPMIMPPPLPPQFSHGFGYTDLAAGYGYNLDHGHGAAYETEEFHNAAACDFF

SEQ ID NO: 20341 - protein, 462 aa, Renibacterium salmoninarum
MSPTARKISATAAPEDSASAETSTARTRAAVKDAPVAQTAAVKTLAAKKPSAKKVTEIPDAVTIEEKLTPAQKRAATAAAKKAALSEDDAAVKPTRGRKPKADDSAESADDESTEGVADSAETETADAPEEAEETAGSGFVYSDADDDDAPVQQVMSAGATADPVKDYLKQIGKVALLNAEQEVDLALRIEAGLYAEEKLAADDGKITEKLNREYQWVIHDGKRAKNHLLEANLRLVVSLAKRYTGRGMLFLDLIQEGNMGLIRAVEKFDYTKGFKFSTYATWWIRQAITRAMADQARTIRIPVHMVEVINKLARVQRQMLQDLGREPTPEELALELDMTPEKVVEVQKYGREPISLHTPLGEDGDSEFGDLIEDSEAVVPADAVSFTLLQEQLHSVLDTLSEREAGVVAMRFGLTDGQPKTLDEIGKVYGVTRERIRQIESKTMSKLRHPSRSQVLRDYLD

SEQ ID NO: 20342 - protein, 942 aa, Yersinia pseudotuberculosis IP 32953
MTKYSLRARMMILILAPTLLLGLLLSTSFMVNRYNELQNQIVSAGTNIIEPLAVASEYGMSFRNRDTVRQLINLLHRRHSNIVRSISVFDVDNKLFVTSNYNYNSSQLRLPPGEPVPDSLMLSYRGDSLILRMPIVSESNLSSEQASGQGESDQILGYIAIDLDLQSVRLKQYKEIFISTLLLLFCMCVAILFAYRLMRDVTGPIRNMVNTVDRIRRGQLDSRVEGHMLGELNILKNGINSMAMSLAAYHEEMQQNIDQATSDLRETLEQMEIQNVELGLAKKRAQEASRIKSEFLANMSHELRTPLNGVIGFTRQTLKTSLTPTQTDYLQTIQRSANNLLCIINDVLDFSKLEADKLILEHIPFSLRGTLDEVIILLAHTAHEKGLELTLHINNDVPDQVLGDAMRLQQIVTNLLGNAIKFTEEGNIDILVVVKAIASQQVTLMVEIHDTGIGISESQQAQLFQAFRQADASTSRRHGGTGLGLVITERLVKEMGGNISFQSQMSCGSIFRFHLTLELNESIPYRQPDMAHLEGKQLAYIERNSTAARATINILNTTPLQVTHRQSLAQLPEQHYDFLLVGVPIPFRNNMAIHQDKLLTALKIADHVILALPSQSQVEAEQLKQIGAKGCLLKPISSIRLIPLLLAEDTHSKVPSEEQPRKQPKLPFRVMAVDDNPANLKLIGTLLEEQIEETVLCDSGAMAITYAREHTLDIILMDIQMPEIDGIRASEIIHQIPHHQETPIIAVTAHAVKGQQEQLLRLGMADYLAKPIDEARLLQVLSRYQSDNPPLSTASTASTASTASTASTASTASTASTAESLPLPVPKGAGVIDWAQAVRQAANKEDLARDLLTMLLEFMPQITARVQAILAGADDGDILNLVHKFHGSCACSGVPRLRQLCMTIELQLRQQVNLQDLEPEWLELLDEIENVSEAAKTYLRTE

SEQ ID NO: 20343 - protein, 355 aa, Halobacterium sp. NRC-1
MTRGEARRPPQEFDRVLSSMCTTPHPAAREAAQAFLATNPGDPETYPAVAERERDAVALLGEIVGLSSPHGYIAAGGTEANLQAVRAARNRADADAVNVVAPASAHFSFQKAADVLGVELRLAPTDGDHRADVAAVADLVDGDTAVVVGVAGTTEYGRVDPIPALADIAAGVDANLHVDAAWGGFVLPFTDHDWSFADAPVNTMAIDPHKMGQAPVPAGGFLARDPETLDALAIETPYLESDTQPTLGGTRSGAGVAGALASLRALWPDGYREQYERTQGNAEYLAAELAARGYDVVDPELPLVAADMPDAEFQALREEGWRISRTASDALRVVCMPHVTREMLAAFLDDVDALA

SEQ ID NO: 20344 - protein, 560 aa, Candida albicans SC5314
MVSNTLPEHESNTSLHDMEKKQLADQLGDIHYKILPIKKLLICLFSLSLALFLSFVDQTSVTIALATIGKDLNAETTINWAPTASLLANCICQVLFGRLSDIFGRKVMLITCLICLSLGELICSFAKSGVEFFVFRALTGLSCGGIQSLCMVILSDVVTLKQRGKYQGILGASVGLGNSIGPFMMAAFIEHNTWRNFYRMMCPINILAFVIIAIFIDTKQQTKQLNQLLSKSEQFKKLDYLGMLIGCSGLTLLLVSISSGGSTYNWNSAPVISMFVIGGILLITFLFVEWKVPELPMIPLNLFSRFSLGLILGSNFFFGMAYYGFTFYIAYYYQIVLGLDSIHSAILMLPLVIPQSVVSAIAGQIISYTGHYIYVIIFGYSLWTLSCGLTLLFDSNTNYGVITVVLLLMGTGVACTFQPTMVAAQSQAKKSERAVVISCRNVIRSLGGAVGLAVASLIITNSLLKEITKQENRQDISSTSSVPTGYLMYLKTHVYSKVDTTQLTADQVLIVRQMYMQAIRNFFYLTIPLLALCLISSLFVKDKGLQCIDEEPEKEEKELQ

SEQ ID NO: 20345 - protein, 552 aa, Lycopersicon esculentum
MDKYIVPSFVVSLLGFLLLYVLRPRTPNYKKMDLKSTRKCETHNVISRKLEKGTDADVIIVGAGVAGAALAHTLAKEGRNVHVIERDLTEPDRIVGELLQPGGYLKLIELGIEDCVEDIDAQRVVGYALFKDGKSTNVSYPLKNFHSDVAGRSFHNGRFIQKMREKAATLPNVRLEQGTVTSLIEENGSIKGVQYKTKAGQELKAHAPLTVVCDGCFSNLRRSLCDPKVDVPSCFVGLVLELENDRLPYPNHGHVILADPSPILFYPISSTEIRCLVDVPGQKLPSLANGDMANYLKTMVAPQVPPELRDAFLSAIDKGHIKTMPNRSMPAAPYPTPGALLLGDSFNMRHPLTGGGMTVALSDIAVLRNLLMPLQDLNDADELCKYLESFYTLRKPVASTINTLAGALYKVFCASPDQARREMRDACFDYLSLGGTCSTGPVALLSGLDPNPMSLVLHFFAVAVYGVGRLLVPFPSPKKLWIGAKLILLKFLHTRSPCLKVLTILACMLFFFVQSASGIIFPIIKAEGIRQMFFPTTIPAYHRAPPVKTESD

SEQ ID NO: 20346 - protein, 467 aa, Lycopersicon esculentum
MKLLSKKAMCNSHGQDSSYFLGWEEYQKNPYDEIRNPKGIIQMGLAENQLSFDLLESWLTLNPDASAFKRNGHSIFRELSLFQDYHGLPAFKDALVQFMSEIRGNKVSFDSNKLVLTAGATSANETLMFCLADPGHAFLLPTPYYPGFDRDLKWRTGAEIVPIQCTSSNGFRITESALEEAYTEAERRNLRVKGVLVTNPSNPLGTTLTKKELQLLLTFVSTKQIHLISDEIYSGTVFNSPKFVSVMEVLIENNYMYTDVWDRVHIVYSLSKDLGLPGFRVGAIYSNDDRVVSAATKMSSFGLISSQTQYLLSALLSDKKFTKNYVSENQKRLKKRHEMLVGGLKQIGIRCLESNAGLFCWVDMRHLLSSNTFDGEMELWKKIVYEVGLNISAGSSCHCTEPGWFRACFANMSEDTLNIAIQRLKAFVDSRVNNKDDIQNQQQCSNKKKSFSKWVFRLSFNERQRER

SEQ ID NO: 20347 - protein, 349 aa, Thermoproteus tenax
MAQIYTGPKTVYISIRGREIQRKKLVRAAQRLLRESEANGLLSRYNIVERFQRKNLILRSAIFVGVRVAVIPVGGEAVRLRPLTVETSKAMVRILNRPLMELTVVGLARQGVEEVIMGVRGYYNYKDIYDYFGEGHWIEKEYGVRVRLRYMPRAETRGNAEAVKISLEYYGIREPVLVVQGDNLFEIDLADFYRYYRSKKAFMAIALKEEERLEEFGVAAVDEDMRILKFVEKPKRREDAPSKLVNTGLYLLSEDFLSFFEGEVGSKLLREGKMDFGSNVIPAAIEAGLPVYGYHTKGYWFDVGTPERYLAAAQYLLAKLSPADLSSEEVLPKVYIQGTSPESLAFKRS

SEQ ID NO: 20348 - protein, 402 aa, Triticum aestivum
MEHSAPAPEPMLLDEQPPTAVACEKKQQDGEAPYAEGNDAMTGHIISTTIGGKNGEPKQTISYMAERVVGTGSFGIVFQAKCLETGETVAIKKVLQDRRYKNRELQLMRSMIHSNVVSLKHCFFSTTSRDELFLNLVMEYVPETLYRVLKHYSNAKQGMPLIYVKLYTYQLFRGLAYIHTVPGVCHRDVKPQNVLVDPLTHQVKICDFGSAKVLVAGEPNISYICSRYYRAPELIFGATEYTISIDIWSAGCVLAELLLGQPLFPGESAVDQLVEIIKVLGTPTREEIRCMNPNYTEFRFPQIKAHPWHKVFHKKMPPEAIDLASRLLQYSPSLRCTALDACAHPFFDELREPNARLPNGRPFPPLFNFKHELANASQDLINRLVPEHVRRQAGLAFVHAGS

SEQ ID NO: 20349 - protein, 79 aa, Synechocystis sp. PCC 6803
MRQFCAHFPLVCQKNLIIPTYWSELMDIVKIICAILLPPLGVFLQVGIGKDFWINLLLTIFGLYILGLVHAIWVIARER

SEQ ID NO: 20350 - protein, 539 aa, Zea mays
  misc_feature (44)..(44): Xaa can be any naturally occurring amino acid
  unsure (1)..(539): unsure at all Xaa locations
MGNCCVTPKAADDAGGGKKPKEPKQKKGKKPNPFSIEYNRSGPXSAPKLVVLRDPTGRDIAARYELGAELGRGEFGVTYLCTDRASGEALACKSISKKKLRTAVDLEDVRREVEIMRHLPKHPNVVTLRDTYEDDNAVHLVMELCEGGELFDRIVARGHYTERAAALVLRTIVEVVQMCHKHGVMHRDLKPENFLFANKKESAALKAIDFGLSVFFTPGERFSEIVGSPYYMAPEVLKRNYGPEVDVWSAGVILYILLCGVPPFWAETEQGVAQAIIRSVIDFKRDPWPRVSDNAKDLVRGMLNPDPKRRLTAHQVLGHPWLQNIKKAPNVNLGETVKARLQQFSVMNKFKKHALRVIAEHLSVEEAADIKDMFEKMDLNKDQMLSFEELKLGLHKFGHQMPDADVQTLMEAADADGNGSLNYGEFVTLFVHLRKIGNDEHLHKAFAYFDRNQSGYIEIDELRESLADDLGQNREEIINAIIRDVDTDKDGKISYDEFATMMKAGTDWRKASRQYSRERFTSLSLKLQKDGSLQMTSTR

SEQ ID NO: 20351 - protein, 188 aa, Zea mays
MHAPPLVTFAGGACPTTASASPSPWLASPRDAIFAAPARPLRSRRGTLRLEAKAAWRAAGGGRGPRVPAKGAVLASYMGAEEVVGPSSLLDEEEFISHIRKELDNGKLPADVASNLEELYYNYRNAVLQNGDPNAYEVMLSNMMTLFDRVLLDVQNPFNFPPYHKALREPFDYYMFGQNYIRPLVDFR

SEQ ID NO: 20352 - protein, 193 aa, Betula pendula
LGSGYSLEVVCLSCGQAVKFVCDRRSVKHPVICSESGRAIVSHHSVLIFEAVSASAYGSQALSTSSFQHFVEGLSDEALADIGNLNAAAIKGEHETCLLYADQLKQRCVDQFKDGSLGMEQLAAVDGLCDMVSKAIGTTDPVRTYHVNLSVFTSIPDFWGIGQLFPIVPIHRHDQRPSVKGILSDLTQSTPAR

SEQ ID NO: 20353 - protein, 118 aa, Glycine max
  misc_feature (65)..(65): Xaa can be any naturally occurring amino acid
  unsure (1)..(118): unsure at all Xaa locations
MLQLLLFEQQAFFPDNFTVLGRAMIEPNLLSASKLYTNISFYELGPLLGIPPPKAEKIASRIIFXDRMRGFIDQVEAVIHFSDAPEKLHRWGPQIVGLCQALHHVLDSMAKKGFPVPV

SEQ ID NO: 20354 - protein, 130 aa, Triticum aestivum
CDVLVPCALGGVLNKDNAPDVKAKFIIEAANHPTDPEADEILAKKGVVVLPDIYANSGGVVVSYFEWVQNIQGFMWAEEKVNDELEKYMSSAFQHMKAMCKSLDCDLRMGAFTLGVNRVARATLLRGWEA

SEQ ID NO: 20355 - protein, 578 aa, Oryza sativa
MVTPLSNSTKSNEQCDIERKHDGSIDSVAKRKGSLCQQVANSDGERRTRYSGPNLPEVTCKHLPSYWPLLPMKDYQGYVLSLVNHRVTIGNLEVMRTAYRLLSFPTTNPKGYGKATRLFSLPIDQAVTLTDIWCHIHSLMPFKDAARAACVSRAFRRSWQHRPNLIFCIGTLGLDFINKIDRIIKNHSDIGIKSLQLEYDTFCNARRSASISYHLNNWLQIAVTPWIEELILTLSLSSYNVDYNFPCSLLSDGRGSSLRHLYLGSCFFHPTVNLELRNLTRLHLVTVHITGDEFGCLLLNSYALERLELKYCYGIICLKIPCLLQRLSHLEVFECRMLQAIENKAPNLCSFDLGARQVRLLLGESLQMKTLSLDYPSAVYYARAELPSNVPNLEILTICSDHEMVDTPMLPSKFFYLKCLTIDLAWRLSPAYDYFSLISFLDASPSLETFCLEISQDRMENELIIGDMSHMRQMLEHRHDNLQSVEIIGFCYTKSLIELTCHILDNTTSLKHLKLDTTRDVFSCSTGKHDKCFHMGKDMLTEAKKAVLAIETYIEPKVPSTVMLSVVKPCNRCHVAES

SEQ ID NO: 20356 - protein, 409 aa, Rhodopseudomonas palustris CGA009
MQYNQFFQDALTRLHDERRYRVFADLERMAGRFPHATWHSNSGPRDVVIWCSNDYLGMGQHPKVVGAMVETATRIGTGAGGTRNIAGTHHPLVQLEQEIASLHGKEAALLFTSGYVSNQTGLSTLGKLIPNCLILSDALNHNSMIEGIRQSGCERVVWRHNDTAHLEELLIAAGPDRPKLIAFESLYSMDGDTAPLAKICDLAEKYNAMTYCDEVHAVGMYGAHGAGVAERDGVMDRIDIIEATLAKAFGCLGGYITGKNEVIDAVRSYAPGFIFTTSLPPPICAAATAAIKHLRSSTWERERHQDRAARVKAVLNNAGIPVMPTDTHIVPVFVGDAEKCKKASDLLLEQHNIYIQPINYPTVARGLERLRITPSPYHDDKLIDALAEALVQVWNELGLPLGAKAIAAE

SEQ ID NO: 20357 - protein, 448 aa, Streptococcus pneumoniae TIGR4
MTSAKEYIQSVFETVKARNGHEAEFLQAVEEFFNTLEPVFEKHPEYIEENILARITEPERVVSFRVPWVDRDGKIQVNRGYRVQFNSAVGPYKGGLRFHPTVNQGILKFLGFEQIFKNVLTGLPIGGGKGGSDFDPKGKTDAEVMRFCQSFMTELQKHIGPSLDVPAGDIGVGGREIGYLYGQYKRLNQFDAGVLTGKPLGFGGSLIRPEATGYGLVYYTEEMLKANGNSFAGKKVVISGSGNVAQYALQKATELGATVISVSDSNGYVIDENGIDFDLLVDVKEKRRARLTEYAAEKATATYHEGTVWTYAGNYDIALPCATQNEINGEAAKRLVAQGVICVSEGANMPSDLDAIKVYKENGIFYGPAKAANAGGVAVSALEMSQNSLRLSWTREEVDGRLKDIMTNIFNTAKTTSETYGLDKDYLAGANIAAFENVANAMIAQGIV

SEQ ID NO: 20358 - protein, 471 aa, Lycopersicon esculentum
MKLLSDMASCNSHGQDSSYFLGWQEYEKNPYDEIQNPKGIIQMGLAENQLSFDLLESWLAQNPDAAGFKRNGESIFRELALFQDYHGLPDFKNALVQFMSEIRGNKVTFNPNKLVLTAGATSANETLMFCLANPGDAFLLPTPYYPGFDRDLKWRTGAEIVPIQCTSSNGFRITQSALEESYKLAKTRNLRVKGILVTNPSNPLGTTLTRNELELLVSFVAEKGIHLISDEIYSGTVFNSPKFVSVMEVLIENNYMYTEVWDRVHIVYSLSKDLGLPGFRIGAIYSNDAVIVSAATKMSSFGLISSQTQYLLSAMLTDKKFTKKYISENQKRLKKRHAMLVKGLESSGISCLESNAGLFCWVDMRHLLKTNTFEAEIELWKKIVYEVRLNISPGSSCHCTEPGWFRACFANMSEDTLNLAIQRIKSFVDSSDVIGINVDQSNQTNQNTSTSPKKKLFAKWGFRLSFNDRER

SEQ ID NO: 20359 - protein, 231 aa, Silicibacter pomeroyi DSS-3
MTNKLIAEVFGTFWLVLGGCGSAVLAAGVADVGIGWAGVSLAFGLTVLTMAYAVGHISGGHFNPAVSLGLMVAGRFDGKLLLPYWAAQVVGAILAALVLYIIVSGGAGFTGVGGFASNGYGEASPQGYSMMSGLVIEVVLTAFFLIIILGATSKGAPAGFAPIAIGLGLTLIHLVSIPVTNTSVNPARSTGVALFADGPALAQLWLFWVAPLIGGALGAVLWKVIAGKDAD

SEQ ID NO: 20360 - protein, 721 aa, Anaerobranca gottschalkii
MINKKNSIGKAICICLSILLLFGVLSIFQPVTNATQNSLEHIKEHTSVNNQVNYATDVIYQIVTDRFLDGDKYNNPTCENLYSEDGADLRKYLGGDWRGIIQKIEDGYLPDMGISAIWISSPVENIYAVHPQFGTSYHGYWARDFKRNNPFFGDLNDFRELIAVANEHDIKVIIDFAPNHTSPAEVNNPNYAEDGNLYNNGEFVASYSNDLNEIFYHFGGTDFSTYEDSIYRNLFDLAGLNLNNNFVDQYLRDSIKFWLDLGVDGIRVDAVKHMPLGWQKSFVDTIYNHKPVFVFGEWYLGKDEYDPNYYHFANNSGMSLLDFEFAQTTRSVFRNHEKNMFDLYDMLKNTENNYERVVDQVTFIDNHDMDRFHYDGATKRNVEIGLAFLLTSRGVPTIYYGTEQYLTGNGDPYNRKPMSSFDQNTKAYKIIQKLAPLRKSNPALAYGTTQERWLNNDVIIYERKFGNNIVLVAINRNLSQSYSITGLNTKLPEGYYYDELDGLLSGKSITVNPDGSVNQFIINPGEVSIWQFAGETITPLIGQVGPIMGQVGNKVTISGVGFGDKKGTVNFGEIDATIISWTNSVIQIEIPSVPAGNYEITVSSEGGEKSNSYNFEVLTNKQIPVRFVVNNAYTSWGQNVYLVGNVHELGNWDPNRAIGPFFNQVVYQYPTWYLDISVPADTTLEFKFIKIDESGNVIWQSGLNRVYTTPEKGTDTIYFEW

SEQ ID NO: 20361 - protein, 219 aa, Lilium longiflorum
VEQFSPVPYLATLLNCMLWVVYGLPLVHPHSTLVLTINGLGLIIELTYVLLFLLYSNGRARIRVLAMLLTEIVFVGLITVIVLSTAHTLVTRSLIIGVLCVFFGTMMYAAPLSVMKLVIQTKSVEYMPLFLSVASFLNGICWTTYALIRFDLFITIPNALGTMFAVAQLILHAMYYKSTKIQMEAQKRKLEMGFEEVMAPVENTEKIRGASQTGKYPPV

SEQ ID NO: 20362 - protein, 362 aa, Rhodopseudomonas palustris CGA009
MFRAGAPRWSNCLMTSTAASKIPVTVLTGYLGAGKTTLLNRILSENHGKKYAVIVNEFGEIGIDNDLIIGADEEVFEMNNGCVCCTVRGDLVRILAGLMKRKGKFDAIIVETTGLADPAPVAQTFFVDEDVQNAARLDAVVTVADAKWLSERLKDAPEAKNQIAFADVIVLNKTDLVSPAELAEVEARIRAINPYAKLHRTERCQVALADVLERGAFDLDRILEIEPAFLEADDHDHHHDHDHGHHHHGHDHHHDHGLKHYHDEDMQSLSLKSDKPLDPAKFMPWLQQLVQTEGGKILRSKGILAFTGDDDRYVFQGVHMMLEGDHQRAWKEGEPRESRVVFIGRDLPEQAIRDGFAKCIAS

SEQ ID NO: 20363 - protein, 677 aa, Candida albicans
MPSLDELTISTIRGLSVDAVSAANSGHPGAPLGLAPAAHVVWQKMKFNPKDPNWINRDRFVLSNGHACALLYSLLVLYKFELTVDDLKQFRQLGFKTPGHPEATDTAGVEVTTGPLGQGISNAVGIAIAQKQFAATYNKPDITLSDSYVYTFVGDGCLMEGVSSETSSLAGHLQLNNLIAFWDDNRISIDGDTAVSFTENVPDRYRAYGWNVLEVPDANTNIEAIAAAVDEAKKSTDKPTLIRLVTTIGYGSLKQGSHDVHGSPLKPDDIKQLKKSWGFKEDVDFFIPEEVSEYLAKHVSENQKVQKEWEAKLAEYKKKYPTEGAEIQRRLDGKLPEGWKEYLPKYTPADKPLATRKLSENVINALHGKIPEFIGGSADLTGSNLTRAEGSVDFQPPSTGLGNYDGVYIRYGVREHGMGAIMNGIAAFGANYKNYGGTFLNFVSYAAGALRLSALSHHPVIWVATHDSIGLGEDGPTHQPIETLAHFRAIPNLSVWRPADGNEVSAAYAAAIESTSHPSVIALTRQNLPQLEGSSIENALKGGYTLVKKDNPDVIIVSSGSEVSISVAASEELAKQGVKANVVSLPDFFTFDQQSDEYRLSVLPDGVPILSVEVMSTFGWSKYSHEQFGLNRFGASGKAADLYKYFEFTPEGIAERAQKTIKYYEGKQLLSPLDRAF

SEQ ID NO: 20364 - protein, 406 aa, Bartonella henselae str. Houston-1
MRRVVVTGMGIVSAIGNNPGTVLTSLYEAKSGISYAPQYAKLGFRSRVYGKPDINIEELVDRRALRFHGRGTAWNHIAMDQAIADAGLEPHEVSNEHTGIIMGSGGASTQSIVEAADITRQKSPKRVGPFVVPKAMSSTASATLATFFKIKGVNYSISSACATSNHCIGNAYEMIQYGKQDRIFAGGCEDLDWTLSVLFDAMGAMSSKYNDVPEKASRAYDAHRDGFVIAGGAGVLVLEELECAKARGAKIYGEIVGYGATSDGHDMVAPSGEGAERCMRMALATVKNKIDYINPHATATPVGDPPEIEAIRRIFGAGDQCPPISATKSLTGHSLGAAGVQEAIYTLLMMNHNFICESAHIEELDPAFADMPIVRERRDHQQLNTVLSNTFGFGGTNATLVFQRYG

SEQ ID NO: 20365 - protein, 129 aa, Zea mays
VALANVVPGFIGGSADLASSNMTLLKMFGDFQKDTAEERNVRFGVREHGMGAICNGIALHSPGFVPYCATFFVFTDYMTHDSIGLGEDGPTHQPIEHLVSFRAMPNILMLRPADGNETAGAYKVAVVNR

SEQ ID NO: 20366 - protein, 163 aa, Brassica napus
  misc_feature (31)..(31): Xaa can be any naturally occurring amino acid
  misc_feature (73)..(73): Xaa can be any naturally occurring amino acid
  unsure (1)..(163): unsure at all Xaa locations
NTFLYPSAATNERSALCQLFTMVALDPHPSXPHHAHAWMDMAHIVCGGCRTMLMYTRGASSVRCSCCQTVNLXVPGPPPSNQVAHINCGNCRTTLMYPYGASSVKCAVCQFVTNVNMSNGRVPLASNRPNGTASPGTMPSTSTQSTPPSQTQTVVVENPMSVN

SEQ ID NO: 20367 - protein, 213 aa, Yersinia pseudotuberculosis IP 32953
MPAHQLDDHNQETRSDDENIVWHPHAITRQDREQQHGHQGVVLWFTGLSGSGKSTLAGALEQALFARGVSTYLLDGDNVRHGLCRDLGFSDADRRENIRRVGEVAKLMVDAGLVVLTAFISPHRAERKMVQDMLASGQFIEVFVDTPLAICEARDPKGLYKKARAGELKNFTGIDSVYESPASPDIHLQGEQLVTNLIEQLLDVLRGRAIIKS

SEQ ID NO: 20368 - protein, 308 aa, Saccharopolyspora spinosa
MSSTDSTGMPGLGPTSLTAPRVGLVQSGSVLGDVAANIDTAVNEVISAAERGADLLVFPECYLHGYMFADADAVHQAALPLDDPALLPLHHVVRRTGVHAVLGLLERGTDGYVYNTALALGPAGTLGHYRKQHIPFMGADRFVAPGDDGAPRVFDTPFGRVGMMICFDLRFPESARELALAGADIIVMPTAWPASATLLAELVTRVRAWENRVFLAIADRPDEEGGLRFLGRSQIVGPDADIVLDAGAETGTFVAEVQLERARAKELVFIPGEYEVSIFGARRPGRYAAITDPSLPAPPSRVGSWRSE

SEQ ID NO: 20369 - protein, 560 aa, Picrophilus torridus DSM 9790
MEKMKYDAVIMGAGLAGLMAANEIASAGYSVAVVSKVFPTRSHSSAAEGGIAAYIPGNSDPNDDPDYMSYDEIKGGDYLVDQDAAELLSSKSGEIVRTLDSWGAPFNRQPDGRIALRYFGGQTYPRTRFVGDKTGMALLHTLYERASGFNIDFYNEWYVIDLLKEKKAAGLVALKMRSLEPIYLTAKAIIIASGGLGMIYKHSTNSYINTGDGYGIALRAGVPLKDPEFVQFHPTGLYPSDILISEAARAEGGILRNNKNERFMEKYAPHKFDLAPRDIVSRSMTIEINEGRGFPGGYLGLDLTHLGRDYIIERLSLAYEAAKTFAGVDATEEMIPVRPAQHYFMGGIDVDITGASPLPGLFAAGEAACVSVHGANRLGSNSLLETLVYGRETGKNVVEFLKKEHDIPDLNPEKSLDDAYKYVKRETGEHFGSILNDLRETMWDNVGIFRDEKKLSKAVSDIKSLRKRAESLYVTDKSNNYNTEFFNALELRNMLDVAYVIAESALNRKESRGAHYRTDFPDRNDDSWLKHTISYLSNEDVRIDYKPVKMTRWKPEVRVY

SEQ ID NO: 20370 - protein, 212 aa, Halobacterium salinarum
MADNDIEEAVARALEDAPQRNFRETVDLAVNLRDLDLNDPSQRVDEGVVLPSGTGQETQIVVFADGETAVRADDVADDVLDEDDLSDLADDTDAAKDLADETDFFVAEAPMMQDIVGALGQVLGPRGKMPTPLQPDDDVVDTVNRMKNTVQIRSRDRRTFHTRVGAEDMSAEDIASNIDVIMRRLHANLEKGPLNVDSVYVKTTMGPAVEVA

SEQ ID NO: 20371 - protein, 401 aa, Corynebacterium efficiens YS-314
MSTPNAYLVSGRRTPVGRYGGALSAVRPDDLAALTIKAVVEEAGIDPAAVDEVIFGNANGAGEENRNVARMAWLLAGYPDSVPGITVNRLCASGMSAITMAANMIKAGEADIVVAGGVESMSRAPWVQEKPTTAFAKPGQIFDTSIGWRFTNPVFAAQEKTTYSMPETAEEVARVKNISREDADAFAVESQRRAVEAIKAGRFNSEIVPVEVKGRKGQVTVVDTDEGPRERTTAEVLAKLRPVVGGGEVVTAGNSSSLNDGASAILVVSERALEKYGLTARARVVGGASVGLAPEIMGMGPVPATRKVLERADWSIDDVDAVELNEAFASQSLACIRELGLDTDKVNTWGGAIALGHPLGSSGARITITLLNRLEQEGGTKGVATMCIGVGQGAAIAIEKV

SEQ ID NO: 20372 - protein, 274 aa, Zea mays
  misc_feature (12)..(12): Xaa can be any naturally occurring amino acid
  misc_feature (64)..(64): Xaa can be any naturally occurring amino acid
  misc_feature (254)..(254): Xaa can be any naturally occurring amino acid
  unsure (1)..(274): unsure at all Xaa locations
MASCRMALLLNXGLLLLVVASPAIADDDSGIYYQLALMWPGAYCEQTSAGCCKPTTGVSPARAXDFYITGFTVLNATTDAAVTGCRNKVPYDPNLITGIQGLNQYWSNIRCPSNNGQSSWKNAWKKAGACSGLSEKDYFETALSFRSRINPLVRLKAKGIEPDFGLYGLKAITKVFKSGINATPVIQCSKGPFKKWMLFQLYFCAAGNGTFIDCPAPQQYTCSKEILFHPFKKWMLKQQLNQDDDPFQLPGVAXWTTDTPYRRLCLRFCQVCME

SEQ ID NO: 20373 - protein, 423 aa, Agrobacterium tumefaciens str. C58
MTVPVSERKTVWSILEHGMDFEAFFTTELQSLHSEGRYRVFADIERQQGNFPRATRYNANGDRKDVTVWCSNDYLGMGQNPKVIEAMKAAIDHCGAGAGGTRNISGTNHYHVLLEQELADLHGKESALIFTSGYVSNWATLGTLGQKIPGLIIFSDALNHASMIEGIRYGRCERVIWKHNDLEDLEAKLKAADPNAPKLIAFESVYSMDGDIAPIREICDLADRYGAMTYLDEVHAVGMYGPRGGGIAEREGLMDRLTIIEGTLGKAFGVMGGYITGSTAVCDFIRSFASGFIFTTALPPSLAAGAIASIQHLKASPFERARHQDRVRKLRGLLDARGIPHMDNPSHIVPVMVGDAAKCKWISDILLDNHGVYVQPINYPTVPRKTERLRITPTPLHTDADIEQLVGALHQLWSHCALARAVA

SEQ ID NO: 20374 - protein, 481 aa, Halobacterium salinarum
MQLFWHRRDLRTTDNRGLAAAAPGVTAVDGGHDQGPVAAVFCFDDEVLAHAAPPRVAFMLDALAALRERYRDLGSDLIVRHGDPAAVLPAVANDLDATRVVWNHDYSGLATDRDAGVRDALDAAGVAHAQFHDAVHHRPGEIRTNAGDPYSVYTYFWRKWQDREKNPPAPEPEPADLAADTALADTSPLPSVQELGFAEPEAAVPDAGTAAARSLLDAFRESGDIYRYEDRRDYPHEEPTSRLSPHLKFGTIGIRTVYEAARAAKSDADTDDERENVAAFIGQLAWREFYAQVLYFNQNVVSENFKAYEHPIEWRDDPAALQAWKDGETGYPIVDAGMRQLRAEAYMHNRVRMIVAAFLTKDLLVDWRAGYDWFREKLADHDTANDNGGWQWAASTGTDAQPYFRVFNPMTQGERYDPDADYITEFVPELRDVPADAIHSWHELSLSERRRHAPEYPDPIVDHSQRREDAIAMFERARGDE

SEQ ID NO: 20375 - protein, 473 aa, Bradyrhizobium sp. BTAi1
MADTSFDVIIIGSGPGGYVTAIRAAQLGFKTAIIEKSYLGGICLNWGCIPTKALLRSAEIYHYMQHAKDYGLSAEKISYDPKAVVARSRGVSKRLNDGVGFLMKKNKVQVIWGKAAIDAPGKITVTKSDVESPKGALGEGTYQAKHIIVATGARPRVLPGLEPDKKLVWTYFEAMVPEKMPKSLLVVGSGAIGIEFASFFRTMGSEVTVVEVLPQILPVEDAEIAGIARKQLEKQGLKIMTGAKVTKLDKKTDSVVATIDDGKGKIEAVEFERVISAVGVVGNIENLGLEKLGVKTDRGCIVIDGYGKTNVPGIYAIGDVAGPPMLAHKAEHEGVVCIEAIKGLHPHAMDKNLIPGCTYCHPQIASVGLTEAKAKEQGRDIRVGRFPFVGNGKAIALGEDQGLVKVIFDKKTGQLIGAHMVGAEVTELIQGYVVAMNLETTEEELMHTVFPHPTLSEMMKEAVLDAYGRVLNM

SEQ ID NO: 20376 - protein, 653 aa, Propionibacterium acnes KPA171202
MLSQNPTTVAWWSVRMRATGTLDDEPYHVSGAESLVAPGMIEQTVAGLTQRALAPGHTVKARQVRVSLDQLDVEPTIIPALPTELKECPDPVAARQYFVDVLSRFVPHPAEALRVLTEGPTMRGAAMVEAGTDRRLEADPLRGVRVTKFGDLTESAPGASLAHKKHHHEAVLLASKVAAAPGVLAEFCISDDPHYTRGYVCVDGVYTTVTNVKADGDPNGGRVILVDTARADPTTITTWLENHPVLIGPATASSQKATSWHGHLCGRLNAWRAAGLERRPRTFCSAQDPDAVTTDGPALLFSSSDYLGLSTEPKVQQAMNNTVRRLGSSSGGSRLTTGTSVAHHQAEHEIAAWLGYPQAVFMASGYQANIATIQLLADPHVTVISDAENHASLIDGCRLARARTVVVPHADLDAIDTALDCVTTDRALVLTEGVYSMGGDVAPVGELVEIAHRHGALVVVDDAHGIGTVGPTGRGATEELPASQRPDVLLGTASKALGVEGGFACVDETLATLMRNCARGYVFSSAPSPVVAAGVAAAVEYLRTDTRRVCSLQANVAQARLLLAEADLIPPSAAHDRGPIIRIPVGPESRAVAAQEELARRGLMVGAIRYPAVARGDAILRICLTARHTDEHIRILVTSLREVLDGALSDAPR

SEQ ID NO: 20377 - protein, 340 aa, Bradyrhizobium sp. BTAi1
MAAPKKTATKEQGQDRDNGPPPEFTREQELAALRDMLLIRRFEEKAGQLYGMGAIGGFCHLYIGQEAVVVGMQMALKEGDQVITGYRDHGHMLACGMDAKGVMAELTGRRGGYSKGKGGSMHMFSMEKNFFGGHGIVGAQVSLGTGLALANRYRGNDSVSVAYFGDGAANQGQVYESFNMAELWKLPVIYVIENNRYAMGTAVSRASAQTDFSKRGISFNIPGEQVDGMDVRAVKAAGEKAVAWCREGKGPYILEMQTYRYRGHSMSDPAKYRTREEVEKVRHDQDPIEQVRNRLLAAKVSEQDLKAIDADVRKIVNEAADFAQADPEPDAAELYTDVYR

SEQ ID NO: 20378 - protein, 541 aa, Coxiella burnetii RSA 493
MRRLFQLIRLIQINFILLRHGFNRPVIGELSPSLRLLSYLNPWSFIQKDKSRGESFRIVLEELGPIFVKFGQLLSTRRDLLPDDIAEELEKLQDRVPPFPGKIAKAMIEKSCGKTIEDCFATFDETPLASASIAQVHAATLHDSSEVIIKVLRPNIAKTIQRDIALMYLGAKLARRFWRHGKRLKPVEVVAEFEHTIYHELDLMREAANASQLRRNFADSEKMYVPKIYWDYVHRDVMVMERIYGIRISNIAELKAANTNLKKLAEYGVEIFFTQVLRDSFFHADMHPGNLFVDVTDPENPKYLGVDFGIMGALSPQDQRYIAENLLAFFKRDYRQVAILHIESGWISADSRIDQFEAAIRTVCEPIFERPLKDISFGKLLLRLFQTADQFNMEIQPQLLLLQKTLLNIEGLGRQLYPDLDLWRTAKPFIEDWMRKQHGPRYLLNTAIKEFPLAVKTTLKLPRLLHDVLHEIHFRQNLERNEPRPPRKKQKRGFILGAGLAFLISALVSFLIAPTSPSPWQWTALGGGILLIIIGWLTPKD

SEQ ID NO: 20379 - protein, 340 aa, Physcomitrella patens
MDLGSGRDGTDQQQQQQRGPHQTQQQQQQLPQPQPLASLPTSIPLLLPPALAVSNYHPTPVSVQPQHQQHHEMPGAAKPKLLNTPSGNGGSVQSKSDHVAADQAREIVRQAVQVAGAASESASAKLSNVKKGAFRYRECQKNHAASIGGHALDGCGEFMPGGQEGTVGALRCAACDCHRNFHRREVEGEVLCECKRKPKPGMQLGAGIVTPHQLPGGTNTSTPMGALALPPSAGAMTPLTTAALSAGGLTDSDEQDDGLGNSAGGMMISMRSPSAIKKRFRTKFSTEQKDQMCAFAEELGWRIQKHDEAAVQEFCTTVGVKRHVLKVWMHNNKHTVGKKP

SEQ ID NO: 20380 - protein, 769 aa, Arabidopsis thaliana
MESSEEDDEYPFIESITPQSKIDSVHQSLTEKGIRKLCCELMDLKDAVENMCGDMRTKYLAFLRISEEAVEMEHELVELRKHISSQGILVQDLMAGVCREMDDWNRLPGDVHDAEVEEDPLPNEVTDPKSEFLEKIDLLLAEHKVDEALEAMDAEERSSPDLKGSVEMSSYKSAFMERKAVLEDQLLRIAKQPSICVAELKHALIGLIRLGKGPSAHQLLLKFYATSLRRRIEAFLPSCLTCPNTFPATLSKLVFSNISVATKESAAMFGDDDNPAYSNKVVQWAEREVEYLVRLVKENASPSETASALRAASICLQDCLNYCKVLEPQGLFLSKLFLVLFRPYVEEVLELNFRRARRVIFDLNETDEGLESPSDFVTILSEFAIASDTMMTDCSIRFMQIVQDILEQLTHLVVLHFGESVLTRILQLYDKYIDFLIKALPGHSDEDGLPELQDNTVLARAETDSEQLALLGAAFTILDELLPRSLVKVWKLQIENGGGEGENSAALNSSAAPELKEWKRHMVQAFDKLRNYFCLQFVLSFIYSREGLTRLDALIYLTETPDDLHLPSLPFQALFSKLQQLAIIAGDVLLGKEKLQKILLARLTETVIIWLSNEQEFWSAFEDESNPLQPSGLQQLILGMNFTVEIARFAGYPFKVVQNHASVVINRAINIFSERGINPQSSLPKTEWFTEAAKSAINRLLMGSEDASEPEEYECEEEEEDDHHIVLPEMDDDSDSEDTSSLSTVDSFESFASASMADLESPSFTDSES

SEQ ID NO: 20381 - protein, 261 aa, Desulfitobacterium hafniense DCB-2
MMIQRLTEMNLPRFPLLSDEEMMDLLHRAQNGDAEARERLINCNLKLIFNLVQRFSHRGYELEDLFQIGTIGLIKAIDKFDFTYGVKFSTYAVPMIIGEIRRFLRDDHPVKVPRSYKELVYKVNKARESLSATLGRDPTIGEIAESIGVDREDIVSALEAVQSPTSIHDTLYQDDSDPIYILDQLPMEKDLEAGWFEKIALKEVLDKLPEREKRVLMMRFYEDKTQSEIAALLNLSQVQISRIERAALHRIRQYLHEPEHD

SEQ ID NO: 20382 - protein, 545 aa, Legionella pneumophila subsp. pneumophila str. Philadelphia 1
MTKYIFITGGVVSSLGKGIAAASLAAILEARGLRVTLIKLDPYINVDPGTMSPFQHGEVFVTNDGAETDLDLGHYERFVKTTMTKRNNFTSGKIYENVIKKERRGDYLGGTVQVIPHITNEIKRCIKLGADAFDVAMVEIGGTVGDIESLPFLEAIRQMRIELGSQRAIFIHLTLVPYIATSGETKTKPTQHSVKELRSIGIQPDVLICRSEKPLSMADRAKIALFTNVEKEAVISLEDANSIYQIPMILHAQHLDEIVVKKLSLEAKQADLSEWQRVVDMQAVQTMTVKIAMVGKYTELNDAYKSINEALLHAGIHTETKVEIIYFDAEMIEKHGALLLESIDAILVPGGFGERGVEGKIKAIQYAREHKVPFLGICLGMQTAVIEFARNVVGLTGANSTEFNKETLYPVLGLISEWMDADGSKQIRDENTDLGGTMRLGGQYCHLAEGTLARKVYGKPQIIERHRHRYEVNNKYVDSLVKHGLIISGRSADNSLVEMIELADHPWFLACQFHPEFTSNPRDSHPLFKEFVLAARIHHQEKDKK

SEQ ID NO: 20383 - protein, 282 aa, Glycine max
MSQRSVPAPFLTKTYQLVEDQGTDQVISWGESGNTFVVWKHADFAKDLLPKYFKHNNFSSFVRQLNTYGFRKIVPDKWEFANEHFKRGQKELLSEIKRRKTVPQSSAHPPEAGKSGGDGNSPLNSGSDDAGSTSTSSSSSGSKNQGSVETNTTPSHQLSSENEKLKKDNETLSCELARARKQCDELVAFLRDRLMVGPDQIDRIMRQGSCGSENVVGEGGGGDCLKLFGVWLKGDTLTDKRNNHKRGREDQMGFGGPRLKESKPVVDFGAVNIMMKSNRVCN

SEQ ID NO: 20384 - protein, 270 aa, Populus tremula x Populus tremuloides
MGRSPCCEKAHTNKGAWTKEEDDRLVAYIRAHGEGCWRSLPKAAGLLRCGKSCRLRWINYLRPDLKRGNFTEAEDELIIKLHSLLGNSRWSLIAGRLPGRTDNEIKNYWNTHIRRKLLNRGIDPATHRPLNEPVQEATTTISFTTTTTSVEEESRGSIIKEEIKEKLISATAFVCTEAKTQVQERCPDLNLELGISLPSQNQPDHHQPFKTGGSRSLCFACSLGLQNSKDCSCNVIVSTVGSSGSTSTKNGYDFLGMKSGVLDYRSLEMK

SEQ ID NO: 20385 - protein, 231 aa, Triticum aestivum
  misc_feature (79)..(79): Xaa can be any naturally occurring amino acid
  misc_feature (192)..(192): Xaa can be any naturally occurring amino acid
  unsure (1)..(231): unsure at all Xaa locations
MQIFVKTLTGKTITLEVESSDTIDNVKAKIQDKEGIPPDQQRLIFAGKQLEDGRTLADYNIQKESTLHLVLRLRGGMQXIFVKTLTGKTITLEVESSDTIDNVKAKIQDKEGIPPDQQRLIFAGKQLEDGRTLADYNIQKESTLHLVLRLRGGMQIFVKTLTGKTITLEVESSDTIDNVKAKIQDKEGIPPXDQQRLIFAGKQLEDGRTLADYNIQKESTLHLVLRLRGGQ

SEQ ID NO: 20386 - protein, 107 aa, Triticum aestivum
  misc_feature (53)..(53): Xaa can be any naturally occurring amino acid
  unsure (1)..(107): unsure at all Xaa locations
MALSSAPPCPGQEPPSGKQLSYQPAAAVRSINWTYAIFWSLSTGLRPPGVLTXKNGFYNGEVKTRKIISSTMTELTADELFLQRSEQLRELYESLLSGKADHRAKRP

SEQ ID NO: 20387 - protein, 80 aa, Prunus armeniaca
MSSCCGGKCGCGAGCKCGSGCGGCGMYPDISMEQSTTTETLIMGVAPQTSHFEASEMGVVAENGCKCGDNCTCNPCKCGK

SEQ ID NO: 20388 - protein, 428 aa, Panicum miliaceum
MAALSRAASCLTRRPQMQPSRLQAARAMASSLFGHVEPAPKDPILGVTEAYLADPSPDKVNVGVGAYRDDNGKPLVLDCVREAERRIAGNLNMEYLPMGGSVKMIEESLKLAYGEDSELIKDKRIAAVQALSGTGACRLFADFQKRFLPDSQIYIPTPTWSNHHNIWRDAQVPQKAYTYYHPESRGLDFAGLMNDIKNAPDGSFFMLHACAHNPTGVDPTEEQWREISHQFKVKKHFPFFDMAYQGFASGDPERDAKAIRIFLEDGHQIGCAQSYAKNMGLYGQRVGCLSILCEDEMQAVAVKSQLQQIARPMYSNPPVHGALVVSIILNDPELKSLWLKEVKGMADRIIGMRTALKENLEKLGSSLSWEHITNQIGMFCYSGMTPEQVDRLTNEFHIYMTRNGRISMAGVTTRNVGYLANAIHEVTK

SEQ ID NO: 20389 - protein, 332 aa, Yersinia pseudotuberculosis IP 32953
MSQSTLKVNELHEDADFDENSTETEIFDEKALVDDEPTESELADDELLAQGVTQRVLDATQLYLGEIGYSPLLTAEEEVYFARRALRGDVPSRRRMIESNLRLVVKIARRYSNRGLALLDLIEEGNLGLIRAVEKFDPERGFRFSTYATWWIRQTIERAIMNQTRTIRLPIHIVKELNVYLRTARELSHKLDHEPSAEEIAEQLDKPVDDVSRMLRLNERITSVDTPLGGDSEKALLDILSDENENGPEDTTQDDDMKQSIVKWLFELNAKQREVLARRFGLLGYEAATLEDVGREIGLTRERVRQIQVEGLRRLREILQTQGLSIEALFRE

SEQ ID NO: 20390 - protein, 409 aa, Panicum miliaceum
MASQVASVFAGIAQAPEDPILGVTVAFNKDPSPVKINLGVGAYRTEEGKPLVLNVVRRAEQMLINDPSRVKEYLPITGLAEYNKLSAKLIFGADSPAIQENRVATVQCLSGTGSLRVGGEFLAKHYHERTIYIPVPTWGNHPKVFTLAGLTVRSYRYYDPATRGLDFNGLLEDLSSAPLGSIVLLHACAHNPTGVDPTIDQWEQIRQLMRSKSLLPFFDSAYQGFASGSLDKDAQPVRMFIADGGELLMAQSYAKNMGMYGERVGALSIVCGSADVAARVESQLKLVIRPMYSSPPLHGPSVVATILKDSEMFHEWTVELKAMADRIISMRQQLFDALKSRGTPGDWSHIIKQIGMFTFTGLNSEQVAFMRQEYHIYMTSDGRISMAGLNMKNVPHLADAIHAAVTQLK

SEQ ID NO: 20391 - protein, 808 aa, Candida albicans SC5314
MSHLVSSSLGTTTTATPTSRSPHTNHSTPYNQNSITSNRSSPVPKNSVNSRIIPQTMNPPIDMKSNNILNPEKDTDTSRGDHSESKASSISSASGTTTTNNNNVSNNNSTGKTQIVFIHKLYDMLHDESISHLIWWSPSLDSFYVTPGEEFSRVLSQYFKHTNIASFIRQLNMYGFHKVNEPFLNQDDQQQQQQLQSNRWEFRHSTNQFRKGDTESLKNIKRRSSKTLNAQKEVVNIKSLPPTSHPMEYNTGYSYQNEDSAHYFVHHHSITTMQSPADMRPRSPSTPIPMQPLAQQQQQQQQQQQQQQQQQQQLPSQPVPNGPPVFSGPIPPGAVNQSPQEYLTRPSILNNVQGSFENATNFKFVELTNQINSLRNDFFTMNNRYEILQNELKYQTADSMAVLEILEKLSNDNRIATDIRDLKNVVSQRMQRLNNQFIPQQSNFAPHIPGQQQQQQHGNSVSSNYHLESTNVSRNPSTTNLNVAPQPYPLNPHYTIYANNRASGSSEINNGVFRAREDSNNSKRNLSVYDPLQPVPSRNSSRILIEESTPTHPPTNFNPQQSQSQSQVQLGPAMPPQGFRNRAESTYSPLSHSSNKSQILNKAPTPVNHSPLVQQQQKEAKQELNDSSVAPPSQSSLPVTRPLSRQQQQQQQTLHHPSTTSSRTNSLPNPVAEHPAPQSSYFMQRNSFNTIYEHQKSLRVPSPKRVRYATPPRSIPEQPISSTAPTTMITSTSKTTSTSGAAISRSENHSVVSLTGGALPSVSELDKSIRTGSSVSLPPIKSIKDNDNKNDNGNSDDNGNDHKKRKLE

SEQ ID NO: 20392 - protein, 637 aa, Thermosynechococcus elongatus BP-1
MALTVTKTSNWTIEDSEQLYRIQGWGEPYFGINAAGHVTVSPKGDRGGSLDLYELVQALQQRNISLPLLLRFSDILEDRIERLNACFARAIARYGYQGAYKGVFPIKCNQQRHIIEALVRFGQSHQFGLEAGSKPELLIALAMLNTPGALLICNGYKDRSYIETAILARRLGHTSIIVLEQPEEVAEVIAVSQALGIEPIVGVRAKLSTQGVGRWGTSAGDRAKFGLTVPEILTAVEQLRAAGMLNALQLLHFHIGSQISAISVIKDAIREAGQIYGELVRLGANMQYLDVGGGLGVDYDGSKTNFHASKNYSMQNYASDVVAGIKDACRQRGIPDPTLISESGRAIASHQSVLIFNVLGVSEVPKITPEPATAEEHLIIRNLYDTYQAIDENNYQEAYNDALQFKGEAISLFNFGYLSLPERARAESLFWACCAKILGIARQQEYVPDDLEDLEKIMASIYYINLSVFQSVPDSWAIDQLFPIMPIHRLDEEPTERGILADLTCDSDGKIDQFIDLRDVKSVLELHPFRPGEPYYLGLFLNGAYQEIMGNLHNLFGDTNAVHIRLTPKGYEIEHLVRGDTMQEVLGYVQYQGDALLEKIRCRTEAALAEEQITLAEAQHLLENYERSLRSYTYLSS

SEQ ID NO: 20393 - protein, 920 aa, Rubrivivax gelatinosus PM1
MGERSRPDLADPDESAAGAERADALARSELLRAALIGVIERYEPEVARVLRGEAPLERMSTRLLARTIQAQAIWFQLLAIAEQNRDMRRRREVERQRGHAQVRGTFAHVFHTAVEAGLDAKQIREALCSLRIRPVITAHPTEAKRVTVLERHRRIYLRLFDLESPRWTDREREDLTRAISDEVELLWLTGELKLDKPTVDQEVAWGLYFFDENLFDVVPQLYGRIEAAFAKQFPGETLELPVVFGFGSWIGGDRDGNPFVTSTVTRHTLWQMRLASLRRYRSRLADLARNLSISERAAALPEDFRAAVAAALAALPDGAGVAARNPGELFRQFIAGMLARLDATIARNGEQPEPADAARDAAPYEHADQLIGDIELMHRALVETGAQPLAKTFLAPLLREVRTFRFATVRLDIRENTIRINATLGELYRAVRGSEPPASDSAEWKDWLLTELAAPRRAGEAPLATAGLTPEAQETLATFRTVAEMRDRVDREAFGTLILSMTHSATDVLGVYLLAKHAGLFNDAQAVERCTLPVVPLLETIPDLRRAPAILKELLAVPLVQRSLRLHGNVQEVMIGYSDSNKDGGYFTANWELSKAQATMTRLGEDLGVKIAFFHGRGGSVSRGGAPTGRAIAALPAGSIRGGFRSTEQGEVVSYKYANRGTAHYQVELLASSVLQHVLLSERESALVPKHEFDEAMEAISGVSWTAYRQLMESEHLLAYLQGSSPLEELALLNIGSRPARRTQARTLADLRAIPWVFAWTQNRHMLTGWYGLGSGLAAFVEVRKARGLDLLQRMFHEGRLFRTVIDEVEKTLLTVDLDIAREFAGLVADPAVREPIFQAIEREYRLTCEMVLKVSGGRQVAERFPQLRRRLARRLQTMNQVSREQVQLLRALRDGGDDDVRTAFLLSINCAAAGLGATG

SEQ ID NO: 20394 - protein, 410 aa, Thermoproteus tenax
MSEQTVSIRTTGKIIQSPCGPIIHGLEDVLVKITTISDIDGHTGRLWYRGYRIEDLAENTTYEEVVYLLLYGKLPSARELADIKSRLSANRELNPATIEILRALAKAHPMFALEAAVASEGAFDEDNLKLADALRAGRYKQEEKDLALRIAEKLIAKLPTIVAYHYRLSRGLELVRPRGDLAHSANFLYMFFGKEPDPLATKAIDLYLILHADHEIPASTFTALVIGATLSDLYSVIAGAIGALKGPLHGGANEAAVKSYLEIADPSKAKEIVEAATKPGGPRLMGVGHRVYKAYDPRAKIFKKLVEDYTAKFGDPQRLYAIASNIEQAVMAHPYFQQRKLYPNVDFWSGIVFYYMGIPYDYFTPLFAMSRVAGWTAHVLEYWENNRLFRPRACYVGPHDQQFIPLENRS

SEQ ID NO: 20395 - protein, 436 aa, Saccharopolyspora spinosa
MASPNPLRALDEVWRDTYYRRTARSRKANEAAEKFVAKGQRARFNSGMPYPVYIERGAGSHFTDLDGNDFLDCNAGWNAAFLGRGNPTVSATVQEAMAKLGAPGGAMHPSLIRDEFAELLCERVPGAERVIFAPSGSEANTYALRLARSFTGKQKVIRMAGGFHGQHDALLGAQSSKAGTASTAQDNVITVPFNDLDAARSALAEHAGSVAALITEPMMTIPGAVHQRDQFLAGLRAATRQHHVVFVLDEVITGCRFAVGGASEFYDFAAPDLTVMGKMLGGGLPTAAVVGRADIIEQPISASNTHAQNPVTLAAAVAAMRVTEADGYARVAKMGDRLRRELRAVTDELTTPVQVTGDGPCVGIHFVDEEVVDFATAERADHSLWQLLCLGIASHGLGLSSRTFGPTLAWTESDLDVAVKGFSSTLEAISTACASN

SEQ ID NO: 20396 - protein, 252 aa, Triticum aestivum
  misc_feature (241)..(241): Xaa can be any naturally occurring amino acid
  unsure (1)..(252): unsure at all Xaa locations
MASRNLSKALRGPARQLASAPRVQQRTFVSAARAAVRAGAVARPVASGPIQQQIRGVKTMDFAGHKEDVYERADWPQEKLLEYFKNDTLALIGYGSQGHGQGLNLRDNGLNVIVGVRKNGKSWKDAEQDGWVAGKNLFDVDEAIGRGTIVMNLLSDAAQSETWPAIKPQLVKGKTLYFSHGFSPVFKDLTKVEVPTDIDVILCAPKGSGRTVRSLFREGRGINSSFAVYQDVTGKAEEKAXALGVAIGSGYL

SEQ ID NO: 20397 - protein, 122 aa, Zea mays
  misc_feature (48)..(48): Xaa can be any naturally occurring amino acid
  misc_feature (68)..(68): Xaa can be any naturally occurring amino acid
  misc_feature (74)..(74): Xaa can be any naturally occurring amino acid
  misc_feature (79)..(79): Xaa can be any naturally occurring amino acid
  misc_feature (113)..(113): Xaa can be any naturally occurring amino acid
  unsure (1)..(122): unsure at all Xaa locations
TDKAIERLLSQLRKESLKIIPVNASSEVDALYSFKTEFSVNEDLHLIXLYSEKGISKDRILIKIAATXEDIKAXEILQXDHGINTNLTLMVSLIQAIGAAEAAAYLISPFVGXILDWFKPLP

SEQ ID NO: 20398 - protein, 542 aa, Streptomyces coelicolor A3(2)
MEAGSRPHAGTGSVPAADGTSDAGRPKPLHEPDPYSTPPYGEPGPWAPAPPVQHPAATPAHGTVTAAGGALHAPVTPVTEGSHAHVPHPGASSVSPPVGAVPDPAFADAAPPVPPTAQEQPPAPAATPAYDTAPHDAAPPPAAPADPWGRYDPWAASAQHHDAAERAPKRRRGPRAKALVGGALLIALVSGGIGGGVGAYLERNGGVGTVELPQAGPEAAERDPDSVAGIAARALPSVVTLHVSGSEAAGTGTGFVLDGRGHILTNNHVVEPAGSGGEITVTFNSGDTAEAEVVGRDSGYDLAVVKVKGVTGLTPMPLGNSDNVRVGDPVVAIGAPFDLAGTVTSGIISAKERPITAGGEEGDGSDISYVDALQTDAPINPGNSGGPLLDARGRAIGINSAIRSADSGSTESDDGQAGSIGLGFAIPINQGKRVAEELINTGKAAHPVIGITLDMNYTGDGARVSAKGGDGGPAVTTGGPGAKAGIKPGDVITAVDGQRVHSGEELIVKTRAHRPGDRLELTLQRDGKETKVSLVLGSSGDD

SEQ ID NO: 20399 - protein, 403 aa, Saccharopolyspora spinosa
MITKVSNHSEDAASLTERARNVLPGGITRSTVYVPPHPPYAATGSGALVQDVSGHVLVDCNNNYTSLIHGHSSRQEIVEAAVSATRSGTAFGLPTRHEVDFAEYLAARTGVEKWRFCNSGTEAVLMMLRAARAFTQRDTIIRFAGSYHGTGDEVVDPKAAGVPKWVEESVLVVPQGDLDALKDALREHGNRVAAVLIDLMPNRAGLNPATREFVQELRALTRRYGVLLAIDEVISFRLSWGGFHQHYGVEPDLISTGKIIGGGFPVGAVGGKAGFLREFDPARAGAVMWGGTFSANPVTMVAGLTALRLFDQDAISALNAKGESMRGDLEAAGVRVNGFGSLLRIMTSDTKALWWSLYERGVLAGSNGLLALSTAMNDKHLSHVIEAVAEGARNVGDTGTPEQ

SEQ ID NO: 20400 - protein, 415 aa, Rubrivivax gelatinosus PM1
MAGRNFLFVPGPTNVPERVQRAMVVSMEDHRSSKFPDLTKSVLEDLKAVFKTTTGTPIIFPATGTGGWEAALTNTLSPGDLVLASRFGQFSHLWIDMITRLGFQVETVECEWGEGVPVEKYAEILAKDKGHKIKAVIATHNETATGVTSDIAGVRKALDDARHPALLLVDAVSSLGSIDFRMDEWGVDICVSGSQKGLMLPAGLGIVCASEKALKARESSTAPRCFFDFGDMIKANATGYFPYTPALPMLYGLRESLTMIKEEGLENIFWRHTYLASGVRAAVLDGWKLGLCAKDPKWYSDTVSAIVVPEGINGAHVIDVAFRRYNLSLGAGLSKVAGKVFRIGHLGDLNELMVLGALAGAEMSMLDVGIRIEPGSGVAAAQKYFRTHDNVPKKKVARSEVVYASQSMGSTEGAH

SEQ ID NO: 20401 - protein, 543 aa, Bradyrhizobium sp. BTAi1
MARYIFITGGVVSSLGKGLASAALGALLQARGYKVRLRKLDPYLNLDPGTMSPYQHGEVFVTDDGAETDLDLGHYERFTGRPATKADNITTGRIYQDILTKERRGDYLGATIQVVPHVTNAIKDFVLSGNDEYDFVLVEIGGTVGDIEGLPFFEAIRQLKNELPRDHAIYIHLTLLPYIPSAGELKTKPTQHSVKELRSIGIQPDILLCRTDREIPKEERRKLGLFCNVRESAVIEARDVDNIYAVPEAYHAAGLDDEVLAAFGIEPRVPPALASWHTINERVRNPEGDVTIAIVGKYTGMKDAYKSLIEALSHGGIANKVRVKLDWIESEVFENEDPAPFLEHVNGILVPGGFGQRGAEGKIRAAQFARERDVPYFGICFGMQMAVIEAARNLVGITEANSTEFGPTKEPLVGLMTEWLRGNELERRSQSGDLGGTMRLGAYPAMLKRGSRVSEVYGGATEISERHRHRYEVNTAYKDRLEQHGLKFSGLSPDGVLPEIVEYADHPWFIGVQFHPELKSRPFEPHPLFASFIQAAVVQSRLV

SEQ ID NO: 20402 - protein, 155 aa, Lilium longiflorum
MGSKLTREEYDTLLAAFHKLTVRLEVASVPKDATPADIKNLPDAYLYFIDMPGVRTGEIKVEVEDDSALVIIGERKREEEEKYQMMERWTGKRMRKFELPENADTKAVSAVWKNGVLAVTVRKLPAWEVAGISFNIERLPVPLPTKTKSIEVKIA

SEQ ID NO: 20403 - protein, 139 aa, Brassica napus
SLLRVNSGNSSQSNMLILQESCTDASGSYVIYAPVDIVAMNVVLSGGDPDYVALLPSGFAILPDGSVGGGGDGNQEVVSSSTASESCGSLLTVAFQILVDSVPTAKLSLGSVATVNSLIKCTVERIKAAVACDRGGGGP

SEQ ID NO: 20404 - protein, 203 aa, Lilium longiflorum
QSSQSMESAMITLDLPVIAAYRQLMEIPGETSNSLGDPSQSYALDAPTLTYALDAPTRSYVLDAPTLSYAHDAPTLTYALGAPASTYALDAGAMASTAADVKDLPAAYVFVVDMPGVGSGDLKVKVEGDNVLLISGERKREEEGVYLCIERRVGKLTKMFVLPENANTEAVSAVCKDGVLTVTVEKRPPQEPKKPKVIEVKVA

SEQ ID NO: 20405 - protein, 371 aa, Yersinia pseudotuberculosis IP 32953
MSHENLKGAQMAEGIPETMRAVVAYGPRDYRFERVPVPTIDAKEILVKVEGCGICAGDTKAFEGAPSFWGDDKQPAYIKAPMIPGHEFIGHVVGLGADVEGFELGDRVTSEQIVPCWGCRFCNHGQYWMCEKHDLYGFQSNVNGAMAEYLKFTKEAINYHVPDHLPLEKAILIEPYACAFHAVQRAKIKLGDVVVLAGSGTLGLGMIGAIKKSGAAKLIVLDLSDDRLALAKKFGADLVLNPSRDDVNTLIKEMTGGYGCDIYIDATGAQKAVEQGLTLLRKLGTFVEFSVFKDPVTVDWSIISDRKELDVLGSHLGPYCFPLVIEGISNGDLPTEGVVTHILPLEKYAEGIELVKRGVDSLKVVLNPNLT

SEQ ID NO: 20406 - protein, 358 aa, Brassica napus
MATSSLHTSISPRSFLSLSKPSRKPHRSQVFLRINKRRSCVSCALVHDETDVIPVQSGDRTDHEEGSLVVMSSETERDVNEPVVVGFGAEQLSFEGFPSSSPTADLGDEKSRESEEMEKMIDRSINATIVLAAGTYAITKLLTIGHGWTLFEILRYAPQHNWLAYEEALKRNPVLAKMVISGVVYSVGDWIAQCYEGKPLFEIDRARTLRSGLVGFTLHGSLSHFYYQFCEELFPFQDWWVVPAKVAFDQTVWSAIWNSIYFTVLGFLRLESPLSIFKELKATFLPMLTAGWKLWPFAHLITYGLVPVEQRLLWVDCVELIWVTILSTYSNEKSEARISESVIENPSSSTTPIDPSKE

SEQ ID NO: 20407 - protein, 271 aa, Glycine max
  misc_feature (221)..(221): Xaa can be any naturally occurring amino acid
  unsure (1)..(271): unsure at all Xaa locations
MNNNPTTIIGSTTHGSEEEDEHITEIREIHALTPPPPRGRAWETVHTHRSSSLSVASEGGASSSENFSMSREFSALVLAGSSIDHDNSNNNNSNSPMNENNNSNSLLGRIREEDLMEETNPLAIVPDNHPLDPVPSSSSQGVRGGGAAREEHVSVQRVKKEEVDAKISAWQNAKVAKINNRFKREDAVINGWESEQVQKASSWMKKVERKLEEKRARPMEXMLNVIAKAHRKAEERRASAKAKRGSKVARVLEIASLMRAEERPPAKKSFL

SEQ ID NO: 20408 - protein, 452 aa, Triticum aestivum
  misc_feature (198)..(198): Xaa can be any naturally occurring amino acid
  misc_feature (215)..(215): Xaa can be any naturally occurring amino acid
  unsure (1)..(452): unsure at all Xaa locations
MREIISIHIGQAGIQVGNACWELYCLEHGIQQDGTMPSDTTVGVAHDAFNTFFSETGAGKHVPRAIFVDLEPTVIDEVRTGAYRQLFHPEQLISGKEDAANNFARGHYTVGKEIVDLCLDRVRKLADNCTGLQGFLVFNAVGGGTGSGLGSLLLERLSVDYGKKSKLGFTIYPSPQVSTAVVEPYNSVLSTHSLLEHXDVRPPNKGFSMKMRGVXHGGLDIERPTYTNLSRLISQIISSLTTSLRFDGAINVDVTEFQTNLVPYPRIHFMLSSYAPVISAEKAYHEQLSVPEITNAVFEPSSMMAKCDPRHGKYMACCLMYRGDVVPKDVNAAVATIKTKRTVQFVDWCPTGFKCGINYQPPSVVPGGDLAKVQRAVCMISNNTAVAEVFSRIDHKFDLMYAKRAFVHWYVGEGMEEGEFSEAREDLAALEKDYEEVGAEGADDEGDEGDDY

SEQ ID NO: 20409 - protein, 523 aa, Vicia faba
MEPLSSTKQINNNNNLAKPSSLHVETQPLEPSPLRKIMVVASIAAGVQFGWALQLSLLTPYVQLLGIHHTWAAYIWLCGPISGMLVQPIVGYHSDRCTSRFGRRRPFIAAGSIAVAIAVFLIGYAADLGHSFGDSLDQKVRPRAIGIFVVGFWILDVANNMLQGPCRALLGDLCAGNQRKTRNANAFFSFFMAVGNVLGYAAGAYSKLYHVFPFTKTKACNVYCANLKSCFFLSIALLTVLATSALIYVKETALTPEKTVVTTEDGGSSGGMPCFGQLSGAFKELKRPMWILLLVTCLNWIAWFPFLLFDTDWMGKEVYGGTVGEGHAYDMGVREGALGLMLNSVVLGATSLGVDILARGVGGVKRLWGIVNFLLAICLGLTVLVTKLAQHSRQYAPGTGALGDPLPPSEGIKAGALTLFSVLGVPLAITYSIPFALASIFSSTSGAGQGLSLGVLNLAIVIPQMFVSVLSGPWDALFGGGNLPAFVVGAVAALASGILSIILLPSPPPDMAKSVSATGGGFH

SEQ ID NO: 20410 - protein, 315 aa, Thermoproteus tenax
MSLVEELTPREAAGKALADLGDLRKDVVVVVADTGETTRARFFAERHPDRFFNVGIAEQAMAAISAGLAYAGFMPYALTFAEFMLRAWEIIRNSVARLNLPVRFIGTHAGFSDPYDGPSHQALEDIALFRVLPNFTVIAPADSCETYRAVMATAEVRGPVYVRVGRDFHIPATCDLYKVFEVGKGYVAADGSDVAIMTTGQMLGYAIDAAHILREKGISAAVLHFPTIKPLDLTLLSRYARAVKAIVTVEEHMVHGGFGSAVAEALANIGPKPLAMMGVKTFGRTAKSPEELYRYFGLTPENIAARAEELISLAR

SEQ ID NO: 20411 - protein, 389 aa, Campylobacter jejuni subsp. jejuni NCTC 11168
MLTKRSQVLEESITLAITALANELKAKGEDIISFSAGEPDFDTPQTIKNAAISAIEKGCGKYTAVAGIPEVLKAIQTKFKKDNNLDYETNEIITNVGAKHSLFECIECLVEKDDEVIIPSPYWVSYPEMVKFAGGKPVFIEGLEENGFKITAEQLKKAITAKTKVLMLNSPSNPVGSIYSKEELTQIAKVLEGTQITVLSDEMYEKLRYDGFDFVAFASVSKDALKRTVTINGLSKCGAMPGWRFGYMASKNKALISAVKRLQGQSTSNICSITQHAAIPALNGECDKDIEKMRQAFEKRRNLALDILKQIPNISVYKPEGAFYLFVNIQKIEKDSMKFCQKLLEQEKVAVVPGVGFGMDGYFRLSYATSDELIKKGLERIANFIKNYK

SEQ ID NO: 20412 - protein, 499 aa, Propionibacterium freudenreichii subsp. shermanii
MRRAKIVCTLGPATSTQERMEEMIHAGLDVARFNMSHGDHSEHLRRLEETRAAAEAVGKTVGLLADLQGPKIRLGVFADGKAELALGQEFIITTDDVPGDAHRASTTYKGLPADVKAGDRILIDDGNIQLEATGVTDTDVITKVTVAGPVSNHKGINLPGVAVNVPALSEKDENDLRWALRNDFDMIALSFVRHAADIDRVHEIMDEEDMHLPVIAKLEKPQAIENLDEIIDAFDGFMVARGDLGVEMPLEQVPLVQKTIIRKARKWAKPVIVATQMLDSMISNPRPTRAEASDVANAVLDGADAVMLSGETSVGAFPVTTVETMANIVSTTEGEGLTDISKIKWDPHTTGGVIAMAAATSGVQLGAKFLVAFTQSGDTARRMSRLRNDIPLLVFTPEAKTAQWLTLCWGAQVFHTPSYSSNEEMVTAVNRTLQDLGLAAPDDVVVIIFGSPIGMVGKTNTMRIHRLKPIDWVEKVKLPSYMRGEDGPVDGTVVANDRR

SEQ ID NO: 20413 - protein, 289 aa, Thermoproteus tenax
MKTKFLRSPYLGLYGGGFGVREIGVDSLDELSCEARRRLMIMAAYDPGIHIGSSLSVLDILTALYGTGRLKFNAHNGVSTRNYLILSKGHAVHAIYALASLFGYLNQDELRETGSLGSRLQNHPEDDTPFTDVSNSGSLGLGIGMAVGLALGLKLKGHAGKVFLITGDGELDEGISWESMAVAASYKLNNLIVIVDHNKAQLDGFSEEVLRKGDIAGRFRSLGFFVQVVDGHNIGELVKAIEAAERSEAPSAIIAETVRGRGVEGLEGSTRQRVPRDEALEMAKRVTCR

SEQ ID NO: 20414 - protein, 428 aa, Synechocystis sp. PCC 6803; identical to SEQ ID NO: 759

SEQ ID NO: 20415 - protein, 476 aa, Glycine max
MGMEEESSNNSSIIEGGASLPSTGSDAKKRRVTYFYEPTIGDYYYGQGHPMKPHRIRMAHNLIVHYSLHRRMEINRPFPASPADIRRFHSDDYVDFLSSVSPETLADSAFSRHLKRFNVGEDCPVFDGLFPFCQASAGGSLGAAVKLNRADADIAINWAGGLHHAKKSEASGFCYVNDIVLGILELLKVHRRVLYVDIDVHHGDGVEEAFYTTDRVMTVSFHKFGDFFPGTGHVKDIGVGSGKNYAVNVPLNDGMDDESFRSLFRSIIQKVMEVYQPEAVVLQCGADSLSGDRLGCFNLSVRGHADCLRFLRSFNVPLMVLGGGGYTIRNVARCWCYETAVAVGVEPDNKLPYNEYYEYFGPDYTLYVDPSNMENLNTSKDLEKLRNTLLEQISRLPHAPSVPFQTTPPTLQLPEEAEEDMDRRPKLRKWDGEDYDSDPDEGGKANSKFSNITAHMRDIADEMEEEKPEEHPSSCC

SEQ ID NO: 20416 - protein, 559 aa, Zea mays
PTRPLSFCSERTHSPVPDLRSPRRSKMQIFVKTLTGKTITLEVESSDTIDNVKAKIQDKEGIPPDQQRLIFAGKQLEDGRTLADYNIQKESTLHLVLRLRGGMQIFVKTLTGKTITLEVESSDTIDNVKAKIQDKEGIPPDQQRLIFAGKQLEDGRTLADYNIQKESTLHLVLRLRGGMQIFVKTLTGKTITLEVESSDTIDNVKAKIQDKEGIPPDQQRLIFAGKQLEDGRTLADYNIQKESTLHLVLRLRGGMQIFVKTLTGKTITLEVESSDTIDNVKAKIQDKEGIPPDQQRLIFAGKQLEDGRTLADYNIQKESTLHLVLRLRGGMQIFVKTLTGKTITLEVESSDTIDNVKAKIQDKEGIPPDQQRLIFAGKQLEDGRTLADYNIQKESTLHLVLRLRGGMQIFVKTLTGKTITLEVESSDTIDNVKAKIQDKEGIPPDQQRLIFAGKQLEDGRTLADYNIQKESTLHLVLRLRGGMQIFVKTLTGKTITLEVESSDTIDNVKAKIQDKEGIPPDQQRLIFAGKQLEDGRTLADYNIQKESTLHLVLRLRGGQ

SEQ ID NO: 20417 - protein, 587 aa, Nocardia farcinica IFM 10152
MSRWCAFLTEDDPAAHVRAVGAEPITAGPITAGSITAAGPHGFGLLDGPGVAAGPFTAGALTAVGEVTLFNADRLRARLGADAPPPGRPDGEVLLHSYARFGLDGIAAAEGMFALAVADGPDLVLLRDQLGARTLFHARARAGWAASTSLRALRRWPALRTGLHLPAVRSFLTFAYLPGRETLLRDVHEVLPGRCLRLHPDGTSTEHTYWEPREHIDERPASEHALRLRALLEDAVTRRLPAGEPVGVLLSGGIDSSLVTALAAKLHDQAVHTYSISFGADAPDELGYSGLVATHCHTRHRVLTVPGQTVAARLADTVGLLDSPVGDPLTVPNLMLAEAVAADGIRVALNGEGGDPVFGGPKNLPMLIFELTRDDPAEDARAHAYLDSYRKCYADLPALLTRDALAALADAPGPVEHVAPYLRPGAMTSLLNQLLHTNLRTKGAHHILTKVERLTAASGIEGRAPLFDRAVVDHAFAVPPTMKLAGTSEKWILKQAVRDLLPKTIVDRPKSGMRVPVQQWLDGPLRELAHDLLLGRTARERGLFRADTIRAWLRGEGALLPRQGGKLWLVLSLQLWLRSFDLEESVR

SEQ ID NO: 20418 - protein, 229 aa, Mesorhizobium loti MAFF303099
MPQPDLVIFDCDGVLVDSEIIAARVEAELITLAGYEISAEEIAESYAGLTFKDILMRIEEKSKIPFQASLIDRAEELVDRKLRSDVRAIEGVREAVASVTAQRCICSNSRSERIEFMLEKVHLLPFFAGRIFSALEIPSKKTKPAPDVFLFAAERLGANPANTFVIEDSVHGVAGARAAGMRVIGFTGASHSYPGHADALTEAGAETVIRRWAELKSVIAALSEWSADA

SEQ ID NO: 20419 - protein, 524 aa, Anaplasma platys
MANTVVTGEVLDKSIREVVRTLEDAVGCTAGPKGLTVAISKPYGSPEITKDGYKVMKSIKPEEPLAAAIASIITQSASQCNDKVGDGTTTCSILTAKVIEEVARAKAAGADIVSIKNGILKAKEAVLTALMSMRREVEEEEIAQVATISANGDKNIGSKIAQCVKEVGRDGVITVEESKGFKDLEVEKTDGMQFDRGYLSPYFVTNAEKMLVEFENPYIFLTEKKINVVQHILPILENVARSGRPLLIIAEDVEGEALSTLVLNKLRGGLQVAAVKAPGFGDRRKDMLGDIAVIAGAKYVVNDELAVKMEDISLSDLGTAKNVRITKDTTTIIGSVDSNSEVIASRTNQIKAQMESSTSDYDKEKLKERLAKLCGGVAVLKVGGSSEVEVKERKDRVEDALHATRAAVEEGVVPGGGAALLYTLSSLDSLKGKNDDEQLGINIIRRAACAPIKRIIKNSGSEEAPCVIQHLLKQNDKELIYNVDTMNYANAFTSGVMDPLKVVRIAFDLAVSLAAVFMTLNAVV

SEQ ID NO: 20420 - protein, 7488 aa, Saccharopolyspora spinosa
MNSSHCWTTNDTSLAQSSDFRSPTSQGSEMTNEEKLRGYLKKATNDLLIARARLRELESGEQEPIAIVGMACRYPGGVTSPEELWELANSGGDGISGFPDNRGWDIGGLFDDYPGERGTSYAREGGFLHDAADFDAGFFGISPREALAMDPQQRLLLETSWEAIERAGIDPASLRGSESGVFVGVIYHDYGTSKTVEFPEDVEGYLATGNAGGVMSGRLAYTFGLEGPAVTIDTACSSSLVALHLAGQALRSGECDLALAGGVTVMATPGTFVEFSRQGALSADGRCKSFSDSADGTSWSEGVGILVVERLSDAQRKGHHVLAVVRGTAVNSDGASNGLTAPSGPSQQRVIRQALTAAGLAGVDVDVVEAHGTGTTLGDPIEAQALLATYGQGRPADRPLLLGSVKSNFGHTQAAAGVAGIIKMVMAMRRGVVPQSLHAEVPSSKVDWDSGAVVLATERVPWPDAGRLRRAGVSSFGISGTNAHVIVEQAPESPVAAPVTDTVIRPWVLSGRSPEALRAQAERLLSFVEDSPEIGAASVGRALALARAPFNHRAVVVGTRLADFRAGLASPNLLTGIADGGAKTAFVFAGQGSQRVGMGRELHARFPVFAEAFDAVAAQLELDLLSADEETLGRTEFTQPALFALEVALFRLLESWGVIPDFVAGHSIGEIAAAHVAGVLSLEDACVLVSARGRLMQALPAGGVMVAVQASEADLPPLPDGVSLAAVNGPRSMVIAGTEAAVSQVDGFKSRRLNVSHAFHSALMEPMLEEFRAVIADLSFGQPSIPAVSTVTGAVVTEEWGDPEYWIRHVRETVRFADGVHALESAGAGVFVELGPDGVLSAMIHENLADAVAIPLLREDRGEEETAVTALARIWTVGGTPDWAAVFADTPAVPVELPTYAFQRERYWPKTAVRPGNAAALGLGEIDHPMVGAAVELPGADGHVFTGSLSVRSHPWLADHVVAGTVLLPGTALLELALRAGEEVGCGRVEELTLETPVVLAEDIAVAVQVVVDAPDESGRRALSVYARQSDALDQLWTRHASGALAGAGRPAAEEGGSWPPAGAEPVDITGLYDRLAEAGFDYGPAFRGLRAVWRCGEDFFAEISLGEDERADAAAFGLHPALLDAALHVSGLDGETGRLPFSWTGVTPHAAGVPAARVRLTPLGADRLALEVSDQLGQPVLSVESLILRPVDVGVSGSPAVKVGRDSLFRLDWVPLDADAGIPGEPVIVLGEDQGAPGVTSFSDLAELTAAVDDGMAVPGTVYVPLETELADVPGAVRAATAEVLGLMRTWLADVRFSGSRMAFVTQGALPVGDLLDVVAASVWGLVRTAQSEHPNRFTLIDFDGEAESLAVLPMAAASGEPQAVVRDGEIRVGRLARIPAGYSAPHWDLDGTVLITGGTGSLGGLLARHLVAEREVRNLVLLSRSGSEAAGAVELVAELTELGAEVRVVACDAADRDALAEVLASIPAEHPLTAVIHAAGVLDDGVLDALTPERLDTVLRSKADAAWHLHELTRDLDLAAFILFSSAAGVFGNAGQGSYAAANTFLDGLAQYRRGLRLPALSLAWGAWMPSGGMTAGLAESDIRRMDRAGFPPLSHDQGLALFDLAAAESGVVVAMRLDARVVRRQPQIPPVLRGLVHAPLRRSAAADVARPGTLLDRLARADVSETRATAVLDLVRGQAAAVLGHSSATAIDIGQAFGEVGFDSLTAVELRNRLTAETGLSLPSTLIFDYPTPGLLAEFLLAEITGSEPAVPTPVRASAPATDDPIVIVGMACRFPGGVTSPEDLWDLVATGQDGVTGFPTDRGWDLEGLYNPDPDNWGTSYTRAGGFLHEAAEFDPHFFGISPREALATDPQQRLLLETSWEAFERAGIDPTSLRGSRGGVFVGSIYHDYTLSSLVQFPRDVEGYLGIGSAGSVVSGRLAYQFGFEGPAVTVDTACSSSLVALHLAAQALRSGECDLALAGGVTVMSTPGAFISFSRQRALSPDGRCKSFAEAADGTGWSEGSGVLVVERLSDARRLGHEVLAVVCGSAVNSDGASNGLTAPNGPSQQRVIRQALAASGLSTSDVDVVDAHGTGTRLGDPIEAQALLATYGQERDVPLLLGSVKSNIGHTQAAAGVAGIIKMVMAMRHGVVPRTLHVDQPSSHVDWAGGAVELVTESVSWPQAGRPRRAGVSSFGISGTNAHVIIEAAPATEPAEVAETVSTVVPWVLSGKSPQAVREQAARLVSFVDGQHPFDVGFSLATKRAVFEHRAAVGDLDGLRSLAEGVPAAGVFEGFTRDAVRTAFVFAGQGSQRVGMGQELYARFPVFAEAFDAVSDRLGNPVLDNEELLGQTEFTQPALFALEVALFRLLESWGVIPDFVAGHSIGEIAAAHVAGVLSLEDACVLVSARGRLMQALPAGGVMVAVQASEADLPPLPDGVSLAAVNGPHSLVIAGTEAAVSSVDGFRTRRLNVSHAFHSALMDPMLDDFRRVIEGLSFGRPTISAVSTVTGALVTDEWSDPEYWVRHVRETVRFADGVHALEAAGVTTFVELGPDGVLSAMVQENLADATAVPLLRKDRGEEAAIVAALGELYVHGINPDWPVLFAGGRRVELPTYAFQHERFWPKPKLAAGDASALGLRSAEHPLLGATVELPGSGGFLLTTRLSAALYPWLADHAVADTVLLPGTAFLELVIRAADEAGCGRVEELTLEAPLVLPGQEPVAVQVVVDAPDESGLRAVAVHSATDDGWTRHASGVLASAGRPAAFDLTVWPPEGAEPVTLDGFYERFAEAGFAYGPAFQGLASVWQRGEEIFAEVDPGVVDTSGFGLHPALLDAAVQSAVLAGLAETGGGRLPFLWSGVSLYANGASALRVRVSRSGEDAVSLEVSDQLGQPVASVESLTLRPVDLAGLSSTQTGPDALFRLDWTPMPAGAPGTAAVLGELTLPGSESYEDLAALGAAIDAGLPVPESVLIPVTSDPIEVPAAARAVTSEVLSLVQAWLADPRFADACAVFVTRNAVAGGEPVDVAAAPVWGLVRSAQTENPGRFGLVDLDSEDASLEALPGAVALAEPQAVVRGGEIRVGRLARAVADGLTLSAGDVPWRLDLGVKGTLENLVVVPAPELAGVLGAGQVRVGVRAAGVNFRDVLTVLGMYPGDNRLVGLEGAGVVLEVGPGVTGFVPGDRVFGIFEGGLGSLVVSDQRLLVKVPAGWSFEDAATVPVVFMTAYYGLKDLAGLRPGESVLVHAGAGGVGMAAIQLARWWGAEVFATASPSKWDSLRELGVPDDHIASSRTVEFEQRFGEVTGGRGVDVVLNSLAGEFVDASLRLLAPGGRFLEMGKTDVRAVSDVAYRAFDLFEAGLDRMQAMLADLVELFHAGAVRPLPLRSWDVRRVVEAFRFMSQARHVGKIVLTVPVPWDRDGTVLITGGTGGLGRLVARHLVVEHGVRSLLLLSRRGLDAEGVAELVAELSGQGAEVRVVACDAADRDALAVVLASERLTAVIHTAGVLDDGIVSALTPERFDTVLRPKVDAAWNLHELTKDHDLAAFVLFSSAAGVLGGAGQANYAAANTFLDALAEHRRRLGLPGLSLAWGAWEQSGGMTAGLDEADLQRMARSGMPPLPNAQGLALFDTALRSDHPAVVPTSLDLNVLRDLSEIPPILRGVVRGPVRRSAAATGTIGSASLRDRLSKLDQQDRRTAMVDLVRAQAAVVLGHSGSEMVDAGLAFTDLGFDSLTTVELRNRLNTATGLRLPATVIFDYPSPMVLADHLIGELFSTQMLATPVTMAVSDDPIVIVGMACRFPGEVTSPEDLWRLVSTGGDGIGEFPENRGWDLDFLFDDDPDRQGTSYARHGGFLYQAPDFDSGFFGISPREALAMDPQQRLLLETSWEAFERAGIDPTSLRGSRGGVYVGAIHYDYFASPLTQFSQNVEGYRATGNTSSVVSGRLAYQFGLEGPAVTVDTACSSSLVALHLAGQALRSGECDLALVGGVTVMSTPGAFVDFSRQRALSPDGRCKSFAEAADGTGWSEGVGVLVVERLSDARRWGHEVLAVVCGSAVNSDGASNGLTAPNGPSQQRVIRQALAVSGLSVSDVDVVEAHGTGTRLGDPIEAQALLATYGQERDVPLLLGSVKSNIGHTQAAAGVAGIIKMVMAMRHGVVPRTLHVDRPSSHVDWAGGAVELVTESVSWPRAGRPRRAGVSSFGISGTNAHVIIEVPPAAEPADVTEPADVTEPADVADVEAVEAVEAVSTVVPWVLSGRSPRAVWEQAGRLVSFVDGHDLLDVGFSLATTRAVFEHRAVVVGDRRALVAGLEALAGGGDGPELVVGVAGMAGKVVFVFPGQGSQWVGMAGGLLGSSRVFADSMAECAAVLSEFTDWWLFDVLDDEVALARVDVLQPVLWAVMVSLAALWRSFGVVPDAVVGHSQGEIAAACVAGALSLRDGARVVALRSRALRALAGGGGMVAVSLPVAEVAGYARRYGVSVAAVNSASSVVVSGEVPALEGLAEELGAAGVRVRRVPVDYGSHSGQVDSIRERVLRDLAGVTAVAARVPLYSTVTGEVLDTAGMDAAYWYRNLRETVRFQQATETLLGEGFGVFVEVSPHPVLTPAITDTVGERTLVVGSLRRDQGGLDRFLRSVAELHVRGVPVDWVPVFPGACRVGLPTYPFQRDRYWPEAVAGAGAGDVTAAGLGVVDHPLLGAGVELPGTDGYVFTGRLSLRTHPWLADHAVAGAVLFPGTGYVELAVRAGDQTGCDHLEELTLEKPLVFPGTGGVRIQVAVESPDESGRRVFGVYSRADDETETVWVCHATGVLRTGTPTTLPQPEPGVWPPPGAEPIDLDGFYQRLADADFGYGPAFQGLRAAWHCGDEIAAETALPDTIDPHGFTLHPALLDAALHPAVFTGFDEPVNRMPFSWNGISLHATGATHLRVRLRRTGTDTISLTLADPAGAPVASIDALTLRPADGAARRVWGAQESLFRLEWTPALAAAVAPAGSVAVLGDLALPGAESVRTLADLVAVPETVVIPLVATAGSTVPEAVRELTTQVLDLIHIWLSDSRFAGVRAVFVTAGAVRGVSDLAASGVWGLVRSAQVEHPGRFGLVDVDGDTVSAGAIAVAVGSGEPQAVVRGGEVLAARLARVPAGDGLVPAVGVPWRLDAGGRGTVLITGGTGGLGALLARHLVVEHGVRRLLLVSRRGGGAELVAELAAYGAEVGVVACDVADLDALAGVLGSVPVEHPLTAVVHAAGVLDDGVIESLTPERLDVVLRPKVDAAWNLHELTRDCDLSAFVMFSSVAGVFGGAGQGNYAAANTFLDALAEYRQSLGLPGQSLAWGMWDQRSGMTGHLGEADLRRMARSGMPPMSTEQGLALFDTATGLADAAVVVTPLDFRALRSQPEIPSVFTGLVRPAFRRSVAHAGGPGAETLRDQLVVLDAASRRAAVLDVVCGQAAVVLGHADGGVVGVEQRFTELGFDSLTAVELRNRLNTSTGLRLPPTLVFDYPTPTALADRLLDELLGDGDQGRVPTRTSASPSDDPIVIVGMACRFPGGVESPEDLWRLLVAGAEARGEFPVDRGWDLDGLYDPDPGHVGTTYARHGGFLYDAAEFDAGFFGISPREAMAMDPQQRLLLETSWQAFERAGIDVASIKGSNAGVFVGATHTGYAEALTRMPAATELQGHIGTGNTASVMSGRLAYTFGLEGPAVTVDTACSSSLVALHLAVQALSSGECDLALVGGVTVMATPALFVEFSRQRGLAPDGRSKAFADAADGVGWSEGVGMLVVERLAKARSLGHEVLAVVRGTAVNQDGASNGLTAPNGPSQQRVIRQALATAALSTQDVDAVEAHGTGTTLGDPIEAQALLATYGRDRVEGQPLWLGSVKSNIGHTQSAAGVAGVIKMVMALRNGVLPETLHVDTPSTNVDWDSGDVRLLTETVDWPEVGRARRGGVSSFGISGTNAHAILEQAPAAAPVTATPVPRPVVLPWVVSGKTPAAVRAQAARLAAYLRETTGVTAADVAISLAAHRSVLEHRAVLVGENYEELLNAVTELGQGGRSANLVEGTAHGRNRTAFLFAGQGSQRAGMGKELYARFPVFAEAFDAVSAALGSPVADDEESLALTGFTQPALFALEVSLFRLVESWGIVPDFVAGHSIGEIAAAHVSGVLSLEDAGVLVRERGRLMQALPAGGVMVAVEATEDELSPLPEGVSLAAVNGPRSVVIAGTEAAVSQVDGFRSRRLKVSHAFHSALMEPMLDEFREVVTGLSFGAPSIAAVSTVTGGIVSEEWRDPEYWVRQVRETVRFADGVRALEAAGVTAVVELGPDGALSALVQENLVGTAAIPLVRKDRGEEKSAVSALAELFVLGVEPDWAKLIAAGRRVELPTYAFQRERYWPTAVTGSGNAASLGLGATDHPLLGAGVELPESGGFLFTSRLSLTSHPWLVEHTIGGVVLLPGTAFLELAVHAGYEVGCGHVDELVLEVPLVLPHDGSVQIQVVLGGSDEAGARTVSVYSRGEDVQWTRHARGVVSAEVQPAVEEVPWPPVGAEPIGLDGFYQQLADAGFDYGPLFQGLKSVWRRGEGIFAEVDPGVVDTSGFGLHPALLDAAVHAAAFAGIGGPRADVLSTPGAASPEGGQLPFSFNGVSLHATGATSLRVRLSVSGPATVSLEVADQTGQPVVSVRALTLRPVDTGALSVANRDALFRLEWLTVSAGTPGSLAVLGELAVPGTPVFATLSELDIVPETLLIPIASGPGEIPDAVREVTGRVLDLVQTWLAAPQFARSRAFFVTRGAIAEGSAAEGAVDLAAASVWGLVRSAQTENPGRFGLVDLDSEDASLEALPGAVASGEPQVLVRAGEIRGGRLVRVPSSAVLTVPVPWDRDGTVLITGGTGGLGRLVARHLVVEHGVRSLLLLSRRGLDAEGVAELVAELSGQGAEVRVVACDAADRDALAVVLASERLTAVIHTAGVLDDGIVSALTPERFDTVLRPKVDAAWNLHELTKDHDLAAFVLFSSAAGVLGGAGQANYAAANTFLDALAEHRRRLGLPGLSLAWGAWEQSGGMTAGLDEADLQRMARSGMPPLPNAQGLALFDTALRSDHPAVVPTSLDLNVLHGLGEVPHLLRDVVRKPVRGTTRRSIPASGENVADRLAGLVGAERDQAILDLVRVEIAAVLGHNGVEGIEPGNALQELGFDSLTSVELRNRLNLATGLTLLPTLAFDHPTIGELAAHLATELAESAGAAPAAEVTALVEDGAPDIVSSLYREAHDAGQFRLASELLMSVARLRPTFSDAAELERKPKPVRLVGGDSGTHLVCFTPIVPLTGANLYYPLAAALPGGLTVSALASPGFVEGEKLPVDASVLVSLQAETVAEHVGEAPFVLAGLSSGGIVAHTTAKRLADCGKPPRAVILFDTYAMHDVSVLETGPHFMTAMFERAAGVVPIDSTRLSAYEWTCGLFGHWDPEPMPVPTLLIRASEPMSPDLTGKNWRTNLDGVSTIVDVPGNHYSLMEEFAASTAQVVHDWLRTLD

SEQ ID NO: 20421 - protein, 327 aa, Oryza sativa
MSASAAVSSTCAAASSTTSRRSSSSPASRVQATPRRSLPSRLVASRTSPRSPVVPPVYATASPGGAGGTTAAAARKKLLIFDAEEYLAESLAKYTARLSGEAVAERGAFTVALSGGSLIKALRKLTESPYLEAVEWSKWHVFWVDERVVPKDHADSNYKLAMDGLLSKVPIPASQIYAINDTLSAEGAADEYETCLKQLVNDGVVAISEVTGFPKLDLMLLGMGPDGHVASLFPGHPVVNENLKWVSYIKDSPKPPPERITFTFPLVNSSAHIALVVTGAGKAGAVHKAFSDKQSSSDLLPVEMVSQQEGVLTWFTDKPAVSMLSSI

SEQ ID NO: 20422 - protein, 610 aa, Zea mays
MALSASRVQQAEELLQRPAERQLMRSQLAAAARSINWSYALFWSISDTQPGVLTWTDGFYNGEVKTRKISNSVELTSDQLVMQRSDQLRELYEALLSGEGDRRAAPARPAGSLSPEDLGDTEWYYVVSMTYAFRPGQGLPGRSFASDEHVWLCNAHLAGSKAFPRALLAKSASIQSILCIPVMGGVLELGTTDTVPEAPDLVSRATAAFWEPQCPSSSPSGRANETGEAAADDGTFAFEELDHNNGMDDIEAMTAAGGHGQEEELRLREAEALSDDASLEHITKEIEEFYSLCDEMDLQALPLPLEDGWTVDASNFEVPCSSPQPAPPPVDRATANVAADASRAPVYGSRATSFMAWTRSSQQSSCSDDAAPAAVVPAIEEPQRLLKKVVAGGGAWESCGGATGAAQEMSGTGTKNHVMSERKRREKLNEMFLVLKSLLPSIHRVNKASILAETIAYLKELQRRVQELESSREPASRPSETTTRLITRPSRGNNESVRKEVCAGSKRKSPELGRDDVERPPVLTMDAGTSNVTVTVSDKDVLLEVQCRWEELLMTRVFDAIKSLHLDVLSVQASAPDGFMGLKIRAQFAGSGAVVPWMISEALRKAIGKR

SEQ ID NO: 20423 - protein, 588 aa, Staphylococcus aureus subsp. aureus Mu50
MRLNLMMSRLNSVVIKLWLTIILIVTTVLILLSIALITFMQYYFTQETENAIREDARRISSLVEQSHNKEEAIKYSQTLIENPGGLMIINNKHRQSTASLSNIKKQMLNEVVNNDHFDDVFDKGKSVTRNVTIKEKGSSQTYILLGYPTKAQKNSHSKYSGVFIYKDLKSIEDTNNAITIITIITAVIFLTITTVFAFFLSSRITKPLRRLRDQATRVSEGDYSYKPSVTTKDEIGQLSQAFNQMSTEIEEHVDALSTSKNIRDSLINSMVEGVLGINESRQIILSNKMANDIMDNIDEDAKAFLLRQIEDTFKSKQTEMRDLEMNARFFVVTTSYIDKIEQGGKSGVVVTVRDMTNEHNLDQMKKDFIANVSHELRTPISLLQGYTESIVDGIVTEPDEIKESLAVVLDESKRLNRLVNELLNVARMDAEGLSVNKEVQPIAALLDKMKIKYRQQADDLGLNMTFNYCKKRVWSYDMDRMDQVLTNLIDNASRYTKPGDEIAITCDENESEDILYIKDTGTGIAPEHLQQVFDRFYKVDAARTRGKQGTGLGLFICKMIIEEHGGSIDVKSELGKGTTFIIKLPKPE

SEQ ID NO: 20424 - protein, 355 aa, Burkholderia pseudomallei K96243
MTSSDQTNSGADPVRAYLDCGIRNYWYPVAPSWQVSSAPVGITRLSEQIVLWRDREGNVHALEDRCPHRGARLSLGWNLGDRVACWYHGVEVNGGGTVTKVPAVSNCPLEGQACVKSYPVEERAGAIFLWFGDDAHREPAPLVLPDELVAPEYAQFVCVSNWTCNYQYAIDNVMDPMHGAYLHATSHSMAEGDKQADMRVRRTETGLMFEKVNQRDVNFDWVELGETGCIWLRLAIPYQRKFGPGGSFGIVGFATPIDDEHCQVYFWRTRKVAGWQRDVWRFLYRNRLEGLHWAVLEQDRYVLESMAPNARDHEYLYQHDIGVTRVRRMLRQRAQEHLAALDAHRAAQADAAERA

SEQ ID NO: 20425 - protein, 379 aa, Bartonella henselae str. Houston-1
MAVGLQKLVHYKRIVIKIGSALLVDPQTGLRAEWLKSLISDVANLHQKGVEILLVSSGAIALGRTLLRLPKGALKLEESQACAALGQIELAKTYSDTLAQYGLKTGQILLTLFDTEERRRYLNARATINVLLRFGAVPVINENDTVATSEIRYGDNDRLAARVATMMGADLLILLSDIDGLYTKSPHRDPTAEFIPFIASITSDIEKMADVAHSELSRGGMKTKLDAGKIANSAGTAMIITSGKRMNPLAAIDRGERGSFFAAGEKPVNAWKTWISGHLDPSGILMIDQGAVKALESGKSLLAAGVVAIEGRFNRGDTVAIVDTNGVEIARGLVSYGKDESVRIMGRKSEEIESILGYEARSAMVHRNDMVLRCLTDSA

SEQ ID NO: 20426 - protein, 775 aa, Coxiella burnetii RSA 493
MVYAHNLGFPRIGIKREMKKTVEAYWRGEISQQQLQQQAIELQLTNWKIQAEAGVDLIPVGDFSWYDHVLDMAVRVGAIPSRFKALNSNITDTMFCMARGQAPNGIETSACEMTKWFDTNYHYIVPEFTTNQSFELHHDDLFKSTKLALENNYRAKPVILGPLSFLWLGKCKGESFNKLLLLEKLLPVYAEIFEQLSSLGVEWVQVDEPILVLDLPPEWQQAFLTTYQQLNFFNLKCLLATYFGSLDDNLSLTCQLPVDGLHIDYCRAPDQLDSVLSQLPAEKILSVGIIDGRNIWCNDLNRSLTLLENIQSSLGDRLWVAPSCSLLHVPIDLDQENKLDVELKSWFAFAKQKVAEAAFLTRGLREGRESIGAELKKNEEVIISRKTSKRIHNPNVEKKAASVTERLMRRQHEHSIRKNKQTAQLNLPLFPTTTIGSFPQTSQIRCLRRDYKQGKIDDALYEEKIRQEIAEVIGIQVKLGLDVLVHGEPERNDMVEYFGELLDGIAITSNGWVQSYGSRCVKPPIIFGDVSRERPMTLRWIEYAQSLTTKSVKGMLTGPVTILAWSFVRDDQPRSQTAKQIALALRDEVQDLERSGVRVIQIDEPAFRECLPLRKAAWQDYLEWAVKCFRLASCGVKDETQIHTHMCYSEFNDIIEAIAALDADVITIESSRSEMEILKSFEKFAYPNDIGPGIYDIHSPRIPRVAEIEELAVRALQYIPIERLWINPDCGLKTRNWEETKEALSRMVDAAKHLRKAFSSEKTPTIDLELQPAST

SEQ ID NO: 20427 - protein, 214 aa, Zea mays
MLARPSAPPLVTAQTPEVGIFITARNVSGALVAKLPGNKNNCGGRSNVRQQNIQPGKRGCRREWRALSAADQAQASTPDVDEECKRVLTPLGFSSEDAEKMLKKAFGWTHSPYWSEEREKEVPTAEAVAGVLDYIRSLGLSDEDLGRLLKKFPEVLGCDLDGEVRPNVGKLDSDWGINGKTLRSLLLRNPKVLGYNVDCRGDCMAQCTRCWVRF

SEQ ID NO: 20428 - protein, 412 aa, Bartonella henselae str. Houston-1
MKDMGRKARRAATVLAVMSSEQKNKALEMIALSLEAHSDEILRANHQDLLNATQNNLTVAMVDRLKLNEVRLCTIIDSVRQVACLPDPVGQVMDEWTRPNGLHISRVRTPLGVIGIIYESRPNVTIDASTLCLKAGNAAILRGGSDSFHSAHALHCALVKGLKKAGFPKDAIQMVATKDRGAVGEMLKGLDGAIDVIVPRGGKNLVARIQVDARVPIFAHLEGLCHIYIDQSADLDMARNIVLNAKLRRTGICSAVETVLIDRQALEKFLPILTALQKKGCEIRATEDIVFLMPDAKLAFEEDWSHEYLDAIVSVKTVESVEGAIAHIKRYSSGHTESIIAEDMEIVEKFFNHLDSAILLHNASTQFADGGEFGFGAEIGIATGKMHARGPIGVEQLTSFQYHIKGNGQVRP

SEQ ID NO: 20429 - protein, 456 aa, Arabidopsis thaliana
MENKPSVLTERYEVGRLLGQGTFAKVYSGRSNHTNESVAIKMIDKDKVMRVGLSQQIKREISVMRIAKHPNVVELYEVMATKSRIYFVIEYCKGGELFNKVAKGKLKEDVAWKYFYQLISAVDFCHSRGVYHRDIKPENLLLDDNDNLKVSDFGLSALADCKRQDGLLHTTCGTPAYVAPEVINRKGYEGTKADIWSCGVVLFVLLAGYLPFHDTNLMEMYRKIGKADFKCPSWFAPEVKRLLCKMLDPNHETRITIAKIKESSWFRKGLHLKQKKMEKMEKQQVREATNPMEAGGSGQNENGENHEPPRLATLNAFDIIALSTGFGLAGLFGDVYDKRESRFASQKPASEIISKLVEVAKCLKLKIRKQGAGLFKLERVKEGKNGILTMDAEIFQVTPTFHLVEVKKCNGDTMEYQKLVEEDLRPALADIVWVWQGEKEKEEQLLQDEQGEQEPS

SEQ ID NO: 20430 - protein, 151 aa, Picea abies
MAMDPLLSTVQQLLGVPDDLERILHAPTRSYMRDTEATASTPVDVKEYPNSYVFIVDMPGLKSNDIKVQVEDENVLNISGERKRNEKEEGAVKYIRMERRVAKFMRKFTLPADCNLEAISAACQDGVLTVTVPKLPPPEPKKPKTIAVKIG

SEQ ID NO: 20431 - protein, 611 aa, Campylobacter jejuni subsp. jejuni NCTC 11168
MMDYGIDIWGNENFIIKNGKVCINYEKKPAIIDIVKELRDDGYKGPLLLRFPHLIQKQIENIYGNFNKARKEFGYKGGFNAVYPLKVNQYPGFVKNLVKLGKDYNYGLEAGSKAELLLAMAYNNEGAPITVNGFKDRELINIGFIAAEMGHNITLTIEGLNELEAIIDIAKERFKPKPNIGLRVRLHSAGVGIWAKSGGINSKFGLTSTELIEAVNLLKENKLLEQFTMIHFHLGSQITEIHPLKKALNEAGNIYTELRKMGAKNLKAINLGGGLAVEYSQFKNEKSRNYTLREYANDVVFILKNIAEQKKDLEPDIFIESGRFVAANHAVLIAPVLELFSQEYAENKLILKKQNPKLIDELYDLYKSIKPSNALEYLHDSIDHLESILTLFDLGYVDLQDRSNAEILTHLITKKAILLLGDKQNPADLLAIQDEVQERYLVNFSLFQSMPDFWGLEQNFPIMPLDRLDEEPTRSASIWDITCDSDGEISYSKDKPLFLHDVDVEKENYFLGFFLVGAYQEVLGMKHNLFTHPTEAIISINEKGYEVEGIIEAQSILDTLEDLDYDIHAIMDILNERISNSKLVNDKQKKHILGELYLFLNDNGYLKSIGV

SEQ ID NO: 20432 - protein, 310 aa, Oryza sativa (japonica cultivar-group)
MASKAGGGGVARRGGGRMRSLGRQGSMYSLTLDEVQSQLGEPLHSMNLDELLRSVFPDGLAIADGAGATTSSQQHQPGSGLLRQGSITMPPELSKKTVDEVWKGIQAAPKRNAETGGGGGGGRRRRERQPTLGEVTLEDFLVKAGVVTQGSLKELSDVGNVDPVGRGVTATGTVDLAPGSHWIEQYKQQIASTDAHHHGQQGVQGAYFPNRLVPQPLNVGPGAILEPSYSDGQTSSGMIGGMSDSQTPGRKRGMSGDVADKLMERRQKRMIKNRESAARSRARKQAYTNELENKVSRLEEENVRLKRQKE

SEQ ID NO: 20433 - protein, 262 aa, Synechococcus elongatus PCC 6301
MSRHGINLHNDHQPEWNQCREPEMSVHQSVLADFAAVVSAAQTLVLETASRAIAERGTFRLALSGGSTPKALYEQLATSEADWANWQIFWGDERYVPNDHPDSNERMARQAWLDQVPIPAEQIHPLPTQSADPWQDAAIAETDLRRAFQVQEPAWPVFDLVLLGLGDDGHTASLFPGTAALEEQSRLVTVGDRGGQPRLTFTAPLINQARTVVFLVSGAAKQEALKRALAATGDSQQTPVRLIQPVTGQLYWLLDRDAAVLL

SEQ ID NO: 20434 - protein, 245 aa, Yarrowia lipolytica CLIB122
MKLLTIDAFGTLFVPRPSVAAQYLRIVQQCEPYSGHVTQVQRNFHGAFKQYYQQYPCYGKGKIGYESWWCHVIQQTFDNRISLATAHKVYEHFGTSQAYHLYSDVIPLLTQVRSMGFKTAVLSNMDPKAHDILRDFGLDKYLDKVFISYDTEVDKPDENAWKNVEKEFGVSQRCYNSLYHVGDEPGKDLVSIPGWVSVLIDRSEGYTEYDGFAKNRAVKMRQGVLRVAEDQYVVKDLGDVVDLLV

SEQ ID NO: 20435 - protein, 237 aa, Arabidopsis thaliana
  misc_feature (88)..(88): Xaa can be any naturally occurring amino acid
  unsure (1)..(237): unsure at all Xaa locations
MDIEQKQAEIIDQLVKRASTCKSEALGPLIIEATSHPSLFAFSEILALPNVAQLEGTTDSVYLDLLRLFAHGTWGDYKCNATRLPHLXPDQILKLKQLTVLTLAESNKVLPYDTLMVELDVSNVRELEDFLINECMYAGIVRGKLDQLKRCFEVPFAAGRDLRPGQLGNMLHTLSNWLNTSENLLISIQDKIKWADNMSEMDKKHRKEAEEGVEEVKKSLSMKVSRAWSPIGFTFPY

SEQ ID NO: 20436 - protein, 751 aa, Arabidopsis thaliana
MARISLLFSLALVLAIGSVLAHPPTHKKLQKTLCPSTLSKVQAFPYLEVSSFVEKKVQFAPKTIAFKSLFSICKSYIDFLGGVKFSASRDVFHVVHVKFTLMTKAMVIAQAHIGVEGDLAVKLGKSYTVMAERFVNLLEMMSTVSAKYKFDANAKISASESAEIEKCVMKLKSAIRSYVKVISQCSTKFSAGKSIGFPTYPVGFIGGIAKQGLGYAGKFVGAHGQVGAGFEIGAKAKVGVQSEKFLEYGPITKPKGKVGVQGEVKVGGQVHAAGKAKVRAQVEAKVGGETGSGYYDGIMKYFGKGHFDAAESLNNAKIFSLSLGSRLVFVVSSHAVAEECFTKNDVVLANRPEFLVGKHIGYNSTTMVGAAYGDSWRNLRRIGTIEIFSSLRLNSFVSIRQDEIRRLIICLAKNSQHGFVKVEMKPLFMCLTINNIIRMVAGKRFYGDGTENDNEAKHVRQLIAEVVVSGGAGNAADYFPILRYVTNYEKHVKKLAGRVDEFLQSLVNEKRVEKVKGNTMIDHLLSLQETQPDYYTDVIIKGIILVMILAGTDTSAGTLEWAMSNLLNHPEVLRKAKTEIDDQIGVDRLVEEQDIVKLPYLQHIVSETLRLYPVAPMLLPHLASEDCIVDGYDVPRGTIILVNAWAIHRDPKLWEEPEKFKPERFEKKGEDKKLMPFGIGRRSCPGSGLAQRLVTLALGSLVQCFEWERVEEKYLDMRESEKGTTMRKATSLQAMCKARPIVHKVLDASCP

SEQ ID NO: 20437 - protein, 342 aa, Halobacterium sp. NRC-1
MKKDLPDRVDLVGMKAVVLAGGYATRLWPITKDRPKMFLPVGDSTVIDRIFADLESDDRIDTVYVSTNERFADEFRSHLAERSFEKPQLSVEDTTDENEKFGVMGALAQLVDRESITDDLVVIAGDNLISFDVSAFVDFFAADDADNPAIAAYDVGSYERAQSYGLVELHGDEVINFQEKPDDPNSTLVSIACYAYPESVVEDIDTYLAADGNPDEPGWFVEWLQDRQSVRAFTFEGAWFDIGTPESYLDAVAWTLDGDSIVADDATVSNTTIGENVHVLPGAELTNSTVSNSVIFPDATLRDCDVRNSIIDEDTVLDSIDFSGALIGAHTTIENGHDADGR

SEQ ID NO: 20438 - protein, 395 aa, Picrophilus torridus DSM 9790
MEDAYIVYFKRVPFSRARPNDPERDMYNDLRMDDLLSRLIRKSVDDTGINPEEIGDVITGCAFQAGENWTYGGRHPVLLSELPVSVPAMSLDRACSSSLNAVSIGAMEIMSEKSDIVIAGGMEHMTHVPLGISNPYIKPNMSLMLNPRYSKYDMNVSYNMGLTAEKLAALRGITRKEMDEYSYNSHLRARKAYESGFMKDEIMPVTVERDGEEIKIEKDLSIRDDASLESMEALKPAFKPDGIITAGNSAPLNDGASMVMLMSERAMNEYGLKPMARIVDFAAAGVDPTIMGDGPVPATRKILSRNKIDPQDIDLWEINEAFAVVVLNAVKSFNLDLKKVNINGGGISIGHPLGATGARIAGTLARQLANKRKRYGIATLCVGGGQGYSLLMERI

SEQ ID NO: 20439 - protein, 251 aa, Propionibacterium freudenreichii subsp. shermanii
MHMTSKLILLRHGESEWNAKNLFTGWVDVDLNEKGVREASHGGELLAQEGLLPDIVHTSLLRRAIHTSYLALDKADRLWIPVKRSWRLNERHYGALQGLNKSEIRDQYGEEQFMAWRRSYDVPPPAIEPDSKFSQFNDPRYADIPADERPLHECLKDVVERMLPYWESSIVPDLKAGKTVLVAAHGNSLRALVKHLDNIDDQTISGLNIPTGIPLFYELDDDMKPLVPGGRYLDPEAAAAGQKAVASQGKK

SEQ ID NO: 20440 - protein, 568 aa, Glycine max
TNNFLKMLSRFSKITVRGYAKDLKFGSEGRKAMLSGVDMLADAVAVTMGPKGRNVVIEQSWGSPKITKDGVTVAKAIDFKDKFQNMGAKLVQDVANKTNEEAGDGTTCATVLARAIAKEGFENISKGANPVEVRKGLMNAVDELVKELKAMSKTVTTPEEIAQVATIAANGDKTIGKLISDAMKKVGNKGVITVKDGKTLLDELELIEGMKFDRGYISPYFINSAKGAKVEFEKCLILFSEKKISQIQDIVPALELTNKYRRPVLIIAEDVDGEALTTLVLNRLKVGLQVCAVKAPGFGDNRKNTLKDMAVSTGGTVFGEEASLIKLEDIQIQDFGEADEVTVTKDDTLILRGKGSQEDVEKRIASIQDELDASTSDYEKEKLNERLAKLSTGVALLKIGGASEVEVNEKKDRVTDALCATRAAVEEGIVPGGGVALLRALKKLDTLKPDNDDQKSGIKIVQKAIRQPISTIIANAGLEPSAIVEKVLANAETNYGYDAMNDKFVNMLEAGIIDPTKVVRTALQDAAGVASLMATTECVVTEIPKEEPPMPAGGGMGGMGGGMGGGMF

SEQ ID NO: 20441 - protein, 40 aa, Saccharomyces cerevisiae
QNEGHECQCQCGSCKNNEQCQKSCSCPTGCNSDDKCPCGN

SEQ ID NO: 20442 - protein, 306 aa, Sporothrix schenckii
MDGKRQLNSFQQLEKLGEGTYATVFKGRNRHTGEFVALKEIHLDSEEGTPSTAIREISLMKELKHENIVALHDVIHTESKLMLVFEYMDGDLKKYMDTNGERGALKPMLIKSFMYQLLKGIDFCHQNRVLHRDLKPQNLLINGKGQLKLGDFGLARAFGIPVNTFSNEVVTLWYRAPDVLLGSRTYNTSIDIWSVGCIMAEMYTGRPLFPGTTNEDQMLRIFRIMGTPTEHNWPGISQFPEYKATAPRYATQDLRQILPQIDATGIDLLQRLLQLRPELRISAHDALQHPWFHDILQYQHCQQAAG

SEQ ID NO: 20443 - protein, 609 aa, Nocardia farcinica IFM 10152
MSTSEIGFAHESGKTVYTVPEAFQETLTLRPDQVALRTVGGTTEITWREYGERVRALAAGLAALGLKHGDTMGIMLTNRPEFNLIDTAAQHVGATPFSVYNTSSAEQITHLFGNAGNKIVVTEQAFLDVIRATGVALDHIIVVDGPATGTLTLAEVEANPLADFDFDAAWRAVRNDDLATLIYTSGTTGPSKGVEITHANVLAQITALVSGPLRVGLDDRAVSYLPAAHVADRISGHAINLVTGIQITTVPDPREIAAALPDARPTTFFGVPRVWQKIKAGVEAKLASEPSPVKKKLATWAIETGVAAARADLAGKGRSPVLAVQHRLAEKLVLSKLRAALGFDELKVAASGAAPIPAEILEFYLGLGFTVSEVWGMSETTGVGTYTELDKPRPGSVGRPVDGVEVRLDADGEVLIRGPIVTRGYRNMPDKTAEAIDAEGWLHTGDVGTLDEDGYLRIIDRKKELIINEAGKNIAPSNIENAVKAASSLVGQVVAIGDAKPYITALIVLDPDIVALRAKDLGATDADLPTLVRRREIVDEVHAAVKAGNTKLSRVEQIKRFTIVGAVWEPGGDELTPKMSLKRKPIAEKYATTLTELYADPAPEHIVNV

SEQ ID NO: 20444 - protein, 395 aa, Corynebacterium efficiens YS-314
MTDIGALVASWMDRHHDEVIGWRRHLHSHPELSHLEYNTTEYLAGVLTEHGMTPTLFPGTGLMVDIGPSEGERLAFRADIDALPLTETTGLDYSSTVPGVAHSCGHDIHTVIALALACALNSIDLPLGIRVIFQPAEEVMTGGATDVIQFGGLEGVHAIYALHVEPKLKVGRVGVRAGAITSASDVIEVRVRGEGGHTSRPHLAKDVVYALGKLVTELPALLSRRVDPRTGTVLVFGTINAGFASNAIPESGIVSGTLRTADIGTWRSMRPLISELVAQVLAPTGVEHELIYNPGVPPVLNDDVATALLASAARDLDPQSVVQAPQSSGGEDFSWYLEHVPGSMARLGCWSGQGPRQDLHQSDLNVDERCIGVGVKLFGSLVQQYSSKSEAFLHP

SEQ ID NO: 20445 - protein, 166 aa, Zea mays
MADDGGSHEGSGGGGGVREQDRFLPIANISRIMKKAVPANGKIAKDAKETLQECVSEFISFVTSEASDKCQKEKRKTINGDDLLWAMATLGFEEYVEPLKIYLQKYKEMEGDSKLSTKAGEGSVKKDAISPHGGTSSSSNQLVQHGVYNQGMGYMQPQVIYRTVIC

SEQ ID NO: 20446 - protein, 438 aa, Oryza sativa (japonica cultivar-group)
MAASSSSTTRLIPLLLVLTFCLALASASAWAAAAGDDDLLAAAREPGMAEWLRGVRRRIHRHPELAFEEVRTSELVRAELDAIGVPYQWPVARTGVVATIAGGGGGDGPVVALRADMDALPVQELVDWEHKSQENGKMHACGHDAHTAMLLGAAKLLQKRKNELKGTVKLVFQPAEEGSAGAYYVLQEGVLDDVSAMFGMHVDPALPVGVVAARPGPFAATSGRFLATITGKGGHAAFPHDAIDPVVAASNAILSLQQIVAREIDPLQGAVVSITFVKGGEAYNVIPQSVEFGGTMRSMTDEEYFRPKIGQIVEGQAAVNRCGGGVDFMEESMRPYPAVVNDEGMYAHARASAERLLGAGGVRVAPQLMGAEDFGFYAARMPSAFFTIGVGNATTSSARAAHTTHSPHFVIDEAALPVGAAVHAAVAIDYLSKHASSM

SEQ ID NO: 20447 - protein, 151 aa, Picea glauca
MAMDPLLSTVQQLLGVPDDLERILHAPTRSYTRDTEATASTPVDVKEYPNSYVFIVDMPGLKSNDIKVQVEDENVLNISGERKRNEKEEGEVKYIRMERRVAKFMRKFSLPADCNLEAISAACQDGVLTVTVPKLPPPEPKKPKTIAVKIG

SEQ ID NO: 20448 - protein, 323 aa, Oryza sativa (japonica cultivar-group)
MAFTVKASSPSSPATTRLTGALHGGAARVAARKLPAAAVAASLTLDRAPAPAGAERGMSSSVSRTMSRLREKGKAAFIPYITAGDPDMGTTAEALRVLDACGADVIELGVPFSDPYTDGPVIQASAARALAAGATMDGVMSMLAEVTPELSCPVVLFSYFGPIVRRGPANFTAAAKEAGVQGLIVPDLPYVETSTFRSEAIKNNLELVLLTTPATPADRMKAITAASGGFVYLVSVNGVTGSIQNVNPRVEHLLQEIKQVTDKAVCVGFGISTPDHVRQIADWGADGVIIGSAMVRQLGEAASPKQGLKRLEKYARSLKDALP

SEQ ID NO: 20449 - protein, 468 aa, Burkholderia pseudomallei K96243
MSTLETAIAGAPAADTAAGAATPGAIIARIERLPANAMQIRARVLIGTATFFDGFDVITIAATLPLLIHKWGLSPNQIGMLIASGAIGQLLGAFLFPALAQKHGRVRAIAWSSAVIGVTSIACGFASTFETFVLLRIVQGLGLGGELPVAATYINEITRAHGRGRFVLLYEIVFPIGLLASMAFGAWLVPRFGWEVMYFIGGMPLLLALVLTRLVPESPRWLASRGRLDEAGRALHAFEASVKEPLPPVAHAGEFDTLVLSHPKRRMVDLFGPAYLKRTLAVATLWATCGFIQYGLSTWLPTIYKNFYHAPLQLALNLAVIGSVMGVAGSLVSALAVDVVGRKPVIVWSFVLCALSLVFAGVYHASSVYVVAAFCSLALGLMASGFITSYVYTPEQYPTSIRAAGCGLGSAWLKIASFVAPMVVPRAIVGGDLSPAFYLLAAVPLIAALTVHSVGIETKGQVLEKLEA

SEQ ID NO: 20450 - protein, 161 aa, Pseudotsuga menziesii
MSIIPSFFGRRSSSAFDPFSLDVWDPFRAFTDLAAGGPSGQFVNEASAVANTQIDWKETPEAHIFKADLPGLKKEEVKIELEEGQRILQISGERSKEEEQKNDKWHRIERSHGKFLRRFRLPDNAKVEEIKAAMENGVLTVTVPKEPEPQPPQPKSIEISG

SEQ ID NO: 20451 - protein, 312 aa, Medicago sativa
MGSVEIPTKVLTNTSSQLKMPVVGMGSAPDFTCKKDTKDAIIEAIKQGYRHFDTAAAYGSEQALGEALKEAIELGLVTRDELFVTSKLWVTENHPHLVIPALQKSLKTLQLDYLDLYLIHWPLSSQPGKFSFPIDVADLLPFDVKGVWESMEESLKLGLTKAIGVSNFSVKKLENLLSVATVLPAVNQVEMNLAWQQKKLREFCNAHGIVLTAFSPLRKGASRGPNEVMENDMLKEIADAHGKSVAQISLRWLYEQGVTFVPKSYDKERMNQNLRIFDWSLTKEDHEKIAQIKQNRLIPGPTKPGLNDLYDD

SEQ ID NO: 20452 - protein, 146 aa, Funaria hygrometrica
MALSLFGRGSGSFFDPFDLSLLESGPSRQFARDAHAVANTQIDWRETPEAHIFKADLPGLKKEEVKVQLVDGKTLEISGERRKEEVHKDDTWHRVERAHGSFLRRFRLPDNSNVEAVEAQVQDGVLTVTIPKIQKPKPQVRQIEIA

SEQ ID NO: 20453 - protein, 312 aa, Medicago sativa
MDSVEIPTKVLTNTSSQLKMPVVGMGSAPDFTCKKDTKDAIIEAIKQGYRHFDTAAAYGSEQALGEALKEAIELGLVTREELFVTSKLWVTENHPHLVIPALQKSLKTLQLDYLDLYLIHWPLSSQPGKFSFPIDVADLLPFDVKGVWESMEESLKLGLTKAIGVSNFSVKKLENLLSVATVLPAVNQVEMNLAWQQKKLREFCNANGIVLTAFSPLRKGASRGPNEVMENDMLKEIADAHGKSVAQISLRWLYEQGVTFVPKSYDKERMNQNLCIFDWSLTKEDHEKIDQIKQNRLIPGPTKPGLNDLYDD

SEQ ID NO: 20454 - protein, 549 aa, Staphylococcus aureus subsp. aureus Mu50
MNKQWWKEAVAYQVYPRSFNDSNHDGIGDLPGMIDKLDYLKDLGIDVIWLSPMFKSPNDDNGYDISDYQEIMDEFGTMEDFDCLLKGIHDRGMKLILDLVVNHTSDEHPWFIESKSSKDNPKRDWYIWQDPKQDGSEPNNWESIFNGSTWEYDANTEQYYFHLFSKKQPDLNWGNPEVRDAVFEMMNWWFDKGIDGFRVDAITHIKKTFEAGDLPVPEGKTYAPAFDVDMNQPGIQTWLQEMKDRSLSKYDIMTVGEANGVSPDDADDWVGEENGKFNMIFQFEHLGLWNSGDSHFDVNSYKSVLNRWQKQLENKGWNALFIENHDQPRRVSTWGDDDKYWYESATSHAAVYFLQQGTPFIYQGQEIGMTNYPFESIETFNDVAVKNDYQIVKAQGGDVDALLAKYKDENRDNSRTPMQWDDTLNGGFTNGEPWFPVNLNYKTINVAQQLEDEHSVLQFYKDLIQLRKSNDVYVYGQFDLVDAENSQVFAYTRTLNEKQVLIVGNLTNHEAELTVPFDLSHGEVKLFNYDAKVNLKQLRPYEACVIELN

SEQ ID NO: 20455 - protein, 131 aa, Brassica napus
  misc_feature (130)..(130): Xaa can be any naturally occurring amino acid
  unsure (1)..(131): unsure at all Xaa locations
KIEMFKRELPLCARLLADVIDVMKEEAGKAVAEEDGAAGDKSKWMSTAQLWTGDCGREDAEPEKQDKERSSPEARSRAAGGAFLPLKAAVGSGAPAFAPLGLRMDDKAAARAGMPDLCLLSPPATKSAAXE

SEQ ID NO: 20456 - protein, 299 aa, Yarrowia lipolytica CLIB122
MTAVRVRLCGGLATHNLFIRHYSRKPISLKLPDLDFSTPKKQINFCDKCPPPDRDTPYTRLFPAEHEDAIDYKKSMPAAFHLRHLLISTGSHKWPKAIEKDEGTLAGLIAEKRHEFPLRSKMAKAGILISNTTLPSEPGVSDVSSAYLFPDNLFIPEIPHPKTQEFLDTLLEQNDEIRAIKLKENFGARDNSADLWLVCGHAERDARCGDIGPLILGEMDEIKQEYARDTSRDSPRDIHTALISHIGGHAFAGNVLLFSGQTGSSSWFGRVRPEHIQGLVKEWNDGRIVKELYRGSFAD

SEQ ID NO: 20457 - protein, 417 aa, Shigella flexneri 2a str. 301
MLEQMGIAAKQASYKLAQLSSREKNRVLEKIADELEAQSEIILNANAQDVADARANGLSEAMLDRLALTPARLKGIADDVRQVCNLADPVGQVIDGGVLDSGLRLERRRVPLGVIGVIYEARPNVTVDVASLCLKTGNAVILRGGKETCRTNAATVAVIQDALKSCGLPAGAVQAIDNPDRALVSEMLRMDKYIDMLIPRGGAGLHKLCREQSTIPVITGGIGVCHIYVDESAEIAEALKVIVNAKTQRPSTCNTVETLLVNKNIADSFLPALSKQMAESGVTLHADAAALTQLQAGPAKVVAVKAEEYDDEFLSLDLNVKIVSDLDDAIAHIREHGTQHSDAILTRDMRNAQRFVNEVDSSAVYVNASTRFTDGGQFGLGAEVAVSTQKLHARGPMGLEALTTYKWIGIGDYTIRA

SEQ ID NO: 20458 - protein, 428 aa, Rickettsia conorii str. Malish 7
MSNQRVNKRVVITGLGLVTPVGLNVSSSWKNIVDGVSGIKTITEFDTSKLACKIAGLIDNSEKDGFKLENFIQADDINRLSKMDKFIHYGVAAATEAVEDSGWLPDDEKSRDRTGLILGSGIGGLKMIEDTSIKLYQENNGKVSPFFIPASLINLLSGLVSIKYGFSGPNQTAVTACSTGAHAIGDAMRMIKHGYADVMIAGGAEAPVTPVGVAGFVAARALCTKYNDNPKKASRPWDKDRSGFVMGEGAGVVVLEEYEHALNRGAKVYGEVIGYGSTGDAYHMTAPHPEGRGAYRAMRDAMLDATITPDMIDYINAHGTSTTLGDGIELAAVQKLFLEANPKVLMSSTKSSIGHLLGAAGSVEFIFSALAIRDQIAPPTLNLDTPMDEVNIDLVALKAKKTKIDYVLSNSFGFGGTNASLVIKSILV

SEQ ID NO: 20459 - protein, 93 aa, Schizosaccharomyces pombe
GLGFKTPAEAIDGEYVDKKCPFVGQVSIRGRILTGTVVSTKMHRTIIIRREYLHFIPKYNRYEKRHKNLAAHVSPAFRINEGDVVTVGQLAVL

SEQ ID NO: 20460 - protein, 367 aa, Serratia marcescens
MNGSQTLVVKLGTSVLTGGSLRLNRAHIVELVRQCAQQHAAGHRIVIVTSGAIAAGREHLGYPELPATIASKQLLAAVGQSRLIQLWEQLFSIYGIHVGQMLLTRADLEDRERFLNVRDTMTALLDNRIVPVINENDAVATAEIKVGDNDNLSALAAILAGADKLLLLTDQQGLYTADPRNNPQAELIREVHGIDDALRAIAGDSVSGLGTGGMGTKLQAADVACRAGIDVVIAAGSKPGVVADVIEGKPVGTRFHALETPLENRKRWIFGAPPAGEITVDDGAVEAMMARGSSLLPKGIREVKGDFSRGEVIRIRNLTGRDLAHGVSRYNSDAMRMIAGHHSQEISEILGYEYGPVAVHRDDMIVS

SEQ ID NO: 20461 - protein, 438 aa, Thermoproteus tenax
MPSLTAPSSSSLYLSRIFSTKNLFMRPSSFTDTLGFRTSSSSYISAIPSSSPSFDFNTWTSNGFLATSLFSFSCAAVVKDLCPIASSIKESNRLYRRTSFSNCAIFSSRIFLSSSNSSTTIVILTSIKSIVALVASIGNLNYDIYIKTHELPGLDQSVDALDLYTGGGGSAANFSVAIARLGHRARFIGAVGDDVIGEIILKELESEGVEVRYVKKIGGLRSGVVVVIVQPDGGKRMIAYRGANMGLSPDDINEASLGGVDHVHVASGRVELILKAKEVAKRDGKSISVDGGTSLARKGLEVAAKALSGVDVVFMNQAEAKLLSSSSDHRAALDVIARNIDAREIVVTLGDRGAMALSGGEFLYVDAFRLQALDTTGAGDTFAAAYIAARLMGLSLYERLLFANAAASIKVTRPGARSSPRLSEVLEFLRSLGYRLAE

SEQ ID NO: 20462 - protein, 434 aa, Bradyrhizobium sp. BTAi1
MDAKSASKTATLTVGNKNFDLPILSGTVGPDVIDIGKLYAQTGMFTYDPGFTSTGSCQSKITYIDGDAGVLEYRGYPIEQLAEKGDFLETCYLLLYGELPTAAQKKDFDYRVTHHTMVHEQMSRFFHGFRRDAHPMAVMVASVGALAAFYHDSTDINDPKQRMIASMRMIAKIPTLAAMAYKYTIGQPFVYPKNALSFAENFLHMCFAVPCEDYKPNPVLADALDKIFILHADHEQNASTSTVRIAGSSGANPFACIAAGIACLWGPAHGGANEAALNMLAEIGTVDKIPEFIAKVKDKNSDVRLMGFGHRVYKNYDPRAKIMQKMCHAVLKETGHADDQMLKVALELEKIALSDQYFIDRKLYPNVDFYSGITLKAMGFPVSMFTVLFAVARTVGWISQWSEMIEDPQQKIGRPRQLYTGVATRNYVEIDKRG

SEQ ID NO: 20463 - protein, 382 aa, Corynebacterium efficiens YS-314
MNDKNVEVRRGLYGVVSDYTAISKVMPETNSLTYRGYPVQDLVEHCSFEEVIYLLWNGELPTAEQLREFNTRGRSYRVLDAGLIALIHSLPMGCHPMDVLRTAVSYMGTKDPEPFTTGADHVLRIGHNLLAQLPMVVAMDIRRRSGADIIAPDPDKGIAENFLSMVFGTASASVATNPEDVRDFEKSLILYAEHSFNASTFTSRVITSTRSDAYSAIAGAIGALKGPLHGGANEFVMHTMLDIDDPDNAAAWVHRALDNKDLIMGFGHRVYKSGDSRVPSMEKSMRALAQRHDAEKWVRMYEQMQQVMEDRTGIKPNLDFPAGPAYHILGFPVDFFTPLFVLARLAGWTAHIVEQYENNSLIRPLAAYNGVEQREVVPIDQR

SEQ ID NO: 20464 - protein, 216 aa, Xylella fastidiosa Ann-1
MVMTIEALKHLGRVDQSRVGRTEPLPLDNRHYVNGHPLCDAFPGLALIQFGLGCFWGAERLFWQLPGVFSTAAGYAGGGVPYPTYREVCSGETGHAEVVLVVYDHTVISFEQLLQTFWESHDPTQGMRQGNDIGTQYRSVIHCTTSEQYAAASASREVYQQQLNTAGYTAITTEILHPAPPFYYAENEHQQYLAKHPNGYCGLGGTGVTCAIRLQV

SEQ ID NO: 20465 - protein, 147 aa, Funaria hygrometrica
MDFPLFQILSFPDELEKSLNPQSQKYVRDTKAMVSTAVDVKELPDAYIFVADMPGLKSADMKVQLENDNVLVIGGTRKREEPDPKVKYIRMERNSGSFMRKFTLPQNSNLDKIAASCVDGILTVTVPKIPPPEPAKPRTIEVTMGNQ

SEQ ID NO: 20466 - protein, 180 aa, Rhizobium gallicum bv. gallicum
EFDAFPALEQLPLWGFDGSSTMQAEGRSSDCVLKPVAVYPDPARTNGALVMCEVMMPDGVTPHPSNSRATILDDEDAWFGFEQEYFFYENGRPLGFPEQGYPAPQGPYYTGVGYKNVGSVAREIVEEHLDLCLAAGINHEGINAEVAKGQWEFQIFGKGSKRAADQIWMARYLLLRLCEK

SEQ ID NO: 20467 - protein, 666 aa, Xylella fastidiosa Ann-1
MTKPTRRQLANAIRFLAADAVQAAHSGHPGMPMGMADIAEVLWNDFLRHNPNNPNWFNRDRFILSNGHGSMLQYALLHLSGYDLPLDELKRFRQLHSKTAGHPERSETPGIETTTGPLGQGFANAVGFALAEKLLAQRYNRPEHLIVDHRTWVFMGDGCLMEGISHEAAALAGTWNLGKLICFWDDNNISIDGNTAGWFTEDTPARFEAYGWHVIRDIDGHDAEKIATAIQAAVAQENKPSLLCCRTVIGFGSPNKAGKESSHGAPLGAEELEATRKMLDWPYGPFEIPSEIYDGWRANGTGMLRQAEWEQAFDNYARQYPKEAAELTRRSHAELPTDFLSQLDAYIAKVHAAGPCIASRKASQMAIEAFAPLLPELIGGSADLAHSNLTLWKGSQTVVGDAPNANYAYYGVREFGMSAIANGLALHGGFIPFDATFLVFSDYARNAVRMSALIPAHVIHVYTHDSIGLGEDGPTHQPVEHLAALRYIPNNDVWRPCDAVESAVAWKAAITRNNGPSCLVFSRQNLPHQPRHDAQLEQIARGGYILADAASSIPDIILIATGSEVSLAIEAKKTLDAMQLKTRVVSMPSTNVFERQDPTYRESVLPSKVHKRVAIEAGVTGFWWQYVGLHGAVIGLDTFGASAPADVLYKHFNITAEHVVEVAKAL

SEQ ID NO: 20468 - protein, 312 aa, Medicago sativa
MGSVEIPTKVLTNTSSQLKMPVVGMGSAPDFTCKKDTKDAIIEAIKQGYRHFDTAAAYGSEQALGEALKEAIELGLVTRDELFVTSKLWVTENHPHLVIPALQKSLKTLQLDYLDLYLIHWPLSSQPGKFTFPIDVADLLPFDVKGVWESMEESLKLGLTKAIGVSNFSVKKLENLLSVATVLPAVNQVEMNLAWQQKKLREFCNAHGIVLTAFSPLRKGASRGPNEVMENDMLKEIADAHGKSVAQISLRWLYEQGVTFVPKSYDKERMNQNLRIFDWSLTKEDHEKIDQIKQNRLIPGPTKPGLNDLYDD

SEQ ID NO: 20469 - protein, 348 aa, Corynebacterium glutamicum ATCC 13032
MVGGKGTRLRPLTVNTPKPMLPTAGHPFLTHLLARIKAAGITHVVLGTSFKAEVFEEYFGDGSEMGLEIEYVVEDQPLGTGGGIRNVYDKLRHDTAIVFNGDVLSGADLNSILDTHREKDADLTMHLVRVANPRAFGCVPTDEDGRVSEFLEKTEDPPTDQINAGCYVFKKELIEQIPAGRAVSVERETFPQLLEEGKRVFGHVDASYWRDMGTPSDFVRGSADLVRGIAYSPLLEGKTGESLVDASAGVRDGVLLLGGTVVGRGTEIGAGCRVDNTVIFDGVTIEPGAVIENSIISSGARIGANAHISGCIIGEGAQVGARCELNAGMRVFPGVVIPDSGIRFSSDQ

SEQ ID NO: 20470 - protein, 765 aa, Zea mays
MAVLGTAAVEVLIPVAALVGIAFALLQWYVVARVPVPSHAGEDGGGGGNKNVREEEEHVEEDGMDYLLVEARCAEIQRAISVGATSFLLTEYKYLAVFTAAFAVVIFVFLGSAQRFSARPGPCAYDPSRECRPALANAAFSAVAFLLGAATSVLSGYLGMRVATFANARTALEARHGVGRAFAAAFRSGAAMGFLLASSALLVLYAAVNLFGLYYGDDWGGLYESITGYGLGGSSVALFGRVGGGIYTKAADVGADLVGKVERNIPEDDPRNPAVIADNVGDNVGDIAGMGSDLFGSYAESSCAALFVASISSFGAEHNLTAMMYPLLISAVGLLVCAITTVVATDVTEVKGSDEVGPALKRQILISTVLMTAGIAAVTFLGLPPSFTLFDFGNDKHVKNWHLFICVSAGLWAGLVIGYVTEYFTSNAYGPVQAVARSCRTGAATNVIFGLAVGYKSVIVPIMAIAAAIYASFRLAAMYGIALAALGMLSTIATGLAIDAYGPISDNAGGIAEMAGMPHRVRERTDALDAAGNTTAAIGKGFAIGSAALVSLALFGAYVSRAGITAVDVLSPRVFVGLLLGAMLPYWFSAMTMRSVGSAALRMVEEVRRQFDTIPGLAEGLAVPDYATCVRISTDASLKKMMAPGALVMFSPLVAGTLFGVETLAGLLAGALVSGVQVAISASNSGGAWDNAKKYIEAGLSEEARSLGPKGSEAHKAAVIGDTIGDPLKDTSGPSLNILIKLMAVESLVFAPFFAAHGGIIFDHL

SEQ ID NO: 20471 - protein, 180 aa, Rhizobium gallicum bv. gallicum
EFDAFPALEQLPLWGFDGSSTMQAEGRSSDCVLKPVAVYPDPARSNGALVMCEVMMPDGVTPHPSNSRATILDDEDAWFGFEQEYFFYENGRPLGFPEQGYPAPQGPYYTGVGYKNVGSVAREIVEEHLDLCLAAGINHEGINAEVAKGQWEFQIFGKGSKRAADQIWMARYLLLRLCEK

SEQ ID NO: 20472 - protein, 349 aa, Flaveria brownii
EFYIGLRQRRATGQEYAELMNEFMSAVKQNYGEKVLIQFEDFANHNAFDLLEKYRTTHLVFNDDIQGTASVVLAGLISALKLVGGSLADHKFLFLGAGEAGTGIAELIALEISKQTNIPLEESRKKVWLVDSKGLIVRSRLDSLQHFKKPWAHDHEPVDKFLDAIKTIRPTVLIGSSGTGQTFTKEVVETMSSLNEKPIILALSNPTSQSECTAEQAYTWSEGRAIFASGSPFGPVEYNGKLYMSGQANNAYIFPGFGLGLIISGAIRVHDDMLLAASEALAEQVTEEHFDNGLIYPPFTNIRKISAHIAAKVAAKAYELGLASRLPQPENLVAYAESCMYSPKYRSYR

SEQ ID NO: 20473 - protein, 504 aa, Zea mays
MQSLLMPTAASAPVAAPRARRNLPMRLSVRASATAAAAPRRETDPKKRVVITGMGLVSVFGNDVDAYYERLLAGESGIGPIDRFDASKFPTRFAGQIRGFSSEGYIDGKNDRRLDDCLRYCIVSGKKALEAAGIAHGSKPMEKIDKTRAGVLVGTGMGGLTVFSDGVQNLIEKGYRKITPFFIPYAITNMGSALLGMDIGFMGPNYSISTACATSNYCFYAAANHIRRGEADIMIAGGTEAAIIPIGVGGFVACRALSQRNDDPKTASRPWDKDRDGFVMGEGAGVLIMESLEHAIKRDAPIIAEYLGGAVNCDAYHMTDPRSDGLGVSSCIKQSLEDAGVAPEEVNYINAHATSTLAGDLAEVNAIKQVFKDPSGIKINATKSMIGHCLGAAGGLEAIATVKAITTGWVHPSINQFNPEEAVEFDTVPNVKKQHEVNVGISNSFGFGGHNSVVVFAPFKAIRCSWPHKPWSEQRGSSLGVSAFNFHVFSLGEVMSDLSRQRYK

SEQ ID NO: 20474 - protein, 481 aa, Burkholderia sp. 383
MKPSHPIETDALARLDNLPWTRFHTLMLVALGVGWALDSFETNIIGSVFGVLKSHWHLSAAQGSLAVSIWVFGMLVGAIAFGYLADRYGRKRLFLATLLWYAFFSVATVLSWNYESFLFFRAMTALAVGGEYSAVTATMGEFIPKRHRGRTDALILSGFPVGALLSAAVSYLVLNQLPAEWAWRVGFGLGTTMALVFFWIRRVIPESPRWLIQQGRVAEADAIVEQVVASAARDPLAQADRALLTKRYAPTRYAHQAPAFWRNVGELFGAYRARCALAGALNFSQAAVVYGVLSLMALVILPYMKVASTDMPLYYMIGNAAALAGGIVAAVLVEAWGRRASLFVSYTFTVAAIVFIYAMHALPGMVLGYCLIQFGVTWAYISGYVVSSEILPTRIRATGLGVSVAIGRLGAVVAPLMLTNVYAMSGSPSAALIVLLVLALPGPLAAGLWWINGRETRRISLEECSTEADAQPAVDAAPRVA

SEQ ID NO: 20475 - protein, 175 aa, Oryza sativa
MAPTVMASSATSVAPFQGLKSTAGLPVSRRSTNSGFGNVSNGGRIKCMQVWPIEGIKKFETLSYLPPLTVEDLLKQIEYLLRSKWVPCLEFSKVGFVYRENHRSPGYYDGRYWTMWKLPMFGCTDATQVLKELEEAKKAYPDAFVRIIGFDNVRQVQLISFIAYKPPGCEESGGN

SEQ ID NO: 20476 - protein, 473 aa, Staphylococcus aureus subsp. aureus Mu50
MSEKQYDLVVLGGGTAGYVAAIRASQLGKKVAIVERQLLGGTCLHKGCIPTKSLLKSAEVFQTVKQAAMFGVDVKDANVNFENMLARKEDIINQMYQGVKHLMQHNHIDIYNGTGRILGTSIFSPQSGTISVEYEDGESDLLPNQFVLIATGSSPAELPFLSFDHDKILSSDDILSLKTLPSSIGIIGGGVIGMEFASLMIDLGVDVTVIEAGERILPTESKQASQLLKKSLSARGVKFYEGIKLSENDINVNEDGVTFEISSDIIKVDKVLLSIGRKPNTSDIGLNNTKIKLSTSGHILTNEFQQTEDKHIYAAGDCIGKLQLAHVGSKEGVVAVDHMFEGNPIPVNYNMMPKCIYSQPEIASIGLNIEQAKAEGMKVKSFKVPFKAIGKAVIDSHDANEGYSEMVIDQSTEEIVGINMIGPHVTELINEASLLQFMNGSALELGLTTHAHPSISEVLMELGLKAESRAIHV

SEQ ID NO: 20477 - protein, 457 aa, Cryptococcus neoformans var. neoformans JEC21
MDITAALHEASSQQNQKLRSQAYLSLLQSLLQPPLTSASPLIAFGTHFTTSNTVIIIVGRRILGAYLVALLSGTTVVQKGTAKVPLDEEGQADEAEWAALGKAAFGGEKGEEVRRDVVEGVLAAGSSGWCDEQITVLRHLHSHLLMLEEDWEGAARALMPMQLEGGSRVVSDDEKLNVYMQIVRLFLECGEWGQAQTYFTRASLLPRPTDKETRLSMRLSQAKLYDFANEFAKASVTYHEVSHDPSIDPSDRLIILSAAVTTSILAPSGPHRSRILATLNRDDRVHTELPAGLGTMLKKMLLEYIVKPEEMKEFEGALAPHQRAVVEGGGTVLERAVREHNVGACAKVYDNISFSALGAILNLSPSSAETIAQRMIEQSRLRAWIDQPSQLIFFESRPQLDTDADAQGTAGGLGVEKEEKEVEKVGWGVRWDERIRGTSLRVEGIAEAILAKGLIDA

SEQ ID NO: 20478 - protein, 462 aa, Candida glabrata CBS138
MQILGENFKEVEIMDSEYDRRKLEEESAGPPGDEPMGQENHEQLENHIDKATESQMSKELVVEDDQYDQGSHNIDYEARNKEEHNNGTNRTDGGHTQGTEQSNEQQTESNHEQQQQQRLQQTEQHQQHQMETVKKPLIYGANTSGKYTLSDFQILRTLGTGSFGRVHLIRSNHNGRFYALKALKKHTVVKLKQVEHTNDERRMLSIVSHPFIIRMWGTFQDSQHVFMVMDYIEGGELFSLLRKSQRFPNPVAKFYAAEVCLALEYLHSKEIIYRDLKPENILLDKNGHIKITDFGFAKYVPDVTYTLCGTPDYIAPEVVSTKPYNKSVDWWSFGILIYEMLAGYTPFYDANTMKTYEHILNSELKFPSFFHPDVQDLLSKLITRDLSKRLGNLQNGSEDVKNHPWFSEVVWEKLLARYIETPYEPPIQQGQGDTSQFDRYPEEEINYGVQGEDPYADLFREF

SEQ ID NO: 20479 - protein, 1839 aa, Saccharomyces kluyveri
MSSPTDAERVNMRREKHPQIEETFEEHVHNAMPKFKKHYALGITTHTNDEDDDPRDHRQRGIHNPNFIHSPNDPRPPLSQPIKPRFSVHGTASNASVFSHGDIAPVRKTSRAGSLFKRLAGKKSTTSLLGTEHQQRQQQQSSNSLVPAAGLRRKMSTFIHGGSGSQSNESRGTRSSIFFPSTSNSRRGSATSTMTSGSRSSHPPDTPPITSQQQEQQYDQQRQQRPETREQEQKPPTLSDMPIVSRSPSFFMLDTDLNNLSDITNIISATPKNTESDEVRSTGANKTLKYPKPPLSSHKSTSASDLSHHKAQWTAPESWDIEEDANKLLATKRKAKHHHHYHHPQHPRPPHRKHYSNFSKPIEDKAVVEKEQEPPEKCPQPISTDSNDAQGLEIAKPIDESSGIQHSASTQSVSSFSSGATGASGATGKQIGGDQETESTISTVGEDEEVTNLRSIDSEQTDDTSFSKFDEEYDKAEYQLEKYYNDFSDVDLNRRYAIRIFNIDDTFTTLSCTPNTTLQDMMPQLKRKFNVGQGSYQVSLKVGKLSKILRPTAKPILIQRRLLLLNGYLKSDPLHIMGIEDLSFIFSFVFHPVATSHLNYEQEQRLSRGDFVHVDLRNMDLTTPPIILYQHTSDIESLDVSNNANIFLPLDFIESAIKLSSLRMVNIRASKFPANVTDAYKLVSLDLERNFIKKVPDSIFKLNNLTIVNLQCNNLERLPPGFSKLKNLQLLDISSNKFVNYPEVINSCTNLLQIDLSYNKIHSLPVSINQLVKLAKMNLFNNRLTSVGDLSQMKNLRTLNLRCNRVTSIECHAPNLQNLFLTDNRISTFDDDLTRLRTLELQQNPITSMVCGGNYMANMTSLSLNKAKLSSFSAELLSKLPRLEKLELNENNLTQLPPEINKLTRLIYLSVARNKLESIPDEISDLRSLKSLDLHSNNLRMLMNNLEDLELTSLNVSSNLLTGFHGSPAKFFASPSPKLAKSLLFLSVADNNLTDSIWPLVNTFQNLKTLNLSYNNFVEISDLKLQNLTELYLSGNNFTSLPGEAVQHLRSLKVLMLNGNKLLSLPAELSQLSRLSVLDVGSNQLKYNISNYHYDWNWRNNKDLKYLNFSGNKRFEIKSALDPEGKNDLSDLGILKQLRVLGLMDVTLKTSKVPDESVSIRLRTTASMINGMRYGVADTLGQSDSVCSRDVTFERFRGREDECLICLYDGKNENASSGHKISKIIRDIYDKILIRLLEKYGEESDGIKRALRYSFLQLNKEINGMLVSVEDGNTDSGLTSADLLSGSSATVVYLKGKKIYTANIGDTMAVLSKNNGDFVTLTKLHVPAEREEYERIRTSGGYVNNQKLDGVSEVSRAVGFFDLLPHIHASPDISETVLSYSDEMLIIATHKLWEYLDYETVCDISRENKSQPMSAAEKMKDYAISYGCSDNITILCVSLDKSVNQQSQFTLNREDLISRKNTFEDTVLRRLQPEIAPPTGNVAIVFTDIKNSTFLWELFPDAMRAAIKTHNDIMRRQLRIYGGYEVKTEGDAFMVAFPTPTSALVWCLSVQLKLLEAEWPEEITSIQDGCLITDNSGTKVYLGLSVRMGVHWGCPVPEIDLVTQRMDYLGPVVNKAARVSGVADGGQITLSSDFCSEFKKIMKFHKRVVENQEPLKEVYGEDFIGEVLEREIHMLENVGWVFKDLGEQKLKGLETKEFITIAYPKTLASRHDLATKNQNSSVLNDDLLFQLRTISNKLENILSSINGGLIESETPGNSSIYMTFDKNTKDAVITKSTESDWISFLDHLVTRVESTVAILQLRQKLQGGLELYTSSDSTMHKSVFELLDEILKIQTDQKQ

SEQ ID NO: 20480 - protein, 360 aa, Propionibacterium freudenreichii subsp. shermanii
MNPRLKALSDAGVSIWLDDLSRARITSGGLAELIKDSSVVGVTTNPTIFAGALSNGADYAAQLTELGDVSTAEAIKQLTATDVRDACDLFAPIYQSSEGYDGRVSIEVEPGLAHDTEATTKQAAELYKLVDRDNVLIKIPATLAGLPAIEATIAAGISVNVTLIFSVERYRKVMDAYMAGLEKAAAAGKDLSKIHSVASFFISRVDSEIDKRLGALNHPELAGKAGVANGLVAFGAYQEVFASERFQKLAAKGANLQRPLWASTGTKNAAYPDTLYVSDLVARGVVNTIPEKTMQAFADHGELGEPIDGRAAEGQATLDKIAAAGVPLAEVFDQLETEGVDKFVASWAELVESVASAMKR

SEQ ID NO: 20481 - protein, 572 aa, Penicillium chrysogenum
MANAPHGGVLKDLLARDAPRQAELAAEAESLPAVTLTERQLCDLELIMNGGFSPLEGFMNQADYDRVCEDNRLADGNVFSMPITLDASQEVIDEKKLQAASRITLRDFRDDRNLAILTIDDIYRPDKTKEAKLVFGGDPEHPAIVYLNNTVKEFYIGGKIEAVNKLNHYDYVALRYTPAELRVHFDKLGWSRVVAFQTRNPMHRAHRELTVRAARSRQANVLIHPVVGLTKPGDIDHFTRVRAYQALLPRYPNGMAVLGLLGLAMRMGGPREAIWHAIIRKNHGATHFIVGRDHAGPGSNSKGEDFYGPYDAQHAVEKYKDELGIEVVEFQMVTYLPDTDEYRPVDQVPAGVKTLNISGTELRRRLRSAHIPEWFSYPEVVKILRESNPPRATQGFTIFLTGYMNSGKDAIARALQVTLNQQGGRSVSLLLGDTVRHELSSELGFTREDRHTNIQRIAFVATELTRAGAAVIAAPIAPYEESRKFARDAVSQAGSFFLVHVATPLEHCEQSDKRGIYAAARRGEIKGFTGVDDPYETPEKADLVVDFSKQSVRSIVHEIILVLESQGFLERQ

SEQ ID NO: 20482 - protein, 358 aa, Propionibacterium freudenreichii subsp. shermanii
MSIEYTPGPLLEAARNTPTALWNDSADPDELRQSISFGGVGATCNPSIAYTCITKRKDKWLPRIAEIAEEMPQASESEIGWQAVKELSLEAAALLEPIFERENGRDGRLSIQTDPRLARSAKALADQAEEFSKLTKNIIVKIPATEVGIAAIEDATYRGVSVNVTVSFTVPQAITAGEAIERGLKRREAEGKDTSTMGPVVTLMGGRLDDWIKIVAKRDGLFLDPGHLEWGGVAALKRAYHEFQARGLRARVLSAAFRNVMHWSELVGGDLVVSPPFAWQEIINKSDYKPVNRIDEPVAPEIMKTLQSIPEFVRAYEPDGLTPAEFDAFGATRRTLRGFLQADADLDELVRNVIMPQP

SEQ ID NO: 20483 - protein, 189 aa, Saccharomyces cerevisiae
MANLRTQKRLAASVVGVGKRKVWLDPNETSEIAQANSRNAIRKLVKNGTIVKKAVTVHSKSRTRAHAQSKREGRHSGYGKRKGTREARLPSQVVWIRRLRVLRRLLAKYRDAGKIDKHLYHVLYKESKGNAFKHKRALVEHIIQAKADAQREKALNEEAEARRLKNRAARDRRAQRVAEKRDALLKEDA

SEQ ID NO: 20484 - protein, 382 aa, Fremyella diplosiphon Fd33
MPKYIWSKKMVILGNVLNEFKTCTQLQYNGTLNLKSAKNHKWSFYYRLGRIIWASGGIHPFRRWRRQMAQNCPEIDVDKIRLSSQDVAIEYWDYRLLEILYKKQKIQREQFHNIVEHTIAELFFDLAQESDFSDVTCNRSQELIVEMPMSFTSADVSLQMHDSWKIWSEAGLANLYPDLAPIIRKPEQLQQLVSPAVYNNFVNLINGKYTLRDLAVKMKQNPLPVARSLLPYILKGIIELIEIPDLPLSVVTVQKNSAPATPQKPNVPLVACVDDSPQVGKLLEEIITSHGLRFIKIHDAVQALPILIQNKPDLIFLDLMMPVASGYEICTQLRRISAFAHTPIIILTGNDGLLDRVRAKVVGSTDFITKPVASDKVMSIVR

SEQ ID NO: 20485 - protein, 139 aa, Wolbachia endosymbiont of Drosophila ananassae
MAIEKTLSILKPDAVKNNITGKINSYIESSGLKIIAQKMMLLTKKQAELFYEIHKDRPFFGELVEFMTSGSVIVQVLVGENAVSKYRQIMGATNPKQADKGTIRGDFADDISENRVHGSDSLENARKEIAFFFAECELV

SEQ ID NO: 20486 - protein, 433 aa, Burkholderia vietnamiensis G4
MTPSDVKATLSFSDNSPSVEMPIYKGTMGPDVIDIRKLYGQTGKFTYDPGFMSTASCNSAITYIDGDKGELLYRGYPIDNLAQNADFLESCYLLLKGELPNAAQKKEFVDTVTKHTMVHEQMHFFFRGFRRDAHPMAILVAAVGALSAFYHDSLDINDPRHREVSAIRMIAKLPTLVAMAYKYSIGQPFVYPKNSLSYSANFMHMMFSNPCEEYKVNDVLVRALDRILILHADHEQNASTSTVRLAGSSGANPFACIAAGIACLWGPAHGGANEAALNMLEQIGSPDNIPEFIKQVKDKNSGVKLMGFGHRVYKNYDPRAKLMRETCYEVLNELGLHDDPLFKLAMQLEKIALEDEYFVSRKLYPNVDFYSGIVQRALGIPTSMFTCIFAMARTVGWIAQWNEMIADPEQKIGRPRQLFIGDTPREAKPLNAR

SEQ ID NO: 20487 - protein, 549 aa, Zea mays
NYVHLQLFLPHCSVRTYKIVAALGGSSGPSTSLVVGVAVGGLVLLLLASFICLCCLRKKRRRAPPPPQHYGYPPPPPPYKEDPYGGTYQSWQQNAPPAPPPEHVVKMHPSPPPAYANRPPQPPAPPPPAMLNSSGGSGSNYSGGEILPPPSPGAVLGFSKSTFTYEELLRATDGFSDANLLGQGGFGYVHRGLLPNGKEIAVKQLKLGSGQGEREFQAEVEIISRVHHKHLVSLVGYCISGGKRLLVYEFVPNNTLEFHLHAKDRPAIEWPARLKISLGAAKGLAYLHEDCHPKIIHRDIKASNILLDFQFEAKVADFGLAKFTTDNNTHVSTRVMGTFGYLAPEYASSGKLTEKSDVFSFGVMLLELITGRRPVDTTQTYMDDSLVDWARPLLMRALEDGEYDALVDPRLGKDFNPNEMARMIACAAACVRHSARRRPRMSQVVRALEGNVSLEDLNEGVRPGHSRFFGSYSSSDYDSGQYNEDMKKFKKMAFNNNYTSSQYSAPTSEYGQIPSASSSEGHQTQEMESGAMKKGGYSGGYSSGYSGAS

SEQ ID NO: 20488 - protein, 591 aa, Burkholderia vietnamiensis G4
MAAIKTSLPRRKFDVVIVGAGGSGLRAALQLSRAGLSVGVLSKVFPTRSHTVAAQGGIGASLGNMSEDNWHFHFYDTIKGSDWLGDQDAIEFMCREAPNVVYELEHFGMPFDRNADGTIYQRPFGGHTANYGEKPVQRACAAADRTGHALLHTLYQQNVEAKTQFFVEWMALDLIRDADGDVLGVTALEMETGDVYIMEGKTTLFATGGAGRIFAASTNAFINTGDGLGMAARSGIALQDMEFWQFHPTGVAGAGVLITEGVRGEGGILRNSNGERFMERYAPTLKDLAPRDFVSRSMDQEIKEGRGVGPNKDHVLLDLSHIGAETIMKRLPSIREIALRFANVDCIKEPIPVVPTIHYQMGGIPTNIHGQVVGTSRDHKEPVNGFYAVGECSCVSVHGANRLGTNSLLDLVVFGRAAGNHIVQHVKNQRDHKPLPADAGEYSLARLAKLEKSTSGEYTQDVANDIRSTMQKHAGVFRTSALLKEGVDQMAGLKERVENIHLKDKSKVFNTARIEALELENLIEVARATMVSAEARKESRGAHAHSDYEHRDDDNWLRHTLWYSEGDRLDYKPVQMKPLTVDSVPPKPRTF

SEQ ID NO: 20489 - protein, 457 aa, Bacteroides thetaiotaomicron VPI-5482
MKQYDAIIIGFGKAGKTLAAELSNRGWQVAVVEQSDEMYGGACPNVACIPTKTLIHESEISTLLYHNDFDKQSNMYRQAIARKNKLTSFLRENNYEKLSKRPNVTIYTGKGSLVSANTVKVALPEEEIELQGKEIFINTGSTPIIPSIEGIQQSRNVYTSTTLLELDILPKHLIIVGGGYIGLEFASMYAGFGSKVTLLEAGNRFMPRNDSDIAKSVREVMEKKGVEIRLNVRTQSIHDTHDGVTLTYSDTSDGTPYFVDGDAILIATGRKPMIEGLNLQAAGVEVDAHGAIVVNDQLHTNAPHIWAMGDVKGGAQFTYVSLDDFRIIRDQLFGDKKRDINDRDPLPYAVFIDPPLAHIGITEEEALRKGYSFKVSRLPATSVVRSRTLQQTDGMLKAIINSHSGKIMGCTMFCTDAPELINMVAMAMKTGQTSTFLRDFIFTHPSMSEGLNQLFDV

SEQ ID NO: 20490 - protein, 294 aa, Xylella fastidiosa Ann-1
MIVGAFAERVKFAAVLLFIFIWFSFGYLPLAHMVWSTPGFMLSKGALDFAGGTVVHINAGIAGLVGAYFVGKRIGFGQVAVKPHNVPMTFTGAALLWVGWFGFNAGSALEANSIAALAFINTMLATAAAILVWSLLEKMTKGKFSALGVASGMIAGLVGVTPAAGTVGPFGAITIGAVAAVCCIWGITGLKRLLKVDDTLDVFGVHGIGGIVGAILTGVFTDKALGGQGYAEGMTMSNQVMIQAMGVGISIVWIGIVSLVGFLIVKLLFGLRVSEEAEREGLDITSHGESAYES

SEQ ID NO: 20491 - protein, 470 aa, Schizosaccharomyces pombe
MDNLKKKYQHHLSLESASREYGPFQMLGRIQSDSDIKMLSFAGGEPNPSKFPIHKLSVSFPEVNSWEKDTNKDATVSYELSNNANEGSLDLLGALQYGQCQGIPELVKFIKDHVGQIHMPQYKDWDIKITNGNTIGLEYCLRLLVNRGDCILIEKYTYPAAITAMRPLGVKFIPIDMDENGMLPESFEKVMETWDSSLGARPHVLYTIPTGQNPTGSTLTLERRKKFLTLAKKYDIIIVEDEPYYFLQMEKYDANWKPDKQAFNISSFKKKLIPSLLHLDTDGRVLRVDSFSKLIVPGLRLGWITGNSLFIDRITRYAEVCTESPSGVSQVVLYAILNRWGQNGFLEWLQDLQNSYTMRRNALLLAADKHLPKSVCKYHSPKAGLFLWVELDKNRLICSNMDKSISEIEMEIFVELVNNGVKPVCGQLFMGEPNSADKIFFRFAYSLADLSTFEAGLERFTSTIQKYFQL

SEQ ID NO: 20492 - protein, 582 aa, Cryptococcus neoformans var. neoformans B-3501A
MTMELLKVLHHGASQLFPNCIRSSPVACIVLYSFGGIAILLFTVYLWLWPFQYAKLYFRNLPGPPSDSWFWGVVPTLIKSPPSVPHSMWTDEYGPTVRYRVALGAQRFLTIDPTALNYILSHADLFPKPSRVRKALSDLLGNELLTAEGHTHKKQRKALNPSFSPAAVRGMIPVFYDKAYELKAKLLGIIEGDETEQASPTPCKEEDEVEGGKKIDVMKYLGKTTLDVIGIVGFSYDFKALSEPRNELSEAYSKMFQAGMDANFWDFLRGAIPLVNKLPNKRATEIAARKAVTLRISKKIVEDKKREVMSAHSEGLEKREDIGDDLLSILIKANMASDVKPEQKLSDEEVLDQITTFMLAGNETSSTALTWILYSLTQHPECQKRLREEVLAVPDDRPSLETLNNLPYMDAVIREALRLHAPAPGTMREAKEDTVIPLSMPVIGRDGKQIDSVKINKGTMVFIPIITVNTSPAIWGPDARVFNPDRHFKTSSDSFGGANMHVPGVWGNMLSFLGGARNCIGYKLALAEISTILFVLIRSFEFQELKSKPEVEKKASVVMRPRIKGEESAGLQMPLMVKPLLM

SEQ ID NO: 20493 - protein, 167 aa, Triticum aestivum
  misc_feature (56)..(56): Xaa can be any naturally occurring amino acid
  misc_feature (78)..(78): Xaa can be any naturally occurring amino acid
  misc_feature (83)..(83): Xaa can be any naturally occurring amino acid
  misc_feature (91)..(91): Xaa can be any naturally occurring amino acid
  misc_feature (148)..(148): Xaa can be any naturally occurring amino acid
  unsure (1)..(167): unsure at all Xaa locations
KKLAIFTALAFSQKLSGLPPETVFQPLLKDNLVAKGIVLSFITEFFKEYLKENTLXDDLIALLKKGKMEDNLLDFFPXAKRSXEALSEHFXKEGLTSLVEYNEKKMFEVKLKEIKSTLTTMINDEAAIPEVIETVKQQVKDAKFPDLXSSQLWDVLMEVMGREHNSN

SEQ ID NO: 20494 - protein, 578 aa, Cryptococcus neoformans var. neoformans B-3501A
MGDQTPTQLIMGSSSRPTSPRPLSANSHSSSGDEKEKKGLMLPPPVPVKTNKGQEDKPVPPRMTRLPSLKQLSEHLHYTPPTPPSQPNLHEQSPGSSSSNPLRISTNPVPLQSSSAASHTSIVMTPTSTGRLKLPASAMMRSLSAGSSGSATGGLAPVTSSPAIAPNLGSVQGQGHSPTSAHSPTPAQQLAKFVPGGLGDFRPESGPEASTSMSRSASHEVRAEHHREIPSLDEIKKKVNVSKGEDQHRLDLPNERVTEKEKSKTSVESTGERISISSAKDGKKEHPLQHSWTLYYDSKTYKPDPSLIASKQGDKILADYEMTLLTVGKFDTVEGFARHFNNVRLPSQLTPSSNYHLFKSGIRPMWEDPANANGGKWVILFRSSPGTLDIAWANLTMALVGEILDPENQVCGIVGSTRPKVDRLQVWTRGKDDVEGLNQLGKRIVEVMALEGRDADSMSMEYQYNTNDSRPPPNKFIHISYANRAPSTPSRSMSSAFQGPPGSLGGMGQARTHSSSGVNLTHPLPLPPHSPAVIKGDHGSGNNATGMKRGLSHGNPLTGPLDLVRQENYGSQEGVTGV

SEQ ID NO: 20495 - protein, 198 aa, Propionibacterium acnes KPA171202
MGAWSGFGITFETMFRKSFTQGYPEKGKEKPMPPRMHGRHQLNRWPDGLEKCVGCELCAWACPADAIYVEGADNTDEERYSPGERYGRVYEINYLRCILCGMCIEACPTRALTMTNDFKMADTSRAKHIWTKDELLAPLKEGMEQPPHPRRLGDDEDDYFNGLPPSGQDDVRTGPANSGATAHRDDDNDTQHKDEEAA

SEQ ID NO: 20496 - protein, 182 aa, Triticum aestivum
MSDEAASPPGGGGGGGGGGSDDGGGGGGFGGVREQDRFLPIANISRIMKKAIPANGKIAKDAKETVQECVSEFISFITSEASDKCQREKRKTINGDDLLWAMATLGFEEYIEPLKVYLQKYRETEGDSKLAGKSGDVSVKKDALGPHGGASGTSAQGMGQQVAYNPGMVYMQPQYHNGDISN

SEQ ID NO: 20497 - protein, 634 aa, Rhodopseudomonas palustris CGA009
MTAPNKPQSSNSDASAISLSLDAIAATENVGPRTGTLRADADPSQVEEVAAVVKRSRLKPLLSLMPYVARYRGRATLALIALIVAAATTLVVPVAVRRLIDFGFSAEGVELINGYFSVMLGVVVVLAAASAARYYLVMTIGERIVADVRRDVFRHLTALSPAFFDSARSGELISRLTADTTQIKSAVGASVSIALRNMLLFVGAISMMVISSPRLSGFVLAAIPLIVIPLVAFGRWVRRLSRNAQDTLADASAYAAELVGAIRTVQAYTNERVANARFGGAVEESYEAARSSTGARALLTAIIIFIVFASVVAILWVGSHDVAIGAMSPGRLGQFILYAVFAASSLGQLSEVWGEVSAASGAAERLFEILRVKPEIAAPAKPKALPMPVRGDVLFDNVSFSYPTRPDFLALDGLSLSIKAGEKVAIVGPSGAGKSTLFHLLLRFYDPTSGTIALDGVAINAADPQAVRERIALVPQDSVVFAATARDNISFGRDDASELDVERAAQQAHATEFISRLPEGFDTKLGERGVTLSGGQRQRIAIARAILRDAPLLLLDEATSSLDAESEVLVQTALQQLMRDRTTLVIAHRLATVLSCDRIVVMEHGRIVEQGTHAQLVARGGLYARLAKLQFEAA

SEQ ID NO: 20498 - protein, 388 aa, Oryza sativa
MASSSDEQPKPPEPPAAAAVAGTAVATAAAAVPTHAEWAASLQAYYAAAGHPYAWPAQHLMAAAAAGAPYGAPVPFPMYHPGAAAAYYAHASMAAGVPYPTAEAMAAAAAAAAGAVPEGKGKGKGAAASPEKARGAAPSGDDASRSGDSGSEEAADTRDDDTDHKDSSAPKKRKSGNTSAEGEPSQATLVPYAAVESPYPLKGRSASKLPVSAPGRAALPNATPNLNIGIDLWSTPPALAVPAGQGEASPGLALARRDGVAHLDERELKRERRKQSNRESARRSRLRKQQECEELARKVAELTTENSALRSELDQLKKACEDMEAENTRLMGDKAQYKGPTVTTTLGMSIDSSKTQHHDDEGQLHKNTNNNSNGNYVGGSHKPEANSR

SEQ ID NO: 20499 - protein, 72 aa, Aspergillus fumigatus
QITTKELGTVMRSLGQNPSESELQDMINEVDADNNGTIDFPEFLTMMARKMKDTDSEEEIREAFKVFDRDNN

SEQ ID NO: 20500 - protein, 139 aa, Yarrowia lipolytica CLIB122
MARTKSTVIARKVTGGKAPRKQIGSKAARKSAAPSNTSGGVKKPHRYKPGTVALREIRRYQKSTELLIRKLPFQRLVREIAQDFKTDLRFQSSAIGALQESVEAYLVSLFEDTNLCAIHAKRVTIQKKDIHLARRLRGE

SEQ ID NO: 20501 - protein, 138 aa, Saccharomyces cerevisiae
MGLRYSIYIENPLSSPSSSYKSINDPLFHSQHRSQKNVSFITYGCRHCKTHLSSSFQIISRDYRGRTGTAYLMNKVVNVVEGKVEQRRMLTGDYLVCDILCHWCKRNVGWKYLQSSNDDQQYKEGKFILELKNICKCT

SEQ ID NO: 20502 - protein, 293 aa, Neurospora crassa
MLNFQQTRGVRILKGLEDIIDLYELHASMGPTGWYFSGKGSSFPADPFYGFKYLPDLYKKADPSFTGPFTVPMLWDKKTHTVVNNESSEIIRMLTTAFDHLLPEHLREVNRPGGGLYPKHLQSSIDEVNSWVYNLINNGVYKTGFATTQQAYDANLYPLFEGLDRVEQLLSSPAPSDGGSPETKSRKYLLGDNLTETDVRLYTTIIRFDVAYRPVFQCSLKSIRHDYPNIYSWLRRLYWDQDSRETNSAFHSTSAPYLNMYGPSYAAARHKKVFGGQGPFIVPGGPTPLIDQL

SEQ ID NO: 20503 - protein, 837 aa, Synechococcus elongatus PCC 6301
MRAVLLAGGLGTRLRPLTCDRPKPMVPILNRPIAAHILQLLHRHGYQEILATLYYRPETIQQYFQEGQDWGVDLRYILEADRPLGTAGSVKNLTSQLQETFLVASGDCLSDFDLTAALAWHRQQQAIATVILARVDQPLEFGCVVCDRQQRIIRLIEKPDASELISDTVNSGFYILEPEALDYLPLDEPSDFATHLLPRLLAAGEVVTGYVDQGYWCDIGNRQAYQRAQLDALLGRVRLQANQMEWRPGIYVGEGTTIASSAQLEPPLWIGQHCYIGEEVQLKAGTVIGDESRIEAGACLDRAVVWNRVQIGQRSHLEGCVLADGVRLERHVQIHEGAVIGSGCRLQEEAQVQAEVRIWPRKQIEAGAIVNLNLIWATSARRRLFSDGGVRGIANVDITPEFAVKLGVAYGSTIPPGSSVTVSRDQRSISQMVTRSLIAGLMSTGITIRNLEAAAVPIARSMLARLPVVGGIHVRLDPLWPTHVLIEFLDREGLTVDRALERRIEAAFFQEDLRRVPMQDLGTMITVSETLPLYRQLFCDRLDRDLLLRSPNRIVIDYAYSVSGAVLPLLLSEFGCDAVILNASLRQQPPTENERQSLLEQMGQVVSAIKANCGVQVAANGERFTLVDEQGMALDHEQLTVLMAEICWLRRPGGTVVVPMTSSSAVDQTAWRYHGRVHRCRPTPTALMAACRNLPDVILGGSGELGFIFPEMHAGFDAIFGIARLIEGLDRQSRSLSQWVESLPSIAHRHLTLSCPRNLLGTLMRQLLESHEPDRLNFQEGLRIQGDRGDQWLLVLPDASYPLIHLYANAQDHQWVEQTLGSYQQQIEQFVATLQSP

SEQ ID NO: 20504 - protein, 161 aa, Oryza sativa (japonica cultivar-group)
MAEQTEKAFLKQPKVFLSSKKSGKGKKPGKGGNRFWKSIGLGFKTPREAIEGTYIDKKCPFTGTVSIRGRIIAGTCHSAKMNRTIIVRRNYLHFVKKYQRYEKRHSNIPAHVSPCFRVKEGDHVIIGQCRPLSKTVRFNVLKVIPAGSTGGSGGKKAFTAA

SEQ ID NO: 20505 - protein, 688 aa, Propionibacterium freudenreichii subsp. shermanii
MSDLKWTDEDREAVNIARTLAADAVEAAGSGHPGTAISLAPLAYLLYQKVMNVDPDDEHWIGRDRFLLSAGHASVLQYSQLYLGGLGLELEDLKYLRQAGSRTPGHPEYGHTKFIEATTGPLGAGISMAVGMAMAARRERGLYDPDNTGASVFDRYVYSIAGDGCMQEGVQSEAASLAGVQELGNLIVFYDDNRITIEGKTRIAFDEDVEARYAAYSWDVQHIDWTNGGDHYEENVQALFDAIEAAKKVTDKPSLIRLTTVIGWPLPHMAGSAHVHGAAIGEDEINAMKKVIGFPTEPFTFNQDIVADTRKALAERGRSARAAWDERFAAWQGSHAEQAALLDRVLARKLPDDLQVPSFEAGAVSTRKASGKVISALAEQLPELWGGSADLAGSNNTTIEGAESFLPADRATDEWPGNPYGRVLHFGIREHAMGGALNGINLSGLTRAFGGTFFVFADYMRPPVRLAALMGAPSVFVWTHDSVGVGEDGPTHQPVEHLASYRAIPGLDIVRPADANETAAAWVEILSHHDRPAGIVLTRQNVRTVDRTSGEFASTDGVAKGAYVLREARNGKPEVILIATGSEVEPALDAQDILETQGIATRVVSMPCQEWFDAQPAEYREEVLPSSIDARVSVEAGLSLGWSKYVGFKGASVSLEHYGASAKGSLLMEEFGFTGEHVAEVAKGVLGK

SEQ ID NO: 20506 - protein, 387 aa, Brassica juncea
MASSSPQRSHIIEVKAGKAVEESTTSLASLACGEAPCGFSDLNNASGDAQERNASMRKLCIAVVLCLLFMTVEVFGGIKANSLAILTDAAHLLSDVAAFAISLFSLWAAGWEATPRQTYGFFRVEILGALVSIQLIWLLTGILVYEAIIRLLSETSEVNGFLMFLVAAFGLLVNIVMAVLLGHDHGHGHGHGHGHDHHSHGVTVTTHHHGHDHGHTHGEDKHHHAHGHGDVTEQLLDKSEKRKRNINVQGAYLHVLGDSIQSVGVMIGGAVIWYKPEWKIVDLICTLVFSVIVLGTTINMIRSILEVLMESTPREIDATKLEKGLLEMDEVVAVHELHIWAITVGKVLLACHVNITPEADADMVLNKVIDYIRGEYNISHVTIQIER

SEQ ID NO: 20507 - protein, 308 aa, Pseudomonas syringae pv. syringae B728a
MSKIAVIGSNMVDLITYIERMPAQGETLEAPRFAMGCGGKGANQAAAAALLGADVLMLSKVGDDAFADTTLANFQRLGIDTRFVERVPGVSSGVAPIFVQENSHNSILIVKGANAHLSPADIDRAEAQLRDCALIVLQLEVELATVYHAIAFAHRHAIPVLLNPAPALAGLSREHLAQLDFLIPNESELALISGQPVTCAEEAAQAARQLVALGVRHVIVTLGEQGALYVGAEGEWQVPGVKVQARDTTGAGDAFIGCFARHWSQDGNIRQAMHQAVAYSACSVTGLGTQSSYPDASTFARFLDASAN

SEQ ID NO: 20508 - protein, 696 aa, Candida albicans SC5314
MAPLTIAVGEAKPGETAPRRKAAQKDGAVMRPTDSKATTMPEFIDECFKRNGNKDAMAWRDLKDVIVETKQITKVIDGKPTKVNKDWTYYEMGPYNYIKYPELLKLVQNYSKGLLELGLLPDQQSKLMVFAGTSHKWMQTFLAASFQGIPIVTAYDTLGESGLTHSLVQTESDAIFTDNQLLSQLIRPLQKASSVKYIIHGEEIDPKDGRQNGKLYQDAKSAKEKILEIRPDIKFISYDEVIQSGANAKDKQSLHYPKPEDPICIMYTSGSTGDPKGVVITNSNIIAAIGGISCNAGRDLIRPTDRLIAFLPLAHIFELAFECITFWWGVPLGYANVKTLTEASCRNCQPDLIEFKPTVMVGVAAVWESVRKGVLSKLKQASPIQQKIFWAAFKAKTTFKHFGIPGADMFDVVFKKVKSATGGQLRYVLNGGSPISVDAQVFISTLIAPMLLGYGLTETCANAAILEHTHFQIGTLGTLVGSITAKLVDVADAGYYAKNNQGEIWLKGGPVVSEYYKNEKETKEAFTDDGWFKTGDIGEWTSDGGLKIIDRKKNLVKTLNGEYIALEKLESVYRSNHLVQNLCVYADQSKVKPIAIVLPIENNLRQMLKEEKVIDNAETEEFAHLVHDKKVTKAVLKHLLTTGKHQGLKGIELLQNVVLSDDEWTPQNGFVTSAQKLQRKKILESCKKEVQEAYKE

SEQ ID NO: 20509 - protein, 69 aa, Elaeagnus umbellata
MSCNRGSCGCGGCKMYPDMTYTESTTSETQVLGVAPEKGNFEGSEMGYGAENGGCKSGDNCTCDPCTCK

SEQ ID NO: 20510 - protein, 139 aa, Oryza sativa
MERPAPVRKSHTSTADLLAWPQQQHQPDGHAASTPSPARRPHQPSEALRKVVFGGQVTEEEAESLNKRKPCSAPKWKEMTGSGIFAAGADGEAEEPGSAAAPGRAAPRNYQVLACLLARSREMQWSEFTRLGVFSLALE

SEQ ID NO: 20511 - protein, 357 aa, Zea mays
MASLTDLVNLDLSDCTDRIIAEYIWVGGSGIDLRSKARTVKGPITDPSQLPKWNYDGSSTGQAPGEDSEVILYPQAIFKDPFRKGNNILVMCDCYTPQGEPIPSNKRYKAATVFSHPDVAAEVPWYGIEQEYTLLQKDLSWPLGWPVGGYPGPQGPYYCAAGADKAFGRDVVDAHYKACLYAGINISGINGEVMPGQWEFQVGPSVGISAGDEIWVARYILERITEMAGIVLSLDPKPIKGDWNGAGAHTNYSTKSMREAGGYEVIKEAIEKLGRRHREHIAAYGEGNERRLTGRHETADINTFKWGVANRGASIRVGRDTEKEGKGYFEDRRPASNMDPYVVTGMIADTTILWKGN

SEQ ID NO: 20512 - protein, 371 aa, Pyrococcus furiosus DSM 3638
MKFPRKGIPQEEVMRELEKYTSKDLSFSSGKILGSMCTLPHELAKEVFCMYMDRNLGDPGLHPGTKKIEEEVIEMLSDLLHLERGYGHIVSGGTEANILAVRAFRNLADVENPELILPKSAHFSFIKAGEMLGVKLIWADLNPDYTVDVKDVEAKISENTIGIVGIAGTTGLGVVDDIPALSDLARDYGIPLHVDAAFGGFVIPFAKELGYDLPDFDFKLKGVQSITIDPHKMGMAPIPAGGIVFRHKKYLRAISVLAPYLAGGKIWQATITGTRPGASVLAVWALIKHLGFEGYMEIVDRAMKLSRWFAEEIKKTPGAWLVREPMLNIVSFKTKNLRRVERELKSRGWGISAHRGYIRIVSHASCDGGHD

SEQ ID NO: 20513 - protein, 426 aa, Halobacterium sp. NRC-1
MDYTDPAVLTRLRRDLHGIPEPAWCEFQTTARVVDACEDIGVDTLHVGPQAVASDARMAVPDDDTLADWRATARDAGVDEALLDSMAGGHTGAIAVLDRGEGPTVGLRVDIDALHITESEADDHHPAAAGFRSEHDGCMHACGHDGHATIGVGVLAAVADSDFQGTLKVVFQPAEERAGGGKPIAESGHLDDVDYLYAVHLGLDHPTGEVVAGVDGFLAVSHLRADFTGTGAHAGSHPEDGRNAIQAMATAIQNLHAIPRHDGGATRVNAGRAGGGTAPNIVPDSAFLEGEVRGETTALMEYMKSHADRVVRSAAEMHDCTVETATEGQAPSAESDRELAACFGAVAADRAGVDSVLDSDALGGSEDATYLMRRVQNTGGMACYVCVGTDHPGGHHTPTFDVDEQSLRIGVGALTTAITRVAETRP

SEQ ID NO: 20514 - protein, 469 aa, Streptomyces coelicolor A3(2)
MSDLPRKAVTRTAKLAALPLGFAGRATWGLGKRIVGESAEIVGQQLQQRTAEQLFKVLGELKGGAMKFGQALSVFESALPEEVAGPYRAALTKLQEAAPPMPTRTVHSVLAERLGEDWQELFLEFEDKPAAAASIGQVHRGVWQDGREVAVKVQYPGAGEALLSDLNQLSRFARLLGPLVPGMDIKPLITELKDRVSEELDYDLEAQAQRTHAEVFDDDPDIVVPDVIHQCEQVLITEWIDGIPMSEIISNGTQEQRDRAGQLLAHFLFSGPARTGLLHADPHPGNFRLLPGGPRGEDDWRLGVLDFGTVDRLPGGLPEPIGEALRMTLDGEAEAVYEMLCAEGFVKESIELAPDAVLEYLLPIIEPARVDAFTFTRGWMRSQAARIGDPRSPAYQLAKQLNLPPAYLLIHRVTLSTIGVLCQLGATVRLRDELEEWLVGFVAEGEAEVEEGEEADEDVYETEGTAAEA

SEQ ID NO: 20515 - protein, 328 aa, Burkholderia vietnamiensis G4
MAKPAKRVAVTGAAGQIAYSLLFRIANGDLLGKDQPVILQLLDLPQAQAAVKGVVMELEDCAFPLLAGVVITDDPKVAFKDADVALLVGARPRSKGMERKDLLSANAEIFTVQGAALNEVASRDVKVLVVGNPANTNAYIAMKSAPDLPKKNFTAMLRLDHNRALSQLAAKTGKPVASIEKLAVWGNHSPTMYPDFRFATAEGESMLKLVNDDVWNRETFIPTVGKRGAAIIEARGLSSAASAANAAIDHVRDWVLGTNGKWVTMGIPSDGSYGIPEDIIYGVPVTCENGEYKRVEGLEIDAFSREKMDGTLAELLEERDGVAHLLKN

SEQ ID NO: 20516 - protein, 413 aa, Glycine max
  misc_feature (280)..(280): Xaa can be any naturally occurring amino acid
  misc_feature (301)..(301): Xaa can be any naturally occurring amino acid
  unsure (1)..(413): unsure at all Xaa locations
MDRTLVMSSPNVCSNTNGGNLMRRKHSTMANNIYYPTSCVSKASQCHRKTQIECNLLRSQQSILNHHYKCIEGRPTFQECNRKYVVKAAHAIPSFDSESHASSPKNILDPVKKFLVALYWFCNPHSMIGRTLSATSGCLLAVEKLSDISPLFFIGLLQVLVPNFFMDIYVNGVNQLFDLEIDKINKPFLPLVSGNLSITNAVFIVASSAILSFWLSLIIRSWSLIWNVALCSLLWTAYSVNVPLLRWKRSPVLTAMIMFSSWTLIFPITYFLHMQTFRVXKASVVFTRSLIVSMVFYTFDXRRQKGSKDIPDIEGDTKFGIRSFATRLGKKKVFWICVSLFEVAFGVVLLAGASSSSPLWIKIITGLGSIIPATILWYQTKYVDLSSPDSTRSFYMLNWKLLNVAFLFLPLIR

SEQ ID NO: 20517 - protein, 223 aa, Pseudomonas fluorescens PfO-1
MNILVVEDEPKAGNYLLNGLQELGYSVSLARDGADGLHLALEFDFDVIVLDVMMPKMDGWEVLRRLRKETDTPVLFLTARDDIADRVKGLELGADDYLIKPFSFAELVARLRTLTRRGPIHEEEQLQVADLQIDVLKRRVTRAGNRITLTNKEFALLQLFAAHTGQVLSRSLIASRVWDMNFDSDTNVVDVAVRRLRAKIDDPFPLKLIHSVRGIGYRFDTQP

SEQ ID NO: 20518 - protein, 158 aa, Glycine max; identical to SEQ ID NO: 1262

SEQ ID NO: 20519 - protein, 447 aa, Salmonella typhimurium LT2
MDQTCSLESFLNHVQKRDPHQTEFAQAVREVMTTLWPFLEQNPRYRHMSLLERLVEPERVIQFRVVWLDDKNQVQVNRAWRVQFNSAIGPYKGGMRFHPSVNLSILKFLGFEQTFKNALTTLPMGGGKGGSDFDPKGKSEGEVMRFCQALMTELYRHLGPDTDVPAGDIGVGGREVGFMAGMMRKLSNNSSCVFTGKGLSFGGSLIRPEATGYGLVYFTEAMLKRHGLGFEGMRVAVSGSGNVAQYAIEKAMAFGARVVTASDSSGTVVDESGFTPEKLARLCEIKASRDGRVADYAREFGLTYLEGQQPWSVPVDIALPCATQNELDVDAARVLIANGVKAVAEGANMPTTIEATDLFLEAGVLFAPGKAANAGGVATSGLEMAQNAARLSWKAEKVDARLHHIMLDIHHACVEYGGDNKHTNYVQGANIAGFVKVADAMLAQGVI

SEQ ID NO: 20520 - protein, 552 aa, Xylella fastidiosa Ann-1
MKALFRACRIGKVMLRYRLDTLLDGTAAERWLRLAKPFVPRISAEIVEQSRGRRLRLALQELGPIFVKFGQILSTRRDLVPQDIGDELVMLQDRVEPFEGQTARSIIETALGKSVESAFAHFDTVPLASASISQVHAATLHDRREVVVKVLRPDIEHQISDDIALLKSLATLIEHTHPNADKIRPREIVAEIETTLAAELDLQREGANASVLRRFWEASDDIYVPEVIWSHSAERVLTLERMYGIPSDDIALLDASGIDRKALSSKGIRVFYTQVFRDNFFHADAHSGNIWVDSDPARKSNPRFIVLDFGIMGQLSQKDQYYLAENFMAIFHKDYRRIAELHVEAGWIPPHVRIEELEAAARSVCEPYFTRPLSQISLAEVLMKLFHVARRYQLTLQPQLILLQKTLLNIEGVGRQLDPELDIWVVARPVLERILRARYSPRHALKELNKRLPEIMTHAPDTPRLIHTWLVQQVESRKQNDVYLQQIRALAMTLQGLQRRVVNAIVGSGLLVAAAVLYCLHPDGLYLGTIPVWSLISGCVGALALFSAWWRS

SEQ ID NO: 20521 - protein, 386 aa, Crocosphaera watsonii WH 8501
MLGKEIGISVRELQLILKRGKRAKEKMIQANLRLVVAVSKKYQGKGLEFMDLVSEGNLGLIRAVEKFEYDKGYKFSTYAYHWIRQALVRAICDKGRTIRVPVHINEEISKLKKVQLEIRQKYGRSATVRELSERLEISPEKIRVLRSVNNPMLSLDQKVLGDEDNSTLLSFLADPNGDLQKFLDNLGNKELVEQCLCGLKPQEQRVLREYYLETPSLTLNEIGKKMNLSRERVRHIKNNALDKLKQVIVTEKNDESEIMSVNFESITPEKSLKFKSRLKGSLKVETQEKVKSHQLMVTETLRVKEAEKTSIISDQVEHDSLNLASKIIRKSPQKSSKTKSNVKDNSESSQSKVKKKSSAKSKPKTTLSKAQQRELKKQLNQLSYQK

SEQ ID NO: 20522 - protein, 442 aa, Xylella fastidiosa Ann-1
MSTLTLPSDLRLPVTVFSGFLGAGKTTLLNRLLNNRDGLRVAVIVNDMSEVNIDAQLVRDGGAALSRTDETLVEFSNGCICCTLRDDLSKEVKRLALEQRYDYLLIESTGIGEPMPVAATFAVRDADGFCLSDVARLDTMVTVVDGSQFTALFSSMNTLADLGQQADSDDTRSLADLLGQQIEFADTIVISKCDLIDATQLARVRAVVRGLNRDAQIIEAHLGEVPLPQLVGTGRFDFTRAQLAPGWMRELRGEHTPETEEYGITSFVYRARRPFHPLRFNHLLAHGLSGVIRSKGFFWLASRMDWVGELSSVGSATRTQAAGFWYAARHRIDVHEENMPPQIGIAPLPYTELGWQRQQNDCWTAPLPAPHEVSDPGEYVAMQRLWHPQWGDRRQELAVIGLDMDKDVARNELDACLLSNEELRMGPMYWSALPDPFPQWRR

SEQ ID NO: 20523 - protein, 99 aa, Glycine max
  misc_feature (70)..(70): Xaa can be any naturally occurring amino acid
  unsure (1)..(99): unsure at all Xaa locations
GRKSGQKGVSLQRETGIAPAVKGNMRGMPNSRLPASTHPTPGALPMGVCQNMRYTLTGGGTTGALTDIVXLRNLLRPLLDLRDAHALRKAHEPFFTSAK

SEQ ID NO: 20524 - protein, 321 aa, Glycine max
  misc_feature (108)..(108): Xaa can be any naturally occurring amino acid
  unsure (1)..(321): unsure at all Xaa locations
MATLIAPSNHSPQEDAEALRKAFEGWGTDENTVIVILGHRTVYQRQQIRRVYEEIYQEDLVKRLESEIKGDFEKAVYRWILEPADRDAVLANVAIKSGKNYNVIVEIXHNVIVEIATILSPEELLAVRRAYLNRYKHSLEEDVAAHTSGHLRQLLVGLVTAFRHVGDEINPKLAQSEAEILHDAVKEKKGSYEETIRVLTTRSRTQLVATFNRYREIHGTSISKKLVDEGSDEFQRALYTAIRAINDPIKYYEKVVRNAIKKVGTDEDALTRVVVSRAEKDLKIISEVYYKRNSVLLEHAIAKEISGDYKKFLLTLLGKED

SEQ ID NO: 20525 - protein, 555 aa, Thermoanaerobacter tengcongensis MB4
MRIPLFLRNREIYKRYRDILKILTKNGFGFIVDILSRGGRVPFYLLRGHDVMEIGERIRNTLEELGPTFIKLGQLISTRADLIPHDILIELSKLQDEVAPEEFESIKKVLESELGGNIEEFFSYFEEKPLASASIGQVYRARTKEGKDVVVKVQRPEVDKKIHADVVILKNIARILNERIVDSPVDFVEIVEELTDSLLNELDYTQEGNNADRFRENFKNQDYIYIPEVYWDYTTKRVLTMEYIDGISVKNKEILREKGYDLKRIARNGAWSIFLQVYKYGLFHGDLHPGNILITKEGKISYIDFGIVGYLDKSSREVLIELFKAFAENDTEEVIEILSDIGAIRADTNLRNLKADLGRIINYFYTTPLKNINVNDSMRRIMGVVYKYKLMLPPGFTLLLKALATVEGVGRDLDPDFSISDVARDFVKEMYLKKIDVKEVIKENYKDLHKTLIILRKFPLRLQSIMTKLIKDDIKVRINIDESESLRYDLNVMINKVIVSIIASALIVGSSLVLTYGGGYKIFGYNAIGFFGYVIATMLSLWVFYRIFIVERKKK

SEQ ID NO: 20526 - protein, 428 aa, Pisum sativum
MRDQKGEVQYFIGVQLDGSQHVEPLHNRIAEDTAKEGENLVKKTAENVDDALRELPDANMKPEDLWMNHSKMVHPKPHRREDAAWRAIQKIMESGEQIGLKHFKPIKPLGSGDTGSVHLVELCGTDHQFAMKAMDKGVILNRNKEHRACTEREILDMLDHPFLPALYASFQTKTHICLITDYCPGGELFMLLDRQPAKVLKEDAVRFYATEVVVALEYLHCQGIIYRDLKPENVLLQSTGHVSLTDFDLSCLTSCKPQLLVPSTNDKKKGQHGPIFMAEPMRASNSFVGTEEYIAPEIITGSGHTSAVDWWALGILLYEMFYGYTPFRGKNRQRTFANILHKDLKFPKSKQVSLGAKQLIYYLLQRDPTSRLGSKGGANDIKNHSFFKGINWALVRCTKPPELDAPLFDTNKEEKEKEDKYVDNGQRI

SEQ ID NO: 20527 - protein, 236 aa, Zea mays
  misc_feature (195)..(195): Xaa can be any naturally occurring amino acid
  unsure (1)..(236): unsure at all Xaa locations
MASTSSSTPAPVEVDERGRKRKRAAGADPAAPAQPSKWRTRREHEIYSSKLLEAIRLVRAGPPSAAAAGTAAAPPRSRAVREAADRALAVAARGRTHWSRAILASRRRRLQAAHRARLRAPASPPARHGAPSASAAKGAATPPLERKAKVLGRLVPGCRKLSFPTLLAETTDYIAALQMQVRAMTALAEALSAVXPPPPPAPAPPRRRDRSRSLNIRAFVVNFSLSFLPPRIFPRD

SEQ ID NO: 20528 - protein, 316 aa, Salmonella typhimurium LT2
MNQLDGIKQFTTVVADSGDIESIRHYQPQDATTNPSLLLKAAGLEQYGHLIEDAIAWGKKHGGTQEQQVAAASDKLAVNFGAEILKSIPGRVSTEVDARLSFDKEKSIEKARHLVDLYQQQGVDKSRILIKLAATWEGIRAAGQLEKEGINCNLTLLFSFAQARACAEAGVYLISPFVGRIYDWYQARSPLEPYVVEEDPGVKSVRNIYDYFKQHRYETIVMGASFRRTEQILALTGCDRLTISPNLLKELKEKEEPVIRKLVPSSQMFHRPTPMTEAEFRWEHNQDAMAVEKLSEGIRLFAVDQRKLEDLLAAKL

SEQ ID NO: 20529 - protein, 666 aa, Salmonella typhimurium LT2
MSRKDLANAIRALSMDAVQKANSGHPGAPMGMADIAEVLWNDFLKHNPTDPTWYDRDRFILSNGHASMLLYSLLHLTGYDLPLEELKNFRQLHSKTPGHPEIGYTPGVETTTGPLGQGLANAVGLAIAERTLGAQFNRPDHEIVDHYTYVFMGDGCLMEGISHEVCSLAGTLGLGKLIGFYDHNGISIDGETEGWFTDDTAKRFEAYHWHVVHDIDGHDPEAVKKAILEAQSVKDKPSLIICRTVIGFGSPNKAGKEESHGAALGEEEVALTRQKLGWHHPAFEIPKEIYRAWDGREKGEKAQQQWQEKFAAYEKAYPELAAEFTRRMSGGLPEAWESATQKFINDLQANPAKIATRKASQNTLNAYGPLLPELLGGSADLAPSNLTIWKGSTSLKEDPAGNYIHYGVREFGMTAIANGIAHHGGFVPYTATFLMFVEYARNAARMAALMKARQIMVYTHDSIGLGEDGPTHQAVEQLASLRLTPNFSTWRPCDQVEAAVGWKLAIERQHGPTALILSRQNLAQVERTPEQVKAIARGGYILKDSGGKPDIILIATGSEMEITLQAAEKLTGEGHNVRVVSLPSTDIFDAQDEAYRESVLPAHVTARVAVEAGIADYWYKYVGLKGAIIGMTGYGESAPADKLFPYFGFTVENIVEKARRVLNIKG

SEQ ID NO: 20530 - protein, 364 aa, Cryptococcus neoformans var. neoformans JEC21
MTFSLLEKGALQHILIALAWLAIARADSIDAIADSADSSCASGDVAGHYDLGLHIASVFVLLVASGLGVFLPVILGEKGSRSVWFGNTFFVLKYFGTGIIISLAFCHLLQESFKTFSNECIGELAYEPTAPAIAMGSMFVIWLIDFFGSRRLANRKALSSLDAHQSCEPCEPSSPDTKSPVADLCCDSGLKSVAETSDRANRRAHWDVQLLEGGIVFHSIMIGVSLGAQTDGFSATFAALIFHQLFEGLGLGARISLLIWPSGITSSVKKHLLCLAYTLTTPVGIAIGIGVHQSFNENGEAELLAIGVLNSVSAGILLYSGLCQLLYSEWVVGDMRNASNMRVAVALIALVSGLFGMSLIGKWT

SEQ ID NO: 20531 - protein, 463 aa, Ashbya gossypii ATCC 10895
MNSRLGQVLRQAVRVQTGLRGPARSMRGYVSQTQTKQNTVAVVAGAAERFVAPAADAHLKTLSQRELVALGVIGCVTTNARLLKLVTQAFPYVPTPVAKLLISALYCGGDTMAEVRETGRALARRGVGNMMLSLTVEDSEGTKNIDIDYIVEETVRSLHGVLLPHMEEQLARAADVNSVPPGYLALKPSALVSDPANTLLHFADPAWREKRDALVANFSRIVGEVYKLNQEMLARYPGRKSPFFVATIDAEKYEVQCAGVYELQRLMFAKYNPVSSPIVSCIGTWQLYLRDAAADLVAQAERAEREGYKLGLKLVRGAYLHSEPNRDVIHPTKEATDEHYNEVMAKVIQDLLANGEHSVFGHLVVASHNYQSQMLATMLLQAHGESVGKSNVVLGQLLGMADNVTYDLIHNHGARNIIKYVPWGPPKETKDYMHRRLQENGDAVRADNGWPLVKAVCRALFYR

SEQ ID NO: 20532 - protein, 324 aa, Zea mays
MAENPAPSSPLVTSPDAAAPPLPAEFTKLTFRSLYIRRTGPGSREMTVDGRPSDQLGRRFVSDFPIYDGRGSGARLVARLQGVTVQIGSSHQLVSIVFEAERLKGSTLLTNGVITDGSDEWAIYGGTGVFAMATGVIRRRFVAGSNDGNSDELTSIEVFCPAFGSAQPQPNKQDSVSVTRIGVWGGGGGSAQDIPTTEPPQRLHSITVRTGFAVDSIEFTYTDRGGQRRTAGRWGGLGGNLRTIDLGDAEVVREVSGTYGTFEGATTLTSIRILTSSRAWGPWGVEDGTRFCITAPIGSSIVGFYGRSTSRLVAAIGVYLRQQL

SEQ ID NO: 20533 - protein, 332 aa, Anabaena variabilis ATCC 29413
MTKNLLEQLREMTVVVADTGDIQAIEKFTPRDATTNPSLITAAAKMPEYQEIVDQTLLQAKKDAGAGASKGQIVSLAFDRLAVSFGLKILQIIPGRVSTEVDARLSYDTEATITKARELIAQYKAAGIGPERVLIKIASTWEGIKAAEILEKEGIHCNLTLLFGLHQAIACAEAGITLISPFVGRILDWYKKETGRDSYPSAEDPGVISVTTIYNYYKKFGYTTEVMGASFRNIGEITELAGSDLLTISPGLLGELQATIGELPRKLDPAKAATLDIEKISIDKATFDKMHAADRMAYDKLDEGIKGFTKALEELETLLAERLARLEVVASH

SEQ ID NO: 20534 - protein, 431 aa, Picrophilus torridus DSM 9790
MNLFIFRRDLRLYDNTALLKSLNNETATIFIMDPAQVKNNEYRSEKALNFMISSLYDLMTDIEGNHGKLAVFHGDPVDVLKRLVNRENINEIYINRDYTPFSIKRDERIKEFSIKNNIKFNALDDYFLSDPELRTGSGSFFKNFTAFYNRAMEINVKKPVYEIKKSNLIPIDGDDMELKYNNYGRKTAIEKMHNFIKNDYSLRDFPELNMTSFLSADIKFGNISIREAYHYIKDPEFRRQLYWRDFYLYIAYHFPYVFGSNFNRKYNIKWENKEKYIDAWKNGLTGYPIVDAAMRSLNETGYINNRLRMIVSSFLVKDLHVDWRIGEKYFAQKLIDYDPASNNGNWQWVASTGVNSRGMYRIINPWIQQKKFDPECKFIKRYVNELSDLEPEIIHNLYKIRLNNYPAPLVDHKTAVMEFRKLINQTPTYLS

SEQ ID NO: 20535 - protein, 476 aa, Anabaena variabilis ATCC 29413
MRRTKIICTVGPATSAPERLEALVEAGMNVARLNFSHGAYDFHAQTAQYLRQISADRQKPVAIMQDLCGPKIRLGTLPPEGLTVEAGQEVTFVLQEKGNSLDELPLPLPTLFAMVRPGEPILINDGRVKLIVTDRDADRIRAIAKIGGLLSTRKGVNLPATRLPVSSITEKDLQDLRFGIELGVDWVAVSFVRSPYDLEPAQRMIEAAGKTIRVIAKIERPEAVEQIDSIIDVADAIMIARGDLGVEMPIHEVPLIQKDIIRRCNQAGKPVITATQMLESMISAPDPTRAEATDVANSILDGTDAVMLSGETAVGQYPVAAVQTMHDIATTTEKSLQEGSKNCLSHEAGGLSVTESVAEAVCRIAYETGAKAILCNTTSGSTAKLVSKYRPTTPIFALTPDETAYHQLALSWGVEPLLTPPVHNAEEMFMNLINTAVRTGLVHDGDKVVITSGVPIGKSGTTSLIKVHSIGQPITA

SEQ ID NO: 20536 - protein, 317 aa, Erwinia carotovora subsp. atroseptica SCRI1043
MTDKLTSLRQVTTVVADTGDIAAMKLYQPQDATTNPSLILNAAQIPEYRKLIDEAIAWAREQSSDRKQQVVDATDKLAVNIGLEILKLIPGRISTEVDARLSYDTEASVAKAKHLIKLYNDAGISNERILIKLASTWQGICAAEQLEKEGINCNLTLLFSFAQARACAEAGVFLISPFVGRILDWYKANGDKKEFAPHEDPGVVSVSEIYDYYKEHGYETVVMGASFRNVGEILELAGCDRLTIAPALLKELSESEGEVVRKLSYVGDVKVRPARMTEAEFYWQHNQDPMAIDKLADGIRKFAIDQEKLEKMIADLL

SEQ ID NO: 20537 - protein, 316 aa, Synechococcus elongatus PCC 6301
MVKIETATGLGSGFVVKNDNGSIILTNAHVVKGNGGTLTVKDVRGNVVDAQLLAVGEGEADSSDLALIKTETEIGTPLKLSDDIETASTVYAIGSPLGQEWSISQGIISRFVTDQGLIQTDIAINPGNSGGPVLDKRGCVVGVVVSKLDPAQSEGIGFAIEPRIAERYVKENAGNQAIAIDQFSEPEETQVEQVENPDRNEAGYEVCNQSGENLSVAIAYFDTSIDSYRSEGWWNLDQSKCQFFPNLLDSVDEVYVFAESDQTLWSGDFPFCMQEDAFEYPDANRDRCPSPAYSKGFLKVEVGDAKTWTTNLTPSQ

SEQ ID NO: 20538 - protein, 343 aa, Anabaena variabilis ATCC 29413
MAKLKVGINGFGRIGRLVLRAGINNPNIEFVGINDLVPPDNLAYLLKYDSTHGKLRSQVEAKDDGIVIDGHFIPCVSVRNPAELPWGKLGADYVVESTGLFTDSEGASKHLQAGAKRVIISAPTKDPDRVRTLLVGVNHDLFDPSKDVIVSNASCTTNCLAPIAKVINDNFGLTEGLMTTVHAMTATQPTVDGPSKKDWRGGRGAAQNIIPSSTGAAKAVALVLPELKGKLTGMAFRVPTPDVSVVDLTFKTAKATSYKEICAAMKQASEGSLAGILGYTDEEVVSTDFQGDTHSSIFDAGAGIELNSNFFKVVAWYDNEWGYSNRVVDLMLSMIQKEQLAAV

SEQ ID NO: 20539 - protein, 505 aa, Arabidopsis thaliana
GLELQLSYTLRHQHPVEYTVPIQLPVINQVFGTSRAVKISPNSPVARLRPVSGKYMLGEVVAVRVPLLHLSNFQINDWPELSTKRYALMVLMLPSDSARQWHVHELELVEVVADQVAVALSHAAILEESMRARDLLMEQNVALDLARREAETAIRARNDFLAVMNHEMRTPMHAIIALSSLLQETELTPEQRLMVETILKSSNLLATLMNDVLDLSRLEDGSLQLELGTFNLHTLFREVLNLIKPIAVVKKLPITLNLAPDLPEFVVGDEKRLMQIILNIVGNAVKFSKQGSISVTALVTKSDTRAADFFVVPTGSHFYLRVKVKDSGAGINPQDIPKIFTKFAQTQSLATRSSGGSGLGLAISKRFVNLMEGNIWIESDGLGKGCTAIFDVKLGISERSNESKQSGIPKVPSIPRHSNFTGLKVLVMDENGVSRMVTKGLLVHLGCEVTTVSSNEECLRVVSHEHKVVFMDVCMPGVENYQIALRIHEKFTKQRHQRPLLVALS

SEQ ID NO: 20540 - protein, 577 aa, Synechococcus elongatus PCC 6301
MSGSASRSTAANPLELAWITPSAAQLASTADLYYVQDLLGRYLSFAWRSGQWLGLNSEQVVGSYLGEQFTPVDLNLYLARMRRAMHRGRAEQFRTGFRFQGQVYVFDLTLSPILQPQQASTLLLVIGRQQEPLPEALPEPPIAIAPPHHAKLFAQIAWDIRRTLDPETIWRHTVQGLGQALGLQRCLLCPYELGSTAIAIVAEYRQAHLPVVLGEQLAIARNPSLADALLSLRPTQAVVDFERSPAEPIWMVPTGYQDHPNGVLLLRSAEELTAGDRDLVWELADQVGTALAHARLYAQSQALALELQRANQTLLEQQQALIEAHRQSEALSQLKTDFLANTSHELRTPLTGMIGYLQLLQDDLAETPEERQEFIAGAYHSALHLLGIINDILDIARIEAGRLQLQAETVPLRNLLAEVETCLRSQAQAKGLVYRCRIAAETESVALWGDRQRSLQVLFNLVGNAIKFTLTGYVEVRATAVWQPLCANGQNLPGYLRLEIEDSGIGVAPERQGSLFQSFSQADSSLTRQFGGSGLGLVICRRLLESMGGIVELFSPGEGLGTTVTCLIPLAPAIIPS

SEQ ID NO: 20541 - protein, 449 aa, GIBBERELLA ZEAE PH-1
MRQASSDDRTLPVPNTYSEHKRGEKGGKGKMSKYIKPAGESGRTGFHPIHFSKISFRSTSRASLLCNFLWPFVPAAIAVRYAMPDNHVTIFALAYIAMIPCANMIGFAGQELSRKLPHVWGVLIEITIGSIVEIILFMVLLSKNMFYVIKAAILGSILATMLLCLGFCFFVGGMLEDEQVFSEAISEAGSGLLLTAGVVLALPTVFEYGVGNGETLTNQDLEHKTLQISRIVSILLIVAYLVYVFFQARTHHGIYDAVFEQDEHNDRDKHKDQAKAKLTLTECIIALVIAVGLVAWTAVILVMQIEFVIERGHVSDAFMGLILVPLVEKLAEHLTAIDEAWDNQINLAMSHVLGATLQTALFNAPLVVIVSWGLHKTLDLNFAVFDLVMLILAILTVGRFLQDQKSNYLEGFLLIILYVAIATAAWYYPDPANHGAGGGSAEGSSEGGH

SEQ ID NO: 20542 - protein, 645 aa, Mesorhizobium loti MAFF303099
MRHIMAKSLAPTDSVRDYLAAQEKKSLLRFLTCGSVDDGKSTLIGRLLSDTKQIFEDQLAALERDSRKHGTTGDDIDFALLVDGLEAEREQGITIDVAYRFFATPKRKFIVADTPGHEQYTRNMATGASTADLAIVLIDARQGVLRQTRRHSIIASLLGIRHIVLAVNKIDLVDFDQAVFDRIVEDYGQFSRDLGFQTIVPIPMSARYGDNVSGRSDNMQWYSGPTLIEHLETVSVEEAAVEQPFRFPVQYVNRPNLDFRGFAGTIASGAIAQGDEVVVAKSGKSSHVKRIVAHGGDLKQAVAGQAITLVLDDEVEVSRGNMLVSPAARPQVADQFAANIVWFDEHALLPGRSYILRTETDQTSATVTDLKYRINVNDFAHEAAKSLEMNEVGICNVSTRAPIAFDPFAENRTTGAFILIDRISNATVGAGMIVHSLRRAENIHWQSLDVGKRVRADMKNQRPAVFWFTGLSGSGKSTIANLFEKKLFATGRHTYILDGDNVRHGLNRDLGFTDADRVENIRRVAEVAKLMADAGLIVIVSFISPFSAERRMARELMADGEFIEVFVDTPFEECARRDPKGLYARALNGEIKNFTGVDSPYQAPEHPEIHLKTLGKSAEEMVDALEHWLNERDIAEDQYESGGGI

SEQ ID NO: 20543 - protein, 307 aa, Mesorhizobium loti MAFF303099
MILCCGEALIDMLPRITTQGEPAFAPYVGGAVFNTAIALGRLGAPAGFFSGLSSDLFGGQFRDALGASKVSSTYAHTSPRPTTLAFVRLTNGQATYTFYDENTAGRMLTIDDLPSLGNEIEAMLFGAISLISEPAGGAYEEFMRREHASRVMMLDPNIRPNFIPDKAKHLRRIREMMAMADIVKLSDEDLHWFGEAGSHEDVIRNWLDRGPKLIVVTHGSEGAVGYTKDHTVTVMPEKVEVVDTVGAGDTFNAGILASLHEQGLLTKAAIGGLPQDAIRKALALGAKAAAVTVSRAGANPPWRHEIA

SEQ ID NO: 20544 - protein, 484 aa, Novosphingobium aromaticivorans DSM 12444
MAKLDPRGRKVKILATVGPASRDPEMLEKLFRAGADAFRVNMSHGEHAIHAETIANIRALEKKVNRPITILCDLQGPKLRVGKFKDGRAVIRHSGHFTLDRNPEPGDETRVCLPHPELFGVLHKGQRLLIDDGKLRLRVIRADENEILCSAEVGGVISDRKGVNVPDAVVPVPALTDKDRRDLSFAVEQGADWIALSFVQRPEDVAEARRLLGGHGSLMAKIEKPAAISRLEEIVELSDGIMVARGDLGVELNPEEVPPLQKRIVETARRQGKPVVVATQMLESMIEAPTPTRAEVSDVANAVYDGADAVMLSAETAAGAWPEEAVTIMHRIAAQVEADPGYGARVHFLETLPDPTTADALAQAAASITETLPISGIIVFTGSGSTARRVARERPGVPMLVLTPSHKTARKVGLLWGAHAVSTKDIGSFEEMIAKGKRMALRHGFGSAGSKLVALAGVPFGTPGATNLLHVVTLTGDELTRHGE

SEQ ID NO: 20545 - protein, 1768 aa, Ustilago maydis 521
MASASTSASLAAGPGPSHASAQEHSLPPLSDLLARSSKRARLLFHIDDDYDFDNFGDTSAFEPARAHLSCKINSEYVDAKVLPSAILAQQQAAAGPMRPGAAAATVASRSSKRRGDESHLSRLIDQIDGGAASSSTSVGPAAPFPSSQALTVRSNSNLASAAQASSSAGSSALALHRGGSSGLLSQALIQKKEMANRKAKPAFHPNWKLARVISGHLGWVRCVAVEPDNKWFATGAGDRMIKIWDLASGELKLSLTGHISPVRGLAISARHPYLFSAGEDRIIKCWDLETNRVIRQFRGHLSGIYSLALHPTLDVVVTGGRDATVRVWDMRTREAIFTMTGHRGTVASVVCQDSEPQIISGSMDATVKLWDLAAGKSITTLTHHKKSVRTLAIHPTQYTFASGSAGGHNVKTWRCPEGTLVNNMAHDTIVNTLSVNADGVLFSGGDDGSLKFFDYATGTPFQVAEDVPQPGSLDAEAGVFCSAFDQTGTRLITGGADKTIKIYKECSTLFRIFDIRLAQIAPQAHKPKHLKQQSEAIVNHESRYWKNRSLGACVARRFDIQIEQSVALAAVQTWSSEKLHRPTISAALTRLEIFNEPSPSLNRSRPGHSHAIRISLKRKSTVSESQAAPSRLAAYPAEDQDEDDDRDEDENEDDDQDVGTLNASEQDDDDREPDNAEDDQQDDDGEEEQDEEEEDQQDDLDENQDGEGDNVDSVARGNAASNPRTRGLNGAFRSISAGTANPSRRPIKRLRSKGLYEALPKLIENLQRRDSYKFFCEPVNPDEVPGYSDVIKSPMDFGTMQRKVQDRLYSHMDQVKADFQLVISNAMTFNPEGTLYYNEAKRIAAWGNRAIEREGMAVNDNGRAGLKGEEMRRQRRLEREAATVTSVGVLEGPSSVDDGHSRRPLRGSTANQQPALDDASQQRVGDQNASEELTTRSAARGSRFAFSAGVEALMEAARVTSQARQRAAIALGLTGGTLTREDSVQPGAGVKAEGNADMDIDDDEDENVSDEEGGIRANVTRERSVTVDCAAGVNGRQCGSSQPCGTPSTPLGQRQASPGALRRRLAAVTGTPAQALASPMGALSAVAGGTSRASKHSKHRKRLSAPGTPKRLLARTGLTGSGTPLASVASSSGAATDSAGLTLDPAATAAAAAQLIADLSQTQIQTTAASYSFEDNGSINPEDIDDLQAFLTLHRSGKHILMPTIESLHPIPFIPGDYITNSGAEGKAKDQDKEQERSKEKEKAKDKGATDDGDDEDEDGKGDTREKGDKDPLSTLPPSRPGAPDPLYSAIAPEPEPLQSNLSHDVEPLPRHFRNLPFHAPSLPTRSLQDQASYGVLHSWDNPAYAEALKNDKRPKKQKDKEREKERETLEDWSYFRPTLTRLLEITDLGPFTALVPTTEQDQRSEPAKMMAKGKTARATKGAQAVTSPTPAFSTTLLGEQGIQAIKTELGQSEEGLRQAQGILMRYIGAAKAGIATTRNGSWTQAEQQAASRYVSDTVYAGVTGNAYVRSVGEFVGGAIHHAMLLDEADDAEEQQIAEAEKKLLLAAAMRKVTETEATPEPSAASRRGPFMWRDTTEEAAGTATPSVGGEPDTSCVAHTTALGTWMAELEDSVVKPVISEVLEDLEKGETKLAPLRKPLAHVVEEEVIRPITGHTLDVLHLVAVLLEAHGFEELNVDEIEARLLRNKMRRHGINGGEVQSHAAPRAQAVAEPASATNTFLAPSQPPIPFQAELDWLQGQPDLSKLLDEARLDVDSLGSIVNYIVQSA

SEQ ID NO: 20546 - protein, 478 aa, Xanthomonas oryzae pv. oryzae KACC10331
MRPLPTLLTLSLAAAFGGFAATGINAWLDNRAQATPPSNAAFTLPTTAALPAAVAGQPVPSLAPMLQQAMPAVVSVNTKQVVRVRNPFFNDPILRRLFPEVPQDRINESLGSGVIIDAQKGYVLTNHHVIENADDVQVTLGDGRTVKADFIGSDADTDIALIRIKADNLTDIKLADSNALRVGDFVVAIGNPFGFTQTVTSGIVSAVGRSGIRGLGYQNFIQTDASINPGNSGGALVNLQGQLVGINTASFNPQGSMAGNIGLGLAIPSNLARNVVEQLVTKGVVVRGTLGLETQNLTQQMLQGLGVDSLRGALVTRVLPGSAAAAAGVQPGDVVVAANDQRVDSAEALHNYEGLQAVGSAVTLDIRRDGKPLKLKATLKEQDRAVTGDMLDPRLTGATFVDLPESLRQSGITGVMVSEVKRGGRAAANGLVTGDVIVASSVGEFADLASWRANFQRKPQQLVVRILRGNAQYDALMR

SEQ ID NO: 20547 - protein, 664 aa, Thermosynechococcus elongatus BP-1
MPAVTQSLDELCINAIRFLAIDAVQKANSGHPGLPMGAAPMAYVLWNQFMRFNPKNPQWFNRDRFVLSAGHGCMLQYALLYLTGYDSVTIEDIKQFRQWGSHTPGHPENFETPGVEVTTGPLGQGICNAVGLAVAEAHLAARFNKPDIKLVDHYTYVILGDGCNMEGVSGEACSLAGHWGLGKLIALYDDNHISIDGSTDIAFTEDVCKRFEAYGWHVQHVADGNTDLAGIAKAIEAAKAVTDKPSLIKVTTTIGYGSPNKANTAGVHGAPLGPEEVKLTRENLGWNYEPFVVPEEVLNHFRKAIERGASYEAQWNQTLATYRQKYPEEAAEFERLLRGELPANWDANLPSYTPEDKAVATRKHSEICLNAIAPNLPELIGGSADLTHSNLTELKCSGDFQKGQYQNRNIRFGVREHGMAAICNGIALHNSGLIPYCATFLVFADYLRPALRLSALSQAGVIYVMTHDSIALGEDGPTHQPVETLASLRAIPNLLVIRPADGNETSGAYQVAVQRRKQPTLLALTRQNVPNLAGSSAANVAKGAYTLVDCEGTPDLILIGTGSEVALCVKAAETLTANGKKVRVVSMPSWELFEEQSPEYKASVLPAGVKRLAVEAAASFGWCRYADATVAIERFGASAPGNVLMEKFGFTVDNVVAKANALLG

SEQ ID NO: 20548 - protein, 282 aa, Magnetospirillum magnetotacticum MS-1
MAPQTRRLNCAARFAAGLFAYLPVGFPTLERSVETALALVDSGVDVLELGIPYTDPVMDGPVIQAAAQAALDGGARVADVFRVVAAVAERTGGRVPVLVMTYWNPVLRYGVDAFARDLAAAGGAGLITADLVPDEGRAWLDAAEAHGLDRVFLVAPSSTPERLRLTARASRGFVYAASTMGVTGVRAAVGPQAARLVADTRAAGAELVCVGLGVSTAEQAAEVARYADGVIVGSAFVRPLLGDAPWDERLAALRTVAASLAAGVRSARQEQPGTTTPGGVVA

SEQ ID NO: 20549 - protein, 420 aa, Thermosynechococcus elongatus BP-1
MAKAHQKRVVVTGMGAITPLGNTLAEYWEGLMAGRNGIDYITAFDASRHDCRIAAEVRGFDPTLYMDRKDAKRMDRFAQFAVAASKQALADAQLTIDEGNATDIGIIIGTGVGGLKVMEDQQEVYLTRGPDRCSPFMIPMMIANMAAGLTAIHTGAKGPNSCSVTACAAGSNAIGDAFRMVQHGYAKAMICGGTEAAITPLSVAGFAAARALSTRNDDPHHASRPFDLNRDGFVLGEGAGILILEELEFALARGARIYAEMVGYGLTCDAYHMTAPSPGGEGAARAIEACLKDAQIAPDQVSYINAHGTSTPANDSTETAAIKRALGEENARRVPVSSTKSMTGHLLGGSGGIEAIATVMAIAHDRIPPTINLEQPDPACDLDYVPHQSRACPVTVALSNSFGFGGHNVTLAFRKFTPDL

SEQ ID NO: 20550 - protein, 284 aa, Brassica napus
MDPYKYRPASSYNSPFFTTNSGAPVWNNNSSMTVGPRGPILLEDYHLVEKLANFDRERIPERVVHARGASAKGFFEVTHDISNLTCADFLRAPGVQTPVIVRFSTVIHERGSPETLRDPRGFAVKFYTREGNFDLVGNNFPVFFIRDGMKFPDMVHALKPNPKSHIQENWRVLDFFSHHPESLNMFTFLFDDIGIPQDYRHMEGSGVNTYMLINKSGKAHYVKFHWKPTCGVKSLLEEDAVRVGGTNHSHATQDLYDSIAAGNYPEWKLFIQVIDPADEDKFDF

SEQ ID NO: 20551 - protein, 335 aa, Xylella fastidiosa Ann-1
MRNTTSTLKIAIIGYGSQGRAHALNLRDSGFDIIVGLRPGGPTEAKAQVDGFTVQSPDQAAKHADLVAVLTPDMVQKKLYEEVLAPNIKQGACLLFAHGLNVHYSMITPRSDLDVVLVAPKGPGALVRREYEIGRGVPCIYAVHQDLSSHAEQLALTYAGGLGGARANIIKTTFKEETETDLFGEQAVLCGGVSSLVQAGFETLVEAGYQPEIAYYEVLHELKLIVDLFYEGGITRMLEFVSETAQYGDYVSGPRVIDRSTKERMKAVLKDIQDGTFTKHWIAEYQAGLPNYKKYKQADLEHPIEKVGKQLRAKMVWLNSEKTNDTTPPMSSKVV

SEQ ID NO: 20552 - protein, 429 aa, Xanthomonas axonopodis pv. citri str. 306
MNHSRSHALFAQAQTLLPGGVNSPVRAFKSVGGEPFFVARADGPYLFDVDDNRYIDYVGSWGPMIAGHNHPAVREAVEQSIRNGLSFGAPCAAEVAMAQTITRLVPSCEMVRMVNSGTEATLSAVRLARGATGRNRIIKFEGCYHGHGDSFLVKAGSGMLTLGVPTSPGVPAGLSELTATLSFNDFEGATALFDEIGAEVAAVIIEPVVGNANCIPPQAGYLQHLRTLCTRHGALLIFDEVMTGFRVALGGAQAHYGVTPDLTTFGKIIGGGMPVGAYGGRRDLMEQVAPAGPIYQAGTLSGNPVAMAAGLAMLELVQEPGFHTRLSEATSMLCEGLEDAARAAGIAVTTNQVGGMFGLFFTDDIVESYAQATACDITTFNRFFHAMLQQGVYLAPSAYEAGFMSSAHDEAVIDATLAAAREAFAEVAR

SEQ ID NO: 20553 - protein, 193 aa, Arabidopsis thaliana
EFVEAWKTASSPEVQIGVVGAGTARVFEEAMKSADGLLHVAFTPSKATGKVLASELPEKVGKRSSVLYPASLKAGNDIVEGLSKRGFEVVRLNTYTTVPVQSVDTVLLQQALSAPVLSVASPSAVRAWLHLIQNEEQWSNYVACIGETTASAARRLGLKNVYYPEKPGLEGWVESIMEALGAHADSSNPSSRN

SEQ ID NO: 20554 - protein, 521 aa, Solanum tuberosum
MAASIGALKSSPSSNNCINERRNDSTRAVSSRNLSFSSSHLAGDKLMPVSSLRSQGVRFNVRRSPMIVSPKAVSDSQNSQTCLDPDASRSVLGIILGGGAGTRLYPLTKKRAKPAVPLGANYRLIDIPVSNCLNSNISKIYVLTQFNSASLNRHLSRAYASNMGGYKNEGFVEVLAAQQSPENPDWFQGTADAVRQYLWLFEEHTVLEYLILAGDHLYRMDYEKFIQAHRETDADITVAALPMDEKRATAFGLMKIDEEGRIIEFAEKPQGEQLQAMKVDTTILGLDDKRAKEMPFIASMGIYVISKDVMLNLLRDKFPGANDFGSEVIPGATSLGMRVQAYLYDGYWEDIGTIEAFYNANLGITKKPVPDFSFYDRSAPIYTQPRYLPPSKMLDADVTDSVIGEGCVIKNCKIHHSVVGLRSCISEGAIIEDSLLMGADYYETDADRKLLAAKGSVPIGIGKNCHIKRAIIDKNARIGDNVKIINKDNVQEAARETDGYFIKSGIVTVIKDALIPSGIVI

SEQ ID NO: 20555 - protein, 480 aa, Arabidopsis thaliana
MEISERARARLAVLNAHLTVSEPNQVLPAIEPWCTSAHITAAPHGSLKGNLKIVDERTGNEYQVPVSEHGTVKTVDLKKITTGKDDKGLNLYDPGYLNTAPVRSSISYIDGDEGILRYRGYPVEELAEKSTYTEVTYLLIYGNLPSQRQLADWEFAISQNSAVPQGVLDMIQSMPNDVHPVGALVTAMSALSIFYPDANPSLMGLGVYKSKQVRDKQIVRVLGQAPTIAAAAYLRKAGKPPVQPLSNLSYSENFLYMVESMGDRSYKPNPRLARVLDILFILQAEHEMNCSTAAARHLSSSGGDVYTAVSGGVGAIYGPLHGGAVEATINMLSEIGTVENIPEFIESVKNKKRRLSGFGHRIYKNYDPRGKVVKKLADEVFSILGRDPLVEVGDALEKAALSDEYFVKRKLYPNVDFYSGLINRAMGIPSSFTAVSRIAGYLSHWRESLDDPDTKIMRPQQVYTGAGIRHYETVRERTKL

SEQ ID NO: 20556 - protein, 293 aa, Staphylococcus epidermidis ATCC 12228
MEIIIIGGFLGSGKTSAINHLIADALENNLNPAVIMNEFGKRSVDGQLIERPEVPMSEITEGCICCAMKSDVSQQLHELYLKYQPDIIFIECSGVAEPLAVVDACFTPVLAPFITLRSMVGIIDASMYSRIKSYPQDIAALFYEQLRHCATLFVNKIDKIEVEETARLLRQLERLNSDANIQVGQFGELNLKSLLEPTHINSNACGTLHSNINHQFIENPRLQTKEEMISALDNLPQDVYRVKGFVRFSDQQHVYLVQYAQGNIELSPIQLKNDVPLYLIVIGKHLKQIQLDL

SEQ ID NO: 20557 - protein, 362 aa, Vanilla aphylla
SDSGKDAGRLSAAWQLYKTQEELVQVAKQFGVKLTMFHGRGGTVGRGGGPTHLGILSQPPDTILGSLRVTVQGEVIEQCFGEERLCFRTLQRFTVATLEHGMHHHISPKPEWRSLMDEMAVIATKEYRSIVFQDPRFVEYFRLATPELEYGRMNIGSRPAKRKPSGGIESLRAIPWIFAWTQTRFHLPVWLGFGAAFKHVITKDIRNLHILREMYNGWPFFRVTIDLIEMVFTKGNPGIASLYDELLVSNDLLSFGMELRANYEETKRLLLQVAGHKDLLEGDPHLKRLRLRDPYITTLNVCQAYTLKRIREPSYHAMAPHHVSNETESRKSAAELVKLNPTSEYAPGLEDTLILTMKGIAA

SEQ ID NO: 20558 - protein, 245 aa, Lilium longiflorum
MGRGKIEIKRIENTTNRQVTFCKRRNGLLKKAYELSVLCDAEVALIVFSTRGRLYEYANNSVKGTIERYKKASSDAFNTGSVSEANAQYYQQESSKLRNQIVSLQNAHRSMLGESIGSMGTQGTEIHGEKAGKMDNNKIRTKKNELLFAEIEYMQKREAELQNNSMFLRTKIAENERSQQQQMDMERSQQQHMDMDRSHQRHLEMLPTTSAFETMPTFDSRNFFDINLIEAHHHYQQQQTALQLG

SEQ ID NO: 20559 - protein, 381 aa, Triticum aestivum
MGKGDVATRSKSQKSSTAQNEQSTPTNPPTAYPDWSQFQAYYNVPGTTQMTPPAYFHSTVAPSPQGHPYMWGPQMMPPYGTPPPYATMYAQGTPYQQAPMPPGSHPYSPYPVQAPNGTVQTPTSGAGGSETDKSNKNKRKTPLKRSKGSLGSLDVVTVKDKTPPAKPLVSSSNEGSSQSESGSGSYSGGSSTNSKSGSHTKDGSEHGPANDASNKGVTAQGTAVEPTQVSSGPVVLNPMMPYWPVPPPMPGQATGVSMGVDYWGAPTSVPMHGKAVAAPTSAPSSNSRDIVLSDPVIQDEREVKKQKRKQSNRESARRSRLRKQAEWEEVASRADLLKQENSSLKEELKQLQEKCDNLTSENTSLHEKLKALDSEKPNGNL

SEQ ID NO: 20560 - protein, 515 aa, Yarrowia lipolytica CLIB122
MLRALNTVQRLSSTRAMSTSSISSLLKNPNLLRNQGYVNGQWVSSKTGDTFSVENPATGETLGQVPEFSVAEADEAVQHAQTAFKTFKHTTGRERSKMLRKWYDLMQENAGDLATLVTLENGKSLADAKGEIGYGASFFEWFSEEAPRIYGDIIPSANPANRIYTIKQPIGVCGIITPWNFPSAMITRKAAAAVAAGCTMVIKPGSETPYSALALAYLAEQAGIPKGVVNVVTTKKNTRAFGNALCENPTVKKVSFTGSTGVGKTLMGASASTLKKLSFELGGNAPFIVFEDADIDRAVDGAIASKFRGTGQTCVCANRIYVHESIAEKFAERMAAVVKDFKVGNGLDPNTTHGPLIHEGAKGKIQEQVDDAVKKGGKVLIGGSDAPEIGKAFFQPTVISGAKSDMLIASEETFGPIAAIFPFKTDAEVIELANKAEVGLAGYFYSKDVYRIQQVAEALEVGMVGVNTGLMTECALPFGGIKESGFGREGSKYGLDDYMVLKTIVVSGVEPHIQP

SEQ ID NO: 20561 - protein, 143 aa, Brassica napus
SQVAKNMATEDVNEALAAAEVTEKQPHKLERKWCFWFDNQSKQKQGDAWGASLRKACTFDTVEDFWGLHETIFIPSKLTPNAEIHMFKAGVEPKWEDPECANGGKWTYVVANSRKQALDKAWLETLMALIGEQFDEADEICGP

SEQ ID NO: 20562 - protein, 398 aa, Yarrowia lipolytica CLIB122
MSARLFSTASRQAARAAVARVATVSASRSISMAATRPAFKLSAPAVARTIKTISFNGKEDEIVHERADWPQEKLLDYFKNDTIALIGYGSQGYGQGLNMRDNGLNVIIGVRKDGASWKAAQEDGWVPGKNLFDVNEAIGKGTIIMNLLSDAAQSETWPQIKPLITKGKTLYFSHGFSPVFKDLTKVETPADVDVILVAPKGSGRTVRSLFKEGRGINSSYAVWNDVTGKADEKAVALAIAVGSGYVYQTTFEKEVRSDLYGERGCLMGGIHGMFLAQYEVLRERGHSPSEAFNETVEEATQSLYPLIGKYGMDYMYDACSTTARRGALDWSPKFKDALKPVFNELYDRVEDGSETQRSLEFNSQKDYRAKFEAELQDIRDLEIWRVGKEVRKLRPENN

SEQ ID NO: 20563 - protein, 539 aa, Glycine max
MVSLGATCALCCSVLIVFVTLSSAGDIVHPDSIAPRRPGCDNNFVLVKVPTWIDGVESFEYVGVGARFGPTLESKEKHANHTRVAIADPPDCCSKPNNKLTGEIILVHRGQCSFTIKANIAEEAGASAILIINYRTELFKMVCEANETDVDIGIPAVMLPQDAGENLKNHILNNSVVSVQLYSPLRPLVDVAEVFLWLMAVGTILCASYWSAWSARESAIEQEKLLKDASDEYVNAENAGSSAYVEISTAAAISFVVIASCFLVMLYKLMAYWFVEVLVVLFCIGGVEGLQTCLVALLSCFKWFQHAAQTFVKVPFFGAVSYLTVAVTPFCIVFAVLWGIYRRVSFAWIGQDILGITLIITVLQIVRIPNLKVGTVLLSCAFLYDIFWVFVSKWWFHESVMIVVARGDRSGEDGIPMLLKIPRMFDPWGGYSIIGFGDIILPGLLVAFSLRYDWLAKKNLRDGYFLWAMTAYGLGLLITYVALNLMDGHGQPALLYIVPFTLGTFLSLGKKRGELKVLWTRGEPKIPCPHIQEDQSTNQ

SEQ ID NO: 20564 - protein, 635 aa, Frankia sp. EAN1pec
MQQYTLGAGRVLPDDRGLYSLVDDRVRTDPDRVILSRPTGTDWHDVTFRELDAHVRRVAAVLLGHGVGVGDRVGIVGRTSYEWVVADLAVLALGAITVPIFPTASPAQITHIVTDSGMAWCFVETPEHHSAVATAGAGTLLALPWQLADLNGWQAPADDASHDAGHAAGGGDLAAADEFAGRRDAVRADSLATIVYTSGTTGMPKGCILTHGNLFASSANTVEHTGELFRVWRPAAGTGAAEGSAGSEASVEQASTLLCLPLAHVFGRTILVACIYAGTRTGLLAAVPDILPAMATFRPTVLALVPYALEKIRKGLRGVVDTDTELAAVAAGLAGDPADGPATSPAAERRPAPAALARINGVFGGRLTHVISGGASLDATTAAFYRGVGVRILNCYGLTEAATAVTVNQPGTNRIGTVGQPIPGTTVAISPDGEVLVAGPNVSPGYWRAGQAPWIEPAGTQAEPGAGPSRWLHTGDLGHLDADGFLVITGRRKEILVTSGGKNVTPTLLEDRMRLHPLVADCMVVGEARPYVAALVTTDQGALNALAAAHGIDLAASGWWEHPALLDRVQEAVDDANGLVSRAESIRRFRILPTQLTIDAGHLTPSMKLRRAPIETAFATEIEQLYSPAAAPAPA

SEQ ID NO: 20565 - protein, 505 aa, Arabidopsis thaliana
GLRLQLSYTLRHQHPVEYTVPIQLPVINQVFGTSRAVKISPNSPVARLRPVSGKYMLGEVVAVRVPLLHLSNFQINDWPELSTKRYALMVLMLPSDSARQWHVHELELVEVVADQVAVALSHAAILEESMRARDLLMEQNVALDLARREAETAIRARNDFLAVMNHEMRTPMHAIIALSSLLQETELTPEQRLMVETILKSSNLLATLMNDVLDLSRLEDGSLQLELGTFNLHTLFREVLNLIKPIAVVKKLPITLNLAPDLPEFVVGDEKRLMQIILNIVGNAVKFSKQGSISVTALVTKSDTRAADFFVVPTGSHFYLRVKVKDSGAGINPQDIPKIFTKFAQTQSLATRSSGGSGLGLAISKRFVNLMEGNIWIESDGLGKGCTAIFDVKLGISERSNESKQSGIPKVPAIPRHSNFTGLKVLVMDENGVSRMVTKGLLVHLGCEVTTVSSNEECLRVVSHEHKVVFMDVCIPGVENYQISLRIHEKFTKQRHQRPLLVALS

SEQ ID NO: 20566 - protein, 335 aa, Xanthomonas oryzae pv. oryzae KACC10331
MNMAIKVGINGFGRIGRNVLRSAVQNFANDIEIVAINDLLEPDYLAYMLQYDSVHGRFKADVSVDGNTLIVNGKKIRLTQERDPANLKWDAVGADVVIESTGLFLTKDTAQKHIDAGAKKVILSAPSKDDTPMFVYGVNDKTYKGEAIVSNASCTTNCLAPLAKVINDKWGIKRGLMTTVHAATATQKTVDGPSNKDWRGGRGILENIIPSSTGAAKAVGVVIPALNKKLTGMSFRVPTSDVSVVDLTVELEKPATYAEICAEVKAQSEGALKGVLGYTEDKVVATDFRGETCTSVFDADAGIALDSTFVKLVSWYDNEWGYSNKCLEMVRVVAK

SEQ ID NO: 20567 - protein, 485 aa, Kluyveromyces lactis
MVRLGPKKPPARKGSMADVPANLMEQIHGLETLFTVSSEKMRSIVKHFISELDKGLSKKGGNIPMIPGWVVEYPTGKETGDFLALDLGGTNLRVVLVKLGGNHDFDTTQNKYRLPDHLRTGTSEQLWSFIAKCLKEFVDEWYPDGVSEPLPLGFTFSYPASQKKINSGVLQRWTKGFDIEGVEGHDVVPMLQEQIEKLNIPINVVRLINDTTGTLVASLYTDPQTKMGIIIGTGVNGAYYDVVSGIEKLEGLLPEDIGPDSPMAINCEYGSFDNEHLVLPRTKYDVIIDEESPRPGQQAFEKMTSGYYLGEIMRLVLLDLYDSGFIFKDQDISKLKEAYVMDTSYPSKIEDDPFENLEDTDDLFKTNLNIETTVVERKLIRKLAELVGTRAARLTVCGVSAICDKRGYKTAHIAADGSVFNRYPGYKEKAAQALKDIYNWDVEKMEDHPIQLVAAEDGSGVGAAIIACLTQKRLAAGKSVGIKGE

SEQ ID NO: 20568 - protein, 147 aa, Triticum aestivum
  misc_feature (11)..(11): Xaa can be any naturally occurring amino acid
  unsure (1)..(147): unsure at all Xaa locations
PRVRLPSGVIXYRFVVDGERRCFPDLPCETDAMGNAVNLLDVHDFVPESVESVSEFEAPPSPESSYSFLAPEEKDFAKEPPALPSQLHLGVLNSQNSEEICARPQHIVLNHLFIEKGWGAHPLVALGVTHRFESKYVTVVLYKPIER

SEQ ID NO: 20569 - protein, 477 aa, Lycopersicon esculentum
MGLISKIATNDGHGENSAYFDGWKAYENDPFHPTQNPNGVIQMGLAENQLCFDLIQEWIVNNPKASICTYEGVQDFQDTAIFQDYHGLPEFRKAVARFMEKVRGDRVRFDPERIVMSGGATGAHESLAFCLADPGDAFLVPTPYYPGFDRDLRWRTGVQLFPVVCESSNNFKVTKEALEEAYSKAQESNIKVKGLLINNPSNPLGTILDKETLKDILRFINDKNIHLVCDEIYAATAFSQPSFISISEVKSEVVGCNDDLVHIVYSLSKDLGFPGFRVGIIYSYNDAVVNIARKMSSFGLVSTQTQRLIASMLLDTIFVEDFIAKSSMRLLQKHGLFTKGLGQVGITTLKSNAGLFIWMDLRRFLENSTFDDELKLWHIIIDKVKLNVSPGCSFHCSEPGWFRVCFANMDDATMKIALRRIRHFVYLQPNKGVEVATKKQYCRTRSKLEISLSFRRLDDFMNSPHSPMSSPMVQARN

SEQ ID NO: 20570 - protein, 505 aa, Arabidopsis thaliana
GLELQLSYTLRHQHPVEYTVPIQLPVINQVFGTSRAVKISPNSPVARLRPVSGKYMLGEVVAVRVPLLHLSNFQINDWPELSTKRYALMVLMLPSDSARQWHVHELELVEVVADQVAVALSHAAILEESMRARDLLMEQNVALDLARREAETAIRARNDFLAVMNHEMRTPMHAIIALSSLLQETELTPEQRLMVETILKSSNLLATLMNDVLDLSRLEDGSLQLELGTFNLHTLFREVLNLIKPIAVVKKLPITLNLAPDLPEFVVGDEKRLMQIILNIVGNAVKFSKQGSISVTALVTKSDTRAADFFVVPTGSHFYLRVKVKDSGAGINPQDIPKIFTKFAQTQSLATRSSGGSGLGLAISKRFVNLMEGNIWIESDGLGKGCTAIFDVKLGISERSNESKQSGIPKVPAIPRHSNFTGLKVLVMDENGVSRMVTKGLLVHLGCEVTTVSSNEECLRVVSHEHKVVFMDVCMPGVENYQIALRIHEKFTKQRHQRPLLVALS

SEQ ID NO: 20571 - protein, 724 aa, Ashbya gossypii ATCC 10895
MTIQSITGSSFSGGDVSAGSEKVYQNYLMPTLKLYDAKVSINHWQLRDCVKCSSTGLGSVYYIYDHSIRTLDTRSTAAELQNEKMERRRRRSSLCGGQRSDPWRDHRAPSELVVQFDYKPRCFRENGGLIACGGLISSDDIGSTVSRSGRHEDSDGGGQSTGVLTPSQVEPIRLANSDILTDYSFYGDQQSWKGILALYNMENGVSLTYKLGQYINNCVELYQRTSQQYDLYTCNNDSHLYQCDVSNRGVELTRRYSDLKFALNCSAISHDGKTMVVSGDSSKFAVYRQNELSGCFSLQYDAAPEWGSKWSRTKCVPRYAAVDRSEVLDRIYDSPGGDNGFYTSYSENDVHMATIFQNGLCLVYDMRKMDTPLAEIPSTRRHAQNGSFRVCKFSRSFDDLLFISEHQSHVHVVDTRNLMNHQVIVIPDKVRSPDENLTPSPNSGVSRSPPAPSIDDPCVTRATRLPIRSLEPEVLPYPDVAQYSNNFQNVSSDEDAIDQLSSGVFQNRRRRSTFRVRRYSTSSIINSNYPRALEDIDPSILDHHYTQHNYRAVDNYNYVNDQPQRGSPARVSRRVLVPGRSRRAMAVEDIDDDTLEEDNGPEDEDDNPMMGYAEAYNEINEITHGSQFRFENVPQSSAIPRRQGISMALTNILNRTRDSGNRSSRTPAFSTASGSDLFEENSISGIDWVQDQEGSSLIIGTDYGIIKWNINSWARRSFPCYDFC

SEQ ID NO: 20572 - protein, 329 aa, Picrophilus torridus DSM 9790
MEKVYTENDLKENLMRNKKIAVLGYGSQGRAWALNMRDSGLNVTVGLERQGKSWEKAVADGFKPLKSRDAVRDADAVIFLVPDMAQRELYKNIMNDIKDDADIVFAHGFNVHYGLINPKNHDVYMVAPKAPGPSVREFYERGGGVPVLIAVANDVSGRSKEKALSIAYSLGALRAGAIETTFKEETETDLIGEQLDLVGGITELLRSTFNIMVEMGYKPEMAYFEAINEMKLIVDQVFEKGISGMLRAVSDTAKYGGLTTGKYIINDDVRKRMRERAEYIVSGKFAEEWIEEYGEGSKNLESMMLDIDNSLEEQVGKQLREIVLRGRPK

SEQ ID NO: 20573 - protein, 273 aa, Bradyrhizobium sp. BTAi1
MDAIDTQGIRLPKLGLGTFRMQGTVCREAVESALALGYRHIDTAEMYANEDAIGAALAAAQVPRAELHVTTKVWPENLAPDAIRRAFDTSLKKLRLDVVDLYLIHWPAKGMNLPAALETLIKLKDEGRTRAIGVANFTVALLRQAIEEIQAPIACNQVEYHVMLDQSKLMGYMASRSIPLVAYCPLAQGRAAADATLAAIGSKHGASAAQVALKWLLDQDGVAAIPKAGRKESQQANWDAMKVQLDDEDRATIAALPKDKRFVNPGFAPDWDR

SEQ ID NO: 20574 - protein, 505 aa, Arabidopsis thaliana
GLELQLSYTLRHQHPVEYTVPIQLPVINQVFGTSRAVKISPNSPVARLRPVSGKYMLGEVVAVRVPLLHLSNFQINDWPELSTKRYALMVLMLPSDSARQWHVHELELVEVVADQVAVALSHAAILEESMRARDLLMEQNVALDLARREAETAIRARNDFLAVMNHEMRTPMHAIIALSSLLQETELTPEQRLMVETILKSSNLLATLMNDVLDLSRLEDGSLQLELGTFNLHTLFREVLNLIKPIAVVKKLPITLNLAPDLPEFVVGDEKRLMQIILNIVGNAVKFSKQGSISVTALVTKSDTRAADFFVVPTGSHFYLRVKVKDSGAGINPQDIPKIFTKFAQTQSLATRSSGGSGLGLAISKRFVNLMEGNIWIESDGLGKGCTAIFDVKLGISERSNESKQSGIPKVPAIPRHSNFTGLKVLVMDENGVSRLVTKGLLVHLGCEVTMVSSNEECLRVVSHEHKVVFMDVCMPGVENYQIALRIHEKFTKQRHQRPLLVALS

SEQ ID NO: 20575 - protein, 487 aa, Ustilago maydis 521
MVNASYTPSGDLITYYDDQGTPTELIYNLGNMSWIIVSTALVFIMIPGLGFFYAGLLRKKSALSMIWMSMVILSVASFEWFFWGFSLAFSTSSSNKFIGNLDNFGLINVDIGPSTGGTGLPQLLFCIYQMMFAAITPVIACGAFADRARLGPVLIFAFCWCTIVYNPIAYWTWNVGKGWANVMGGLDFAGGTPVHISSGTAALAISIFLGKRKGYGTEQLAYRPHNVAYVILGTVLLWFGWFGFNGGSALGANLRAVQAMMVTQVATSVGGLTWMFWDWRLERKWSAVGFCSGAISGLVAITPASGYVGTPAAVAFGVLGGTACNFATGLKNLFGYDDALDIFAAHGIGGIVGNLLTGIFADNRVASFDGTAPIPGGWINKNWIQLGYQLADSAAGFGWSFVVTLILLFAIDRIPGCHFRSSEEDESLGIDLTQIGEEVMVMPLLHDFVRPEDGAEIHHATASTDLKFSPAHSEKDLEAARPQPTAV

SEQ ID NO: 20576 - protein, 505 aa, Arabidopsis thaliana
GLELQLSYTLRHQHPVEYTVPIQLPVINQVFGTSRAVKISPNSPVARLRPVSGKYMLGEVVAVRVPLLHLSNFQINDWPELSTKRYALMVLMLPSDSARQWHVHELELVEVVADQVAVALSHAAILEESMRARDLLMEQNVALDLARREAETAIRARNDFLAVMNHEMRTPMHAIIALSSLLQETELTPEQRLMVETILKSSNLLATLMNDVLDLSRLEDGSLQLELGTFNLHTLFREVLNLIKPIAVVKKLPITLNLAPDLPEFVVGDEKRLMQIILNIVGNAVKFSKQGSISVTALVTKSDTRAADFFVVPTGSHFYLRVKVKDSGAGINPQDIPKIFTKFAQTQSLATRSSGGSGLGLAISKRFVNLMEGNIWIESDGLGKGCTAIFDVKLGISERSNESKQSGIPKVPAIPRHSNFTGLKVLVMDENGVSRMVTKGLLVHLGCEVTTVSSNEECLRVVSHEHKVVFMDVCIPGVENYQISLRIHEKFTKQRHQRPLLVALS

SEQ ID NO: 20577 - protein, 634 aa, Arabidopsis thaliana
MWRCVSRGFRAPASKTSSLFDGVSGSRFSRFFSTGSTDTRSSYTIVDHTYDAVVVGAGGAGLRAAIGLSEHGFNTACITKLFPTRSHTVAAQGGINAALGNMSEDDWRWHMYDTVKGSDWLGDQDAIQYMCREAPKAVIELENYGLPFSRTEEGKIYQRAFGGQSLDFGKGGQAYRCACAADRTGHALLHTLYGQAMKHNTQFFVEYFALDLLMASDGSCQGVIALNMEDGTLHRFRSSQTILATGGYGRAYFSATSAHTCTGDGNAMVARAGLPLQDLEFVQFHPTGIYGAGCLITEGSRGEGGILRNSEGERFMERYAPTAKDLASRDVVSRSMTMEIREGRGVGPHKDHIYLHLNHLPPEVLKERLPGISETAAIFAGVDVTKEPIPVLPTVHYNMGGIPTNYHGEVVTIKGDDPDAVIPGLMAAGEAACASVHGANRLGANSLLDIVVFGRACANRVAEISKPGEKQKPLEKDAGEKTIAWLDRLRNSNGSLPTSTIRLNMQRIMQNNAAVFRTQETLEEGCQLIDKAWESFGDVQVKDRSMIWNSDLIETLELENLLINASITMHSAEARKESRGAHAREDFTKREDGEWMKHTLGYWEDEKVRLDYRPVHMDTLDDEIDTFPPKARVY

SEQ ID NO: 20578 - protein, 504 aa, Candida boidinii
MSNPPTYTTSQGCPVSDAFSTQRISGTKISIKTPVGPLLLQDFKFLDSLAHFDRERIPERVVHAKGAGAYGVFEVTEDISDICSAKFLDTVGKKTKIFTRFSTVGGEKGSSDSARDPRGFATKFYTEEGNLDLVYNNTPIFFIRDPTKFPHFIHTQKRNPATNCKDANMFWDYLTNNPESLHQIMYLFSNRGTPTSYRKMNGYSGHSYKWYNAKGEWVSSVHFISNQGVHNMTDEEAGDLSGKDPDFQTMDLYKAIEQGDYPSWECYVQTMTLEEAKKQPFSVYDLTKVWPHKDFPLRHFGKFTLNENAQNYFAEVEQAAFSPSHTVPGMEPSNDPVLQSRLFSYPDTHRHRLGVNYSQIPVNCPMRAVFAPQIRDGSMMVNGNLGGTPNYAGAYNCPVQYQAPIKASSKTPEEQYEGETLSYDWTEVNEYDFYQPGRFWEVLGKTKGEQEALVHNVANHVSGADEFIQDRVFAYFSKANPVIGDLIRKEVLKKSPRGASKNKF

SEQ ID NO: 20579 - protein, 474 aa, Xanthomonas oryzae pv. oryzae KACC10331
MFVVSEMADFIKAGGLGDVAAALPRALRHRYDVRVLIPGYRAVLERAGKVEIVGRVLAHAALPACDIGRIVQSDGLPIYILLSRELFERDGSPYVSTSGSEFEDNAIRFATLSHAAADIAAGHAGLGWKPRLLHLNDWPCALAAGYVRWSGGTTPCLLTIHNLAYQGLVPYSMAGALGIPAERVAELEFYGQMSFLRGGIVNADHVNTVSVSYAKQITGPAQGCGLDRLLAGRAAKGALTGIVNGIDASWDPRTDEYLDSHFSVNQWQGRQDNAAQVRKAFGLRESTGPLFAVVSRLVHQKGLDLICEVAPQIVAAGGQIAVIGGGEPDIERQVAELTRRYPGQVGAFIGFEEGLARRMFAGADFLLMPSRFEPCGLSQMYAQRFGCLPIAHATGGLIDTVDDGVTGFLFQHASVEALRRCLERAFRTFRLPGLLAAMRRAAMLRPSGWDVAGNKYLSLYERTAAIAPALATVS

SEQ ID NO: 20580 - protein, 179 aa, Shigella boydii
RMIESNLRLVVKIARRYGNRGLALLDLIEEGNLGLIRAVEKFDPERGFRFSTYATWWIRQTIERAIMNQTRTIRLPIHIVKELNVYLRTARELSHKLDHEPSAEEIAEQLDKPVDDVSRMLRLNERITSVDTPQDDDMKQSIVKWLFELNAKQREVLARRFGLLGYEAATLEDVGREIG

SEQ ID NO: 20581 - protein, 204 aa, Oryza sativa
MRKTTKGAIFNPPNTLQDNSYTKLAVLAKGGSKLETTTAQLARKSSKNRTEHPSKADRPNLQRRVNITFSSPVLSAWQLMGQDLSGLGVKELQTLENQLEMSIRCIRTKKDQLMIDEIHELNRKGSLIHQENMELYRKVNLIRQENAELYKKLYETGAENEANRDSTTPYNFAVIEEANTPARLELNPPSQQNDAEQTTPPKLG

SEQ ID NO: 20582 - protein, 653 aa, Arabidopsis thaliana
MINVMNPMKGGTEKGLDPQLWHACAGGMVRMPPMNSKVFYFPQGHAENAYDCVDFGNLPIPPMVLCRVLAIKYMADAESDEVFAKLRLIPLKDDEYVDHEYGDGEDSNGFESNSEKTPSFAKTLTQSDANNGGGFSVPRYCAETIFPRLDYNAEPPVQTILAKDVHGDVWKFRHIYRGTPRRHLLTTGWSNFVNQKKLVAGDSIVFMRAENGDLCVGIRRAKRGGIGNGPEYSAGWNPIGGSCGYSSLLREDESNSLRRSNCSLADRKGKVTAESVIEAATLAISGRPFEVVYYPRASTSEFCVKALDARAAMRIPWCSGMRFKMAFETEDSSRISWFMGTVSAVNVSDPIRWPNSPWRLLQVAWDEPDLLQNVKRVNPWLVELVSNVHPIPLTSFSPPRKKMRLPQHPDYNNLINSIPVPSFPSNPLIRSSPLSSVLDNVPVGLQGARHNAHQYYGLSSSDLHHYYLNRPPPPPPPSSLQLSPSLGLRNIDTKNEKGFCFLTMGTTPCNDTKSKKSHIVLFGKLILPEEQLSEKGSTDTANIEKTQISSGGSNQNGVAGREFSSSDEGSPCSKKVHDASGLETGHCKVFMESDDVGRTLDLSVLGSYEELSRKLSDMFGIKKSEMLSSVLYRDASGAIKYAGNEPFRYIFLL

SEQ ID NO: 20583 - protein, 193 aa, Shigella boydii
MIESNLRLVVKIARRYGNRGLALLDLIEEGNLGLIRAVEKFDPERGFRFSTYATWWIRQTIERAIMNQTRTIRLPIHIVKELNVYLRTARELSHKLDHEPSAEEIAEQLDKPVDDVSRMLRLNERITSVDTPLGGDSEKALLDILADEKENGPEDTTQDDDMKQSIVKWLFELNAKQREVLARRFGLLGYEAA

SEQ ID NO: 20584 - protein, 372 aa, Corynebacterium efficiens YS-314
MSSSEKNGSLDASAGASVDVDAVILVGGKGTRLRPLTNNTPKPMLPTAGHPFLKHLLARIKAAGITHVVLGTSFKAEVFEDYFGDGSDLGLEIEYVVEDQPLGTGGGIRNVYDKLRHDTAVVFNGDVLSGADLGDILATHREKEADLTMHLVRVANPRAFGCVPTDADGRVLEFLEKTEDPPTDQINAGCYVFQRELIASIPADRVVSVERETFPQLLQEGRRVYGHVDTSYWRDMGTPQDFVRGSSDLVRGIAFSPLLEGQTGEELVDPSAGVRDGVILLGGTVVGRGTEIGAGCRLDGTVVFDGVTIEPGAFIENSIISSGVRIGANAHISGCVIGEGAQIGARCELSSGMRVFPGVVIPDGGIRFSSDQ

SEQ ID NO: 20585 - protein, 579 aa, Oryza sativa
  misc_feature (120)..(120): Xaa can be any naturally occurring amino acid
  unsure (1)..(579): unsure at all Xaa locations
MAASTTLALSHPKTLAAAAAAAPKAPTAPAAVSFPVSHAACAPLAARRRAVTAMVAAPPAVGAAMPSLDFDTSVFNKEKVSLAGHEEYIVRGGRNLFPLLPEAFKGIKQIGVIGWGSQGXPAQAQNLRDSLAEAKSDIVVKIGLRKGSKSFDEARAAGFTEESGTLGDIWETVSGSDLVLLLISDAAQADNYEKIFSHMKPNSILGLSHGFLLGHLQSAGLDFPKNISVIAVCPKGMGPSVRRLYVQGKEINGAGINSSFAVHQDVDGRATDVALGWSVALGSPFTFATTLEQEYKSDIFGERGILLGAVHGIVEALFRRYTEQGMDEEMAYKNTVEGITGIISKTISKKGMLEVYNSLTEEGKKEFNKAYSASFYPCMDILYECYEDVASGSEIRSVVLAGRRFYEKEGLPAFPMGNIDQTRMWKVGEKVRSTRPENDLGPLHPFTAGVYVALMMAQIEVLRKKGHSYSEIINESVIESVDSLNPFMHARGVAFMVDNCSTTARLGSRKWAPRFDYILTQQAFVTVDKDAPINQDLISNFMSDPVHGAIEVCAELRPTVDISVPANADFVRPELRQSS

SEQ ID NO: 20586 - protein, 334 aa, Helicobacter pylori J99
  misc_feature (1)..(1): Xaa can be any naturally occurring amino acid
  misc_feature (6)..(6): Xaa can be any naturally occurring amino acid
  misc_feature (18)..(18): Xaa can be any naturally occurring amino acid
  misc_feature (65)..(65): Xaa can be any naturally occurring amino acid
  misc_feature (137)..(137): Xaa can be any naturally occurring amino acid
  misc_feature (178)..(178): Xaa can be any naturally occurring amino acid
  misc_feature (236)..(236): Xaa can be any naturally occurring amino acid
  misc_feature (329)..(329): Xaa can be any naturally occurring amino acid
  unsure (1)..(334): unsure at all Xaa locations
XSLKRXLAEFEKIQAILXAFPHEFSDWAYCIEEARESFLHIIQTIAKHAKVLVCVHTNDTIGYEXLKNLPGVEIARIDTNDTWARDFGAISIENHGVLECLDFGFNGWGLKYPSNLDNQVNFKLKHLGFLKHPLKTXPYILEGGSIESDGAGSILTNTQCLLEKNRNPHLNQNGIETXLKKELGAKQVLWYSYGYLKGDDTDSHTDTLARFLNKDTIVYSACEDENDEHYTALKKXQEELKTFKKLDGTPYKLIPLEIPKAIYNENQQRLPATYVNFLLCNNALIVPTYNDPNDTLILETLRQHTPLEVIGVDCNTLIKQHGSLHCVTXQLYEG

SEQ ID NO: 20587 - protein, 201 aa, Escherichia albertii
MIESNLRLVVKIARRYGNRGLALLDLIEEGNLGLIRAVEKFDPERGFRFSTYATWWIRQTIERAIMNQTRTIRLPIHIVKELNVYLRTARELSHKLDHEPSAEEIAEQLDKPVDDVSRMLRLNERITSVDTPLGGDSEKALLDILADEKENGPEDTTQDDDMKQSIVKWLFELNAKQREVLARRFGLLGYEAATLEDVGRE

SEQ ID NO: 20588 - protein, 173 aa, Lilium longiflorum
  misc_feature (2)..(2): Xaa can be any naturally occurring amino acid
  unsure (1)..(173): unsure at all Xaa locations
MXLSVLCDAEVALIVFSTRGRLYEYANNSVKATIERYKKASTDISNTRSVSEANAQYYQQEWTKLRQQINSLQNSNRNLLGESLSNMNLRDLKQLENRLEKAINKIRTKKNELLYAEIEYMQKREMELQSDNMYLRNKVAENEREQQQQMNMMPSTSEYEVMPHFRFTEFPSS

SEQ ID NO: 20589 - protein, 425 aa, Cryptococcus neoformans var. neoformans B-3501A
MTSLPQALKRAQQTYANRNRKSYEAHQAASRHLPGGSTRSSIFIHPFPLCIQKGQGVKITDLDGHEYVDFVSDFTSGIYGKSHPVLIDAIKEALDNGLQLGAHTLAETTLASHFTSRFPSIELVRFANSGTEANILAISTAVKHTGRKKVLVFEGGYHGSVMSHFHMKGGDGDDLKVPFDFVVCSYNDPKGADALISQHPSEIGAILVEPMLGAGGCIPGDPAFLQFLREKASSIGAVLIFDEVQTARLSTGGRQKILGITPDLTTVGKFFGGGFAFGAFGGKKEIMEKFDARKGGAISHGGTFNNSPLTMVAGATAMEKILTEDALKNLNKLGDWMREEINRMFTSDGSPFLMTGLGSINQFHCTLSSNQNQVLDLLFFYLLERGFWIAQRGLVSLSFAMTKEDVQRFIEAAVEATQKVKATLK

SEQ ID NO: 20590 - protein, 413 aa, Thermoanaerobacter tengcongensis MB4
MAVNPLKAVQEQIKNACELLNLEESVYEILKEPLRVMEVSIPVQMDDGTVKVFKGYRSQHNDALGPAKGGIRFHPDVTLDEVKALSMWMTFKCGVVGLPYGGGKGGVAVNPQELSPTELERLSRGYIRAISSIIGPEKDIPAPDVGTNAQVMAWMVDEYNKIVGYNSPAVITGKPLIYGGSKGRVDATGYGVALIAREAAKKLEMDIKNCTVAIQGYGNVGSYTGIHLQRLGAKIVGVVDIYGGVYNERGIDAEKLAEHVRKTGSVKDFEGTTSLTNEELFALDVDVLIPAALENQITEENAPNVKARMVCEAANGPTTPEADRILREKGIFVVPDILANSGGVIVSYFEWVQNLMNYYWTEEEIKERQEIVMINAFNNIYQLAQEYKVDMRTAAYMIAIKRIYEAMKVRGWI

SEQ ID NO: 20591 - protein, 150 aa, Arabidopsis thaliana
MSKRKTKEPKVENVTLGPAVREGEQVFGVVHVFASFNDTFIHVTDLSGRETLVRITGGMKVKADRDESSPYAAMLAAQDVAQRCKELGITAIHVKLRATGGNKTKTPGPGAQSALRALARSGMKIGRIEDVTPIPTDSTRRKGGRRGRRL

SEQ ID NO: 20592 - protein, 240 aa, Oryza sativa (japonica cultivar-group)
MYQQSAGQIQLQEGPMAPMKVYGWVVSPWMARVLVALEEAGAEYEVVPMSRSGGDHRRPEHLARNPFGEIPVLEDGDLTLYQSRAIARYIFRKYKPEFLGLGEGGSLEESAMVDVWLDVEAHQHEAAVRPILWHCIINKFEGRDRDQGVVDESVRKLEKVLGVYEARLSGSRYLAGDRISLADLSHFSNMRYFMATEYAGVVDAYPHVKAWWEALLARPTVQKVMAGMPPDFGFGSGNIP

SEQ ID NO: 20593 - protein, 808 aa, Arabidopsis thaliana
MANAERMITRVHSQRERLNETLVSERNEVLALLSRVEAKGKGILQQNQIIAEFEALPEQTRKKLEGGPFFDLLKSTQEAIVLPPWVALAVRPRPGVWEYLRVNLHALVVEELQPAEFLHFKEELVDGVKNGNFTLELDFEPFNASIPRPTLHKYIGNGVDFLNRHLSAKLFHDKESLLPLLKFLRLHSHQGKNLMLSEKIQNLNTLQHTLRKAEEYLAELKSETLYEEFEAKFEEIGLERGWGDNAERVLDMIRLLLDLLEAPDPCTLETFLGRVPMVFNVVILSPHGYFAQDNVLGYPDTGGQVVYILDQVRALEIEMLQRIKQQGLNIKPRILIITRLLPDAVGTTCGQRLEKVYGSQYCDILRVPFRTEKGIVRKWISRFEVWPYLETFTEDVAAEISKELQGKPDLIIGNYSDGNLVASLLAHKLGVTQCTIAHAFEKTKYPDSDIYWKKLDDKYHFSCQFTADIFAMNHTDFIITSTFQEIAGSKETVGQYESHTASRVRPRVRARVGIDVFDPKFNIVSPGADMSIYFPYTEEKRRLTKFHSEIEELLYSDVENKEHLCVLKDKKKPILFTMARLDRVKNLSGLVEWYGKNTRLRELANLVVVGGDRRKESKDNEEKAEMKKMYDLIEEYKLNGQFRWISSQMDRVRNGELYRYICDTKGAFVQPALYEAFGLTVVEAMTCGLPTFATCKGGPAEIIVHGKSGFHIDPYHGDQAADTLADFFTKCKEDPSHWDEISKGGLQRIEEKYTWQIYSQRLLTLTGVYGFWKHVSNLDRLEARRYLEMFYALKYRPLAQAVPLAQDD

SEQ ID NO: 20594 - protein, 321 aa, Arabidopsis thaliana
MALASSKAFSSIFNTLSPINQSKFVLACSGSNHVDVIDRGRRIMIFGSSLALTSSLLGSNQQRLPMESAIALEQFKEKEEELEEEEERNVNLFQKTSPSVVYIEAIELPKTSSGDILTDEENGKIEGTGSGFVWDKLGHIVTNYHVIAKLATDQFGLQRCKVSLVDAKGTRFSKEGKIVGLDPDNDLAVLKIETEGRELNPVVLGTSNDLRVGQSCFAIGNPYGYENTLTIGVVSGLGREIPSPNGKSISEAIQTDADINSGNSGGPLLDSYGHTIGVNTATFTRKGSGMSSGVNFAIPIDTVVRTVPYLIVYGTAYRDRF

SEQ ID NO: 20595 - protein, 363 aa, Capsicum annuum
MGLAENQLCFDLIQEWVVNNPKASICTAKGAEDFQEIAIFQDYHGLPEFRQAVARFMEKVRGDRVTFDPNRIVMSGGATGAHEMLAFCLADPGDAFLVPTPYYPGFDRDLRWRTGVQLFPVVCESSNDFKVTRKALEEAYEKAQESNIKIKRLLINNPSNPLGTLLDKDTLRDIVTFINSKNIHLVCDEIYAATVFDQPRFISVSEVVDEMIGCNQDLIHIVYSLSKDLGFPGFRVGIVYSYNDTVVDIARKMSSFGLVSTQTQHLLASMLSDEIFIEKFIAESSERLSKRQGMFTKGLAQVGISTLKSNAGLFFWMDLRRLLKEPTFDAELELWRIIIHEVKLNVSPGVSFHCSEPGWFRVC

SEQ ID NO: 20596 - protein, 159 aa, Rickettsia conorii str. Malish 7
MINYLKSFFLYEIVRGMVLTLKYFFKPKVTINYPYEKSPISPRFKGEHALRRYENGEERCIACKLCEAICPAQAIVIEADEREDGSRRTTRYDIDMTKCIYCGLCQEACPVDAIVEGPNFEFASLTHTALIYDKERLLQNGDRWEQALASKLHKDYEYR

SEQ ID NO: 20597 - protein, 530 aa, Lactobacillus sakei subsp. sakei 23K
MTKYVFVTGGVVSSLGKGIVAASLGRLLKNRGLKVTIQKFDPYINVDPGTMSPYQHGEVFVTDDGTETDLDLGHYERFIDNNLNKYSNVTTGKIYSEVLRKERKGEYLGATVQVIPHITNMIKEKIMRAATTTDSDIVITEIGGTVGDIESLPFLEALRQMKADVGAENCIYIHTTLVPYLKAAGEMKTKPTQHSVKELRGIGIQPNVLVCRTEKAIPDDMRNKIAQFCDVEPEAVVESRDAESIYDIPLLLKNQGLDDFVLNHFKMTAPEADMTEWIDMLHTIKNLEGTKKIALVGKYIELQDAYISVNEALRHAGYVYNTDVKVTPIQSEDITKENVAETLAGFDGIIVPGGFGDRGLEGMILSIQYARENDVPYLGICLGMQMASIEFARNVAGITDATTGEVHPDAEHKLIDIMSDQKDLENMGGTQRLGLYPCKLKPGTKTAEAYDNQSVIQQRHRHRYEFNNEYRDLLTDKGLVFAGTSPDNRLVEVIEIPENKFFVAAQYHPEFLSRPNKPEGLFKAFIGATM

SEQ ID NO: 20598 - protein, 1275 aa, Euglena gracilis
MPFDRQPLLSGEKGMPATSLWLVGGAVIAAVCVIVNTSYNGTQLSVTARPIQAAVSQVSMARFAESGVSRGSGNRVSQAVPLMAASVGAESESRRWVASAILFPLSGLFAAVALKMAMMKPKVAAVLPFTSEKDMKVWNPVNNKKFETFSYLPPLSDAQIAKQVDMIIAKGLSPCLEFAAPENSFIANDNTVRFSGTAAGYYDNRYWTMWKLPMFGCTDASQVLREISECRRAYPQCYVRLAAFDSVKQVQVISFVVQRPSGSSSSSWGMAAMTGEKDMKVWNPVNNKKFETFSYLPPLSDAQIAKQVDMIIAKGLSPCLEFAAPENSFIANDNTVRFSGTAAGYYDNRYWTMWKLPMFGCTDASQVLREISECRRAYPQCYVRLAAFDSVKQVQVISFVVQRPSGSSSSSWGMAAMTGEKDMKVWNPVNNKKFETFSYLPPLSDAQIAKQVDMIIAKGLSPCLEFAAPENSFIANDNTVRFSGTAAGYYDNRYWTMWKLPMFGCTDASQVLREISECRRAYPQCYVRLAAFDSVKQVQVISFVVQRPSGSSSSSWGMAAMTGEKEMKVWNPVNNKKFETFSYLPPLSDAQIAKQVDMIIAKGLSPCLEFAAPENSFIANDNTVRFSGTAAGYYDNRYWTMWKLPMFGCTDASQVLREISECRRAYPQCYVRLAAFDSVKQVQVISFVVQRPSGSSSSSWGMAAMTGEKDMKVWNPVNNKKFETFSYLPPLSDAQIAKQVDMIIAKGLSPCLEFAAPENSFIANDNTVRFSGTAAGYYDNRYWTMWKLPMFGCTDASQVLREISECRRAYPQCYVRLAAFDSVKQVQVISFVVQRPSGSSSSSWGMAAMTGEKEMKVWNPVNNKKFETFSYLPPLSDAQIAKQVDMIIAKGLSPCLEFAAPENSFIANDNTVRFSGTAAGYYDNRYWTMWKLPMFGCTDASQVLREISECRRAYPQCYVRLAAFDSVKQVQVISFVVQRPSGSSSSSWGMAAMTGEKEMKVWNPVNNKKFETFSYLPPLSDAQIAKQVDMIIAKGLSPCLEFAAPENSFIANDNTVRFSGTAAGYYDNRYWTMWKLPMFGCTDASQVLREISECRRAYPQCYVRLAAFDSVKQVQVISFVVQRPSGSSSSSWGMAAMTGEKDMKVWNPVNNKKFETFSYLPPLSDAQIAKQVDMIIAKGLSPCLEFAAPENSFIANDNTVRFSGTAAGYYDNRYWTMWKLPMFGCTDASQVLREISECRRAYPQCYVRLAAFDSVKQVQVISFVVQRPSSGGRSW

SEQ ID NO: 20599 - protein, 429 aa, Salmonella typhimurium LT2
MTRRAIGVSERPPLLQTIPLSLQHLFAMFGATVLVPVLFHINPATVLLFNGIGTLLYLFICKGKIPAYLGSSFAFISPVLLLLPLGYEVALGGFIMCGVLFCLVSFIVKKAGTGWLDVMFPPAAMGAIVAVIGLELAGVAAGMAGLLPAQGQSPDTKTIIISMVTLAVTVFGSVLFRGFLAIIPILIGVLAGYALSFALGVVDTTPIAQAHWFALPTFYTPRFEWFAILTILPAALVVIAEHVGHLVVTANIVKKDLVRDPGLHRSMFANGLSTIISGFFGSTPNTTYGENIGVMAITRVYSTWVIGGAAIFAILLSCVGKLAAAIQIIPLPVMGGVSLLLYGVIGASGIRVLIESKVDYNKAQNLILTSVILIIGVSGAKVHIGAAELKGMALATIVGICLSLIFKLISLLRPEEVVLEANDAEPPHQ

SEQ ID NO: 20600 - protein, 469 aa, Glycine max
MAATRPVQCLLRRVCRGSRTIGVATEVNASSSSSSQKIIDKEYEHSAHNYHPLPIVFSQAKGTSVWDPEGNKYLDFLSGYSAVNQGHCHPKILKALQEQAQRLTVSSRAFYNDRFPVFAEYVTNMFGYDMVLPMNTGAEGVETALKLARKWGYEKKRIPKDEAIIVSCCGCFHGRTLGVISLSCDNEATRGFGPLLPGNLKVDFGDAEALERIFKEKGEHIAAFILEPIQGEAGVIFPPDGYLKAVRDICSKYNVLMIADEIQTGLARTGKMLACEWEEVRPDIVILGKALGGGVIPVSAVLADKDVMLCIQPGQHGSTFGGNPLASAVAIASLEVIKNERLVERSAQMGEELAGQLLKIQQQYPDYVKEVRGRGLFIGVEFNSKNLFPVSGYELCKKLKYRGVLAKPTHDTIIRFTPPLCISLDEIQQGSKVLADVLEIDLPKLQKTKPKDAAPVASSACDRCGRVLY

SEQ ID NO: 20601 - protein, 605 aa, Shigella flexneri 2a str. 301
MMLNAWHLPVPPFVKQSKDQLLITLWLTGEDPPQRIMLRTEHDNEEMSVPMHKQRSQPQPGVTAWRAAIDLSSGQPRRRYSFKLLWHDRQRWFTPQGFSRMPPARLEQFAVDVPDIGPQWAADQIFYQIFPDRFARSLPREAEQDHVYYHHAAGQEIILRDWDEPVTAQAGGSTFYGGDLDGISEKLPYLKKLGVTALYLNPVFKAPSVHKYDTEDYRHVDPQFGGDGALLRLRHNTQQLGMRLVLDGVFNHSGDSHAWFDRHNLGTGGACHNSESPWRDWYSFSDDGTALDWLGYASLTKLDYQSESLVNEIYRGEDSIVRHWLKAPWNMDGWRLDVVHMLGEAGGARNNMQHVAGITEAAKETQPEAYIVGEHFGDARQWLQADVEDAAMNYRGFTFPLWGFLANTDISYDPQQIDAQTCMAWMDNYRAGLSHQQQLRMFNQLDSHDTARFKTLLGRDIARLPLAVVWLFTWPGVPCIYYGDEVGLDGKNDPFCRKPFPWQVEKQDTALFALYRRMIVLRKKSQALRRGGCQVLYAEDNVVVFVRVLNQQRVLVAINRGEASEVVLPASPFLNAVQWQCKEGHGQLTDGILALPAISATVWMN

SEQ ID NO: 20602 - protein, 532 aa, Arabidopsis lyrata subsp. lyrata
KTTLVELGRTLALEECALWMPTRTGLELQLSYTLRHQHPVEYTVPIQLPVINQVFGTSRAVKISPNSPVARLRPVSGKYMLGEVVAVRVPLLHLSNFQINDWPELSTKRYALMVLMLPSDSARQWHVHELELVEVVADQVAVALSHAVILEESMRARNLLMEQNVALDLARREAETAIRARNDFLAVMNHEMRTPMHAIIALSSLLQETELTPEQRLMVETILKSSNLLATLMNDVLDLSRLEDGSLQLELGTFNLHTLFREVLNLIKPIAVVKKLPITLNLAPDLPEFVVGDEKRLMQIILNIVGNAVKFSKQGSISVTALVTKSDTRDADFFVVPTGSHFYLRVKVKDSGAGINPQDIPKLFTKFAQTQSLATRSSGGSGLGLAISKRFVNLMEGNIWIESDGLGKGCTAIFDVKLGISERSNESKQSGIPKVPAIPRHSSFTGLKVLVMDENGVSRMVTKGLLVHLGCEVTTVSSNEECLRVVSHEHKVVFMDVCLPGVENYQIALRIHEKFTKQRHQRPLLVALTGNT

SEQ ID NO: 20603 - protein, 374 aa, Ashbya gossypii ATCC 10895
MILEANDSLFGPLFKRHSHSHSEEPEECPTENEYDGSDGIRILSVFIILLASAIGTFFPMLGSRFSRVRLPTWAFFFAKYFGSGVIVATGFIHLLLHGHESLSNPCLGGVLSEYPWAFAICMMSLFTLFFVEINSHHFVNKAARSTAVAVAGDEKSIKEDESTEDTPPKPNTAVSGANSAVVSQHFAHDECHQDLEQAKSLAADPNREQYLNQLISLFILEFGVVFHSVLIGLSLAVTAEDHFTTLFVVLIFHQMFEGMGLGARIAETEWGVHRKWTPWLLGLGYCLSTPIAIAIGLGVRHSFAPESRPSLIVNGVFDSLSAGIMLYTGLIELMAHEFLFSNSFKGEGGFNKMMQGFVYMCLGAGLMALLGKWA

SEQ ID NO: 20604 - protein, 449 aa, Kluyveromyces lactis NRRL Y-1140
MREIIHLSTGQCGNQIGAAFWETICGEHGLDFEGNYHGIDDIQKARLNVYFNEASSGKWVPRSVNIDLEPGTIDAVRNSKIGTLFRPDNYIFGQSSAGNVWAKGHYTEGAELVDSVMDVVRREAEGCDSLQGFQIAHSLGGGTGSGMGTLLISKIREEFPDRMMATFSVVPSPKTSDTVVEPYNATLSVHQLVEHADETFCIDNEALYDICQTTLKLPQPDYANLNHLVSSVMSGVTTSLRYPGQLNSDLRKLAVNLVPFPRLHFFMVGYAPLTSIGAQSFRSLSVSELTQQMFDSRNMMAASDPRNGRYLTVAAFFRGKVSVKEVEDEMHKVQTRNSSYFVEWIPNNVQTAVCSVPPKDLDMSATFIGNSTSIQELFRRVGDQFSVMFKKRAFLHWYTNEGMEEIEFSEAESNMNDLVSEYQQYQDATVEDDEELEFVDEQPMAENFE

SEQ ID NO: 20605 - protein, 612 aa, Candida glabrata CBS138
MENKEHHHHHHHHHHHHSNGSYVSNKVSSLADGSRVGNYQIVKTLGEGSFGKVKLAYHVTTGQKVALKIINKKVLAKSDMQGRIEREISYLRLLRHPHIIKLYDVIKSKDEIIMVIEYAGNELFDYIVQRNKMSEQEARRFFQQIISAVEYCHRHKIVHRDLKPENLLLDEHLNVKIADFGLSNIMTDGNFLKTSCGSPNYAAPEVISGKLYAGPEVDVWSCGVILYVMLCRRLPFDDESIPVLFKNISNGVYTLPKFLSPGASDLIKRMLIVNPLNRISIHEIMQDEWFKVDLAEYLVPQDLKQQEQFNKKSGNEENVEEIDDEMVVTLSKTMGYDKDEIYEALESSEDTPAYNEIRNAYILIKDNKSLIKDMKQDNNVTQELDTFLSQSPPTFQQNGDGMKASEDQKKKHSGRRLASSVTQQRTFHQPPFMDQSKEEDSTISILPTSLPQIHRANMLAQGLPAASKISPLVTKKSKTRWHFGIRSRSYPLDVMGEIYIALKNLGAEWAKPSEEDLWTIRVRWKYDSDESRLIEDGVKKIPNLMKIVIQLFQIETNNYLVDFKFDGWESTYGDSTISTNMSEDEMSTFSAYPFLHLTTKLIMELAVNSQGN

SEQ ID NO: 20606 - protein, 477 aa, Pyrococcus furiosus DSM 3638
MRRVKLPSHKTKIVATIGPATNSRKMIKQLIKAGMNVARINFSHGSFEEHARVIEIIREEAQKLDRRVAILADLPGLKIRVGEIKGGYVELKRGEKVILTTKDVEGDETTIPVDYKGFPNLVSKGDIIYLNDGYIVLKVENVRENEVEAVVLSGGKLFSRKGVNIPKAYLPVEAITPKDFEIMKFAIEHGVDAIGLSFVGSVYDVLKAKSFLEKNNAEDVFVIAKIERPDAVRNFDEILNAADGIMIARGDLGVEMPIEQLPILQKKLIRKANMEGKPVITATQMLVSMTTEKVPTRAEVTDVANAILDGTDAVMLSEETAIGKFPIETVEMMGKIAKVTEEYRESFGLSRIREFMEIKKGTIKEAITRSIIDAICTIDIKFILTPTRTGRTARLISRFKPKQWILAFSTNERVCNNLMFSYGVYPFCLEEGFDENDIVRLIKGLGLVESDDMVLMTEGKPIEKTVGTNSIKIFQIA

SEQ ID NO: 20607 - protein, 857 aa, Xanthomonas oryzae pv. oryzae KACC10331
MNAVASLQADAEPSAVVADQRWYKDAIIYQVHVKSFFDSNDDGIGDFPGLISKLDYIAELGVDTIWLLPFYPSPRRDDGYDIAEYMAVHPDYGSIEDFEQLVAQAHARGIRIVTELVINHTSDQHPWFQRARTAPAGSPGRDFYVWSDTDQEYEGTRIIFCDTEKSNWTWDPVAGQYFWHRFYSHQPDLNFDNPAVLEAVLEVMRFWLDRGVDGLRLDAVPYLIERAGTSNENLPETHAILRKIRATLDAEYPDRMLLAEANMWPEDTQQYFGQNADECHMAFHFPLMPRMYMAIAREDRFPITDIMRQTPEIPESCQWAIFLRNHDELTLEMVTDSERDYLWQTYAADRRARINLGIRRRLAPLLERDRRRIELMTSLLLTMPGTPVLYYGDEIGMGDNIHLGDRDGVRTPMQWSIDRNGGFSRADPAQLVLPPVMDPLYGFQAVNVEAQIRDQHSLLTWTRRVLSVRKRYQAFGRGTLRFLYPGNRRMLAYLRCYQDETVLCVANLSHTLQAVELDLSEFEGRVPVDIIGGGSFPPIGRLTYLLTVPPFGFYAFELVSEGTLPDWHVPSPVPLPDYRTLVLRSDADGSAALLPHLPTLEGEILPAWLSARRWFSAKDQALRSVRIARRTPLPGDQPMTLLELEVELEDGRRERYMLPVGIVWEREQPSTLAEQLALARVRQGREVGYLTDAFALKPMVRGVIDALCSNAALKFCDGEEASQQGQVRFEATPALAMLDIPHDPEIRWLSAEQSNSSLVIADKAVFKLLRHVAVGANPEIEIGRRLTEMGYANAAPLLGSISRVDGQGTVTTIALLQGFIRNQGDAWRWTLDHLARSFDEYVDRADRRSARRSRRWL

SEQ ID NO: 20608 - protein, 481 aa, Pseudomonas syringae pv. syringae B728a
MSQKTLTTASGAPVADNQNSRSAGPRGPLLLDDFHLIEKLAHFNRENIPERRVHAKGSGAHGTFTVTRDISQYTSARLFDTVGKQTPIFLRFSTVGGERGSADTERDPRGFAIKFYTEEGNWDIVGNNTPVFFIRDPLKFPDFIHTQKRLPQTNLKSPQMMWDFWSHSPEALHQVTILFSDRGIPDGYRHMHGFGSHTYSLISAAGERHWVKWHYKTRQGIKNLTPAEAARIAGTDPDYAQRDLFTAIEKGDFPKWQVCIQLMTEAQAANHHENPFDVTKTWSQKEYPLIEVGELELNRNPLNYFAEVEQAAFGPSNMVPGVGLSPDRMLQGRVFAYADAHRYRVGTNHQQLPINAPKSPVHSYQRDGAMAFGTNGGATPNYEPNSYSDAPKENPRYAEPALSLNGAADRHDHRVDGDYYSQAGKLFNLMSADQQALLIGNIAGAMAGVSSDVVQRQLQHFYKADPAYGEGIARALDVKLG

SEQ ID NO: 20609 - protein, 1043 aa, Vibrio sp. Ex25
MFTATNVLTPEFIGQPLDKLWSLISPLYMVDESQWLEQLLPLATPTEDEKSAITTQTTQLIEAIRADKKSIQMIDALLLEYSLDTQEGILLMCLAEALMRIPDAATADSLIKDKLSVADWKSHLKNSDSVFVNASTWGLMLTGKVVGLGEQGTQSPGQAVNRLVNKFSEPVIRKAMYQAMKIMGHQFVRGRTIEEAQKNGRPMRDKGFTYSFDMLGEAALTTADANKYFKDYLMAIEAVGRETYGNDTSPAPSISIKLSALHPRYEVANEERVMTELYDSLMQLLKRAIEVDVAITIDAEEADRLELSLKLFEKVYRSDLVKGWGKFGLVIQAYSKRALPVLVWLNALAKEQGDLIPLRLVKGAYWDSEIKWSQQAGYANYPVYTRKEATDVAYLACARFLLSEGVRGNIYPQFASHNAHTVTAIAVMAEHKEYEFQRLHGMGDSLYNHVMEMYGQPVRIYAPVGSHADLLPYLVRRLLENGANSSFVHRLVDARCPIYELTHHPVDVLTGFDTLHNDKIPLPADIFPERKNSYGVNIDIDSEAKPFEAQVESFMDNQWVAGPMINGERFAESMIKENAAEIITAPYDRRIEVGKVAFATLDHVSAAIDAAQTAFSDWKGVPVEQKAACLEKLADLMEENLAELVAICHKEAGKTIHDSIDEVREAVDFCRYYAKQAQNLQPFELEGFDGVKRISSREGLGVFVCISPWNFPLAIFLGQVTAALIAGNTVVAKPAEQTSLIAARAIELMLDAGFPAGVIQLLTGRGAEIGHALTSHDAIAGVAFTGSTATAQRINVTLAERSAKPVPFIAETGGQNAMIVDSTALPEQVVRDVIRSAFASAGQRCSALRVLFVQEDVADRMINLIQGAMNELHVGLPYLHKTDVGPVIDSNAKQKLLAHLEQMSKTQTKVAQLQLDESCQHGDFVSPSAFEISGIDVLKEEQFGPILHIVRFKASELPNVVAQINKTGFGLTMGIHSRNETTYRWIEKHARVGNCYINRDQVGAVVGVQPFGGQGLSGTGPKAGGPHYLFRFTQHLLAQAENA

SEQ ID NO: 20610 - protein, 204 aa, Kluyveromyces lactis NRRL Y-1140
MNTEYDYLFKLLLIGDSGVGKSCLLLRFADDTYTNDYISTIGVDFKIKTVELDGKTVKLQIWDTAGQERFRTITSSYYRGAHGIIIVYDVTDQESFNNVKTWLQEIDRFGTAGVLKLLVGNKNDLTDKKVVDTEVAKEFADSIGIPFIETSALDSSNVEEAFLIMTKQIKESVAKQQKDNGRAEDKSNVNLKGQSLTGSNGGCC

SEQ ID NO: 20611 - protein, 628 aa, Xanthomonas oryzae pv. oryzae KACC10331
MSDWSLDQARKTYSIPHWADGYFDVNAAGHVVVTPTADGPAVSLPEVVDAARAAGAKLPLLVRFPDILGQRLGKLQAAFAQAQSEWDYAGGYTAVYPIKVNQHRGVAGTLASHHGDGFGLEAGSKPELMAVLALSRPGGLIVCNGYKDREYIRLALIGRKLGLQTFIVIEKPSELNLVLEEARALDVKPGLGVRMRLASLGAGKWQNSGGDKAKFGLSPRQVLDLWKTLRDTEYADSLNLLHFHMGSQISNVRDIANGMREATRYFVELSRLGAKISHVDVGGGLGIDYEGTRSRSYCSINYGLHSYASNIVQPLASACEEHGLAPPRIVTECGRAMTAHHAVLIANVSEVEQAPEGRVPDAHADEPAAIRHLREIHDELDVRPAVELFQEAQHFHAEGLSAYALGQIDLTHRARIDDLFYAIAHGVRARLSFDEKSHRPVLDELNERLVDKYFVNFSVFESIPDVWAIDQVFPIVPIERLNEAPQRRGIIADMTCDSDGMVKTYVENESLDSSLPLHSLNAGESYRIGFFLVGAYQEILGDIHNLFGDTDAVEVAVDGDGYRIAQQRRGDTTDVMVDYVGYHLDTLRATYAERIAAAQLPPERAQELSAALEAGLTGYTYLSDEPLG

SEQ ID NO: 20612 - protein, 195 aa, Shigella boydii
LRLVVKIARRYGNRGLALLDLIEEGNLGLIRAVEKFDPERGFRFSTYATWWIRQTIERAIMNQTRTIRLPIHIVKELNVYLRTARELSHKLDHEPSAEEIAEQLDKPVDDVSRMLRLNERITSVDTPLGGDSEKALLDILADEKENGPEDTTQDDDMKQSIVKWLFELNAKQREVLARRFGLLGYEAATLEDVGR

SEQ ID NO: 20613 - protein, 395 aa, Aspergillus fumigatus
MYFKYTAAALAAVLPLCSAQTWSKCNPLEKTCPPNKGLAASTYTADFTSASALDQWEVTAGKVPVGPQGAEFTVAKQGDAPTIDTDFYFFFGKAEVVMKAAPGTGVVSSIVLESDDLDEVDWEVLGGDTTQVQTNYFGKGDTTTYDRGTYVPVATPQETFHTYTIDWTKDAVTWSIDGAVVRTLTYNDAKGGTRFPQTPMRLRLGSWAGGDPSNPKGTIEWAGGLTDYSAGPYTMYVKSVRIENANPAESYTYSDNSGSWQSIKFDGSVDISSSSSVTSSTTSTASSASSTSSKTPSTSTLATSTKATPTPSGTSSGSNSSSSAEPTTTGGSGSSNTGSGSGSGSGSGSSSSTGSSTSAGASATPELSQGAAGSIKGSVTACALVFGAVAAVLAF

SEQ ID NO: 20614 - protein, 199 aa, Shigella boydii
LRLVVKIARRYGNRGLALLDLIEEGNLGLIRAVEKFDPERGFRFSTYATWWIRQTIERAIMNQTRTIRLPIHIVKELNVYLRTARELSHKLDHEPSAEEAEEIAEQLDKPVDDVSRMLRLNERITSVDTPLGGDSEKALLDILADEKENGPEDTTQDDDMKQSIVKWLFELNAKQREVLARRFGLLGYEAATLEDVGRE

SEQ ID NO: 20615 - protein, 377 aa, Novosphingobium aromaticivorans DSM 12444
MKISQLAQLTQASTCPRLVVKVGSALLVGKDGEPRREWLSALVSEIAAMRAAGQEVIVVSSGAIALGARKLGLAKGGRGSLSDAQAAASVGQIALAGLWAELLAQHGLTAAQILLTLEDLEDRRRYLNVTATLGTLLAACAVPVINENDSVATQEIRFGDNDRLAARVGQAAGASGVLLLSDIDGLYDRDPRQPGATRIPVVKGVTPEIHAMATGGSSSGLGSGGMTSKLQAAEIAELAGMALAIIDGQPVAPIAAAMGAARGTLFLPRGRKQARKAWLGGRMRMRGSVQVDAGAAAALARGSSLLAAGVTEVDGDFQRGDAIAVLGPDGRTLARGLSEYDAAECARLKGRHSREHEELLGYAPRSALIHRDQMVLL

SEQ ID NO: 20616 - protein, 180 aa, Shigella boydii
LRLVVKIARRYGNRGLALLGLIRAVEKFDPERGFRFSTYATWWIRQTIERAIMNQTRTIRLPIHIVKELNVYLRTARELSHKLDHEPSAEEIAEQLDKPVDDVSRMLRLNERITSVDTPLGGDSEKALLDILADEKENGPEDTTQDDDMKQSIVKWLFELNAKQREVLARRFGLLGYEAA

SEQ ID NO: 20617 - protein, 162 aa, Galega orientalis
SLGSFKTGAILLVGLFFYDIFWVFFTPVMISVAKSFDAPIKLLFPTSNSAKPFSMLGLGDIVIPGIFVALALRFDVSRGKQPQYFKSAFLGYTFGIAITIVVMNWFQAGQPALLYIVPAVIGSLAAHCIWNGDVKQLLEFDESKTVKSSEEETDAKTSKKVE

SEQ ID NO: 20618 - protein, 289 aa, Amanita muscaria
LETDLDVVAINDPFIDLAYMVYMFKYDSVHGRFSGSVETKDGKLWINQKPITVFRKRDPVQIPWGSAGAEYIVESTGVFTTTEKASAHLKGGAKKIVISAPSADAPMFVCGVNLDKYDPKFQVVSNASCTTNCLAPLAKVVNDKFGIVEGLMTTVHATTATQKTVDGPSAKDWRGGRSVNNNIIPSSTGAAKAVGKVIPELNGKLTGLSFRVPTLDVSVVDLVVRIEQSATYDEIKEAFREASKGSLKGIIEYTDEHVVSTDFIGHTASSIFDSLAGIQLNANFVKLIA

SEQ ID NO: 20619 - protein, 250 aa, Streptomyces griseus subsp. griseus
MNPTYRTTSRGGSMQKRIVASEFLGTLLLVFFAVGSAVVAVEYLGTVGIALTFGFTLLALAYALGPISGCHVNPAVTLGMYMAGRIDIRSAVERWVSQFLGAIVGAALLFLLAKQIPGLETSGEFGTNGYDDRSAVGINIGGAFLAEVVLTFLLVYVVLAVTHKVAVTGFDGLPIGLALAAIHLVGIPLTGTSVNPARSFGPALFAGGAALSQLWLFIVAPLVGGAIAAYAHRLTHPYPNVLPAETEDAV

SEQ ID NO: 20620 - protein, 249 aa, Arabidopsis thaliana
MMSCGGKKPVSKKTTPCCTKMGMKRGPWTVEEDEILVSFIKKEGEGRWRSLPKRAGLLRCGKSCRLRWMNYLRPSVKRGGITSDEEDLILRLHRLLGNRWSLIAGRIPGRTDNEIKNYWNTHLRKKLLRQGIDPQTHKPLDANNIHKPEEEVSGGQKYPLEPISSSHTDDTTVNGGDGDSKNSINVFGGEHGYEDFGFCYDDKFSSFLNSLINDVGDPFGNIIPISQPLQMDDCKDGIVGASSSSLGHD

SEQ ID NO: 20621 - protein, 673 aa, Cryptococcus neoformans var. neoformans B-3501A
MVAAASVSHPSELTVPNKTAHAFDKSTLDALLARRFFFAPSFEIYGGVAGLYDYGPTGSALQANILDAWRKHYIIEEDMLELDTTIMTLSDVLKTSGHVDKFADWMVKDVKNGEIYRADHLVEGVLEARLKGDKEARGVKEEEKKEEEDDKKKKKKKIVKTEAVKLDDNTVAEYEYLLAQASQLHIDNYTGPELGDIIRKHKITNPTTGNEVSEPVEFNLMFESNIGPTGHIKGYLRPETAQGHFVNFARLLEFNNGKVPFASAQIGKSFRNEIAPRQGLLRVREFTMAEIEHYVDPLDKRHARFNEVKDVVLTLLAKGVQSEGRTEIVKKTVGEAVAEGIVDNETLGYFLGRTQLFLTKIGVDPARLRCRQHMANEMAHYATDCWDFEIQSSYGWIECVGCADRSAYDLTVHSVRTKQPLRVQQRLDQPRTVEKLECTFDAKAFGMKFKKDATMIKETLLGLEKEKLQCIKDELEKGSSNVQCADGKSYEITPDLVKINPITVTEHMREFIPNVIEPSFGIGRILYCVLEHTYWAREQDAARGVLSLPALVAPIKCLIVSISQDAQLRSKIHEVSREMRKRGIASRVDDSSATIGKKYARNDELGTPFGCTVDFATIQNGTMTLRERDSTSQLIGPIEDVISVVDQLVKGVLDWEGASQKLEAYSGVQDVDA

SEQ ID NO: 20622 - protein, 459 aa, Rickettsia conorii str. Malish 7
MEQYDVAVIGGGPGGYVAAIRAAQLKKKVVLIEKEHLGGVCLNWGCIPTKSLLKSAEVFEYIKHAKDYGIDAKGAEINIKKIVERSREISNKLAGGVKLLLKKNKVTVIDGVASLAGNKVININDKPIVKAGNIIIATGARSRVLKGFKPDGKQIWTSKEAMIPQHVPKSMIIVGSGAIGIEFASFYNSIGVDVTVIEAHNRILPAEDMEISGIARKNFEKKGIKIITNAKLIKQTKSKDKIEVELELADKTQKLQAEILLMAVGITANTENLGLEKTKIKVENGYITTNGLMQTAASGIYAIGDVAGVPCLAHKASHEGIIAAESIAGLKPHTINKHNIPGCTYSSPQIASVGLTEEAATTLGYELKIGRFPFIANGKALVSGDSDGLIKTIFDAKTGELLGAHMIGSEVTELIQGYVVSKNLEGTELDLINTIFPHPTLSEMMHESVFSAYDRAIHI

SEQ ID NO: 20623 - protein, 357 aa, Mesembryanthemum crystallinum
MTAYRGKYADELIANAAYIGTPGKGILAADESTGTIGKRFAGINVENVESNRRALRELLFTTPGAVQYLSGVILFEETLYQKTAAGKPFVEVLKEGNVLPGIKVDKGVVELAGTNGETTTQGLDGLGARCAQYYAAGARFAKWRAVLKIGPTEPSPLAILENANGLARYAIICQENGLVPIVEPEILVDGPHDIDRCAEVTERVLAACYKALNDHHVLLEGTLLKPNMVTPGSESKKVAPEVIAEYTVRALQRTVPPAVPAVMFLSGGQSEEEATVNLNAMNKLQGKKPWTLSFSYGRALQSSTLKAWSGKEENVEKAQAVFLARAKGNSEATLGKYQGGAGGADASESLHVKDYKY

SEQ ID NO: 20624 - protein, 102 aa, Arabidopsis thaliana
  misc_feature (7)..(7): Xaa can be any naturally occurring amino acid
  misc_feature (11)..(14): Xaa can be any naturally occurring amino acid
  misc_feature (16)..(16): Xaa can be any naturally occurring amino acid
  misc_feature (18)..(19): Xaa can be any naturally occurring amino acid
  misc_feature (21)..(21): Xaa can be any naturally occurring amino acid
  misc_feature (25)..(25): Xaa can be any naturally occurring amino acid
  misc_feature (30)..(33): Xaa can be any naturally occurring amino acid
  misc_feature (35)..(36): Xaa can be any naturally occurring amino acid
  misc_feature (42)..(42): Xaa can be any naturally occurring amino acid
  misc_feature (46)..(46): Xaa can be any naturally occurring amino acid
  misc_feature (54)..(56): Xaa can be any naturally occurring amino acid
  misc_feature (62)..(63): Xaa can be any naturally occurring amino acid
  misc_feature (65)..(65): Xaa can be any naturally occurring amino acid
  misc_feature (67)..(67): Xaa can be any naturally occurring amino acid
  misc_feature (70)..(70): Xaa can be any naturally occurring amino acid
  misc_feature (73)..(74): Xaa can be any naturally occurring amino acid
  misc_feature (76)..(76): Xaa can be any naturally occurring amino acid
  misc_feature (85)..(85): Xaa can be any naturally occurring amino acid
  misc_feature (89)..(89): Xaa can be any naturally occurring amino acid
  misc_feature (95)..(95): Xaa can be any naturally occurring amino acid
  misc_feature (101)..(101): Xaa can be any naturally occurring amino acid
  unsure (1)..(102): unsure at all Xaa locations
WSSTFKXLCKXXXXAXAXXIXAQEXEDGSXXXXRXXIDMSKXIYCXFCQEACPXXXIVEGPXXVXAXETXEEXXYXKAKLLENGXRWEXEIAENXRSESLXR

SEQ ID NO: 20625 - protein, 664 aa, Erwinia carotovora subsp. atroseptica SCRI1043
MSSRKELANAIRALSMDGVQKAKSGHPGAPMGMADIAEVLWRDYLNHNPANPNWVNRDRFVLSNGHASMLIYSLLHLSGYDLPIEELKNFRQMHSKTPGHPEYGYTAGVETTTGPLGQGVANAVGMAIAERTLAAQFNRPGHDIVNHHTYTFLGDGCMMEGISHEVCSLAGTMKLGKLTAFYDDNGISIDGHVEGWFTDDTAARFEAYGWHVVRGVDGHDADAIKRAIGEAQLVTDKPSLLMCKTVIGFGSPNKAGTHDSHGAPLGEAEVAASREQLGWTHAPFDIPADIYAAWDAKPAGQRKEAAWDEEFAAYASAYPELAAEFTRRTGGELPTHWQADAQKFIEDLQANPAKIASRKASQNALEAYGKLLPEFLGGSADLAPSNLTIWSGSVSLDKDHAGNYIHYGVREFGMTAIANGIALHGGFVPYTATFLMFVEYARNAVRMAALMKIRSIYVYTHDSIGLGEDGPTHQPVEQLASLRVTPNMSNWRPADQVETAVAWKYAIERQDGPTSLILSRQNLAQQTRTAEQLANVVKGGYVLKDSDGQPELILIATGSEVELAVGAYDKLTAAGRKVRVVSMPSTDAFDKQDAAYREAVLPKAVAARVAIEAGIADYWFKYVGLNGAIVGMTSFGESAPAELLFEAFGFTVDNVVEKAQALLK

SEQ ID NO: 20626 - protein, 361 aa, Streptomyces avermitilis MA-4680
MTTDGRTGAVPRDAHDVVALGESMVTFLPTRPGRLADVPSFERGIGGAESNVACVLAAAGHSVRWAGRVGADGFGDHLVEAIAAYGVDTSAVRRDPARPTGVYFRTAGDRATDAHEVAYYRAGSAASAMTAENMDLDAVRAGRVLHLSGITAALSDGCLGLLRELTARRPARPLVSFDVNHRPGLWRDTDGPRVLLELARGADLVFVGDDEARAAWGLHGPRAIRDALPEPEVLVVKQGGGGATAFERRPGGPGTGDTSTDTVTFVRALQVDVVAAVGAGDAFAAGFLSATLRGLPVRDRLRHGHLMAAAALTVPGDLAVPPARDHADRLAALDDTAWETLRLGPGWTQAVDRAQEEVRTP

SEQ ID NO: 20627 - protein, 234 aa, Nicotiana tabacum
MSSNSSPLEIDTSFSHSNFFFLQDQSPILQWDDDLFFNDPWFDDDQSPIIPCNSEKDENHQVFEESSDNTIMSKGSSHGQELEEVTSQEEKEKEEEEKHYIGVRKRPWGKYAAEIRDSTRNGIRVWLGTFDTAEEAALAYDQAALSMRGPWSLLNFPLEKVKKSLEKIEYSCKDGLSPAAVLKATHKTRRVKHKRSSRKKKNKETHNVIVFEDLGAELLEELLMTSSQHSCRRD

SEQ ID NO: 20628 - protein, 175 aa, Triticum aestivum
MAPTVMASSDTSVAPFQGLKSTAGLPVSRRSNGASLGSVSNGGRIRCMQVWPIEGIKKFETLSYLPPLSTEALLKQVDYLIRSKWVPCLEFSKVGFIFREHNASPGYYDGRYWTMWKLPMFGCTDATQVINEVEEVKKEYPDAYVRIIGFDNMRQVQCVSFLAFQATGCQESGKA

SEQ ID NO: 20629 - protein, 659 aa, Erwinia carotovora subsp. atroseptica SCRI1043
MSDDMIHHGSSATGKHENLRSMQEVAMNDRNASEMLRTYNIAWWGNNYYDVNELGHISVCPDPDVPEARVDLARLVKDMQKENHQRLPALFCFPQILQHRLRSINAAFKQARESFGYEGGYFLVYPIKVNQHRRVIESLANSGEPLGLEAGSKAELMAVLGHAGMTRTVIVCNGYKDREYIRLALIGEKLGHKVYLVIEKMSEIRLVLEEAERLNVVPRLGVRARLASQGSGKWQSSGGEKSKFGLAAIQVLQLVEMLREAGKLESLQLLHFHLGSQLANIRDIATGVRESARFYVELHKLGVNIQCFDVGGGLGVDYEGTRSQSDCSVNYGLNEYANNVIWGIGDACNEHGLPHPTVITESGRAVTAHHTVLVSNIIGVERNEFSEPTEPEEDAPRALESLWSTWKEIKQPGKRRSLREWLHDSQMDLHDVHTQYTHGMLDLTQRAKAEQLYLSICQLIQEQLDPSNRAHRPVIDELQERMADKLYVNFSLFQSMPDAWGIDQLFPVMPLEGLDKPPERRAVLLDITCDSDGTIDHYVDGDGIATTMPMPPYDPENPPLLGFFMVGAYQEILGNMHNLFGDTSTVDVFVFQDGTVEIEESDEGNTVADMLEYVQLDPKVLMTRFRDQVKETDLDAELQAQFMEEFETGLYGYTYLEDE

SEQ ID NO: 20630 - protein, 350 aa, Arabidopsis thaliana
MVQTETDQRMGLNLNLSIYSLPKPLSQFLDEVSRIKDNHSKLSEIDGYVGKLEEERNKIDVFKRELPLCMLLLNEEIVFLCVAIGALKDEARKGLSLMASNGKFDDVERAKPETDKKSWMSSAQLWISNPNSQFRSTNEEEEDRCVSQNPFQTCNYPNQGGVFMPFNRPPPPPPPAPLSLMTPTSEMMMDYSRIEQSHHHHQFNKPSSQSHHIQKKEQRRRWSQELHRKFVDALHRLGGPQVATPKQIRDLMKVDGLTNDEVKSHLQKYRMHIRKHPLHPTKTLSSSDQPGVLERESQSLISLSRSDSPQSPLVARGLFSSNVGHSSEEDEEEEDEEEEKSDGRSSCRND

SEQ ID NO: 20631 - protein, 403 aa, Streptomyces avermitilis MA-4680
MQVIQSTKLANVCYEIRGPVLEEAMRLEAAGHRILKLNTGNPAAFGFECPPEILEDILRNVSSAHGYGDAKGLLAARRAVVMHNQTLGIETDVEHVFVGNGVSELIVMAMQGLLDDGDEVLVPAPDYPLWTASVSLSGGTAVHYHCDEQSDWMPDLADVERKVTDRTKAIVIINPNNPTGAVYDEAMLRGLTDIARRHNLLVCSDEIYDKILYDGATHTPTAAVAPDLLTLTFNGMSKAYRVAGYRVGWMAISGPRAHADSYIEGLTILANMRLCANMPGQHGVVAALSGRQTINELVLPGGRLKEQRDVAHELLTQIPGVSCVKPKGALYLFPRLDPKVFKIKDDRQMVLDLLRREKIMVVQGTGFNWPDPDHFRVVTLPTVGDLTSAITRIGNFLDGYSQP

SEQ ID NO: 20632 - protein, 127 aa, Glycine max
MASPTSLNSTPTDLVRRKKRQSASSSAASPRRNNAASATAGDGESHARWRSEKQQRNYSAKLVQALQQVRLSSSAAETPSPTAKKRGKAVREAADRALAVSARGRTLWSRAILANRIKLKFRKQKRP

SEQ ID NO: 20633 - protein, 152 aa, Ashbya gossypii ATCC 10895
MQIFVKTLTGKTITLEVESSDTIDNVKAKIQDKEGIPPDQQRLIFAGKQLEDGRTLSDYNIQKESTLHLVLRLRGGGKKRKKKVYTTPKKIKHKHKKVKLAILGLFNVDAEGKVTKLRRECPTETCGAGIFLADHKTRHYCGKCHATFMKKD

SEQ ID NO: 20634 - protein, 509 aa, Xanthomonas oryzae pv. oryzae KACC10331
MPVATGITLSEHLQRSANDCTPSAHSQTVDLVAFDYRQPSSPTRPFRRVGARGRRPDNGQRDARCRASMPPIGISQGSARMNHSRSHALFAQAQTVLPGGVNSPVRAFKSVGGEPFFVARADGSYLFDVDGNRYIDYVGSWGPMIAGHNHPAVREAVERAIRDGLSFGAPCAAEVTMAETITGLVPSCEMVRMVNSGTEATLSAVRLARGATGRNRIIKFEGCYHGHGDSFLVKAGSGMLTLGVPTSPGVPAGLSELTATLSFNDFEGATALFDEIGPEVAAVIIEPVVGNANCIPPQAGYLQHLRTLCTRHGALLIFDEVMTGFRVALGGAQAHYGVTPDLSTFGKIIGGGMPVGAYGGRRDLMEQIAPAGPIYQAGTLSGNPVAMAAGLAMLELVQEPGFHMRLSEATSALCEGLKDAARTAGIAVTTNQVGGMFGLFFTDDIVESYAQATACDITSFNRFFHAMLQRGVYLAPSAYEAGFMSSAHDATVIEATLAAARDAFADVAR

SEQ ID NO: 20635 - protein, 190 aa, Shigella boydii
LRLVVKIARRYGNRGLALLDLIEEGNLGLIRAVEKFDPERGFRFSTYATWWIRQTIERAIMNQTRTIRLPIHIVKELNVYLRTARELSHKLDHEPSAEEIAEQLDKPVDDVSRMLRLNERITSVDTPLGGDSEKALLDILADEKENGPEDTTQDDDMKQSIVKWLFELNAKQREVLARRFGLLGYEAATL

SEQ ID NO: 20636 - protein, 246 aa, Saccharomyces cerevisiae
  misc_feature (1)..(1): Xaa can be any naturally occurring amino acid
  misc_feature (20)..(20): Xaa can be any naturally occurring amino acid
  misc_feature (32)..(32): Xaa can be any naturally occurring amino acid
  misc_feature (149)..(149): Xaa can be any naturally occurring amino acid
  unsure (1)..(246): unsure at all Xaa locations
XSTLKVVSSKLAAEIDKELXGPQIGFTLQQLXELAGFSVAQAVCRQFPLRGKTETEKGKHVFVIAGPGNNGGDGLVCARHLKLFGYNPVVFYPKRSERTEFYKQLVHQLNFFKVPVLSQDEGNWLEYLKPEKTLCIVDAIFGFSFKPPXREPFKGIVEELCKVQNIIPIVSVDVPTGWDVDKGPISQPSINPAVLVSLTVPKPCSSHIRENQTTHYVGGRFIPRDFANKFGFEPFGYESTDQILKL

SEQ ID NO: 20637 - protein, 195 aa, Shigella boydii
LRLVVKIARRYGNRGLALLALIEEGNLGLIRAVEKFDPERGFRFSTYATWWIRQTIERAIMNQTRTIRLPIHIVKELNVYLRTARELSHKLDHEPSAEEIAEQLDKPVDDVSRMLRLNERITSVDTPLGGDSEKALLDILADEKENGPEDTTQDDDMKQSIVKWLFELNAKQREVLARRFGLLGYEAATLEDVGR

SEQ ID NO: 20638 - protein, 1340 aa, Arabidopsis thaliana
MHRDMYSSRGTGYGQQQYGSQSGYSQNLGSGYPGSSVSGGAEGGSQISLSSRHPSITGAPQETDIGGGYRSHLSTAASHYGTQYGSVYGSTSLSSSQPLSTNGLGSSVLDNRSGYVPTLPDSPKFASGSYLSPSSHGYGQKTDDLYSDKLSGYIPVDRRQYGEQSSSYLGRELQNEPTRRYADPSNFARQTDLYDRIDQASLLRGEQLLKMQSLHTSSVDAGVNRQTDYLTERSSTVRHSDQEAMHYGGRLESDPHGLSVRNTSSYASQHTPSLLGAVPRRNLDDYIYPESSSNPGYGVSLPPGRDYGTGKGIHSAASLDLDYPGGMLARGTGAAPRVDDLRKGDRASYLREFDLREEERRREDQRARDKEREREREREHDRERERQRERERQRARDRERERILERREKERQGERERERKRALEIKRDRTPTARATSKDTKERTPVPKSISRDARSSSLRRDAHHREASIRRSSPIKPIRRDYVCKVLSSRLVDMERDYVTLDKRYPRLFVPSEFSKVVVNWPKQKLTLSMHTAVSFEHDYIEDGGADVKSTSTKPLALKTGGKSVWNAKMVLMSGLSRTALEDLASDKFFEDRIPHICNILKFAVLKKDHSFMAIGGSWDPTDGMDPSVDQSSLIQTMLRHSKDKLHLDLSNCRHWNPFLEIHYDRVGTDGVFSYKEITVLFVPDLSECLPSFDVWRTQWLAHRKALTERDRLLSQEVKKDTVEVTKDAEKKSPGDTSGTPTTGTKKTVKKIIKRVVKRPVNDGKATGMKGEKSDVPEHVAIPETTVPKEESTGTSSNKKIVKKVAETGDTSDPSAKANEQTPAKTIVKKKIIKRVAKRKVAEIDNKMDGDSKKDGDSDEKKVMEVGKKSSDSGSVEMKPTAESLEDVKDENASKTVDVKQETGSPDTKKKEGASSSSKKDTKTGEDKKAEKKNNSETMSEGKKIDRNNTDEKEVKEKVTEKEIKERGGKDESRIQVKDRKKCEEPPRAGFILQTKRNKDSKLRSLSASLDSLLDYTDKDLDESSFEISLFAESLYEMLQYQMGSRIFEFLKKLRVKIVRQRNQRKRHQEELSVKQNEAKSQDKRQKTAEHEDKEASVISESAPGKDDKETSGKETVDGSREIADKEAVAKTKETLGSKEVTVGEAVNMEVENQDEEDDDGDDDPEEDPEEDPEEDPEEDPEEDPEECEEMDVANTEQEEPAEEPQKKEENLEKTSGTVADPITEAETDNRKEERGPNDSKTEIKPKSETEKHGKQDGGTSDAAKREETVDKELLQAFRFFDRNQAGYVRVEDMRVTIHSLGKFLSHREVKELVQSALLESNTGRDDRILYNKLVRLSL

SEQ ID NO: 20639 - protein, 478 aa, Torenia hybrida
  misc_feature (64)..(65): Xaa can be any naturally occurring amino acid
  unsure (1)..(478): unsure at all Xaa locations
MVNKRHILLATFPAQGHINPSLEFAKRLLNTGYVDQVTFFTSVYALRRMRFETDPSSRIDFVAXXDSYDDGLKKGDDGKNYMSEMRKRGTKALKDTLIKLNDAAMGSECYNRVSFVVYSHLFSWAAEVAREVDVPSALLWIEPATVFDVYYFYFNGYADDIDAGSDQIQLPNLPQLSKQDLPSFLLPSSPARFRTLMKEKFDTLDKEPKAKVLINTFDALETEQLKAIDRYELISIGPLIPSSIFSDGNDPSSSNKSYGGDLFRKADETYMDWLNSKPESSVVYVSFGSLLRLPKPQMEEIAIGLSDTKSPVLWVIRRNEEGDEQEQAEEEEKLLSFFDRHGTERLGKIVTWCSQLDVLTHKSVGCFVTHCGWNSAIESLACGVPVVCFPQWFDQGTNAKMIEDVWRSGVRVRVNEEGGVVDRREIKRCVSEVIKSRELRESAMMWKGLAKEAMDEERGSSMNNLKNFITRIINENAS

SEQ ID NO: 20640 - protein, 198 aa, Shigella boydii
LRLVVKIARRYGNRGLALLALIEEGNLGLIRAVEKFDPERGFRFSTYATWWIRQTIERAIMNQTRTIRLPIHIVKELNVYLRTARELSHKLDHEPSAEEIAEQLDKPVDDVSRMLRLNERITSVDTPLGGDSEKALLDILADEKENGPEDTTQDDDMKQSIVKWLFELNAKQREVLARRFGLLGYEAATLEDVGREIG

SEQ ID NO: 20641 - protein, 484 aa, Streptococcus sinensis
CGVAILADTVKVTLGPKGRNVVLEKSFGSPLITNDGVTIAKEIELEDHFENMGAKLVSEVASKTNDIAGDGTTTATVLTQAIVREGIKNVTAGANPIGIRRGIEAAVATAVSALKETAIPVSNKEAIAQVAAVSSRSEKVGEYISEAMEKVGNDGVITIEESKGMETELDVVEGMQFDRGYLSQYMVTDSEKMVADLDNPYILITDKKISNIQEILPLLESILKTNRPLLIIADDVDGEALPTLVLNKIRGTFNVVAVKAPGFGDRRKAMLEDIAILTGGTVITEDLGLELKDATIEALGQASKVTVDKDSTVIVEGSGNPEAIANRVVVIKSQIESTTSEFDKEKLQERLAKLSGGVAVIKVGAATETELKEMKLRIEDALNATRAAVEEGIVSGGGTAFVSVLGAVAALELTGDEATGRNIVLRALEEPVRQIALNAGFEGSIVIDRLKNSEAGTGFNAATGEWVNMIEAGIIDPVKVTRSA

SEQ ID NO: 20642 - protein, 348 aa, Thermus thermophilus HB8
MRALLLLALLLTLVLGQRLVAPEEVARAQVIQKALPAVVRVQGSALSPGGEDVVGTGFFVGPSRVVTNYHVIRDLKDLTVRLADGRTFLAERYAVDPGIDLALLTVRGARAPGVLAFAQVEARRLPLGMGVVLVGFPYGQGPLASFGILSGVGPLEVPLPDPSVGTEVGEYLFTDAPLTVGNSGSPLLNLQGEVVGLVADVIGGPAGIGGIGVAVPGDLVAQSIADLERFGLPQRGWLGASLISLDELPPVLLRAVGLTSTQGAMVDRVEPGSPAARAGLKGAQRDTQGRLLALGDVILAVDGVAVKDKADVVRLVAQRRPGDRVRLTLWRDRRRLEVTVVLMARPRE

SEQ ID NO: 20643 - protein, 193 aa, Escherichia albertii
LRLVVKIARRYGNRGLALLDLIEEGNLGLIRAVEKFDPERGFRFSTYATWWIRQTIERAIMNQTRTIRLPIHIVKELNVYLRTARELSHKLDHEPSAEEIAEQLDKPVDDVSRMLRLNERITSVDTPLGGDSEKALLDILADEKENGPEDTTQDDDMKQSIVKWLFELNAKQREVLARRFGLLGYEAATLEDV

SEQ ID NO: 20644 - protein, 202 aa, Phaseolus vulgaris
MAEETQNKYETAESSEVEVQDRGVFDFLGKKKEEEKPQEEVIVTEFEKITVSEEKKEEEGEKKHSLLEKLHRSDSSSSSSSEEEGEDGEKKKKKKKEKKEKKKIEEKIEGYHKEDTSVPVEKVEVVESEEKKGFLEKIKEKLPGHKKSEEAAAPPPPPPAATSSEHEGEAKEKKGILEKIKEKLPGYHSKTEEEKEKESGGH

SEQ ID NO: 20645 - protein, 333 aa, Xanthomonas axonopodis pv. citri str. 306
MSNHTQPKIAIIGYGSQGRAHALNLRDSGFDVTVGLRPGGPTEAKAQADGFTVVAPSEAVKSADLVAILTPDMVQKKLYEEVIAPNMKQGACLLFAHGLNVHFDMITPRADLDVVLVAPKGPGALVRREYEIGRGVPCIYAVYQDTSGKAEQFALTYAGGLGGARANIIKTTFKEETETDLFGEQAVLCGGASSLVQAGFEVLVEAGYQPEIAYYEVLHELKLIVDLFYEGGITRMLEFVSETAQYGDYVSGPRVIDAGTKARMKDVLTDIQNGTFTKNWVAEYDAGLPNYNKFKQADLEHPIEEVGKKLRAKMVWLNGQQQAAAAPANQQAA

SEQ ID NO: 20646 - protein, 862 aa, Taxus canadensis
MAQLSFNAALKMNALGNKAIHDPTNCRAKSEGQMMWVCSKSGRTRVKMSRGSGGPGPVVMMSSSTGTSKVVSETSSTIVDDIPRLSANYHGDLWHHNVIQTLETPFRESSTYQERADELVVKIKDMFNALGDGDISPSAYDTAWVARVATISSDGSEKPRFPQALNWVFNNQLQDGSWGIESHFSLCDRLLNTTNSVIALSVWKTGHSQVEQGTEFIAENLRLLNEEDELSPDFEIIFPALLQKAKALGINLPYDLPFIKSLSTTREARLTDVSAAADNIPANMLNALEGLEEVIDWNKIMRFQSKDGSFLSSPASTACVLMNIGDEKCFTFLNNLLDKFGGCVPCMYSIDLLERLSLVDNIEHLGIGRHFKQEIKGALDYVYRHWSERGIGWGRDSLVPDLNTTALGLRTLRTHGYDVSSDVLNNFKDENGRFFSSAGQTHVELRSVVNLFRASDLAFPDEGVMDDARKFAEPYLRDALATKISTNTKLFKEIEYVVEYPWHMSIPRLEAGSYIDSYDDDYVWQRKTLYRMPSLSNSKCLELAKLDFNIVQSLHQEELKLLTRWWKESGMADINFTRHRVAEVYFSSATFEPEYSATRIAFTKIGCLQVLFDDMADIFATLDELKSFTEGVKRWDTSLLHEIPECMQTCFKVWFKLMEEVNNDVVKVQGRDMLAHIRKPWELYFNCYVQEREWLEAGYIPTFEEYLKTYAISVGLGPCTLQPILLMGELVKDDVVEKVHYPSNMFELVSLSWRLTNDTKTYQAEKARGQQASGIACYMKDNPGATEEDAIKHICRVVDRALKEASFEYFKPSNDIPMGCKSFIFNLRLCVQIFYKFIDGYGIANEEIKDYIRKVYIDPIQV

SEQ ID NO: 20647 - protein, 465 aa, Klebsiella pneumoniae
MHDKYDVLIIGGGPGGYVAAIRAGQLGLRTVLVEKQHLGGICLNWGCIPTKALLHGAEVAHTITHASQLGISVGEVNVDLQKLVQFSRTVSQQLTAGVAYLLKKNGVRVIDGTARLRGKGQITVEDARGEARDYRADHVILATGARPRALPGIAPDGEHIWTYFEALRPKLLPKSLLIIGSGAIGVEFASLYNDLGCKVTLVELASQILPVEDAEVSAAVRKSFEKRGIQIHTQTLVTQVQLTDTGVRCTLNNTGGEYSQDVERVLLAVGVQPNIEDLGLETLGVELDRGFIKTDAACRTNVFGLYAIGDVAGPPCLAHKASHEGVLCVETLAGVEGAHPLDRDYVPGCTYARPQVASLGLTESTALARGRPIRIGKFSYQSNGKALVSGETEGFVKTIFDAETGELLGAHMVGAQVTEQIQGFGIARHLEATDESLLSMIFAHPTLSEAMHESILAACDQPLHQ

SEQ ID NO: 20648 - protein, 316 aa, Oryza sativa (japonica cultivar-group)
MLSEQTAASGSSSSSRGADDREIVISTGREIVVRSSGGEEREEEVVVEEELEEPEFRDIHALSPPPTPTPSQPSSSYHRRRRESWESAAGSRHTSIRSVGSDTAPSELFPTMSREFSAMVAAAANANAAAAAAANGGDSSRAGVDDALGRIGEDELEETNPLAIVPDSNPIPSPRRAHLALPAPGDVSSAGGGHGDEVSVGQVKKEEVESKIAAWQIAEVAKVNNRFKREEVVINGWEGDQVEKANAWLKKYERKLEEKRAKAMEKAQNEVAKARRKAEEKRASAEAKRGTKVARVLELANFMRAVGRAPSKRSFF

SEQ ID NO: 20649 - protein, 79 aa, Vibrio cholerae
MSKRDFYEVLGVGRDASERDIKKAYKRLAMKYHPDRTPGDAGCRGKFKIQEAYEILTDAQKKAAYEQYGIAAFEQGRVV

SEQ ID NO: 20650 - protein, 392 aa, Ruegeria sp. PR1b
MLSDLGSVPSDEILTLMQMHREDPRRDKIDQTVGVYRNELGQTPVMQAVKAAEYKIWQDQTSKSYTGLLGDPEFLEVMQALVLGPEAPPCTAAAVPGGSGACRQAFELIRQATPGARVYVSDPTWANHTTMLAHTGLARETYRFRDPATGGLNFDGMMQDLGTARAGDVVLLHGCCHNPTGISLTRTQWRALADRMAKNGLVGMIDLAYLGFGDGLEEDAWGTRHLAETLDECLIAVSCSKNFGLYRERAGALLVTARNPALLAHTREVLAYLNRQAYSFPPDHGARIVTSILKDPALREVWTQELHGIRNSIAALRLQLCNAFAEKTGTRRFDYIREHKGMFSCLGATPEQVRTLRAKHGIYMVTDSRLNFASLSQQNVERIVDAVTDVGI

SEQ ID NO: 20651 - protein, 505 aa, Synechococcus elongatus PCC 6301
MLSKELFQMPRGVAPAFAGRKPKGWAWASTAVPDFQGGFKRLINRFQGSKLWLACVPLAATIAVFWGVAANAQGSADPVPSAQFLVNNLWLMVATVLVIFMNAGFAMVETGLCRQKNAVNVLAKNLIVFTLAATAYWFIGYSLMYGSPVVDGFLYFGKGGPLGFFFDPTVSAETIKNDGLISSLDFLFQAAFAGTAATIVSGSVAERIKFVDFIIFSLILTAVIYPIAGSWQWNVGSGWLNKAGFIDFAGSTVVHSVGGWAALIGAITLGPRMGKFQDGRPGALPGHNLAIATLGALILWIGWYGFNGGSVLAFNTAVPYVAVTTTLGGAAGGISATITSWSTSGKPDLSMVINGILAGLVGVTAGCDGFGMGGSFIVGLIAGVLVVFSVYTFENLKIDDPVGACSVHLVCGIWGTLAVGLFNLEKGLFYGGGFGQLGSQILGIISYGVWTVVASVIIWNILKALLGLRVSPEEELQGLDIGEHGMEAYSGFAKDASNALSSISE

SEQ ID NO: 20652 - protein, 460 aa, Aspergillus oryzae
MGKEDKQHINIVVIGHVDSGKSTTTGHLIYKCGGIDQRTIEKFEKEAAELGKGSFKYAWVLDKLKSERERGITIDIALWKFQTSKYEVTVIDAPGHRDFIKNMITGTSQADCAILIIASGTGEFEAGISKDGQTREHALLAFTLGVRQLIVALNKMDTCKWSQDRYNEIVKETSNFIKKVGYNPKSVPFVPISGFNGDNMIEASTNCPWYKGWEKETKAGKSTGKTLLEAIDAIEPPVRPTDKPLRLPLQDVYKISGIGTVPVGRVETGVIKPGMVVTFAPANVTTEVKSVEMHHQQLQAGNPGDNVGFNVKNVSVKEVRRGNVAGDSKNDPPAGCDSFNAQVIVLNHPGQVGNGYAPVLDCHTAHIACKFAELLEKIDRRTGKSVEDKPKFIKSGDAAIVKMIPSKPMCVESFTDFPPLGRFAVRDMRQTVAVGVIKSVEKNTGGSGKVTKAAQKAGKK

SEQ ID NO: 20653 - protein, 156 aa, Oryza sativa
MASTAAFLSGTEQAPETTKKKGGGGGDERVVQVHSAEELDGALRAAKERLVVVEFAASHSVNSSRIYPCMVELSRTCGDVDFLLVMGDESDATRELCRREGITAVPHFTFYKGAEKVHEEEGIGPDQLAGDVLYYGDHHSAVVQLHSRADVESLIS

SEQ ID NO: 20654 - protein, 424 aa, Campylobacter jejuni subsp. jejuni NCTC 11168
MTNKKAFKETCKFIAGGVNSPVRAFANVQSEPKFISHGKGAYIFDIDGNSYIDYVQSWGPLLFGHCDKDIQKACQKALHKGSSFGAPTLLETELAKLVLSDFPHLEKIRFVSSGTEATMSAIRLARGFTKKDKILKFEGCYHGHSDSLLVSAGSGAATFNSPSSLGVLEDVAKHTLVAKYNDINSVKELFEKNKDIACVIIEPIAGNMGLVPAKQDFLEELAKICKNNQTLLIFDEVMSGYRASYLGSYGINHIQADIITFGKVIGGGLPAAAFASRAEIMDILSPLGGVYQAGTLSGNPLAMAAGIASLTKAKKKTKLYDKLGKLAKKLTQGMKKLADEKGLPLQACHVGSMFGYFFTKDPVSNYQDALKSDLALFSKFHKNMLENGIYLAPSQFETGFICSKMDDKIIDTTLEAVRESFKRI

SEQ ID NO: 20655 - protein, 617 aa, Kluyveromyces lactis NRRL Y-1140
MFVGTRKDAYGVRSVVRLVFVLLAVLSAFARAETTHVFNFTTGWVNVNPDGVGEKKMIGFNGHWPIPDIHVNKGDRIEIYLTNGFDDLPTSLHFHGLFMNTELGNSNQMDGPEMVTQCPIQPGDTFLYNFTVPDQVGTYWYHSHSGAQYTDGMRGAFVIHDPDMPFDYDEEMTILVSDLYDKPYYEVADFFLSQYNPTGAEPIPRNILFNHTTNNTIHFDTDKTYLIRLINGGTFVSQYLFIEDHDMTIVEVDGVYVDPTKAKLLYIAAGQRMSILVKSKHTKSKNFAFMQIMDDEMLDVIPADLELNRTNTISYSSKNGEAKQAYIDSFKHFTNDFHLVTRAKTELLDTYDYQIKLNVEMENLGDGVQYAFFNNITYVAPKVPTLLTALSAGKLATNPAIYGDNINAFVLEYGEVVEIVVNNHDAGKHPFHLHGHVFQVVQKSGGREDGEDPIDYDEKNPVSAYPEYPVLRDTVVVESLGHVVLRFQATNPGIWFFHCHVDWHLEQGLAAVFIEAPLLLQERETLTESVLNTCKSGNIPTKGNAVGNEKDWFNLEGLPRQPAPLPAGFTFKGYVAFFFSTAVGLWGIYTIAQYGLGEVVPDDQELAAQLKALLNNK

SEQ ID NO: 20656 - protein, 309 aa, Bradyrhizobium sp. BTAi1
MSTLYLSHEACLDHATPSGHPERADRLRAVEEALTEERFALLDRDEAPEADIALALLCHNEHYVTELRQMAPTSGIIYLDGDTSMSPGTWEAVMRGVGGAVAATESVMSGRHRNAFVAVRPPGHHAEIAKPMGFCFFDNVAIAARYAQRTFGIERAAIIDFDVHHGNGTQDIFWADKSVMYCSTHQMPLFPGTGARGERGEHDTIVNAPLASDDGSLEFRSAFENLILPQLTKFSPELVIISAGFDAHYRDPLASLNLRAEDFGWVTRKLMDLADKCAGGRVVSVLEGGYDLQGLKESVSAHVAALTGA

SEQ ID NO: 20657 - protein, 301 aa, Shewanella sp. ANA-3
MNKLTDFERYVIEEKGTERPFSGEYYKHDAKGVYLCKKCHAPLYRSEDKFNAHCGWPAFDDEIPGAVSRHVDADGRRTEIVCSQCGGHLGHVFEGEYLTPKNIRHCVNSVSMVFQAADEVTTSTHKTAFATFGAGCFWCVEAIFKSLKGVLNVRSGYSGGEASDADYKSVCSGLTGHAEVVHIEFDPAQISFTTLLQVLFESHDPTTLNRQGNDKGPQYRSVVFTHDAAQIEETNTMIAKLTEAKVFDAPIVTQVVAFESFYPAEDYHNDYFALHGEQPYCQIVVRPKVEKIRALFAELQA

SEQ ID NO: 20658 - protein, 297 aa, Arabidopsis thaliana
MDQYEKVEKIGEGTYGVVYKARDKVTNETIALKKIRLEQEDEGVPSTAIREISLLKEMQHSNIVKLQDVVHSEKRLYLVFEYLDLDLKKHMDSTPDFSKDLHMIKTYLYQILRGIAYCHSHRVLHRDLKPQNLLIDRRTNSLKLADFGLARAFGIPVRTFTHEVVTLWYRAPEILLGSHHYSTPVDIWSVGCIFAEMISQKPLFPGDSEIDQLFKIFRIMGTPYEDTWRGVTSLPDYKSAFPKWKPTDLETFVPNLDPDGVDLLSKMLLMDPTKRINARAALEHDTSRILEACLRKA

SEQ ID NO: 20659 - protein, 433 aa, Pseudomonas syringae
MSGMAGWVDLRHGVGQQANLPHSKVTKVILDMIAAMAGRGPDGQAVWLGPDLALGHCSTVASRYDFNEQPWIGEIRGATVAIMYTGQIYNMWQLQQELASFGPAPDRWSYAEIIRARLWRGYGTARSALRACSLLPLDGQKRELLLARDRLGLQPLYYTLTDGGIIFASVPTAIQAHPQFTAKLDRSALAIVLQPRMAMPGETPLKGLHELPPANVLSFSKRGHTQVRYWQLESAPHTDNFEQTSDHVRALLEGVVARQFEDQVPSAAMLSGGIDSTSVAALVMKQLATRGAGPALDTFCLKFDTDEDAFTSSELRPDIDAPFAALAAEYMGTRHTTLSATMQDLLNVIPATRTARGLPGWGQFDASMYLLFERMRDNFSVALTGEAADEIFGGYPYYFKPDLLARAQFPWLGDGPKLADYLSPALITAQQVA

SEQ ID NO: 20660 - protein, 460 aa, Bacillus licheniformis
MHTLEKMEQTNVQMARDYVTKAYETVRQRNLHESEFLQAVKEIFDSLVPVLARHPKYIEHRILERIAEPERMITFRVPWVDDEGNIQVNRGYRVQFNSAIGPYKGGIRFHPSVNASIIKFLGFEQIFKNSLTGQPIGGGKGGADFDPKGKSDREIMSFTQSFMNELYRHIGPDTDIPAGDIGVGAREVGFMFGQYKKIRGRYDAGVLTGKGLEYGGSLTRKEATGYGLVYFVEEMLKDQGLRFENSTVVVSGSGNVALYAMEKAAQFGGKVVACSDSDGYVYDEKGISLETVKRLKESGNGRIREYVSEHPEAHYFEGCSGIWSIPCDIALPCATQNEIDEEAAGVLISNGVKAVGEGANMPSEEGAVKRFLDAGVLFGPAKAANAGGVAVSALEMAQNSARLHWTAEETDEKLRMIMTDIYKRSVEAASEYGRPGNLLDGCNIAGFIKVADAMIAQGVV

SEQ ID NO: 20661 - protein, 1011 aa, Oryza sativa
MTDTTDDIAEGISFQAFEDDCRLLGSLLHDVLLRELGPRFIHLLERITILAQSAVNMRSAGVEDTAVVVEKQLGAELAAMSLEDSLCLARAFSHHLNLMTIADTYHRVRKARNFADLSKSCDDTFAKLIQSGVSPEELYDTVCKQHLLEFNERADLSLEDKEILIEDLVREITAIWQTDELRRHKPTPVDEARAGLHIVEQSLWKAIPHYLRRVSNALKKNTGKPLPLTCTPIKFGSWMGGDRDGNPNVTAKVTRDVSILSQWMAIDLYIRELDTLSFELSINRCSEKLANLANDILLKESASEDQKTNTWNQTGPQNNLKLQHSLALPAQLPSGADLPSCTECNDGESQIRMSKLPGNPKHKRSLEAQTVHKNALAQLFQYALHFFSTNIEMTWSEKCYGEAMASPLALNITEKREDSPLPSPSHRPMGRTPSGGQLRKMFTESQIGRSSFRKLLEPSISERPGSTPYRVVLGDVKEKQSCGSSVLADGRLADLIRRVATFGMVLMKLDVRQESGRHTETLDAITSYLDLGVYSEWDEQKKLDFLTRELKGKRPLVPPYIQVTADVQEVLDTFRVAAELGSDALGAYVISMASNASDVLAVELLQKDARLTVSGDLGRPCPGGTLRVVPLFETVNDLREAGPAIRKLLSIDWYRDHIIKNHNGHQEVMVGYSDSGKDAGRFTAAWELYKAQEDVVAACNAFGIKVTLFHGRGGSIGRGGGPTYLAIQSQPPGSVMGTLRSTEQGEMVQAKFGLPQTSVRQLEIYTTAVLLATLRPPQPPRDDKWRGVMEEISRVSCAQYRSTVYENPEFIKYFQEATPQAELGYLNIGSRPAKRRTTPGISNLRAIPWVFAWTQTRLVLPAWLGVGRGLQDACDKGHTHELRAMYEEWPFFQSTVDLIEMVVAKADAPMAKHYDDVLVHDAGRRTLGAELRQELARTENCVLAVSGHKKLSANNRSLRKLIDSRLTYLNPMNMLQVEVLRRLRQDDDNRKLRDALLITINGIAAGMRNTG

SEQ ID NO: 20662 - protein, 477 aa, Bacillus anthracis str. A2012
  misc_feature (105)..(105): Xaa can be any naturally occurring amino acid
  misc_feature (170)..(170): Xaa can be any naturally occurring amino acid
  unsure (1)..(477): unsure at all Xaa locations
MKIVLRKESNIPYYKQIYMQIVERIQSGMLSHGDSLPSLRSMAEDLQINLLTVRKAYKHLEKKEYIRIEQGKGAYIHKHVKKDSKPIPYKWQQTKTINVMRSQYXMNQHRKYYYFSQAILYPRLLPNPFLADEMHKILNKDKMILATYGPVQGDYELRVEIANYLNEHQXLVTDPSQLLITSGAQQGIDLIAQTLLKPGDIVLVESPCYSAALDIFINKGAQIIPVSLDNHGVRSDLIDDICQSKNPVLLYTNPTFQNPTGTVMSKERRMELIELAELYEFFIIEDDSFGEIYFEDAIVPPPIKNFDTNGHVLYIKGFSKTLAPGLRIASLIADGPIFAWLYAVKGSMDIGSPLLTQKALLPFLRAERMKHHLEKLRTALQIRRDITIDMLSPLKEIQFEIPDGGFNLWITLPNSIDPFTLLQKANEVDVSFLPGTACLLHNDINNNQFRISYSMLNEKDMLIGLEKLHDTIRKFKL

SEQ ID NO: 20663 - protein, 347 aa, Pseudomonas fluorescens PfO-1
MNTPFNAPTPNTKIPVTILTGFLGAGKTTLLNYILKENHGRKIAVIENEFGEVGIDGDLVLSSETEEIYEMVNGCVCCTAEVREDLVRIVRELVARPVRLDHILIETSGLADPYPVAQSFFINDPIAEEVELDAIVTMVDAKHIAQHLEDLQLDGVDNQAVDQIVCADRIVINKVDLVSAEEVETLRGKIRGLNATADLVTSTHAQIDLSKILGIGAFECTQKLMEIGADQHDHHDHGHQTEEPDHEHDPSVSSVGIAVDGAVNLMAFHRWISELRSSQADNLYRMKGVLAVANEDQRYVLQGVHSLVEFRASTAWGSEPRSSKIVFIGRDLDRAALNQGFAACLAS

SEQ ID NO: 20664 - protein, 352 aa, Triticum aestivum
  misc_feature (106)..(106): Xaa can be any naturally occurring amino acid
  unsure (1)..(352): unsure at all Xaa locations
MYNKFVQKSRLVPVRNSRDIVDPRVRLSSFGDLGDAVFGAPGRLAVDTMLVLSQASFCVGYLIFISNTMAHLYPVFAPSSNVFLSPKALFIYAMLPFQLGLNSIKXTLTLLAPLSIFADVVDLGAMGVVVGQDVSTWLAAHPPVAAFGAPAALLYGAGVSVYAFEGVCMVLPLEAEAADKKKFGATLGLSMAFIAVMYGLFGVMGYVAFGDATRDIITTNLGSGWLSAAVQLGLCINLFFTMPVMMNPVYEVAERLFHGKRYCWWMRWVLVVTVGLAAMLVPNFTDFLSLVGSSVCVLLGFVLPATFHIKVFGAEMGWVGVLSDVLLVVLGLVLAVFGTYSSLVQIFHSSSA

SEQ ID NO: 20665 - protein, 651 aa, Thermus thermophilus HB8
MKETRDLETLSVNAIRFLAIDAVEKARSGHPGMPMGMAPLAYLLFREVMRHNPLDPDWPDRDRFVLSAGHGSMLLYAVLHLTGYDLPLEELKSFRQWGSKTPGHPERGHTPGVEVTTGPLGQGISTAVGLALAERKLAAEFNRPGHVVVDHYTYVLASDGDLMEGVSGEAASLAGHWGLSKLIVFWDDNRISIDGPTDLAFTEDVLARYRAYGWQTLRVEDVNDLEALRKAIKLAKLDERPTLIAVRSHIGFGSPKQDSAKAHGEPLGPEAVEATRRNLGWPYPPFVVPEEVYRHMDMREKGRAWQEAWEKALEAYARAYPDLHQELMRRLRGELPPLPEEPPSFDKPIATRAASGRALNLLAPRLPELLGGSADLTPSNNTKAEGMEDFSRANPLGRYLHFGVREHAMGAILNGLNLHGGYRAYGGTFLVFSDYMRPAIRLAALMGVPTVFVFTHDSIALGEDGPTHQPVEHLMSLRAMPNLFVIRPADAYETFYAWLVALRRKEGPTALVLTRQAVPLLSPEKARGLLRGGYVLEDVEEPQGVLVATGSEVHLALRAQALLREKGVRVRVVSLPSFELFAAQPEAYRKEVLPPGLPVVAVEAGASLGWERYAHKVVALDRFGASAPYPEVYERLGFTPERVAEAFLSLV

SEQ ID NO: 20666 - protein, 451 aa, Pseudomonas fluorescens PfO-1
MSSASSSSTVHPVDRVLPVRQMLTLGLQHMAVSYIGAIAVPLIVASALKMSHADTVVLISTTLFCSGIATLLQTVGFWRFGVRLPILQGVAFSSVGPVIAIGSNPEVGFAGVCGAVIGAGIFTMLIAPFVGRLRRFFPPVVTGCIVTVIGLQLFPIAYEWVGGGRNASNFGAPAFLAVAVVVLLTILLVNRYGSPLLRNMAVLVGMLVGAGLAYGLGMGNFHSVEDAPWLTVPYPFYFGLPTFSLIPIATMVVVMIVQMVESMGLFVAIGDIVDKPVEDKQVINGLRANGLASTIAGMFAAFPFIAFMENVGLVILTGVRSRWVVAISGLLMCSIALVPKAGAIIASMPTAALGGAGIAMFGVVAAAGIQTLAKVDYERNRYNVLIVGFTIAAALVPVLAPTLFKQLPEWSQPFLHSSVVIACLVSVLLNAALNGVSMPETTAGKSASHIL

SEQ ID NO: 20667 - protein, 206 aa, Photorhabdus luminescens subsp. laumondii TTO1
MLTIWGRKNSSNVKKVLWCLKELDIPYNQVDIGGKFGKLDAPQYLKMNPNGKIPCLQEGDFILWESNAIVRYLAAKFGKEVLYPQDLQERANADKWMDWVASHLFPHIRQLMIGFIRTPETERDQKQIEQTLAEIEKLMKVLDDTLAEQKYLSGDKFGMADIALGPMIYPWLNIPIKRPFLPNIERWYQLMAERPAFKKIVMIELS

SEQ ID NO: 20668 - protein, 328 aa, Solanum habrochaites
MAVNGASSSGLIVSFGEMLIDFVPTVSGVSLAEAPGFLKAPGGAPANVAIAVTRLGGRSAFVGKLGDDEFGHMLAGILKTNGVQADGINFDKGARTALAFVTLRADGEREFMFYRNPSADMLLTPAELNLDLIRSAKVFHYGSISLIVEPCRAAHMKAMEVAKEAGALLSYDPNLRLPLWPSAEEAKKQIKSIWDSADVIKVSDVELEFLTGSNKIDDESAMSLWHPNLKLLLVTLGEKGCNYYTKKFHGTVGGFHVKTVDTTGAGDSFVGALLTKIVDDQTILADEARLKEVLRFSCACGAITTTKKGAIPALPTASEALTLLKGGA

SEQ ID NO: 20669 - protein, 611 aa, Cryptococcus neoformans var. neoformans B-3501A
MPPRRQSQASQRKGKQPAQETQDDSDEETQGGRSGPLTDADIESRAGMLVRLALFQEYKRIPIRRTEVAKQILPDNTRAFPLVFARAQTILRDTFGCELYEIRARGKGDSTEDPSQTQAMTQTQKKGKGKGRQPNRGLDAIDEEEEEEDEEEEDATITQKVKRETGTKVYILQNILPGKIIEAMAEPAPLPHGIEVEGDDDDSGALLQWDKGDGGIIGHVGLLGIRTLILSLVLCHNRIINDDHLHALLRRLNLHRETVLPYASKDTTDPHLTLDKYLELLAKYQYLEKIKNPGPMGQAEGGTVEWKWGSREAEFSSKAAAKFMEEIMLGKEGESDSEEEDEDQPRRRGRGAPRERASRPQKRQKLRDDIIKAAGGVPLKPRHSAHYGQRQHPHQHLHPQQNYNHQHASMSEHGQEEYPPVPLQTGPMIAPHQDLHSFLESFWTRQMDTVEGETPDWKSYNLPLARIKKVMKSDEEVKMISAEAPIMFSKACEIFISELTCRAWLVAESHKRRTLQKSDVAAAIAYSDMFDFLIDIVPRDDGGVGGGGSGGGVGGSGTVTGAGSVVADEGMERDEDDPEGDEGEGEGEGEGEGFDGQEEEGDLYSEYVQGD

SEQ ID NO: 20670 - protein, 215 aa, Fagus sylvatica
MARRADEEYDYLFKVVLIGDSGVGKSNLLSRFTRNEFCLESKSTIGVEFATRTLQVEGRTVKAQIWDTAGQERYRAITSAYYRGAVGALLVYDVTKPTTFEQVWLKELRDHADSNIVIMLIGNKTDLKHSRAVRTEDAQGFMLRKKALSFIETSALKATNVEKAFQTILCLRFTGIISKKSLSSDEPAPSVIKEAVKHIVVGGSEANTKKPCCSN

SEQ ID NO: 20671 - protein, 466 aa, Yersinia pestis KIM
MMSDQQEGAELKRGLKNRHIQLIALGGAIGTGLFLGIAQTIKMAGPSVLLGYAIGGFIAFLIMRQLGEMVVEEPVAGSFSHFAYKYWGHFAGFASGWNYWVLYVLVAMAELTAVGIYVQYWWPEIPTWVSAAVFFLAINAINLANVKVYGEMEFWFAIIKVIAIIAMILFGGYLLISGRGGPEATVTNLWAQGGFFPNGIMGLVMAMAVIMFSFGGLELVGITAAEAEDPAKSIPKATNQVIYRILLFYIGSLAILLSLYPWGKVVEGGSPFVLIFDALDSNSVATVLNIVVLTAALSVYNSCVYCNSRMLFGLAKQGNGPKILLKVDGRGVPVIAIAVSAFATAFCVLINYLLPGRAFELLMALVVSALVINWAMISLAHLKFRAAKNRQGVIPKFKAFWYPFGNCLCLLFLTGILVIMFLTPSIRISVILIPVWVVVLAIGYILKNQSQRQNQQLSASSRKVTK

SEQ ID NO: 20672 - protein, 386 aa, Oryza sativa (japonica cultivar-group)
MAFAGDARIVVVAVAAFVLVGVAVEGKGEGGGGGGVGVCFERIFSFGDSLTDTGNFLLSVPEDFPDPARSLPYGQTFFGRPSGRYSDGRNLLDFFAEAFGLPFVPPYLAGGDFRQGANFAVGGATALNGSFFRDRGVEPTWTPHSLDEQMQWFKKLLTTVSSSESELNDIMTKSLFLVGEVGGNDYNHLIVRGKSLDELHELVPKVVGTITSAITELINLGAKKLVVPGNFPIGCVPLYLSIFPSQKEDYYDEKTGCIKWLNEFTEYHNRLLQEELEKLRNLYPDVSIIYADYYGAALNIFLAPLQFGFTVPLNSCCGSDAPYNCSPSILCGHPGSVVCSDPSKYTSWDGLHFTEATYKIIIQGQSAVYDHPAMFSSISEIGPPVF

SEQ ID NO: 20673 - protein, 466 aa, Novosphingobium aromaticivorans DSM 12444
MAEYDYDVLFIGAGPGGYVGAIRTAQLGLKTACAEGRETLGGTCLNVGCIPSKALLHGSEKFDEARNGTFASYGIKTGAVELDLDAMQAQKADSVKSLTGGIEFLFKKNKVTWLKGYAAFEDAHTVTVAGQKVTAKNIVIATGSSVTPLPGVTVDNDAGVIVDSTGALALNRVPQHLVVIGGGVIGLELGSVWRRLGAKVTVVEFLDQLLPGMDGDVRKEAAKIFKKQGMELKLGTKVTGVAVNGGTATLTVEPSKGGEASTIEADCVLVAIGRRPNVDGLGLDKIGLELNARGQIETDHDFATKIPGVWAIGDVIPGPMLAHKAEDEGIAVAENIAGLTGIVNHDVIPGVVYTMPEFAGVGLTEEAAKERGEIKVGKFPMLANSRAKTNHEPDGFVKVISDAKTDRVLGVWCIASVAGTMIAQAAQAMEFGATSEDIAYTCHAHPTHSEALKEAAMAVTGKPIHM

SEQ ID NO: 20674 - protein, 131 aa, Bacteroides fragilis YCH46
MNVILFDGICNLCNGAVTFVVKRDRKGLFRFVSLQSETGKSLLKRYAVESTNKTLYYFRNNRCYSKSTAILYILKDLGGFWQCLYPLILIPAKLRDAIYLLVSKYRYRIFGKADSCIKPFGFSSEESKRSD

SEQ ID NO: 20675 - protein, 541 aa, Oenococcus oeni PSU-1
MAKEVRFSEDARTRMQAGIDKLADAVKTTIGPKGRNVVLEQSYGTPTITNDGVTIAKAVELDDHYENMGAKLVTEAASKTNDVAGDGTTTATVLTQAIVNEGLKNVTAGANPVGIRSGIEKATAAAVAGLNKNSHEVEDSSSIQQIASISAANEEIGKLIADAMEKVGHDGVITIEESKGIETELDVVEGMQFDRGYMSQYFVTDNDKMETNLDNPYLLITDQKIGNIQDILPVLQSVVEQGRSLLIIADDITGEALPTLVLNKLRGTFNVAAVKAPGFGDRRKAQLQDIAILTGATVVTEDLGLQLKDVTIDQLGQANRVTITKDKTTIVEGKGDKTALADRIKSIRQEIDSTTSDFDREKLQERLAKLAGGVAVVRVGAATETELKEKKYRIEDALNATRAAVEEGFVAGGGTAFVNIIPEVKKVADSLQGDVATGARIVLRALEEPLRQIVENAGLEGSVIAQRAKSEKPEVGFNAATGEWVNMIDAGIVDPTKVTRSALQNAASVSAMILTTEAVVAELPKKDAPAAPNAGGMPGMM

SEQ ID NO: 20676 - protein, 259 aa, Bacteroides fragilis YCH46
MNRFENKIIIITGAAGGIGASTTRRIVSEGGKVIIADYSREKADQFAAELSNSGADVRPVYFSATELKSCKELITFTMKEYGQIDVLVNNVGGTNPRRDTNIETLDMDYFDEAFHLNLSCTMYLSQQVIPIMSAQGGGNIVNVASISGITADSNGTLYGASKAGVINLTKYIATQTGKKNIRCNAVAPGLILTPAALNNLNEEVRKIFLGQCATPYLGEPQDIAATIAFLASEDARYITGQTIVADGGLTIHNPTINLV

SEQ ID NO: 20677 - protein, 144 aa, Raphanus sativus
MASTQQAVSSASDADQQYAKFDERKRKRMESNRECARRSRMRKQQRLGELMGETTQLHKQNSICRERIDSVERNYRAMDAENNVLRAQIAELTERLNSLNSPTQFWADANGFPVELSEIPDALLEPWQLPCPIQPIDASDMLLF

SEQ ID NO: 20678 - protein, 117 aa, Tortula ruralis
ARATKAARKSAPTTGGVKKPHRYRPGTVALREIRKYQKSTELLIRKLPFQRLVREIAQDFKTDLRFQSHAVLALQEAAEAYLVGLFEDTNLCAIHAKRVTIMPKDIQLARRIRGERA

SEQ ID NO: 20679 - protein, 332 aa, Oenococcus oeni PSU-1
MNVLVTGGAGYIGSHTVDRLLAHGDRVSVVDNLWTGHRQAVPDQAKFYEADVRDKTALKKIFDENDFDAVVHFAALTQVGESMKKPLFYFDNNTFGVISLLEAMRDHNVKKIVFSSSAATYGVPKHNPITEDEIQKPINPYGLTKLQMEQIMAWSDQAYGIKGVALRYFNVAGAKADGSIGEDHNPETHMIPNILMVAQGKKDKMVIFGDDYNTPDGTNVRDYVHVVDLADAHVLALEYLQRENKSNRFNLGTEMGMSNKQLISAAKKVTGIDFKVEIGPRRAGDPDALVASPKKAKEVLGWDPKLSNVEDEIKSAWNWMTKHPNGYDDKEQ

SEQ ID NO: 20680 - protein, 591 aa, Bacillus anthracis str. A2012
MLWRSVVGKLWMTILLLVSFVLGFVAILLSQFFRTYYVDMSEARLQKVATSVSELIEEGADVKTIENIAYKFSDPLSRIIIVEEGKEISSSPKQEGLVTLTIDDLKEDKELAAVFTDKKEIKNKVRKASNSRKNKNTENDIMIVGKPVQSKNESAVFVYESLQVPIQGMERTTDFIFLSAGIAIILTTFFAFFLSTRITAPLRKMREVAFEVSRGKFDAKAPMVSQDEIGELATALNQMGKQLKFNMNALQQEKEQLASILSSMADGVITLNQEGEVVVINPPAEHFLQVWQEEKEIELSKKLPSELVELFHLVVESEQQQVVGINLQKGNYVVLMTPLYNQTKIRGAVAVLRDMTEERRLEKMRQDFIANVSHELRTPMVMLQGYSEAILDDIVQTKEEINEFVZIIYDESVRLGKLVNELLDLARMESGNVELHIGEVDIHPFVEKIGRKFQGIAKDKEVALTVDFKDSIEQYPFDADRMEQVLTNLIDNAIRHTNAGGHVTLVIDTKNNGLIFEVQDSGAGIPEEDIPFLFDRFYKADKARTRGKKGGTGLGLAIAKNIVQGHGGKISVSSVVGEGTTFSVYLPNRII

SEQ ID NO: 20681 - protein, 532 aa, Arabidopsis lyrata subsp. petraea
KTTLVELGRTLALEECALWMPTRTGLELQLSYTLRHQHPVEYTVPIQLPVINQVFGTSRAVKISPNSPVARLRPVSGKYMLGEVVAVRVPLLHLSNFQINDWPELSTKRYALMVLMLPSDSARQWHVHELELVEVVADQVAVALSHAAILEESMRARNLLMEQNVALDLARREAETAIRARNDFLAVMNHEMRTPMHAIIALSSLLQETELTPEQRLMVETILKSSNLLATLMNDVLDLSRLEDGSLQLELGTFNLHTLFREVLNLIKPIAVVKKLPITLNLAPDLPEFVVGDEKRLMQIILNIVGNAVKFSKQGSISVTALVTKSDTRDADFFVVPTGSHFYLRVKVKDSGAGINPQDIPKLFTKFAQTQSLATRSSGGSGLGLAISKRFVNLMEGNIWIESDGLGKGCTAIFDVKLGISERSNESKQSGIPKVPAIPRHSSFTGLKVLVMDENGVSRMVTKGLLVHLGCEVTTVSSNEECLRVVSHEHKVVFMDVCLPGVENYQIALCIHEKFTKQRHQRPLLVALTGNT

SEQ ID NO: 20682 - protein, 436 aa, Bacillus cereus ATCC 10987
MRDYLIKPLVGQPYPMISHGKGVYLYDQNGNKYFDGSSGAITAGIGHGVKEIADVIKKQAEEIAFVYRSQFTSEPAEKLAKKLSDLSVGDLNWSFFVNSGTEANETAMKIAIQHFQERGIQGKHKILSRWMSYHGITMGALSMSGHPLRRQRFVSILEDYPTIPAPYCFRCPVQKVYPTCQLACATELERSIERIGAEHIAAFIAEPIIGAAGGAVVPPKEYYKVIKDICSHYDILFIADEVMTGLGRTGAWFAMEHWGVEPDIMTLGKGLGAGYTPMAATVVSDRVMEPILRGSRSVMSGHTLSANPLSAATALAVIEYMEKHNLPEKTAEKGEYLIKGLQKVQQQSTIIADVRGKGLLIGVELQPFTKASELISVAAKNGLLLYQAVSGQAGKEDSALLVAPPMTTTYSELDELLSIFAKSVEEMMQKGGHSIA

SEQ ID NO: 20683 - protein, 495 aa, Taxus canadensis
MDAMDLTVAKFKEFTQLQSSAILLTVVSGIIVIVILLLRSKRRSSLKLPPGKLGLPLIGESLSFLWALRSNTLEQFVDKRVKKYGNVFKTSLLGQPTVVLCGAAGNRLILSNQEKLLSRTVSDRVAKLTGDTSISVIAGDSHRIIRAAVAGFLGPAGLKIHIGEMSAHIRNHINQVWKGKDEVNVLSLARELVFAISASLFLNINDREEQHQLHKTLETILPGYFSVPINFPGFAFRKALEGNSKRRKHFSVLQEKRRRDLSVGLASRTQDLLSVLLAYEDDKGNPLTDEEVLDNISALIDGSYESTSSQMAMLLKLLSDHPECYEKVVQEQLEIASHKKEGEEITWKDVKAMRYTWQVMQETLRMFAPVFGPRGKAITDIHYDGYTIPKGWQLSWATYSTHQNDTYFNEPDKFMPSRFDEEGGRLAPYTFVPFGGGRRKCPGWEFAKTEILLFVHHFVKTFSAYTPIDPHESIWGRPLPPVPANGFPIKLISRS

SEQ ID NO: 20684 - protein, 170 aa, Streptomyces avermitilis MA-4680
MAAQTQRAVLAGGCFWGMEDLIRRLPGVTATRVGYTGGDVPNATYRNHGTHAEAIEILFDPARTDFRAILEFFFQIHDPSTKNRQGNDIGLSYRSAIYYVDDEQKRIAEDTIADVDASGLWPGKVVTEVEPVGPFWEAEPEHQDYLERYPDGYTCHFPRPGWRLPARAEG

SEQ ID NO: 20685 - protein, 220 aa, Kluyveromyces lactis NRRL Y-1140
MARRPARCYRYQKNKPYPKSRYNRAVPDSKIRIYDLGKKKATVDEFPLCVHLVSNELEQLSSEALEAARITANKYITKMTGRDSFHLRVRVHPFHVLRINKMLSCAGADRLQQGMRGAWGKPHGLAARVAIGQVIFSVRTKDNNKDTVIEGLRRARYKFPGQQKIIISKKWGFTSLNREEYVKKRDAGEIKDDGAFVKFLSKKGSLEENIREFPEYFAKA

SEQ ID NO: 20686 - protein, 263 aa, Triticum aestivum
  misc_feature (208)..(208): Xaa can be any naturally occurring amino acid
  misc_feature (223)..(223): Xaa can be any naturally occurring amino acid
  unsure (1)..(263): unsure at all Xaa locations
MSGCLCLPCCYKKPSAPGGENTTPPAAAIDSSSSSLLQKPTYHPPPPPPSNKMDAAVERLKTGFEKFKTEVYDKKPDFFEPLKAGQAPKYMVFACADSRVCPSVTLGLEPGEAFTIRNIANMVPSYCKNKYAGVGSAIEYAVCALKVEVIVVIGHSRCGGIKALLSLKDGADDSFHFVEDWVRIGFPAKKKVQTECASMPFDDQCTVXLEKEAVNVSLQNLLXYPFVKEGGSHGTPQVGGGALTTSSPGRFETGGAGKPSPGG

SEQ ID NO: 20687 - protein, 231 aa, Zea mays
  misc_feature (180)..(180): Xaa can be any naturally occurring amino acid
  misc_feature (194)..(194): Xaa can be any naturally occurring amino acid
  misc_feature (219)..(219): Xaa can be any naturally occurring amino acid
  misc_feature (222)..(222): Xaa can be any naturally occurring amino acid
  unsure (1)..(231): unsure at all Xaa locations
MDSALASAAAIADQRQKIEQYRHILASVISSSPPDIPQAKRFLNHMVSDEVPLVVSRQLLQTFAQELGKLEPDSQKEVAHYALTQIQPRVVSFEEQVVVIREKLAELYESEQQWSRAAQMLSGIDLDSGIRMLDDTNKLSKCVQIARLYLEDDDAVNAEAFINKASFLVTNSNQEVLNLXIQVCYARNLDLKRXFLGAALRYYGISQIEQRQIGDEEIXDEXALEQALSAA

SEQ ID NO: 20688 - protein, 109 aa, Arabidopsis thaliana
  misc_feature (12)..(12): Xaa can be any naturally occurring amino acid
  unsure (1)..(109): unsure at all Xaa locations
CEEILSRQRYIXGNQLTEADVRLFVTLIRFDEVYAVHFKCNKRLLREYPNLFNYTKDIYQIPGISSTVNMEHIRKPYYGSHPSINPYGIIPAGPNIDYNAPHDRERFSA

SEQ ID NO: 20689 - protein, 563 aa, Cryptococcus neoformans var. neoformans B-3501A
MVCVVSDPDWWRQAVVYQIYPRSFADANGDGIGDLKGITARVPYLKALGVDAIWLSPFYPSALRDGGYDVADYRDVDPKIGTLEEFDEMTAAFQKVGIRVIVDIVPNHSSDDHEWFQAALKAGKGSPERERYIFRDGLGPNKDQPPTDWICSFGGSAWSPSGMNDGQWYFHWFDSSQPDWNWENPDVKADFLKTLKFWGDRGVSGFRIDVAHGLAKDMSEPLPNWEQLTKLTHQKLTNGNSELDHPLLDRKEVHDIYRSWREVFNQFNPPLMAVAEAWVAPDQKPLYASSEGLGQTFSFDILLCNFDAEEYRQCIKSSLAGSKKSDSTTTWVLSNHDVMRHPTRFGLPNVPNANHAMTTDTYNKFLKTKLTDPKVDIEQGLRRAKAATLMILALPGSTYLYQGEELGLQEVVEIPDEERQDPIFIRTKGEEVGRDGCRVPIPWVADEKNFGYGPGKRAHLPQPAWFKDYAVDVEEKDANSVLSLYRRALGLRKELQSAEELEWVENPNKEVLHFRRPGGWEVVVNIGKDSVDLPKGSVLISSSNNALKGGSIPGETTVWLKSA

SEQ ID NO: 20690 - protein, 475 aa, Yersinia pestis KIM
MMSTEIKTQVVVLGAGPAGYSAAFRCADLGLETILVERYSTLGGVCLNVGCIPSKALLHVAKVIEEAKALAEHGIVFGEPKTDIDKVRVWKDKVINQLTGGLAGMAKGRKVKVVTGFGKFTGANTLVVDGENGPTTINFDNAIIAAGSRPIQLPFIPHEDSRIWDSTDALALRTVPERLLVMGGGIIGLEMGTVYHALGSKIDVVEMLDQVIPAADKDVVKVFTKRISKQFNLMLETKVTAVEAKEDGIYVTMEGKKAPAEPQRYDAVLVAIGRVPNGKLLDAGQAGVEVDDRGFIHVDKQLRTNVPHIFAIGDIVGQPMLAHKGVHEGHVAAEVIAGMKHYFDPKVIPSIAYTEPEVAWVGLTEKEAKEKGISYETSTFPWAASGRAIASDCADGMTKLIFDKETHRIIGGAIVGTNGGELLGEIGLAIEMGCDAEDIALTIHAHPTLHESVGLAAEIYEGSITDLPNPKAKKK

SEQ ID NO: 20691 - protein, 521 aa, Triticum aestivum
  misc_feature (36)..(36): Xaa can be any naturally occurring amino acid
  misc_feature (187)..(187): Xaa can be any naturally occurring amino acid
  misc_feature (286)..(286): Xaa can be any naturally occurring amino acid
  misc_feature (315)..(315): Xaa can be any naturally occurring amino acid
  misc_feature (406)..(406): Xaa can be any naturally occurring amino acid
  misc_feature (419)..(419): Xaa can be any naturally occurring amino acid
  misc_feature (434)..(434): Xaa can be any naturally occurring amino acid
  misc_feature (443)..(443): Xaa can be any naturally occurring amino acid
  misc_feature (455)..(455): Xaa can be any naturally occurring amino acid
  misc_feature (476)..(476): Xaa can be any naturally occurring amino acid
  misc_feature (478)..(478): Xaa can be any naturally occurring amino acid
  unsure (1)..(521): unsure at all Xaa locations
MVLSHAASAGSSDESVHSTFASRYVRASLPRFRMPXNSIPKEAAYQIINDELMLDGNPRLNLASFVTTWMEPECNKLMMDSINKNYVDMDEYPVTTELQNRCVNMIAHLFNAPLGETETAVGVGTVGSSEAIMLAGLAFKRRWQNKMKAAGKPCDKPNIVTGANVQVCWEKFARYFEVELKEVKLSXGYYVMDPEKAVEMVDENTICVAAILGSTLNGEFEDVKMLNDLLVKKNEETGWDTPIHVDAASGGFIAPFLYPELEWDFRLPLVKSINVSGHKYGLVYAXGIGWCIWRSKEDLPDELIFHINYLGADQXPTFTLNFSKGSSQVIAQYYQLIRLGFEGYRNIMGHCQENAMVLKEGLERTGRFNIVSKDQGVPLVAFSLKDSSRHDEFEISEFLRRFGWIXVPAYTMPPNAQHXTVLRVVIREDFNRTXAERLLIDIXKCSTTRPLPSRXNGARPAHPTANCEREGLASNXVXSLWKKASRKKKTRVLTWHRSHLHMVNPISIPAVFKTFHNYKVS

SEQ ID NO: 20692 - protein, 118 aa, Glycine max
MHIKCENNGIKRKKEEVSQMITFRTRSQLEVMDDGYKWRKYGKKTVKNNPNPRNYYKCSGEGCNVKKRVERDRDDSNYVLTTYDGVHNHESPSTAYYSQIPLVHSNHDWPQLHPSANS

SEQ ID NO: 20693 - protein, 309 aa, Methanosarcina acetivorans C2A
MKVACIQMDVLQCKKQENLEKALYMALKAVKKGAELIVFPEVFTTGFCYEDLNHAAESLPSPTLENLACFSEANDCIILGSIIQKDSGEAYTEDDGEGSNDKGRDGGKKGSKKEEKGFSGKETEIPGSKAFTERKNSTLYYNLGFCFESGVLAGTYLKTHPFKAENGYFSKGSSIEPISLKKQNLKIGLEICYELRFPEVARKLSIAGSDLLVTIAAFPNPRAEHWKTLAKARAIENQIPHIACNRTGSVPDCTYFGNSMIIDAWGEIKAEAGSKECTIVCDLDLTGKEEIRKAIPVFEDRRIELYSDN

SEQ ID NO: 20694 - protein, 327 aa, Nostoc sp. PCC 7120
MPTVNTHTEDTNTKFTADMVRTYLREIGRVPLLTREQEIVYGKQVQQMMSLIDAKEALAKKLDREPSLPEWADHVQKSETEVKQTVTQGKRAKQKMIEANLRLVVAIAKKYQKRNMEFLDLIQEGTLGLERGVEKFDPMRGYKFSTYAYWWIRQAITRAIAQQGRTIRLPIHITEKLNKIKKVQRELAQTLGRSPSPAEIAKELELEPAQIREYLNMARQPVSLDVKVGDNQDTELQEMLEDDGPSPEYYTTQEFLRQDLNTLLAELTPQQREVVALRFGLLDGNELSLAKVGERLNLSRERVRQLEHQALAHLRRRRANVKEYVAS

SEQ ID NO: 20695 - protein, 704 aa, Arabidopsis thaliana
MLLKPGNKLVSPETSHHRDSASNSSNHKCQQQKPRKDKQKQVEQNTKKIEEHQIKSESTLLISNHNVNMSSQSNNSESTSTNNSSKPHTGGDIRWDAVNSLKSRGIKLGISDFRVLKRLGYGDIGSVYLVELKGANPTTYFAMKVMDKASLVSRNKLLRAQTEREILSQLDHPFLPTLYSHFETDKFYCLVMEFCSGGNLYSLRQKQPNKCFTEDAARFFASEVLLALEYLHMLGIVYRDLKPENVLVRDDGHIMLSDFDLSLRCSVNPTLVKSFNGGGTTGIIDDNAAVQGCYQPSAFFPRMLQSSKKNRKSKSDFDGSLPELMAEPTNVKSMSFVGTHEYLAPEIIKNEGHGSAVDWWTFGIFIYELLHGATPFKGQGNKATLYNVIGQPLRFPEYSQVSSTAKDLIKGLLVKEPQNRIAYKRGATEIKQHPFFEGVNWALIRGETPPHLPEPVDFSCYVKKEKESLPPAATEKKSKMFDEANKSGLEDVFVGYLFGRKKATEVAHVVWEQVIQKGDTVIDATCGNGNDTLAMLKMVMHDSVGCGGYVYAMDIQKDAIESTSSLLDQAVGSKEPCSISAEEIQKECVKLFNLCHSKMGEIVPENARVRMVAFNLGYLPGGNKSIITLSDTTLSALKAAERILKPGGLISLVVYIGHPGGREELEVVEAFGSGLPVSDWICCKFQMLNRPLAPVLVFMFKREN

SEQ ID NO: 20696 - protein, 606 aa, Triticum aestivum
  misc_feature (509)..(509): Xaa can be any naturally occurring amino acid
  misc_feature (538)..(538): Xaa can be any naturally occurring amino acid
  misc_feature (556)..(556): Xaa can be any naturally occurring amino acid
  misc_feature (559)..(559): Xaa can be any naturally occurring amino acid
  misc_feature (570)..(570): Xaa can be any naturally occurring amino acid
  misc_feature (587)..(587): Xaa can be any naturally occurring amino acid
  unsure (1)..(606): unsure at all Xaa locations
PALGLRPILGDLIEQVCTKKQAGTGPEFPGYRRPTRPAGSMTPRSPLTTPRSNHIDMLLAGRSAINESNDLPQIVELADIARCIANTPLDEESALSQLVTCIEDLQEIVNRRKHEALTVQTFGTRIEKLHREKYLQLCDSVDMDKVDSSSTIMDEEDDVVRSLRASPVHPVKDRTSIDDFEIIKPISRGAFGRVFLAKKRTTGDLFAIKVLRKADMIRKNAVESILAERDILITVRNPFVVRFFYSVTSRENWYLVMEYLNGGDLYSLLRNLGCLDEDVARVYLAEVVLALEYLHSMQIVHRDLKPDNLLIAHDGHVKLTDFGLSKVGLINSTDDLSGPAVSGASLYGDDEPQMNELEEMDHRARRQKRSAVGTPDYLAPEILLGTGHGTSADWWSVGVILFELLVGIPPFNAEHPQTIFDNILNRKIPWPHVPEEMSFEAKDLIDKFLTEDPHQRLGSDGASEVKQHPFFKDVSWDTIARQKAAFVPSSDSACDTSYFTSRYSWNPSXDENIYEAYEFEDPSENGSLSGSSSCVSNXHQDDMGGMSMEVAPLTFXPGXNVNTLSTLPLXNPSTLAPTNYDLLTKDXRTPPNGTETYLYVDYNKTF

SEQ ID NO: 20697 - protein, 218 aa, Pirellula sp. 1
MSQSDNNTASILSPNELGQLHLDIAIAHDLTERYEGLIFDCDGTLTNSMPLHYLAWNETMTRHGIDFPESRFYAMGGMPSEKIIAVLSSEQGVSIDVDLATEEKEANFIARIPSVERLEHVTDIAERHLNRIAMSVASGGMRDIVADQLRTIGVADWFPVLVGSEDTELHKPEPDVFLCAAERMGVDPKRCLVFEDSPLGFEAAKRAGMDWVDVRVDA

SEQ ID NO: 20698 - protein, 224 aa, Triticum aestivum
  misc_feature (212)..(212): Xaa can be any naturally occurring amino acid
  unsure (1)..(224): unsure at all Xaa locations
MPQSVLVDRATSESLIGPDWSLNLEICDILNHDPSQAKDVVKSIKKRIGHKNSKIQLLALTLLETLIKNCGDFVHMHVAERDILHEMVKIVKKKPDYHVKEKILILIDTWQEAFGGARARYPQYYAAYQELLRAGAVFPQRSESSVPIYTPPQTQPLQNYPPPALRNTDYRQEAPESSSVPEVSTLSVTEIQNASGVMDVLSEMLNAIDPGXNREGLRQGGSLL

SEQ ID NO: 20699 - protein, 390 aa, Nostoc sp. PCC 7120
MYQTKHESLKETMNIAELGTMEIIESVVEHEEHSLDTLELIIEEEPPITENLDSEERDSGDEMAAARPSGYNKTEHDDAVGAFFKEMARYPLLKPDEEVELARRVRFLEEVRDLQADLQLQIGQHPTKAQVAGQLEITEKQLENRLYQGRVAKRKMIRSNLRLVVSIAKRYLNRGVPFLDLIQEGAMGLNRATEKFDPDKGYKFSTYAYWWIRQAITRAIANDARTIRLPIHIVEKLNKLKKAQRELKQKFSRNPSEAEMAEALEISVPQLRQLQQLRRQALSLNHRVGKEEDTELMDLLEDEDNLSPEAKMNENMMRQEIWEVLGDVLTPREKDVISLRYGLTTSEPCTLEEVGNMFNLSRERVRQIQSKAMRKLRRPHIAKRLKGWLI

SEQ ID NO: 20700 - protein, 427 aa, Oryza sativa
FFDGIFYGKGDDEEENGRFLSLCLLGFWNFGNLWFLLCVYVGAFWTEKDGKMDALKSSCRSEEAADEGAAAAPSAWGMVERDGFSVEDLLDLEEFCEAEKDAAEENEQALALVAAPEEEKSKDDSQPSSVVTYELVAPPPPPPEIVDLPAHDVEELEWVSRIMDDSLSELPPPPQPPASVVASLAARPPQPRQLQRRPQDGAYRALPPASYPVRTPTICALSTEALVPVKAKRSKRSRATAWSLSGAPPFSDSTSSSSTTTTSSCSSSASFSSFSPLLKFEWHPLGGTSDLPDDHLLPPGKKSKHGKNGKNKPKKRGRKPKQLPPHPSGAAASAPAPGDRRCSHCGVQKTPQWRAGPEGAKTLCNACGVRYKSGRLLPEYRPACSPTFVSAIHSNSHRKVLEMRRKKEVGSGLLTAAAAAAPAVASF

SEQ ID NO: 20701 - protein, 635 aa, Streptomyces caeruleus
MKSALSTWKPSDRPPDPTLPEPPAQLRRIFRLFRPYRGRLAVVGLLVGASSLVAVASPFMLREILDTAIPQGRTGLLSLLALGMILTAVLSSVFGVVQTLISTTVGQRVMHDLRTAVYAQLQRMPLAFFTRTRTGEVQSRIANDIGGMQATVTSTATSLVSNLTAVIATVVAMLALDWRLTVVSLLLLPVFVWISRRVGRERKRITLQRQKQMATMAATVTESLSVSGILLGRTMGRADSLTRSFAEESERLVDLEVRSNMAGRWRMSVIGIVMAAMPAVIYWAAGFVLQSGGTVVSIGTLVAFVSLQQGLFRPAVSLLPTGVQMQTSLALFQRIFEYLDLPVDITEPERPVALDKVRGEVRFDGVDFSYEEKDGNTLHGLDLTVPAGGSLAVVGPTGSGKSTLSYLVPRLYDVTGGRVLLDGVDVRDLAFDTLARAVGVVSQETYLFHASVADNLRFAKPDATDEEIEKAARAAQIHEHIVTLPDGYDTLVGERGYRFSGGEKQRLAIARTILRDPPVLVLDEATSALDTRTEHAVQQAIDSLSEGRTTITIAHRLSTVRDADQIVVLDAGRIAERGTHEELIDRDGRYAALVRRDGAPAPAPVPARDGKRRRRWCGCVRRASRRSGRDRRAGS

SEQ ID NO: 20702 - protein, 532 aa, Arabidopsis lyrata subsp. petraea
KTTLVELGRTLALEECALWMPTRTGLELQLSYTLRHQHPVEYTVPIQLPVINQVFGTSRAVKISPNSPVARLRPVSGKYMLGEVVAVRVPLLHLSNFQINDWPGLSTKRYALMVLMLPSDSARQWHVHELELVEVVADQVAVALSHAAILEESMRARNLLMEQNVALDLARREAETAIRARNDFLAVMNHEMRTPMHAIIALSSLLQETELTPEQRLMVETILKSSNLLATLMNDVLDLSRLEDGSLQLELGTFNLHTLFREVLNLIKPIAVVKKLPITLNLAPDLPEFVVGDEKRLMQIILNIVGNAVKFSKQGSISVTALVTKSDTRDADFFVVPTGSHFYLRVKVKDSGAGINPQDIPKLFTKFAQTQSLATRSSGGSGLGLAISKRFVNLMEGNIWIESDGLGKGCTAIFDVKLGISERSNESKQSGIPKVPAIPRHSSFTGLKVLVMDENGVSRMVTKGLLVHLGCEVTTVSSNEECLRVVSHEHKVVFMDVCLPGVENYQIALCIHEKFTKQRHQRPLLVALTGNT

SEQ ID NO: 20703 - protein, 427 aa, Pseudomonas syringae pv. phaseolicola 1448A
MSRSETLFANAQKHIPGGVNSPVRAFKSVGGTPLFFKHAAGAYVTDEDDKRYVDYVGSWGPMILGHSHPEVLDAVRSQLEHGLSYGAPTAMETEMADLVCALVPSMEMVRMVSSGTEATMSAIRLARGFTGRDSIIKFEGCYHGHSDSLLVKAGSGALTLGVPSSPGVPAAFAKHTLTVPFNNLDAVRDLLAEVGQEVACIIVEPVAGNMNCVPPAPGYLQGLRDLCDEHGVVLIFDEVMTGFRVALGGAQAYYGVTPDLSTFGKIIGGGMPVGCFGGKREIMSHIAPLGPVYQAGTLSGNPLAMAAGLTTLRLISRPGFHDELSDYTRRLLEGLQQRADAAGIAFVTTQAGGMFGLYFSEAREIVTFEDVMTSDAERFKRFFHLMLEGGVYLAPSAFEAGFTSIAHGDAELKLTLDAAEKAFAALK

SEQ ID NO: 20704 - protein, 214 aa, Zea mays
  misc_feature (208)..(208): Xaa can be any naturally occurring amino acid
  unsure (1)..(214): unsure at all Xaa locations
MEDERNTQQHQGGEAQQDAAGQVEVKDRGLLDSLLGRKKHDDDQEKKKQTEELATGMEKVTVSEPEKHGHKEEEHEVVGEKKEGLFAKLHRTSSSSSSSSDEEEEAIDENGEIIKRKKKKVGLKEKIKEKLPGHKDGHHTAAPSPAPAPAPVETHAHHQEEAHHRPHVVPAPAPPPHVETHVHQHDHGVVVQKVEDDVKTETPPHAPXEEKKGL

SEQ ID NO: 20705 - protein, 173 aa, Tripsacum dactyloides
MEGGESAKGTVLVTGASGFVGSWLVMKLLQAGYTVRATVRDPANVGKTKPLMDLPGATERLSIWKADLAEEGSFDDAIRGCTGVFHVATPMDFQSKDPENEVIKPTVEGMISIMRACKEAGTVRRIVFTSSAGTVNLEERQRPVYDEDSWTDVDFCRRVKMTGWMYFVSKTLA

SEQ ID NO: 20706 - protein, 1144 aa, Candida glabrata CBS138
MLSQVEQDIRRKIAVEENIIKGSSALKKKTDNVMVIQKCNTNIREARQNIEYLEETLKKLQLSQSQQGQTDSQQQQANDDSTVTEIDRGQGYRQLSTIAPEEHVFSRLDLVKYDCPSLAQKIQYMLQQLEFKLQVERQYQEANNKLTKLYQIDGDQRSSSAAEGGALESKNRVQLLKKALKKYQAINVDLDQYYKHHNDESLKDMQPKLREKQLTGMLTIGITAIRDVDHIQSPLFARNPETFITVKIDDVVKSRTKPSRNDRWNEEFSIEVDKGNEIEITIYDRVNESVTPVAVMWLLLSDIAEEIRKKKVGKTNGQGWVRAASIKSQTVHNSQAVANRTYASDSRTTSLNNSNSDLNQDMSLSPTQVTTNAWFVLEPAGQILLTLGFHKTSQHQRKNLVGGLHRHGAIINRKEEVYEQHGHHFVQKSFYNIMCCAYCGDFLRYTGFQCQDCKFLCHKKCYGNVVTKCISKASTETDPSEAKLNHHIPHRFEPVSNRGTKWCCHCGYILPWGKQKVRKCTECGIMCHTQCAHLVPDFCGMSMEMANKILKTIEDTKRTQEKKKRKPPQTNASALTSTSTMIGSSVHDRLDSSPSKSMNASIPSIPSPRKHPYAANQYHEKAEEHQMQNQNRLNNYIEDNEAYLKFTSGVGVPGASQDVKAQNMNDAYVDQYGHEYQQDNNDSQLKASEDELELWKQHRERMERELQQEQQMQMSYDNNAEGQIDLYTKQASGDVNMLPAVDETVSSHNNPFRDMNHETFEQTQNYVANQLQGDVTDIRSSTEIITAAGNNVSPQKRSSGKHKKRGSKRPKVSLDNFVLLKVLGKGNFGKVILSRSKNTNRLCAIKVLKKDNIIQNHDIESARAEKKVFLLATKTKHPFLTNLYCSFQTENRIYFAMEFIGGGDLMWHVQNQRLSVRRAKFYAAEVLLALKFFHDNGVIYRDLKLENILLTPEGHIKIADYGLCKDGMWYGNKTSTFCGTPEFMAPELLREQDYTKAVDWWAFGVLLYQMLLCQSPFSGDDEDEVFNAILTDEPLYPIDMAGDIVQIFQGLLTKDPEKRLGAGPRDALEIMEEPFFRNINFDDLLNLRIKPPYIPEIKSAEDTSYFEQEFTSAPPSLTPLPSVLSTTQQEEFRGFSYMPEDLEL

SEQ ID NO: 20707 - protein, 428 aa, Bacillus anthracis str. A2012
MVAEKGTQTKTQQQREQHFELLNSTQIVISEALEKLGYPNEVYELLKEPIRMMTVKIPVRMDDGTVKIFTGYRAQHNDAVGPTKGGIRFHPNVTENEVKALSIWMSLKCGIVDLPYGGGKGGIICDPREMSFRELERLSRGYVRAISQIVGPTKDIPAPDVFTNSQIMAWMMDEYSRIDEFNSPGFITGKPLVLGGSHGRETATAKGVTICIREAAKKRDIDIKGARVVVQGFGNAGSFLAKFMHDAGAKVIAISDAYGALHDPNGLDIDYLLDRRDSFGTVTKLFNNTISNKELLELDCDILVPAAIENQITEENANDIKAKIVVEAANGPTTLEATKILTDRGILLVPDVLASAGGVTVSYFEWVQNNQGYYWTEEEVEQRLEKVMVRSFDSIYETAQVRKVNMRLAAYMVGVRKMAEASRFRGWV

SEQ ID NO: 20708 - protein, 691 aa, Ashbya gossypii ATCC 10895
MMELEQVLAQMPLLLSYPAMLLSHDLILTPKTSAAGAAKDQQMTQAVPLLLRHLVVPLLTSCVTVSVTQYVLRSFMQKKVLTFLVVFITLALSSFLGPIQASVLSVSLLQILLAQHVSLRYYVVFPGLSLAMDYVNGVSYYNTVVSYCVICVFLLLHRKYRNGAATHFAKYQVPRLFFLVVSLVSLVLTFVWVDYVETVDINYSMFLVFLGCIFVALVTFQDVSREIECNDGSTAKFEVWKVPYAPAVVGVLSLGLQVLSFNIISATFQGNVIMFVFLVLSAVVPHTLEFSTTCSHDATQVDKHCGFAHEHDDNHAQTDSQAHENSRFGVNVTYLLQQLALDKENRAIFSFLLLNFTFMLIQLLYSFRSRSLGLLSDSLHMALDCTSLFLGLLAGVLSKNPATDMFPFSLAYLETLAGFTNGVLLIGIVSSIFVEAAGRILHPVSLHGTNELLVVSVLGLLVNLVGLFAFDHSGHGHDNENLKGIFLHILADTLGSVGVIVSTMLTKMFGSQIFDPLASIFIALLILLSSIPLVKSTSAGMLLRLNDKNHNTVKDALTQIMSTPGVTGYTTPRFWPLVMPAAGGHSHAHGHSHSHSHSHSHSHSHSHSHSHSLPSTSDQNDACGGSAKDRKQLIGYIHVQYLEGENSTIIKKRVEKIFENLGIQAWIQVEPNESNCWCRIPSSVPKSAPLM

SEQ ID NO: 20709 - protein, 331 aa, Listeria monocytogenes str. 1/2a F6854
MTKVYYEDAVKNNALEGKTVAVIGYGSQGHAHSQNLRDNGNNVIIGIREGKSAESARNDGFDVYSVSEAAEKADVIMILLPDETQGETYENEIKPNLKAGNALVFAHGFNIHFDVINPPSDVDVFLVAPKGPGHLVRRTFVEGGAVPSLFAIYQDATGNARDTALSYAKGIGATRAGVIETTFKEETETDLFGEQAVLCGGATHLIQAGFETLVEAGYQPELAYFEVLHEMKLIVDLMYEGGMEKMRHSISNTAEYGDYVSGPRVVTADTKKAMKEVLTDIQNGNFAKSFINDNKNGFKEFHRMRKEQQGHQIEKVGAELREMMPFVKPQH

SEQ ID NO: 20710 - protein, 558 aa, Photobacterium profundum SS9
MYENNKTLYLPYAGPTLLENALLNKGSAFSPEERQNFSLMGLLPAAIESITEQEERAYSQYQTFNDDMDKHIYLRNIQDTNETLYYRLIDNHIEEMMPIIYTPTVGAACEQFSNIYRRGRGLFLGYPDKGNIVDILNNAARQDVKIIVITDGERILGLGDQGIGGMGIPIGKLALYTACGGINPANTLPIVLDVGTNNTQLLSDPMYMGWRHPRITGQEYDDFVEEFIQAVKSRWPNALIQFEDFAQKNAMPLLNRYKDKVCCFNDDIQGTAAVTVGSLLAACKAAGSELSEQRITFVGAGSAGCGIAEAIVAQMIAEGLSDSAARARIFMVDRWGLLTDNMQNLLDFQQKLAQKSATVSQWNETGNISLLDVVSNGKPTVLIGVPGLFSQEVIMEMHAHCKRPIVLPLSNPTSRVEATPSDIIRWTEGDALIATGSPFDPVIFNEKTYPIAQCNNSYIFPGIGLGVLASGATRVTDEMLMESSRVLAECSPLAQNGNGALLPPLKDIHQVSHCIALAVAKKAVEQNKAPQRTEKQLLEKIESYFWKPEYLKYKRTAL

SEQ ID NO: 20711 - protein, 532 aa, Arabidopsis lyrata subsp. petraea
KTTLVELGRTLALEECALWMPTRTGLELQLSYTLRHQHPVEYTVPIQLPVINQVFGTSRAVKISPNSPVARLRPVSGKYMLGEVVAVRVPLLHLSNFQINDWPELSTKRYALMVLMLPSDSARQWHVHELELVEVVADQVAVALSHAAILEESMRARNLLMEQNVALDLARREAETAIRARNDFLAVMNHEMRTPMHAIIALSSLLQETELTPEQRLMVETILKSSNLLATLMNDVLDLSRLEDGSLQLELGTFNLHTLFREVLNLIKPIAVVKKLPITLNLAPDLPEFVVGDEKRLMQIILNIVGNAVKFSKQGSISVTALVTKSDTRAADFFVVPTGSHFYLRVKVKDSGAGINPQDIPKLFTKFAQTQSLATRSSGGSGLGLAISKRFVNLMEGNIWIESDGLGKGCTAIFDVKLGISECSNESKQSGIPKVPAIPRHSNFTGLKVLVMDENGVSRMVTKGLLVHLGCEVTTVSSNEECLRVVSHEHKVVFMDVYLPGVENYQIALCIHEKFTKQRHQRPLLVALTGNT

SEQ ID NO: 20712 - protein, 741 aa, Archaeoglobus fulgidus DSM 4304
MMRQGGVMVGARKRWITDWWPNRLNLKILRQNLQNPYGEDYDYVEEVENLDIDAVIRDLKELMRSSQDWWPADFGHYGPLFIRLAWHSAGSYRIFDGRGGARDGSIRFPPRINWPDNINLDKAIRLLWPIKKKYGRKLSWADLIILAGTVAMEDMGVKLFGFALGREDIFEPDESPDWGPEEEMLTAKRGEKEELERPFAATEMGLIYVNPEGPGGNPDPLGSAQEIRVAFRRMGMNDEETVALIAGGHAFGKCHGAGPADYLGPDPSSSPIEMQGLGWKYNYGKGKGSDTFTSGLEVTWSPTPTKFGINYLRILFTYEWELEKSPAGKNQWVAKDAPEIIPDAHDPNKKHRPRMLTADLALRFDPEFSKIARRFLENPEEFEKAFAIAWYKLTHRDMGPKDCYIGKYVPEETFVWQDPLPRRDYELVDEKDVEELKRRILASGLSLSQLVYFAWASASTYRNSDRRGGANGARIRLKPMSVWEVNHPEELKKVIAAYEKIQQEFNEGAKGSEKRISIADLIVLGGIAAVEEAARRAGFSVKVPFIPGRVDAQQEHVDEEFYRVIEPFADGFRNYFRYPERINERDVYTTPEYFLVDKANLLTLTVPEMVVLIGGMRALGANYSHSDYGVLTERPGVLSNDFFVNLLDMSVEWRAADDYRYTFEGYDRKSGELRWRATRVDLILGHHDELRAVAEVYGCDDAKEKFVKDFAAVCAKVMHLDRFDLWRSNRKLYKEITAGLR

SEQ ID NO: 20713 - protein, 578 aa, Candida glabrata CBS138
MKYVVVSGGVISGIGKGVLASSTGMLLKTLGLKVTSIKIDPYMNIDAGTMSPLEHGECFVLNDGGETDLDLGNYERYLNVTLTKDHNITTGKIYSHVIAKERKGDYLGKTVQIVPHLTNAIQEWIERVSRIPVDNTGMEPDVCIIELGGTVGDIESAPFVEALRQFQFRVGKENFALIHVSLVPVIHGEQKTKPTQAAIKDLRSLGLVPDMIACRCSETLEKGVIEKIAMFCHVGADQVVNVHDVNSTYHVPLLLLEQKMINYLHQRLQLQEITLSSEDIQRGENLLSKWKSMTGNFDSSMETVKIALVGKYTNLKDSYLSVIKALEHSSMKCRRKLEIMWVEATDLEPETQDTEKAKFHEAWNKVSTADGILVPGGFGSRGTEGMMLASRWARENHIPFLGVCLGLQIATIEFARNVLGVKEGNSAEFFPELDESNQVVVFMPEIDKETMGGSMRLGLRPTYFQQGTEWCAIKKLYGSAESVEERHRHRYEINPNFIERLEEHGLMFVGRDETNKRCEIFEMKDHPFFVATQYHPEYTSKVLDPSKPFLGLVAASSGILDDVIAGKYEFNGDGKSDF

SEQ ID NO: 20714 - protein, 602 aa, Desulfovibrio desulfuricans G20
MSTAQREQHTKKSEGRILFRRILGYFSSYKLHITIATLGMLSVAACTGAAAYLVKPALDDIFISKNETMLLLVPFAYIVIITIKGLGRYVQNYFMRYCGLMVLERLRNELYRKIICLPTRFYEENQVGMLMSRIINDVMLIRASLPSVVMIVRQVITMCCLIGVVFYQDWFLAIWAVLVLPLAAFPFIYFGRKLRKLSRRNQNKLSDISIFLQEIFSGIRVVKAFATEDKEAARFKQENNRLVKIAIKETVFSELSSPVMELIGAVGIGLVIWYGGKQVIDGVSTPGTFFSFVAGLVMLYDPVKSLNSANMDIQRALAGAERVFEILDSKDIVVEKDGTVPFSGSFEEIRFENLTFHYEGCPAPVLDNINLTVRQGERVAIVGPSGAGKTTFVNLIPRFYEQTEGRILLNGTDIREYTLATLRRNVAMVSQDSFLFNIPVMENIAYGMESTSEEAVYEAARAAYAHDFILQLKDGYQTVIGERGVKLSGGQKQRLTIARAILKDAPLLILDEATSALDSESERIVQKALENLMAHRTSIVIAHRLSTILGADRILVMEKGRIVSQGRHEDLLGSCPLYTRLYNMQFQTEHTTEDNGCALPQA

SEQ ID NO: 20715 - protein, 257 aa, Triticum aestivum
WIPRAAGIRHEVFRDLRGRRAGMIKALTEDVDKFFKLCDPEKENLCLYGYPNETWEVTLPAEEVPPEIPEPALGINFARDGMNEKDWLALVAVHSDSWLLSVAFYFGARFGFDKENRRRLFNMINNLPTIYEVVTGIAKKQSKEKTPNSSSKSSKPSMKVLSRAEPRAKAKVPVPKDEEESGEDEGDDEEEEHDNTLCGTCGTNDGKDEFWICCDNCEKWYHGKCVKITPARAEHIKHYRCPECTNGGSNSNKRVKT

SEQ ID NO: 20716 - protein, 350 aa, Arabidopsis thaliana
MARNVLVSGGAGYIGSHTVLQLLLGGYSVVVVDNLDNSSAVSLQRVKKLAAEHGERLSFHQVDLRDRSALEKIFSETKFDAVIHFAGLKAVGESVEKPLLYYNNNLVGTITLLEVMAQHGCKNLVFSSSATVYGSPKEVPCTEEFPISALNPYGRTKLFIEEICRDVYGSDPEWKIILLRYFNPVGAHPSGDIGEDPRGIPNNLMPFVQQVAVGRRPHLTVFGNDYNTKDGTGVRDYIHVIDLADGHIAALRKLEDCKIGCEVYNLGTGNGTSVLEMVDAFEKASGKKIPLVIAGRRPGDAEVVYASTERAESELNWKAKYGIEEMCRDLWNWASNNPYGYDSSSEDNSH

SEQ ID NO: 20717 - protein, 159 aa, Pyrococcus abyssi
MCENEKERTLVIIKPDAVIRGLIGEIISRFEKRGLKIVGMKMIWISKELAEKHYAEHREKPFFKSLVEYITRTPVVVMVVEGRCAIEVVRKMAGATDPKNAEPGTIRGDFALEVSDAICNVVHASDSKESAEREIKLYFRDDEIFDYPRAEDWFYRKGI

SEQ ID NO: 20718 - protein, 762 aa, Oryza sativa
MAILSDVATEVLIPIAAIIGIGFSIAQWVLVARVKLAPSQPGASRSKDGYGDSLIEEEEGLNDHNVVAKCAEIQNAIAEGATSFLFTEYQYVGVFMSIFAVVIFLFLGSVEGFSTKTHPCTYSKDKECKPALFNALFSTVSFLLGAITSVVSGFLGMKIATYANARTTLEARKGVGKAFITAFRSGAVMGFLLASNGLLVLYIAINLFKMYYGDDWEGLFESITGYGLGGSSMALFGRVGGGIYTKAADVGAGLVGKVERNIPEDDPRNPAVIADNVGDNVGDIAGMGSDLFGSYAESSCAALVVASISSFGINHDFTGMCYPLLVSSMGIIVCLITTLFATDFFEIKAVKEIEPSLKKQLIISTALMTVGIALVSWLALPYKFTIFNFGEQKEVTNWGLFLCVSIGLWAGLIIGYVTEYYTSNAYSPVQDVADACRTGAATNVIFGLALGYKSVIIPIFAIALGIYVSFTIAAMYGIAVAALGMLSTIATGLSIDAYGPISDNAGGIAEMAGMSHRIRERTDALDAAGNTTAAIGKGFAIGSAALVSLALFGAFVSRAGVKVVDVLSPKVIIGLIVGAMLPYWFSAMTMKSVGSAALKMVEEVRRQFNTIPGLMEGTGKPDYANCVKISTDASIKQMIPPGALVMLTPLIVGTLFGVQTLSGVLAGALVSGVQVAISASNTGGAWDNAKKYIEAGASEHARSLGPKGSDCHKAAVIGDTIGDPLKDTSGPSLNILIKLMAVESLVFAPFFATHGGILFKLF

SEQ ID NO: 20719 - protein, 260 aa, Oryza sativa (japonica cultivar-group)
MRLQSPRPGRKRKRKITTTPVAGSNPSHGKRGRPRLDAKSHTRAPAPEPKQLPCRTSCRRATNCSSKTVAGLDASGSVVRNQLAQNIVQEGSSSVISRTPCQELPLSIRLTDQQNEHHLVNGSSNSENLVKVPPSQGGQVTGAKKRKSGNVRRFEQNKPTQGQGECGALVVAEDVGSTEGETGDKKKTEGCPNRVHITKIIKPVRFAAAVNNDVQQVSITFKALRSDGQEVMVDDKELKANNPLLLISYYEQCLRYNPTS

SEQ ID NO: 20720 - protein, 404 aa, Shewanella sp. MR-4
MKTTSSTEKPMQSTGLGHSVAQWQHSHGFSNQNTAGEKNTRYVLYLTVITMVAEIVAGTLYGSMALLADGWHMGTHAAAFMITLFAYSYARKHANDPAFAFGTGKVSVLGGYTSAIALGLVALVMLIESGMRLINPEDIHFNEAIFVALIGLSVNVLSVFLLKDHHSHGHGHSLGHSHGHSHGHSHSHSHDHDHDDDDHKEHQDNHCCHGHDHHAADHDHDHDHDHDHDHDHDHDDHSHSHAQGHSHGHSHGHSGHDHNLRAAYFHVLADALTSVLAIAALLFGKYMGLTWLDPIMGIVGAIIISRWSWGLIQQTSPILLDGGVKASLQRKVRETIEAVPDHQVADLHIWRVSADHHAIMVSIVSHSPKEASYFNQLLTKFPELSHITIELHTCRQRECVAKEA

SEQ ID NO: 20721 - protein, 365 aa, Burkholderia vietnamiensis G4
MSTPAPHTAPSMKAAVWHGRNDIRVEEVPVPGHPPAGWVQIRVHWCGICGSDLHEYVAGPVFIPVDAPHPLTGLKGQCILGHEFSGEIAALGAGVTGFALGERVTADACQHCGTCWYCRHGMYNICENLAFTGLMNNGAFAEYVNVPAELLYKLPDNFPTEAGALIEPLAVGMYAVKKAGNIVGQTVVVVGAGTIGLCTIMCAKAAGAGRVIALEMSAARKQKALEVGATVVIDPKASDAIAEVKALTGGYGADVSFECIGHTATAKLAIDVIRKAGKSVMVGIFEEPTSFNFFDIVSTEKEVIGSLAYNGEFADVIRFIADGRIDVQPLITGRIALGDIVARGFEELVNHKDRNVKIIVQPVAA

SEQ ID NO: 20722 - protein, 533 aa, Zea mays
GIDSRRSDGCATLRVPLCSSRPAGVPKPHRLNCFAFDCGRRRRTKNQKMTPCALTVDSLNPKVLALADHLGDNAIARRAQCIQNEIEAEPGSHPFREIIDCSLSNPQSMGQRPNKFFREVLALCDYPHLLEQSGTNSLFSSGAIARAREILDLFPGRATGGYSHSQGTEGLRDIIAAGIAARDNFPCNADDIFLTDGAAPPVHMMMHLLIRDQKDGILCPVPSHSLYTSAMLLQGATLVPYFLDESRGWGVSMSDLKKQLDSARSMGVFVRGLVVINPGNPTGHVLVEENQREIVDFCRNEDLVLLADEVYQENIYADEKGFHSFKKIARSMGYGEGDISLVSFHSVSNGYYGECGRRGGYMEVTGFNSDVKKQVYKVVSLSSCSNISGQILMSLVMNPPQVGDESYASYHAERHGVLSSFARCAEAMVRSFNGLEGVTCSEAEGAVFVFPSVRLPKKAVAAAEASNTQPDAFYALRLLETTGIVVVPGSVFGQMHGTWHFRCTVLPHEEKKMTVIISSFVAFHRAFMEEFRD

SEQ ID NO: 20723 - protein, 310 aa, Yersinia pestis KIM
MVNCVISSAYVISKKEPYSMGLLVVLRTHEVFNPPHMRDVTGNIKNQTGTEKILRRQYRVITETTVPISKSESLPYIILSQPEHYRLFTLMKEIEKLIANNRTWSNTICKDDPGFFEHLAQSQKPRFLWIGCSDSRVPAEQLTGLKSGELFVHRNVANLVIHTDLNCLSVVQYAIDVLQVEHIIICGHLGCGGVEAAIKGEEMGLIDNWLLHIRDLWYKHSSLLGELPQEERSNVLCQINVVEQVYNLGHSTIVRSAWKRGQKAMIHGWVYGIENGLLRDLEVSATSLGSLEMVYRKAMAELLQNNKEDH

SEQ ID NO: 20724 - protein, 340 aa, Fusobacterium nucleatum subsp. vincentii ATCC 49256
MDNEEHDDLLEDETEDKLDDTDEENDETEEHFTEFDDEFNPEYIEDVSEDELSNEKLLNLGNSAKVDEPIKMYLREIGQVPLLTHDEEIEYAKKAYEGDEEASKKLIESNLRLVVSIAKKHTNRGLKLLDLIQEGNIGLMKAVEKFEYTKGYKFSTYATWWIRQAITRAIADQGRTIRIPVHMIETINKIKKESRIYLQETGKDASPEILAERLGMEVDKIKAIQEMNQEPISLETPVGSEEDSELGDFVEDQKTTSPYEATNRAILREELDAVLKTLSPREEKVLRYRYGLDDSSPKTLEEVGKIFNVTRERIRQIEVKALRKLRHPSRKKKLEDFKVD

SEQ ID NO: 20725 - protein, 416 aa, Magnetospirillum magnetotacticum MS-1
MLRKHPRYVEAAVLERVCEPERQIIFRVPWVDDIGRVQINRGFRVEFNSALGPYKGGLRFHPSVYLGIVKFLGFEQIFKNSLTGMPIGGGKGGSDFDPRGRSDGEVMRFCQSFMTELYRHIGENTDVPAGDIGVGGREIGYLFGQYKRITNRYESGVLTGKGISWGGSLVRTEATGYGTVLFAQNMLETRGQELDGRRVVVSGSGNVAIYATAKAQQLGANVVAFSDSSGYVVDEAGVDLELLRQIKEVERGRVADYAARRPGARVVTDGSIWDVPCDVALPCATQNELDEAAAKQLVANGVVAVAEGANMPTTPSAVALLQEAGVLFAPGKAANAGGVATSALEMQQNASRDAWSFEYTEDRLAQIMAGIHDRCVETADEYGTPGNYVLGANIAGFTKFADAILAGDPLDRLTAC

SEQ ID NO: 20726 - protein, 600 aa, Zea mays
MASSSSSRLLLLLLPCLALTLLGAADAEVHHHEFVIQETPVKRLCKTHNIITVNGQYPGPTLEVREGDTLVINVVNRAQYNATIHWHGIRQIRTGWADGPEFVTQCPIRPGGSYKYRFTIQGQEGTLWWHAHSSWLRATVYGALIIRPRENKTYPFAKPSREVPVILGLHPAHPGPLICCFIHVSNNLTDGDRWAGEWWDANPIDVIREAQRTGGGPNVSDAFTINGQPGDLYKCSNKETTAIPVKAGETALLRFINAALNHELFVTIAQHKMTVVATDASYTKPFTTSVLMLAPGQTTDVLVTMDQPPTRYYVAARAYVSGQNVAFDNTTTTAVLEYDCGCASDFGPKIQPAFPAALPAFNDTSAATAFAAGIRSPDRVKVHENVDEYLFFTVGLGLFNCKPGQLCAGPNNNTRFAASMNNVSFVFPQTDSLLHAHYYKIPGVFTTDFPAYPPVQFDYTGQNVSQALWQPVPATKLYPLRFGSVVQLVLQDTSIVTPENHPIHIHGYDFFILAEGFGNFDPKKDVEKFNYVDPPQRNTVAVPVNGWAVIQFVADNPGVWLMHCHLDVHITWGLAMAFLVEDGYGELQSLEPPPVDLPMC

SEQ ID NO: 20727 - protein, 527 aa, Hordeum vulgare
MSSMQFSSVLPLEGKACVSPVRREGSACERLKIGDSSSIRHERASRRMCNGGAGAPPPPVRSACSPPTPARPTPLFSGRPSGGITPIRTRSRPSVAAVILGGGTGTQLFPLTSTRATPAVPIGGCYRLIDIPMSNCFNSGINKIFVMTQFNSASLNRHIHRTYLGGGINFTDGSVEVLAATQMPGEAAGWFRGTADAVRKFIWVLEDYYKHKSIEHILILSGDQLYRMDYMELVQKHVDDNADITLSCAPVGESRASEYGLVKFDSSGRVIQFSEKPKGDDLEAMKVDTSFLNFAIDDPAKYPYIASMGVYVFKRDVLLNLLKSRYAELHDFGSEILPRALHDHNVQAYVFTDYWEDIGTIRSFFDANMALCEQPPKFEFYDPKTPFFTSPRYLPPTKSDKCRIKEAIISHGCFLRECKIEHSIIGVRSRLNSGSELKNAMMMGADSYETEDEISRLMSEGKVPIGVGENTKISNCIIDMNARIGRDVVISNKEGVQEADRPEEGYYIRSGIVVIQKNATIKDGTVV

SEQ ID NO: 20728 - protein, 444 aa, Arabidopsis thaliana
  misc_feature (26)..(26): Xaa can be any naturally occurring amino acid
  unsure (1)..(444): unsure at all Xaa locations
RSDQSDNIRVGDFELLTMIGKGAFGXRVVREINTGHVFAMKKLKKSEMLRRGQVEHVRAERNLLAEVDSNCIVKLYCSFQDNEYLYLIMEYLPGGDMMTLLMRKDTLSEDEAKFYIAESVLAIESIHNRNYIHRDIKPDNLLLDRYGHLRLSDFGLCKPLDCSVIDGEDFTVGNAGSGGGSESVSTTPKRSQQEQLEHWQKNRRMLAYSTVGTPDYIAPEVLLKKGYGMECDWWSLGAIMYEMLVGYPPFYADDPMSTCRKIVNWKTHLKFPEESRLSRGARDLIGKLLCSVNQRLGSTGASQIKAHPWFEGVQWEKIYQMEAAFIPEVNDDLDTQNFEKFDEEDNQTQAPSRTGPWRKMLSSKDINFVGYTYKNFEIVNDYQVPGIAELKKKESKSKRPSVKSLFESESDSSSSGSEQQTINRSYSNPTPRGMEPNLRRLDSE

SEQ ID NO: 20729 - protein, 293 aa, Pisum sativum
MGSSFWTVCLILASLVSSSFCALPRKPVDVPFGRNYYPTWAFDHIKYFNGGSEIQLHLDKSTGTGFQSKGSYLFGHFSMNIKMVPGDSAGTVTAFYLSSQNAEHDEIDFEFLGNRTGQPYILQTNVFTGGQGNKEQRIFLWFDPTKEFHRYSILWNMYQIVFYVDDVPIRVFKNSKDLGVKFPFDQPMKIYNSLWNADDWATRGGLEKTDWSKAPFIAGYKSFHIDGCEASVNAKFCATQGKRWWDQVEFRDLDAAQWRRLKWVREKFTIYNYCNDRKRLPQIPPECKRDRDI

SEQ ID NO: 20730 - protein, 596 aa, Neurospora crassa
MAAYGSRGGDSFGQGSSWSFREPFAVGRVPTWARARHRQEPRLRTFLDSFKRDPVRRISTHGIYAQSHPDQYQAADSSDEPPTEQNHGSHYFDLHAANVRTANTGLARELKGRHLQMIAIGGSVALGELAVAFPVAGSFSSYSTRFLDPAWGFAMGWNYALQWLTVLPLELIAASITIGYWNDQLNKAIFITIFLATVIIINLFGVKGYGEAEFVFSIVKIAAVTGFIILAAVINIGGFDDPQGNTGYIGGRYWTNPGAFHHGFKGLCSVFVSAAFAFTGTELVGLAAAETANPRKSLPTAIKQVFWRITLFYIVSLTLVGLIVPYNHERLLGNIQHYSVSDASYSPFVIAIESASIQVLPGIMNAVILIAVLSVGNSAVFGSSRTLAALADQRQAPQILAYVDRKGRPLFAILFAALVGLIGYLADLKFQSDVLNWLLAVSGLSSIFTWGSICLCHIRFRRAWARRGRSLTQLSFTAQAGITGSYVGLFLNVFVLIAQFWIAAFPIVTFTDNQSAATASPSKVAQSFFLQYLCVPIVVAFYLVYKLWFRTKIVRSDEMDLDTGRRRDVNLPVLVMREKEEVEGWPGWKRVYRFFC

SEQ ID NO: 20731 - protein, 293 aa, Triticum aestivum
MDQYEKVEKIGEGTYGVVYKAKDRYTNETIALKKIRLEQEDEGVPSTAIREISLLKEMQHRNIVRLQDVVHNEKCIYLVFEYLDLDLKKHMDSSADFKNHHIVKSFLYQILHGIAYCHSHRVLHRDLKPQNLLIDRRTNSLKLADFGLARAFGIPVRTFTHEVVTLWYRAPEILLGARQYSTPVDVWSVGCIFAEMVNQKPLFPGDSEIDELFKIFRIMGTPNEETWPGVSSLPDYKSAFPKWPSVDLATVVPTLEPLGLDLLSKMLCLDPTRRINARTALEHEYFKDLDVSS

SEQ ID NO: 20732 - protein, 191 aa, Ashbya gossypii ATCC 10895
MQTLKCVVVGDGAVGKTCLLISYTTNQFPADYVPTVFDNYAVTVMIGDEPYTLGLFDTAGQEDYDRLRPLSYPSTDVFLVCFSVVSPPSFENVKEKWFPEVHHHCPGVPCLIVGTQIDLRENKMVIEKLQRQRLRPITPEQGEKFARELRAVKYVECSALTQRGLKNVFDEAIVAALEPPVIKKSKKCTIL

SEQ ID NO: 20733 - protein, 557 aa, Glycine max
  misc_feature (444)..(444): Xaa can be any naturally occurring amino acid
  misc_feature (476)..(476): Xaa can be any naturally occurring amino acid
  unsure (1)..(557): unsure at all Xaa locations
MAELSLPQDSYFLGFDSSTQSLKATVLDSNLNIVASELVHFDSDLPHYKTKDGVHRDPSGNGRIVSPTLMWVEALDLILQKLSKSNFDFAKVAAVSGSGQQHGSVYWKSGSSQILSSLDPKKPLLDQLENAFSIKESPIWMDSSTTAECRAIEKAFGGALELARVTGSRAYERFTGPQIKKIFDTRPEIYDSTERISLVSSFMASLLVGAYAAIDHSDGAGMNLMDIKSWSKVALEATAPGLESKLGELAPAYAVAGNIAPYFVERPPKPFDCLVVQWSGDNPNSVAGLTLNIPGDLAISLGTSDTVFMITKDPNPGLEGHVFPNPVDAEGYMVMLVYKNGSLTREDVRNCYANKSWDVFNKFLQQTQPLNGGKLGFYYKEHEILPPLPVGFHRYIIENFSDTPDGLKEQEMEEFDPPSEVRALIEGQFLSMRAHAERFGMPSXPPKRIIATGGASANHCILSAIASIFGCDVYTXVQRPDSASLGAALRAAHGWLCNKKGGFLPISDMYVDKLEKTSLSCKLSVSAGDHELVSKYATLMKKRIEIENRLVQKLGRF

SEQ ID NO: 20734 - protein, 812 aa, Arabidopsis thaliana
MGQLALQRLQPLASLPRRPPSLPPPSSATPSLPCATASRRPRFYVARAMSSHIVGYPRIGPKRELKFALESFWDGKTNVDDLQNVAANLRKSIWKHMAHAGIKYIPSNTFSYYDQMLDTTAMLGAVPSRYGWESGEIGFDVYFSMARGNASAHAMEMTKWFDTNYHYIVPELGPDVNFSYASHKAVVEFKEAKALGIDTVPVLIGPMTYLLLSKPAKGVEKSFCLLSLIDKILPVYKEVLADLKSAGARWIQFDEPILVMDLDTSQLQAFSDAYSHMESSLAGLNVLIATYFADVPAEAYKTLMSLKCVTGFGFDLVRGLETLDLIKMNFPRGKLLFAGVVDGRNIWANDLSASLKTLQTLEDIVGKEKVVVSTSCSLLHTAVDLVNEMKLDKELKSWLAFAAQKVVEVNALAKSFSGAKDEALFSSNSMRQASRRSSPRVTNAAVQQDVDAVKKSDHHRSTEVSVRLQAQQKKLNLPALPTTTIGSFPQTTDLRRIRREFKAKKISEVDYVQTIKEEYEKVIKLQEELGIDVLVHGEAERNDMVEFFGEQLSGFAFTSNGWVQSYGSRCVKPPIIYGDITRPKAMTVFWSSMAQKMTQRPMKGMLTGPVTILNWSFVRNDQPRHETCFQIALAIKDEVEDLEKAGVTVIQIDEAALREGLPLRKSEQKFYLDWAVHAFRITNSGVQDSTQIHTHMCYSNFNDIIHSIIDMDADVITIENSRSDEKLLSVFHEGVKYGAGIGPGVYDIHSPRIPSTEEIAERINKMLAVLDSKVLWVNPDCGLKTRNYSEVKSALSNMVAAAKLIRSQLNKS

SEQ ID NO: 20735 - protein, 347 aa, Ashbya gossypii ATCC 10895
MVVHNPNNWHWVDKNCIDWAKKHFAEKLAGLSSGNKTDGEYAEIAAVNSVEGDCEVNQRKGKVISLFDLRVVLSVRGHVADGTDWEGSITIPEVAFDSAEDDYQFEISIYQETSKLAPARPLVREKLVPQLRAAFAVFGKELLQAHGKDIQVPQDQVRSSFTKANQESSFVGTDATAAAPGARMASAPAASAPRATAAPAYAKAAVSNTTSIHIEPTFNVAAADLFHTLLDKQRITAWSRSHIQADRNGPELAVGETARMFGGNVTSTLLEAHEPERLVFNWRLADWSPAQVSKLAITFHESPEFHETKMVVSWSGIPIGEEEKVKANFEEMYVRAIKLTFGFGSVL

SEQ ID NO: 20736 - protein, 338 aa, Mucor racemosus
MVTQVGINGFGRIGRIVLRASLSNPEVQVVAINDPFIPLEYMVYMFKYDSVHGRFQGTVEAKDGKLVVNGKEISVFSERDPAQIPWGSVEAAYVVESTGVFTSIDAASAHLQGGAKKVIISAPSGDAPMFVCGVNLEKYTSDLKVISNASCTTNCLAPLAKVINDNFGIVEGLMTTVHATTATQKTVDGPSNKDWRGGRGAGANIIPSSTGAAKAVGKVIPELNGKLTGMAFRVPTPDVSVVDLTVRLEKGATYEEIKAVIKKASENELKGILGYTNDQVVSTDFVGDAQSSIFDAAAGIALNDKFVKLVSWYDNEFGYSNRVIDLLAYAAKVDAAAQ

SEQ ID NO: 20737 - protein, 481 aa, Ustilago maydis 521
MSATTASISAEQVARQARAAFESSSQLLSTSSSADATRSSALQSIRAALEAHKKRIQEANQLDMQAANALVEEGKLSSSLAARLDLFSKPGKWESLLDGVSEVAALASPLDQVQWAKRLAHETSTQAAIDLYRITCPIGVLLCIFEARPEVVVNIASLAIKSGNAAILKGGKESKHTAAILSSIISSALAQAGLPKHLIQTVETRSDIQSLLHLDEYIDLVIPRGSNELVRAIQRDARMPVMGHADGLCIGYVHEDAELDMVVGTVVDSKTDYPAACNALETLLVHESLLHRKDFWPPLAQALVSAGIQLRLDQVSLQCLDQLDASLRTSYASQIIAAQPADFTTEFLDLILAVKATDSLDSAISHITTHSSGHTDLILTSSSSPNRAAHKFVKSINSANVFVNISSRFADGFRFGLGTEVGISTGKTHARGPVGLDGLVIYKYVARSNPSTTKNAAQTAAQFNAGRKWAHSPIEPNYPTL

SEQ ID NO: 20738 - protein, 572 aa, Xanthomonas oryzae pv. oryzae KACC10331
MRSPCLRSCGPYPQLRSVCGDITATIAIVARLRAANKTTALTAKRARPVVGIGMYHAYAPVPQRRSRSSDDSSRRFVSRSWPLLLQAGVKRRGRRRDAVSWRDSRHSSLSMPLPTDPVAETAASAAPVLRHALKPRQLMMMGLGTAIGAGLFLGSGVGIHAAGPAALVSYLIAGGLVIIVMNALGEMAAAKPTSGAFSVYAADAMGPTAGATVGWLWWLQIVVVIAAEAVGAAGLLATVWPALPVPLLALLFMATFTAINLLGVRNFGEFEFWFAILKVLAIVVFLLIGIALLAGWLPGVTSPGLSNFTQNGGFAPKGLAGIGSALLVVVFAFGGTEIVAVAAAETADPGRSLARTIRTVAGRILVFYIGSISVIVAVVPWTSTALSSPFAAVLQVARIPGAATAITLVAVVALLSALNANLYGASRMIFSLAQRGEAPRVLARTSSEQVPLVAVIASVLFGFAAAALELLYPNKVLPMLLNIVGATCLLVWTISLVSQLILRARADRAGLALPFRMRGFPFLTVLALAILAVIFGLLAYSADTRAQFLSMVTLTAVIAVVSEVARRFRSRM

SEQ ID NO: 20739 - protein, 339 aa, Mucor racemosus
MSTINTGINGFRSHWPYCLACSLENPKVKVVAINDPFIDLEYMVYMFKYDSTHGRFKGTVEHKDGKLVVNGHEIAVHAERDPAQIPWGSHGADYVIESTGVFTTKDAASAHLKGGAKKVIISAPSADAPMFVVGVNLDKYTSDLTVISNASCTTNCLAPLAKVIHDNYGILEGLMTTVHATTATQKTVDGPSNKDWRGGRGAGANIIPSSTGAAKAVGKVIPELNGKLTGMAFRVPTPDVSVVDLTVRLEKPASYDEIKATIKKASESEELKGILGYTEDQVVSTDFVGDAHSSIFDAKAGIQLSPTFVKLISWYDNEFGYSTRVVDLLAYVAGKDGAL

SEQ ID NO: 20740 - protein, 324 aa, Pseudomonas aeruginosa PAO1
MSTLSTDQLLHAYRVMRTIRAFEERLHVEFATGEIPGFVHLYAGEEASAAGVMAHLRDDDCIASTHRGHGHCIAKGVDVHGMMAEIYGKKTGVCQGKGGSMHIADLEKGMLGANGIVGAGAPLAAGAALAAKLKGSDAVAVAFFGDGGSNEGAVFEAMNLASVWNLPCLFVAENNGYAEATAANWSVACDHIADRAAGFGMPGVTVDGFDFFAVHEAAGAAIERARAGEGPSLIEVKLTRYYGHFEGDAQTYRDPDEVKHYRETRDCLKQFRERTCHAGLLSASDLDAIDAEVEARIEDAVQRAKNDPKPEPDDLLRDVYVSYP

SEQ ID NO: 20741 - protein, 363 aa, Pseudomonas aeruginosa PAO1
MNSSPQANAAMRAAVWHGRHDIRVEDVPLPAEPPPGWVQIRVHWCGICGSDLHEYLAGPVFIPVEAPHPLTGLKDQCILGHEFSGEIVRLGNGVTGFAVGQAVAADACQHCGTCYYCRHGLYNICENLAFTGLMNNGAFAEYVNVPANLLYALPAGFPSEAGALIEPLAVGMHAVKKAGSLLGQNVVVVGAGTIGLSTIMCARAAGAAQVIALEMSSARKAKALEVGASQVLDPSRCDALGEIRALTGGLGADVSFECIGNKHTAKLAIDAIRKAGKCVLVGIFEEPSEFNFFELVSTEKQLLGALAYNGEFADVIAFIADGRLDIAPLVTGRIGLEEIVERGFEELVNNKEHNVKIIVSPGG

SEQ ID NO: 20742 - protein, 217 aa, Arabidopsis thaliana
MDQQGQSSAMNYGSNPYQTNAMTTTPTGSDHPAYHQIHQQQQQQLTQQLQSFWETQFKEIEKTTDFKNHSLPLARIKKIMKADEDVGMISAEALVVFARACEMFILGLTLRSWNHTEENKRRTLQKNDIAAAVTRTDIFDFLVDIVPREDLRDEVLGGVGAEAATAAGYPYGYLPPGTAPIGNPGMVMGNPGAYPPNPYMGQPMWQQPGPEQQDPDN

SEQ ID NO: 20743 - protein, 407 aa, Nicotiana tabacum
FAWSTLIANKNAELQRLTGIYKNILKNAGVTLIEGRGKVVDPHTVDVDGKLYSAKNILISVGGRPFIPDIPGSEYAIDSDAALDLPTKPNKIAIVGGGYIALEFAGIFNGLKSEVHVFIRQKKVLRGFDEEIRDFVGEQMSLRGIEFHTEESPQAIIKSADGSLSLKTSRGTVEGFSHIMFATGRRPNTKNLGLETVGVKMTKNGAIEVDEYSRTSVPSIWAVGDVTDRINLTPVALMEGGALAKTIFADEPTKPDYRNVPAAVFSQPPIGQVGLMEEQAIKEFGDVDVYTANFRPLKATISGLPDRVFMKLIVCAKTSKVLGLHMCGDDAPEIVQGFAIAVKAGLTKADFDSTVGIHPTSAEEFVTMRTPTRKVRSSPSEVSNSPEIAVHSSLGKAEHDIKAAAGV

SEQ ID NO: 20744 - protein, 405 aa, Methanosarcina acetivorans C2A
MKAIILAAGEGLRCRPLTLTRSKVMLPVANRPILEHVISSLEKNGIKEIILIVGYEKERIMNYFEDGLNFGVNITYVEQKAQLGTAHAIEQAKKLISPEDSEFLVLNGDNLVESKTIADLLNNYKGDASLLTVRMEDTAGYGVVLKENKRVTRILEKRPGDLSHIVNTGIYIFTPQVFETIEKTPISENGEYAITDTLQLMIDEGKIVTSIPTESKWLDAVHAWDLLKANSTVLNSSRNLKQEGELEEGVIIRGKVAIGKNSRIRAGTYIVGPVVIGENCDIGPNVVILPSTTIGDNVSIRSFTEIQNSIIMNDCRISSHGQISNCIIGSNNTLGPGFTAEEKENLEININCKIHSAPKLGTIFGDDNRIGGRVLVKAGVMIAVNCQVESGNTIYRDLPRDSVVL

SEQ ID NO: 20745 - protein, 161 aa, Neurospora crassa
MATELTVQSERAFQKQPHIFLNSKTKVKSARPGKGGRRWYKDVGLGFRTPAAAIEGQYIDKKCPFTGQVSIRGRILSGTVVSTKMHRTIIIRREYLHFIPKYNRYEKRHKNLAAHVSPAFRVEEGDKVTVGQCRPLSKTVRFNVLRVLPRTGKSVKKFAKF

SEQ ID NO: 20746 - protein, 411 aa, Pseudomonas fluorescens PfO-1
MTQAYEPLRLHVPEPSGRPGCKTDFSYLHLTDAGTVRKPSIDVEPADTADLARGLIRVLDDQGNALGPWAENVPVEILRKGMRAMLKTRIYDNRMVVAQRQKKMSFYMQSLGEEAIGSAQALALNIDDMCFPTYRQQSILMARDVPLVDLICQLLSNERDPLKGRQLPIMYSVKDAGFFTISGNLATQFIQGVGWGMASAIKGDTKIASAWIGDGATAESDFHTALTFAHVYRAPVILNVVNNQWAISTFQAIAGGEATTFAGRGVGCGIASLRVDGNDFYAVYAASAWAAERARRNLGPTMIEWVTYRAGPHSTSDDPSKYRPADDWSHFPLGDPIARLKQHLIKVGHWSEEEHAAVSAELEAEVIAAQKQAEQYGTLAGGQIPSAATMFEDVYKEMPEHLKRQRQQLGI

SEQ ID NO: 20747 - protein, 469 aa, Staphylococcus epidermidis ATCC 12228
MQMKLGWHNVLLVKGGIYYMSKSYDLIVIGAGPGGYVAAIRGAQLGKNVAVIEKNNAGGTCLNVGCIPSKTLLEHGEKAHSIRVANDWGITTKDLKIDFTQFVQRKKKVVQTLTGGVKQLLKKNKVTYIEGEARISKNLKVDVNNETYQAKDIILATGSQPFIPPIDGLDQVNYETTDTFFDLEKLPKQLAVIGGGVIATELASSMADLGVRVTIIEVADDILLTEINETREMLKAHLDNQGIKILTKAKIKQVKESKIILDGQDDVSFDTLLVATGRQPNTQVAKDLNLEMDGKFFKVNEHYETSQKHVYAIGDLIKGYQLAHAASAHGIHVVETIMNKQPSLVRQEDITRCIYTRLEAASVGLSEAQAKEAGYDVKVTQSAFQGNAKALIKGENEGFIKLVVDKKYGEVLGAFIVGPHATDIIGELLSVKASEGTIHELSQIIQPHPALLEAIGESADAFFDSAIHM

SEQ ID NO: 20748 - protein, 715 aa, Glycine max
MENTDPCRHFLKDVKRIIIKVGTAVVTRQDGRLAVGKLGALCEQIKELNSLGYEIILVSSGAVGLGRQRLRYRKLINSSFADLQKPQVELDGKACAAVGQNSLMALYDVLFSQLDVTSAQLLVTDNDFRDKDFRMQLSETMKSLLALKVIPIFNENDAVSTRKAPYEDSSGIFWDNDSLSALLALELKADLLILLSDVEGLYSGPPSDPRSKLIHTYIKEKHQSEITFGDKSRVGRGGMTAKVKASIHAAEAGIPVIITSGYAAENIIKVLQGQRIGTLFHKDAHKWAPVKEVDAREMAVAARDCSRRLQALSSEERKQILLKIADALEAHQNEIRIENEADVADAKEAGYEKSLVARLVLKNEKLASLANNIRIIANMEDPIGRVLKRTELAEGLILEKTSSSLGVLLIVFESRPDALVQIASLAIRSGNGLLLKGGKEAKRSNAILHKVITEAIPDIVGSKLIGLVTSRAEIPELLKLDDVIDLVIPRGSNKLVSQIKSSTKIPVLGHADGICHVYVDKSADLEMARRIVLDAKIDYPAGCNAMETLLVHKDLVEKGWLNSIIIDLRTEGVTLYGGPKASPLLNIPMARMLHHEYNSLACTVEIVDDVYAAIDHINLYGSAHTDSVVAEDHEVANVFLRQVDSAAVFHNASTRFSDGARFGLGAEVGISTSRIHARGPVGVDGLLTTRWILKGSGQIVDGDKAVNYTHRDLSI

SEQ ID NO: 20749 - protein, 317 aa, Staphylococcus epidermidis ATCC 12228
MKMEKEQAHWIYKTMNEIRFFEEKVHKIFSDGRIPGFVHLYVGEEAVATGVMSQLNDDDYITSTHRGHGHAIAKGCDLNGMMAEIMGKRDGLGHGKGGSMHVAEIDKGMLGANGIVSGGFGLAIGASISIINQGKDNVAVCFFGDGAANEGNFHEGLNFASILDLPVLFICENNQFAEGTTHDYASASETIAERAAAYNMPGVRVDGMDVVEVYKATQEAVERAKKGEGPTLIECDTYRKYGHFEGDEQKVKSPDDRNADKNATVEFRKRAIEENWLTEKEADEIEKAAEQAVEDAVKFAEESELPDEDSLYKDVFA

SEQ ID NO: 20750 - protein, 397 aa, Methanosarcina acetivorans C2A
MKAVVLVAGKGTRMEPLTSDCPKVMLKVANKPILEHILNSAIEAGIEGFIFITGYLEEQIKAHFGDGSKWEVSIEYVQQKEQLGTANAIGYARGHVEGAFLVLNGDMLIEQEDLKALVSREEEAVICVKEVENPSDFGVLETENDKVVRIIEKPKNPPTNLANAGIYLFRESIFDFIDKTQPSVRRELEITDSIQMLINSGAPVGYSSLEGRWIDIGYPWDLLKANEHLLKDLKGSCEGTVEPYAIIKGEVSIGKGSLIRSGSYIEGPVVIGENCDIGPNCFIRPSTAIDNHIRIGNAVEVKNTIILEDTHVGHLSYVGDSVIGHHCNFGAGTKVANLRHDGKNIKVMLRGRILDSGRRKLGVIMGDDVHTGINTSINIGVVMHKGRATLPGEVVKH

SEQ ID NO: 20751 - protein, 199 aa, Bacillus subtilis subsp. subtilis str. 168
MTHNPNIIWHPAAISKSDRQSLNGHKSCVLWFTGLSGSGKSVLANAVDEKLYRKGIQSYVLDGDNIRHGLNKDLGFQTGDRIENIRRIGEVAKLFVDSGQMILTAFISPFREDRDMVRALFPKGEFFEIYVKCPLHVCEQRDPKGLYKKARNGEIKHFTGIDSPYEAPLSPDFIIESDQTSISDGADLIINALQNRGII

SEQ ID NO: 20752 - protein, 204 aa, Glycine max
IRLEVSSSLLAKLCITFFRCYRKRVSAVTEQFDNCMKKQVEAIARVLHLFQSYKEDNIPCKIDEGLYLGSIATAANKPALKDCNITHVLTVAGRIPPAHPHDFVYKIIDVVDKDDEDLKQYFNECFDFIDEAKRHDGGVLVHCFAGRSRSVTIVVAYLMKTRGMSFFEALQHVRSIRPAAGPNQGFICQLQDFEKSLQGANKLH

SEQ ID NO: 20753 - protein, 343 aa, Anabaena variabilis
MAKLKVGINGFGRIGRLVLRAGINNPNIEFVGINDLVPPDNLAYLLKYDSTHGKLRSQVEAKDDGIVIDGHFIPCVSVRNPAELPWGKLGADYVVESTGLFTDSEGASKHLQAGAKRVIISAPTKDPDRVRTLLVGVNHDLFDPSKDVIVSNASCTTNCLAPIAKVINDNFGLTEGLMTTVHAMTATQPTVDGPSKKDWRGGRGAAQNIIPSSTGAAKAVALVLPELKGKLTGMAFRVPIPDVSVVDLTFKTAKATSYKEICAAMKQASEGSLAGILGYTDEEVVSTDFQGDTHSSIFDAGAGIELNSNFFKVVAWYDNEWGYSNRVVDLMLSMIQKEQLAAV

SEQ ID NO: 20754 - protein, 457 aa, Pseudomonas fluorescens PfO-1
MQSLNTTLLIIGGGPGGYVTAIRAGQLGISTILVEGESLGGTCLNIGCIPSKALIHVAEQFHQTQHHNQHSALGISVSAPTLDITKSVEWKDGIVDRLTTGVAALLKKNKVQVINGWAKVIDGKTVEVGDTRIQCEHLVLATGSKSVNLPILPIGGPIISSTEALAPKSVPKRLIVVGGGYIGLELGIAYRKLGAEVSVVEAQDRILPAYDAELTQPVHDALKQLGVKLYLKHSVLGFDGTLQVRDPNGDTLNLETDQVLVAVGRKPNTQGWNLEALNLDMNGSAIKIDSRCQTSMRNVYAIGDLSGEPMLAHRAMAQGEMVAELISGKTREFNPTAIAAVCFTDPELVVVGKTPDEAKAAGLDCIVSNFPFAANGRAMTLESKTGFVRVVARRDNHVIVGWQAVGVGVSELSTAFAQSLEMGARLEDIGGTIHAHPTLGEAVQEAALRALGHALHL

SEQ ID NO: 20755 - protein, 118 aa, Brassica napus
MAESQAKSPGGGESGGDQSPRSSSHVREQDRFLPIANISRIMKRGLPANGKIAKDAKEIVQECVSEFISFITSEASDKCQREKRKTINGDDLLWAMATLGFEDYIDPLKIYLTRYREM

SEQ ID NO: 20756 - protein, 266 aa, Bordetella parapertussis 12822
MTPTGKIAAIQFDVRQGENDANRARSCELARQAAAAGANLIVLPECCVGGLVFDSRDEIRAVSETVPGPSTRAWSQVSRETGAWIVAGLSETDGAKIYNTAVLVGPNGELHRHRKLHVRGIEQRLFDVGDALTCVDTPLGRIGLAICYDMWFPEVCRNYALDGVDVVAAPANWSKSVRTADAFDAYGLPQGYHLMAATAVSNELVVVAADRVGTERGVAFLGTSCIFGPSGEEQILLADWPDIAAVRAQGGPHLGQRQPAVYPVTR

SEQ ID NO: 20757 - protein, 320 aa, Bartonella doshiae
TYIDGDKGILLYRGYPIEQLAEKGDFLESCYLLLYGELPTQQEKNDFDRRIMQHTMVHEQFSRFFQGFRRDSHPMAVMVACLGAMSAFYHDSIDITDPQQRMIASIRLISKVPTLAAMAYKYSIGQAFVYPHNSLSYAANFLRMCFAVPCEEYQVNPVLTRAMDRIFILHADHEQNASTSTVRLAGSSGANPFACIAAGVACLWGPAHGGANEACLKMLKEIGSVKKIPEFIARAKDKNDPFRLMGFGHRVYKNYDPRAKIMQKTCHEVLKELNRQDDPLLDIAIELEHIALNDEYFIEKKLYPNVDFYSGITLKALGFP

SEQ ID NO: 20758 - protein, 197 aa, Heliobacterium chlorum
AGGIAEMAELGPEVRKKTDKLDAVGNTTAAVAKGFAIGSAALTALALFTAFAEEVVKSPGVSSALHGSHFVLNLLEPKIIIGLFIGGTVPFLFCAFAMEAVGKAAFEMIGEVRRQFREIPGLMEGKAKPDYARCVDISTRAAIRQMIAPGLLAVITPLIVGFGFGAQALGGMLAGVTVAGVLLAIFMANAGGAWDHA

SEQ ID NO: 20759 - protein, 380 aa, Neisseria meningitidis Z2491
MKVFKQQLEQLGAQNQYRSIPDLIHQGRYITRENCKMLNMSSNDYLGLASDENLRRSFLQQYGGNFPSFTSSSSRLLTGNFPIYTDLEELVAQRFQRESALLFNSGYHANLGILPALTTTKSLILADKFVHASMIDGIRLSRCAFFRYRHNDYEHLKNLLEKNVGKFDRTFIVTESVFSMDGDVADLKQLVQLKKQFPNTYLYVDEAHAIGVYGQNGLGIAERDNLIAEIDLLVGTFGKALASVGAYAVCNQVLKECLINQMRPLIFSTALPPFNVAWTYFIFERLPQFSKERSHLEQLSAFLRREVAHRTQIMPSQTCIVPYILGGNEATLAKAEYLQRQGYYCLPIRPPTVPKGTSRIRLSLTADMTMDEVRQFAACL

SEQ ID NO: 20760 - protein, 197 aa, Allochromatium vinosum
AGGIAEMSGLPEDVRKTTDALDAVGNTTKAVTKGYAIGSAGLAALVLFADYTHNLEVAGKMQVFSLSDPAVIIGLFIGGLVPYLFGAMAMEAVGRAAGSVVIEVRRQFREIKGIMEGTAKPDYSRAVDLLTKAAIKEMVVPSLLPILVPVAVAIGMNILMGDGAGIRALGGMLIGTIVTGLFVAISMCTGGGAWDNA

SEQ ID NO: 20761 - protein, 171 aa, Candida glabrata CBS138
MGLRYTSYIESPLASDLNKSFKGSRNSQTDLYQYNEYGTIGNSLYSGPILLRQRRRTLSGSSDSSSSSQEKIFVTYGCRRCRTHLSSSSHVISKDYRGKTGTAYLMDEVLNVLEGNVETRPMLTGDYVVCDILCHWCKNVVGWKYLQSERKDQRYKEGKFILEVKTICKCD

SEQ ID NO: 20762 - protein, 630 aa, Neisseria meningitidis Z2491
MPILTIREVCNINHWGIGYYDVDDSGEIIVRPNPSQHNQIVSLQKLTEAVQQKHQARLPVLFCFPQILEHRLRDINRAFQTAREECGYKGGYCLVYPIKVNQHRRVIESLMSSGQPHGLEAGSKAELMAVLAHAGTRQTLIVCNGYKDREYIRFALMGEKLGHQVYLVIEKLSEIQMVLEEAEKLGIKPRLGVRARLASQGSGKWQSSGGEKSKFGLSASQVLQLVDILKQKNRLDCLQLLHFHLGSQLGNIRDVATGVHESARFYVELHKLGVNIRCFDVGGGLGVDYEGNRTQSDCSVNYSLNEYAATVVWGISQACLEHGLPHPTIITESGRGITAHHAVLVANVIGVERYKPRRLDAPSPEAPRVLHSMWETWTDISASREKRSLRSWIHEGQFDLADVHNQYNVGLLSLAQRAWAEQLYLNICHEVGELFNEKHRSHRTIIDELQERFADKLYVNFSLFQSLPDAWGIDQLFPVCPITGLNEPIARRAVLLDITCDSDGTIDHYIDGDGIAGTMPMPDYPEEEPPLLGFFMVGAYQEILGNMHNLFGDTATADVVVGEDGQFTVIDYDEGNTVADMLEYVYQDPKELMKRYREQIEHSDLPASQAMSFLKELEAGLNGYTYLEDE

SEQ ID NO: 20763 - protein, 459 aa, Bacillus anthracis str. A2012
MSKLVVIGGGPAGYVAAITAAQNGKNVTLIDEADLGGTCLNVGCMPTKSLLESAEVHDIVRKSNHYGVTLNNGSISIDWKQMQVRKSQIVTQLVQGIQYLMKKNKIKVIQGKAKFETDHRVRVTYGDKEIVVDGEQFIIATGSEPTELPFAPFDGKWILNSTHAMSLKNIPKSLLIVGGGVIGCEFASIYSRLGTKVTIVEMAPQLLPGEDEDIAHILRGKLENDGVKIFTGATLKGLNSYKKQALFEYEGGIQEVNPEFVLVSVGRKPRVQQLNLEKAGIQYSNKGISVNEHMQTNVSHIYAAGDVIGGIQLAHVAFHEGTTAALYASGEDVKVNYHAVPRCIYTAPEIASVGLTEKDAKEQYGDIQIGEFPFTANGKALIIGEQTGKVKVIVEPKYQEIVGISIIGPRATELIGQGTVMIHTEVTADIMRDYIAAHPTLSESIHEALLQAVGHAVHA

SEQ ID NO: 20764 - protein, 457 aa, Zea mays
MQIFVKTLTGKTITLEVESSDTIDNVKAKIQDKEGIPPDQQRLIFAGKQLEDGRTLADYNIQKESTLHLVLRLRGGMQIFVKTLTGKTITLEVESSDTIDNVKAKIQDKEGIPPDQQRLIFAGKQLEDGRTLADYNIQKESTLHLVLRLRGGMQIFVKTLTGKTITLEVESSDTIDNVKAKIQDKEGIPPDQQRLIFAGKQLEDGRTLADYNIQKESTLHLVLRLRGGMQIFVKTLTGKTITLEVESSDTIDNVKAKIQDKEGIPPDQQRLIFAGKQLEDGRTLADYNIQKESTLHLVLRLRGGMQIFVKTLTGKTITLEVESSDTIDNVKAKIQDKEGIPPDQQRLIFAGKQLEDGRTLADYNIQKESTLHLVLRLRGGMQIFVKTLTGKTITLEVESSDTIDNVKAKIQDKEGIPPDQQRLIFAGKQLEDGRTLADYNIQKESTLHLVLRLRGGQ

SEQ ID NO: 20765 - protein, 235 aa, Triticum aestivum
  misc_feature (116)..(116): Xaa can be any naturally occurring amino acid
  misc_feature (158)..(158): Xaa can be any naturally occurring amino acid
  misc_feature (163)..(163): Xaa can be any naturally occurring amino acid
  misc_feature (218)..(218): Xaa can be any naturally occurring amino acid
  unsure (1)..(235): unsure at all Xaa locations
GKTITLEVESSDTIDNVKAKIQDKEGIPPDQQRLIFAGKQLEDGRTLADYNIQKESTLHLVLRLRGGMQIFVKTLTGKTITLEVESSDTIDNVKAKIQDKEGIPPDQQRLIFAGQXQLRMGRTLADYNIQKESTLHLVLRLRGGMQIFVKTLTGKTSXLELSXSDTSDNVKAKIQDKEGIPPDQQRLIFAGKQLEDGRTLADYNIQKESTLHLVLRLXGGCKSLSRPHWQDITWS

SEQ ID NO: 20766 - protein, 408 aa, Lactococcus lactis
MAKANIGKLLLTGVVGGAIALGGSAIYQSTTNQSANNSRSNTTSTKVSNVSVNVNTDVTSAIKKVSNSVVSVMNYQKDNSQSSDFSSIFGGNSGSSSSTDGLQLSSEGSGVIYKKSGGDAYVVTNYHVIAGNSSLDVLLSGGKKVKASVVGYDEYTDLAVLKISSEHVKDVATFADSSKLTIGEPAIAVGSPLGSQFANTATEGILSATSRQVTLTQENGQTTNINAIQTDAAINPGNSGGALINIEGQVIGITQSKITTTEDGSTSVEGLGFAIPSNDVVNIINKLEADGKISRPALGIRMVDLSQLSTNDSSQLKLPSSVTGGVVVYSVQSGLPAASAGLKAGDVITKVGDTAVTSSTDLQSALYSHNINDTVKVTYYRDGKSNTADVKLSKSTSDLETSSSSSSN

SEQ ID NO: 20767 - protein, 341 aa, Bacillus anthracis str. A2012
MNKKIGGLDMLKTTESKENEITKEQARWMYEKMLEIRKFEDKVHELFAQGVLPGFVHLYAGEEAVAVGVCAHLTDSDSITSTHRGHGHCIAKGCDLNGMMAELFGKATGLCKGKGGSMHIADLDKGMLGANGIVGGGFPLACGSALTAKYKGTKDVSVCFFGDGANNEGTFHEGVNLAAIWKLPVIFIAENNGYGEATTFEYASSCDSIADRAKAYNIPGVQVDGKDLLAVYKAAEEAVERARNGDGPTIIECMTYRNYGHFEGEAQTYKTSEEKEEHLNEKDAIVNFRKHLIHEALLTESELVDMEKAVDEAVQKSIEFSENSPYPEDEELLKDVYVSYK

SEQ ID NO: 20768 - protein, 107 aa, Glycine max
QDNHEEQKAHLVIIRETEPLEFSHVTYDADAQIMKDVSQAAWLRKAVIPALSQTVKMNTVGTYMDAPESYDNMDGPYVEEGWGDQTCRVCMTDTIGEAEQLDMAGTH

SEQ ID NO: 20769 - protein, 620 aa, Gloeobacter violaceus PCC 7421
MAITIEEKAPRKLSEADLRPRGQVHPSPASWRDQFLYQLLPDRFSDGREADRPLFDPADPARFQVKDRGAWMAAGKRFVGGTLKGVISKLDYLQGLGVTTLWLNPPWKQRADLETYHGYGIQNFFDIDPRFGTRQDLRDLVDAAHARGLYVILDVIYNHSGNNWFYRDEWDGSPQSMRPYRYAPGYPVHGWRSGDGRSVGEIVSLDDGVWPEEFQNFDWYTRAGRIINWSEAAWEDYLSPQVEFRRGDFFDLKDFNLANPATIAGLARVYQYWIALSDCDGFRVDAVKHVSPVESRKFCAAINEYAQSIGKDNFLLTGELTDDRMLLAYLDIVGRNLDAALDIVSAPIQLTAAAKGLAHPGAFFGLYDENTLAGAYRQSGLYHVSVLDDHDMSSRSYKSRFAAHGEGVPNLYRQVAHAVGVQLTMPGIPSIYYGTEQALDGSESNHDYGIDGSHEYVDRYVREAMFGGAFGAFRTEGCHFFNPDHPTYLRIAAIARLRNRLDAVGKTLRRGHHYLRETSFVHRPFVLPGAGELVAWSQILFETEALMVLNTHGLENRGAEVTVETSLHPEGSSMAVLYHSEWSDDQLRQPPSAQTVPVEYGHGRATVRIDLPPCGMVILS

SEQ ID NO: 20770 - protein, 416 aa, Ralstonia eutropha JMP134
MFRSVWLPALLSSQLQEPGGSPVRLKLLGEELVAFRTKKGEVGITQANCAHRLAPLYYGRVEDDGIRCNYHGWLYNSKGQCLEMQNEPDKAICSKVKIKAYPVAEKADIVWIYMGEGEAPELPKFPWIDLPKSQRNATVWIQESNWLQGMEGELDSSHVSILHTNPATLATSPVHRPYSAVDLTPKLYAKDTPIGILGVARRNADDQYYWRVSQFMVPAFSSIPSVDFPVGGRAFIPIDDYNTYTWDFNYYFKGDLPQDFLDYTGKGLAFPPESNYQSYRLNTGTIIDAFVPVRTAENNYLINRNGGSLSSPSGIHGLNDQDRAMQEGMLATEGSEGRIVDREKEFLVATDIAIVRARRRILSIVQSEDSLEQFRQTIKDGTAYSVEPLDVLSQIDDVDSFVREYKTQLGPQKAGA

SEQ ID NO: 20771 - protein, 232 aa, Gloeobacter violaceus PCC 7421
MAHLILIRHGQSLWNAANKFTGWVDVPLSERGRAEATIASCKLRDYRVNVCFTSMLMRAIETAVITLTECDDICGGKIPIIKHEADDENWHGWDNYDGDPAAELPIYPTATLDERYYGDLQGLDKAETTAKYGKEQVQIWRRSYSVRPPGGESLEDTRKRVYPYFTNRILGHIKQGDNVLVAAHGNSLRSIIMILETLSEEEVPKVELATGVPIVYELDKAAHMLSKAVLTN

SEQ ID NO: 20772 - protein, 175 aa, Oryza sativa
MAPSVMASSATSVAPFQGLKSTAGLPVNRRSSSSSFGNVSDGGRIRCMQVWPIEGIKKFETLSYLPPLTVEDLLKQIEYLLRSKWVPCLEFSKVGFVYRENHRSPGYYDGRYWTMWKLPMFGCTDATQVLKELEEAKKAYPDAFVRIIGFDNVRQVQLISFIAYKPPGCEESGGN

SEQ ID NO: 20773 - protein, 389 aa, Gloeobacter violaceus PCC 7421
MTGSLLDQLRQMTIVVADTGDIQAIEQFTPRDATTNPSLITAAAQMPQYQQIVDDTLKQARAELGPEAKAAAVATLAFDRLAVAFGLKILAIVPGRVSTEVDARLSYDTEATIEKGRSLIAQYEAAGISRERVLIKIASTWEGIRAAEILEDEGIHCNLTLLFGVHQAIACAEAGVTLISPFVGRILDWYKKETGRDYEPHEDPGVVSVTTIYNYYKKFGYQTQVMGASFRNIGEIVELAGCDLLTISPKLLEQLQATDAELVRKLDPDQAAGLEIEKIDMDQATFEKRHAEDRMASEKLDEGIKGFTNALVALEKLLADRLARLEGEVALNQAFESIFRTFDLDGDGFITREEWMGTDAVFDAIDLNHDGKITAEELGAGIGAVSKLA

SEQ ID NO: 20774 - protein, 768 aa, Ornithobacterium rhinotracheale
MTIKKKIINKIFQIMNRYNKIPIRILQTVLILLCTQTLFAQRVVHYELYVKDTLVNYAGKQKRAIAVNGQIPMPTLTFTEGDTAEIVVHNQLKESTSLHWHGVFLPNKEDGVPWLTQKPIAPGTTYTYRFPIIQHGTHWYHSHSGLQEQIGMYGSFIMKKRSDDKTFRKGIDDLPTVPIILSEWTNLNPDNINRMLHNANDWAAIKKGATQSYVEAIKEGKLGVKVKNEWKRMLAMDVSDVYYDKILINGSHSTDLKTIDGKKLKAGDKVRLRVSNGGASSYFWLRYAGGKITVVANDGNDVEPVEVDRLIIAVSETYDIVVTIPQDGLAYEFLATTEDRTQSASYFIGDGVKQLISPLPRLKYFEGMKMMNDMMKMNGDLNDMGMKMSLNQMDMNVVMYPEITGDATKKADHSKHEGMDMDNDANRYNANALGDIKTLNYAMLQSPYNTSLPNDAPVKELKFTLTGNMNRYVWSMDNKILSETDKIPVKKGEILRITIYNNSMMRHPMHLHGFDFRVINGKGEKSPLKNVLDIMPMETDTIEFLANEEGDWFFHCHILYHMMAGMNRVFEVGDYNNPYLPDKAKAYKELQRESNMPHFMAQNDFATNGNDGEAMLMNARYQLGTEWRLGYNSMHGYEVETHLGRYIGKMQWFMPFVGFDYRYRKMGEDEHEKNIFGQTNKKDTRRAFSLGFMYTLPMLVNFQAEVYHDGIVRLQLMREDIPISKRLRGGFMVNTDLEYMGELRYIINKNIGYVPTMIAIWALVWGWH

SEQ ID NO: 20775 - protein, 462 aa, Arabidopsis thaliana
MSEEQPHANLAVPAFKTEKEPITQTRNGQSSVWRFGGSDKAAKASTVTLRGVIYMLFDNCGKDVNKTILPLGHGDPSVYPCFRTCIEAEDAVVDVLRSGKGNSYGPGAGILPARRAVADYMNRDLPHKLTPEDIFLTAGCNQGIEIVFESLARPNANILLPRPGFPHYDARAAYSGLEVRKFDLLPEKEWEIDLEGIEAIADENTVAMVVINPNNPCGNVYSHDHLKKVAETARKLGIMVISDEVYDRTIFGDNPFVSMGKFASIVPVLTLAGISKGWVVPGWKIGWIALNDPEGVFETTKVLQSIKQNLDVTPDPATIIQAALPAILEKADKNFFAKKNKILKHNVDLVCDRLKDIPCVVCPKKPESCTYLLTKLELSLMDNIKDDIDFCVKLAREENLVFLPGDALGLKNWMRITIGVEAHMLEDALERLKGFCTRHAKKTETETESLQALKLSDNNLEM

SEQ ID NO: 20776 - protein, 537 aa, Vibrio sp. Ex25
MRNVRRNHRLYRSLLALSMIGALSACNSSGGGDTNSSTPQPDTSYACQANVMAQSNQLRTYQIMVESFVDGDASIGHGTGYGTSHHNGDLQGVIDSLDYIQDLGMNAIWLTPVFESEAIAGQDHWADRLDATGYFATDYFKIDPKFGDLATAKTLVEEAHKRGLYVFFDGVFGHYKDGLIKPSPSGLLPSGSSNPVDYPASLDFYKEVATYWIKELKIDGWRLDQAYQVPTDAWTQLRKAVDEASQGVTYTNSKGEQVNPLGYMVAEIWKGESEIANEAYGSNSDPALCSAFDFPMRYRIVETLAVNESGVGGRGVDWLDNGYSTHNQYPTHAQPNLMIGNHDLVRFGDLLQRGNLADVNDAEYWLRHKAAFAFQAAYTGPITLYYGDEIGDQVDGFAAKEDNNTCAIQGLCDDHVARSSAKIEGVTATLDANQADLKAYVKSLMTMRSAHPALYQGSRTNLVASNGSYLDLKQSGTDKVLFALNTLESARTVTLTQESVGTGELVDLLTNEKITPSNGQYQILMSPLQGRFFAVKP

SEQ ID NO: 20777 - protein, 94 aa, Geobacillus stearothermophilus
MLKPLGDRVVIEVIETEEKTASGIVLPDTAKEKPQEGRVVAVGKGRVLDSGERVAPEVEVGDRIIFSKYAGTEVKYDGKEYLILRESDILAVIG

SEQ ID NO: 20778 - protein, 315 aa, Pseudomonas fluorescens PfO-1
MSADIMTLKVDDFSHNHQFLGASHDENARRTLWVVVLTFVMMIGEIAAGYLTGSMALLADGFHMATHAGALGIAAAAYGFARRNANNRRYSFGTGKVGDLAGFASAMVLGLVSLGIAGESVFRLFQPTSVAFGEATLIAVVGLGVNLLSAFLLAGHHSHHDHGHSHDHSHDHGHHHHHDNNLRSAYVHVLADALTSVLAIAALLAGRYLGWVWMDPVMGIVGSIVIAKWAWNLMRDSAAVLLDTTDEPVAEEIRELLETSDDVRISDLHVWQVGPQARAAIVSVVAVAGVTADAIRERLAPVHELSHLTIELRNA

SEQ ID NO: 20779 - protein, 328 aa, Bacillus anthracis str. 'Ames Ancestor'
MKAIVVTSFGGSEVMKYTDVDIPAISEDQVLIRVVATSVNFADIKSRYGKKGNKALPFILGIDAAGIVERVGSHVKNIYPGQRVIAFPQNGSYAEYVVANENLTFVLPDEVDFQTAAACPIVSFTSYNLLANVARLQQGESVLIHAAAGGIGTTAIQLAKLLGAGTVIGTVGSEAKKEIALDAGADYVIGHQDEDFVEKVNELTNGEGVDVILDSISGTVSERSLKCLAYYGRLIHFGNASGEIGNFQTKDLHASCRSILGFSFGTTRKKRPELLQETANEVFRYLRDGHLQIKATKSFPLQDAGKAHEWVESRKSTGKVILTVQSSS

SEQ ID NO: 20780 - protein, 628 aa, Fusobacterium nucleatum subsp. vincentii ATCC 49256
MPLLGTGIMPLLYSATIVFLEDISSAALIDAMKKYKVTMMIGVPKLWEVMHKKIMDTINSKGITKFIFKLAKIVNSLSFSKLIFKKVSEGFGGHIKFFVSGGSKLNPEITKDFYTLGIKICEGYGMTETSPIISYTPKNDIVFDSAGKVIKDVEVKIADDNEILVKGRNVMKGYYKNPEATAEIIDKDGWLHTGDLGKLVNDYLYITGRKKEMIVLSNGKNINPIEIETKISSMTNLISEMVVTEYNSILTAVIHPDFEKVKEEKIDNIYENLKWEVVDKYNQKAPDYKKILDVKIINEDFPKTKIGKIKRFMIADMLDGKIEKQERKPEPDFEEYNKIKKYLINVKEKDVYFDSHIEIDLGMDSLDMVEFQHFLDLNYGIKEDNLISKYPTLLELANYIKDNKNQEKIGNLDWKEIINKDTNADLPSSSFIAVFFKFLSFVLFKTFFRVKVKGKEKIEKDKPTIFVANHQSFLDGFLFNYSVPLKVMKKTYFLATVIHFKSSIMKFMADSSNVVLVDMNKDIAEVMQILAKLLKENKNIAIYPEGTRTRDGKIDKFKKSFAILAKELNVDVQPYVIDGAYDLFPAGKKLPKPGKITVEFLDKIKVENLTYDEIVDEAYTVIKNKIEA

SEQ ID NO: 20781 - protein, 325 aa, Vigna unguiculata
MSTGAGQVVCVTGASGYIASWVVKFLLERGYTVKATVRDTSDPKKVDHLLSLDGAKERLHLVKANLLEEGSFDSAVEGCHAVFHTASPFFDDAKDPQTELLDPALKGTLNVLKSCVNSPTLKRVVVTSSIAAVSFNDRPKNPDVVVDETWYSDPEYCKRNGIWYNLSKTLAEDAAWKFAKENNIDLVTANPALVVGPLLQPVLNTSSAAVLNLINGSPTFKNVTLGWVDVRDVAIAHVLAYENASANGRYLLVERVAHFGDVVKILHDLYPTLQLPQKCVDDRPYDPIFQVSKEKAKSLGLEFTPLEVSIKDTVESLKEKGFIKF

SEQ ID NO: 20782 - protein, 134 aa, Tortula ruralis
MSGERRKVRAVFGVAHIFASFNDTFVHVTDLSGKETSLVLTGGMKVKADRDEASPYAAMLAAQDVAQRCKELGITALHINVRATGGNKTKTPGPGAQSLRALARSGMRIGRIEDVTPIPTDSTRRKGGRRGRRL

SEQ ID NO: 20783 - protein, 413 aa, Bacillus cereus E33L
MGYYDGPNLNEEHSETREVRKSGSKKGYFFTGLVGAVVGAVSISFAAPYMPWAQNNGATVSSFSSDSKVEGTVVPVVNKAKNETDLPGMIEGAKDVVVGVINMQQSIDPFAMQPTGQEQQAGSGSGVIYKKAGNKAYIVTNNHVVDGANKLAVKLSDGKKVDAKLVGKDPWLDLAVVEIDGANVNKVATLGDSSKLRAGEKAIAIGNPLGFDGSVTEGIISSKEREIPVDIDGDKRADWNAQVIQTDAAINPGNSGGALFNQNGEIIGINSSKIAQQEVEGIGFAIPINIAKPVIESLEKDGVVKRPALGVGVVSLEDVQAYAVNQLKVPKEVTNGVVLGKIYPISPAEKAGLEQYDIVVALDNQKVENSLQFRKYLYEKKKVGEKVEVTFYRNGQKMTKTATLADNSATKNQ

SEQ ID NO: 20784 - protein, 283 aa, Oenococcus oeni PSU-1
MVLSRSVPNIVLNDGHSLPAIGLGTYLVRGGQGVDQILSAIEDGYRLIDTSTNYDSEGAVGEAIRRSGIPRSEFIVTSKLPGKYHHYQDALMMIQESIFRMGIDYLDLYLIHWPLPKRDHYVKAWKALVDAQKLGLIRSIGVSNFLPEHLDRIINESGVTPAVNQIEVHPYWVQEDMLAANKSRGIVSEAWSPLGRGSAALKEDIIKNLADKYGKNTGQIILRWHTQRGIIPLPKSSSLIHQRSNIDIFDFSLTSSEIEQINALNRSDGRVDGQDPNTYEEFD

SEQ ID NO: 20785 - protein, 345 aa, Oryza sativa (japonica cultivar-group)
MEKKKVAVPLVCHGHSRPVVDLFYSPVTPDGYFLISASKDGNPMLRNGETGDWIGTFQGHKGAVWSCCLDTNALRAASGSADFSAKVWDALTGDELHSFEHKHIVRACAFSEDTHLLLTGGVEKILRVYDMNRPDAAPRELDKAPGNVRTVAWLHSDQTILSSCSDMGGVRLWDVRTGKIVQTLETKAPVTSAEVSQDSRFITTADGSSVKFWDANHFGLVKSYDMPCTVESASLEPKSGSKFIVGGEDMWVHVFDFFTGEEITCNKGHHGPVHCVRFAPGGESYASGSEDGTIRIWQLSPPNADDNEAVNSNGKPTVGVNEVARKIEGFHIPKEEEQQQQQAEG

SEQ ID NO: 20786 - protein, 148 aa, Bacillus anthracis str. A2012
MEKTFLMVKPDGVQRAFIGEIVARFEKKGFQLVGAKLMQVTPEIAGQHYAEHTEKPFFGELVDFITSGPVFAMVWQGEGVVDTARNMMGKTRPHEAAPGTIRGDFGVTVAKNIIHGSDSLESAEREIGIFFKEEELVDYSKLMNEWIY

SEQ ID NO: 20787 - protein, 260 aa, Streptococcus pneumoniae TIGR4
MNHLGFGHYGGSLSIVEVLAVLYGEIMPMTPEIFAARDRDYFILSKGHGGPALYSTLYLNGFFDKEFLYSLNTNGTKLPSHPDRNLTPGIDMTTGSLGQGISVATGLAYGQRIRKSPFYTYAIVGDGELNEGQCWEAIQFASHQQLSNLIVFVDDNKKQLDGFTKDICNPGDFVEKFSAFGFESIRVKGSDIREIYEGIVQLKQSNNSSPKCIVLDTIKGQGVQELEEMKSNHHLRPTVEEKQMLTSVVERLSQELEETE

SEQ ID NO: 20788 - protein, 616 aa, Bordetella parapertussis 12822
MAGPWQMARNKLDLRGSAFKAVLGFTFRHWARQPWRIGLIAMLALLSALADILTPLYVGRLIDAVAGGAPADTVARNAALGAFWLLIALGVGATLLRQAIFMNIIALTLKMMHDIAGLAFHQVQRLSSDWHANTFAGSTVRKITRGMWALDLLNDTLLIALLPSLVMLAGATALLGWHWPLMGLVVGLGSLLYVAVTMALSLGYVAPAARLGNAWDTRMGGALADAVSCNAVVKAFGAEWREEARLARVTGKWRHRTRRGWVRGTINGGVQGAMLVAMQAAILGVALLLWQRGQASVGDVTFAFTTFFMLQGYLRDVGMNIRNLQRSINDMEELVSLQRQPLDVEDLPGAGPIDIGAGEIRFENVTFRYGPHEQPLYRDFSVRIAPGERVGLVGHSGSGKTTFIKLIQRLYDVDGGRITIDGQDIAAVRQASLRSQIAIVQQDPVLFHRSLAENIAYGRPGATQAEIERAARLASAHDFIMALPKGYDTLVGERGVKLSGGERQRVAIARAFLADAPILILDEATSSLDSESEVLIQRAMERLMEGRTTLVVAHRLSTVRALDRLLVMDRGRVIEEGSHEALIRLHGGVYRRLFERQALELTRGLSQWELGGAAAS

SEQ ID NO: 20789 - protein, 344 aa, Magnaporthe grisea 70-15
MSTRSEIKTLRLGTASPSPAATTAETLSVVDQVAARAADQNIDLLLLPEAFLGGYPRGTSFGSVIGSRSDEGREEFRQYFRGAVDLGDVVGEGGAGAGGKWVRRELDGEGEAKTRGDGTREKLEEIARRTGVFVVVGLIERAGGSLYCAVVYVCPSLGMIGKRRKVMPTGSERLVWAQGSPATLRAVTTTIRGVRLNLAAAICWESYMPMLRQSLYQQNINLYLAPTADGRDTWLSLMRTIGCEGRCFVVSSNMCVPPKGSNTTGGEASTTEPFVSRGGSCITGPMGAVLAGPQWENNQDIIYADVDFEDCIRGRLDLDAAGSYSRNDSFKFSVEGLDMSPLPY

SEQ ID NO: 20790 - protein, 320 aa, Bartonella quintana
IDGDKGILLYCGYPIDQLAEKGDFLESCYLLLYGELPTKQEKIDFDRCIMQHMMVHERFTRFFHGFRRDSHPMAVMVACLGAMSAFYHDSIDIKDAQQRMIAAIRLISKVPTLAAMAYKYSIGQAFVYPRNDLSYAANFLHMCFSVPCEEYKINPVLSRAMDRICTLHADHEQNASTSTVRLVGSSGANPFACIAAGVACLWGPAHGGANEACLKMLQKIGSVERIPEFIARAKDKNDPFRLMGFGHRVYKNYDPRAKIMQQTCHEVLKELNIQDDPLLDIAIALENTALNDEYFIEKKLYPNVDFYSGITLKALGFPTE

SEQ ID NO: 20791 - protein, 326 aa, Rickettsia sibirica 246
MDIKLGKYKPTKEEYIKSFKDMLLLRRFEEKCGQLYGMGEIGGFCHLYIGQEAVISAVDMVKQKGDSTITSYRDHAHIILAGTEPKYVLAELMGRATGCSKGKGGSMHLFNVPNKFYGGHGIVGAQVPIGTGLAFAEKYNDTHNICFTFLGDGAVNQGQVYEAFNMAALWGLPVVYIIENNEYSMGTSVARSTFMRDLYKKGASFGIKGFQLDGMDFEEMYDGSKQAAEYVRENSFPLILEVKTYRYRGHSMSDPAKYRSKEEVEQYKERDPLVIIRKTILDNKYVTEADLKAIEQSVKEIVKEAVEFSENSPLPDEGELYTQVYC

SEQ ID NO: 20792 - protein, 569 aa, Arabidopsis thaliana
MKKRAIELRRIFTRLGPTFVKLGQGLSTRPDLCPPDYLEELAELQDALPTFPDAEAFACIERELDLSLETIFSSVSPEPIAAASLGQVYKAQLRYSGQVVAVKVQRPGIEEAIGLDFYLIRGVGKLINKYVDFITTDVLTLIDEFACRVYQELNYVQEAQNARRFKKLYADKADVLVPDIFWDYTSRKVLTMEWVEGTKLNEQLAIESQGLKVLDLVNTGIQCSLRQLLEYGFFHADPHPGNLLATPDGKLAFLDFGMMSETPEEARFAIIGHVVHLVNRDYEAMARDYYALKFLSPDVDVTPIIPALRDFFDDALNYTVSELNFKTLVDGLGAVFYQYPFNVPPYYALILRSLTVLEGLALYADPNFKVLAASYPYFAKRLLTDPNPYLRDALIELLFKDGKFRWNRLENLLQQGSKDRDFSAKDALQPVLKLLLDPNGEELRLLVIKEAVRVSEAIALGTVVDTYNSLPEFLRSLVFNGNGNGPLTMSTAELQSTLELRDQVSRIWGLLQSSESFDPAILQPILQVLQQPEARRLGGRVAGGVGQRLAARFLQQLLRATTPSSAPSP

SEQ ID NO: 20793 - protein, 319 aa, Bartonella sp.
ITYIDGDKGVLLYRGYPIDQLAEKGDFLESCYLLLYGELPTKQEKNDFDRCIMQHTMVHEQFARFFHGFRRDSHPMAVMVACLGAMSAFYHDSIDITDPQQRMIASVRLISKVPTLAAMAYKYSIGQAFVYPRNDLSYAANFLRMCFSVPCEEYKTNPVLTRAMDRIFILHADHEQNASTSTVRLAGSSGANPFACIAAGVACLWGPAHGGANEACLKMLQEIGDVKRIPEFIARAKDRNDPFRLMGFGHRVYKNYDPRAKIMQKTCHEVLKELNIQDDPLLDIAIELEKIALNDEYFVEKKLYPNVDFYSGITLKALG

SEQ ID NO: 20794 - protein, 704 aa, Candida glabrata CBS138
MSRDLKNNLLFEVATEVANRVGGIYSVLKSKAPVTVAQYKDNYHLIGPLNRATYQSEVDLLDWNDPSIFSDELKPIQQTLQSMASRGVRFEYGRWLIEGAPRVILFELDSVRGYLNEWKGDLWSLVGIPSPENDWETNDSILLGYTVAWFLGELAHLDSKHAIIAHFHEWLAGVALPLCRKRRIDVVTIFTTHATLLGRYLCASGDFDFYNGIEHVDVDHEAGKYNIYHRYCIERAACHSADVFTTVSQITAFEAEHLLKRKPDGILPNGLNVVKFQAFHEFQNLHALKKEKINEFVRGHFHGSYDFDLDNTVYFFIAGRYEYKNKGADMFIEALARLNYRLKVSGSKKTVVAFIIMPAKNNSFTVEALRSQAVVKSLENTVDEVTRSIGKRIFDHAMKFPHNGITNELPTNLDELLKPSDKVLLKKRVLALRRPWGELPPIVTHNMVDEGQDLILNKIREVQLFNNASDRVKMIFHPEFLNANNPILGLDYDEFVRGCHLGVFPSYYEPWGYTPAECTVMGVPSITTNLSGFGAYMEDLIETNQAKDYGIYIVDRRFKAPDESVEQLVDYMEEFVKKTRRQRINQRNRTERLSDLLDWKRMGLEYVKARQLALRRAYPEQFKQLVGEELSDLNMESLTGGKKFKISRPLSVPGSPKDARSNSAVYMTPGDLGTLQEANNVDDYFNLSVSGDGDDDDENYAEHN

SEQ ID NO: 20795 - protein, 550 aa, Rickettsia prowazekii
MTTKLIKHVQKAREQMLEGIDILADAVKVTLGPKGRNVLIEQSFGAPKITKDGVTVAKSIELKDKIKNAGAQLLKSAATKAAEVAGDGTTTATVLARALAREGNKLVAAGYNPMDLKRGMDLAVNAVVEEIKRSSKKINSQEEIAQVGTISSNGDKEIGEKIAKAMEEVGKEGVITVEEAKNFSFDVEVVKGMMFDRGYLSPYFVTNSEKMVAELENPFILLFEKKLSNLQPMLPILEAVVQSQRPLLIIAEDVEGEALATLVVNRLRGGLKVAAVKAPGFGDRRKAMMEDIAILTKGELITEDLGMKLENVNIKNLGTAKRVTISKENTVIVDGNGDKKNIEDRVLQIKSQIAETTSDYDKEKLQERLAKLSGGVAVLKVGGATEVEVKERKDRVEDALAATRAAVEEGVVAGGGVTLLHASQTLTKLKVQNKDQQAGIEIVIEALKDPLKQIVKNAGENGGVVVGKLLEHNDKNYGFNAQDMQYVDMIKAGIIDPAKVVRTALQDAASVASLIITTETLIVDEPSDKEEPMPMRGGMGGMGGMGGMDF

SEQ ID NO: 20796 - protein, 315 aa, Bartonella sp.
DGDKGVLLYRGYPIDQLAEKGDFLESCYLLLYGELPTKQEKNDFDRCIMQHTMVHEQFARFFHGFRRDSHPMAVMVACLGAMSAFYHDSIDITDPQQRMIASVRLISKVPTLAAMAYKYSIGQAFVYPRNDLSYAANFLRMCFSVPCEEYKTNPVLTRAMDRIFILHADHEQNASTSTVRLAGSSGANPFACIAAGVACLWGPAHGGANEACLKMLQEIGSVKRIPEFIARAKDRNDPFRLMGFGHRVYKNYDPRAKIMQKTCHEVLKELNIQDDPLLDIAIELEKIALNDEYFVEKKLYPNVDFYSGITLKALG

SEQ ID NO: 20797 - protein, 998 aa, Listeria monocytogenes str. 1/2a F6854
MDGEIAARPNNVLYHNEFTIGENWSGRDRYVWLKTTITFPDTKMGTRLIGYFDFGNTGDGHNSGFESLLFVNGEPYQGVDQNHREVLFPDSFAGKKVELVFRLWSGLEGGGIPTIQTHQLKEAFIGYLNLVIDDLYFTSKATLKTLDQLEEKNPTYAPLLQAINRAYLAIDWSTPGSEQNLASMATANQLLQAALEKMPKNFPIKVAAVGHTHIDVAWLWRLKHTREKAARSFSTVLHLMEDYPEYLFLQSQPQLYAYIKEDYPEIYAKIKTKISEGAWEADGGMWLEADCNIPSGESLVRQMLYGQKFLREEFGKPSSFLWLPDVFGYSWALPQILRKSGIKTFMTTKISWNQYNRMPHDTFQWRGMDGTEILTHFITAPEKNSRISTYNGKMTARELVGLWDKYQDKEVNQELLLAYGYGDGGGGVNREMLEMRRRYDAMPGIPEVKPKSATTYFNDLHETINATDQYVHTWNGELYFEYHRGTYTSQAFTKKMNRKIELGLRNSEWLSVLANLKQGITYPTEKLAGIWQILLRNQFHDIIPGSSIKEVYDDALIEYTEAAEGNNALISNQLTNLTTDANQKITLWNSSTWSRPRYIEISPDNQADNLAFYDENNTPLPAQKLANNAWLIQHPSLPALGAATISVKETANILEQPSFHYKNNQLETPFYQITWNEAGQFTSIFDKKNNRQVLAENARGNVFQLFEDKPMWHDAWDIDLFYQEKQKEISALDSVEITENGPLQFTMKQVLHSEKSQITQWIHFYHESPEIRFETEVDWRDRNQLLKVAFPVAVHASEASYDIQFGNVKRPTHWNTSWDYARFETVGHQWADLSEKNYGVSLLNDSKYGYDIKDSTIRLTLLKAAGYPDPDADLGIHQFTYSLYPHQGDFLDGETVQAAWELNNPIFSSNGEIQSFSLFQVTNPYVMIDSIKQAEDGDGIILRLHEFAGTHGEVTIASDYTITSITECNLLEENETSLSTTTFAVAPFEIKTYRIQLA

SEQ ID NO: 20798 - protein, 442 aa, Candida glabrata CBS138
MVDNKDENKDKPAVRKPEQVEGHTVTKFFNKLNGQPESYVSKSNYVFGKTLGAGTFGVVRQARYSPTNEDVAVKILLKKALKGNDVQLQMLYDELSILQMLKHPNIVEFKDWFESKDKFYIVTQLAVGGELFDRILAKGKFTERDAVSITMQILSAVDYMHSKNVVHRDLKPENVLYIDKSDDSQLVIADFGIAKQLQDNDDLIFKAAGSLGYVAPEVLTNNGHGKPCDIWSIGVIVYTLLCGYSAFVAETVDGFLEECTQNKYPVTFHKPYWDNISDEAKNFILRALTLDPAERPTAAELMKDPWITNTRPETANIYPEIRKGFDLRKKLRDAIEIVKLNNRIKKLRSLYMVETDTDIEENVASVAFNTLASSLNDLRLHSQKRVGQLTAEQRRLKSALTQDTFAQIVRAATKNKERIWGEKTASPTPSQSSTSSTSTNKK

SEQ ID NO: 20799 - protein, 595 aa, Glycine max
  misc_feature (305)..(305): Xaa can be any naturally occurring amino acid
  unsure (1)..(595): unsure at all Xaa locations
MVFGSVRGIWVPGPPLSQLRRPPPHLTDTSMLPEWKNGNGIDTLSCPPTELGGCGKSHLELRSVFPSSWIKEMEVKAEEIVCSYDFPETSDKSSSCSLCFDTDHSTNRYKQLQEAALREDSNDNYLFCPTVMDISGDNFEHFQKHCGKGHPIVVQDALRSTSNLSWDPLTMFCTYLEQSITRYEKNKDLLESCLDWWEVEINIRQYFTGSVKRRPQRNTWDEMLKLKGWLSSQIFKEQFPAHFAEVIDALPVKEYMHPLSGLLNLAANLPHGSAKHDIGPYVYISYGSADKETDSVTKLCYDSYXCDAPLSIEQLTKIRKLLKKHKTLCQMETIATEGPQEQKLNGIPLLHGPETERKGSRSMVEGMNFFRRVNRTSCISTEAKKVSSQSMDSNGECDFISDSDSGSALLLLGTVQTAELSEHDNPRNPFKSSKRHKNKFTEHLGAQWDVFRRQDVPKLIEYLERHYDEFSYTHDYHKKMVHPILDQSIFLDSTHKMRLKEEFKIEPWTFQQHVGQAVVIPAGCPYQIRNSKSSVHAVLEFVSPENVTEGIQLFDEVRLLPEDHKAKADMLEVKKMALHSMNTAIKEVRQLTSKT

SEQ ID NO: 20800 - protein, 272 aa, Pseudomonas aeruginosa PAO1
MSSTIHPLPSFGLGTFRLTGQVVVDSVRSALELGYRAIDTAQIYGNEADIGRAIAESGVPRSELFLTTKVWVDNYAREKLLASLRESLEKLRTDRLDLVLIHWPAPGNGVELGEYMAALAEAKSLGLTRRIGVSNFNIELTRQAIAAVGAGEISTNQIELSPYLQNRALTAYLEEQGIAVTSYMTLAYGKVLKDPTLAGIAARHRATVAQVALAWAMQLGYAVIPSSTRRENLASNLLARDLRLDAEDMARIAGLERNGREVSPQGLAPAWD

SEQ ID NO: 20801 - protein, 407 aa, Lactococcus lactis
MAKANIGKLLLTGVVGGAIVLGGSAIYQSTTNQLGNANRSNTTSTKVSNVSVNVNTDVTSAIKKVSNSVVSVMNYQKQNSQSDFSSIFGGNSGSSSANDGLQLSSEGSGVIYKKSGGDAYVVTNYHVIAGNSSLDVLLSGGQKVKATVVGYDEYTDLAVLKISSDHVKDVATFADSSKLTIGEPAIAVGSPLGSQFANTATEGILSATSRQVTLTQENGQTTSINAIQTDAAINPGNSGGALINIEGQVIGITQSKITTTEDGSTSVEGLGFAIPSNDVVNIINKLETDGKISRPALGIRMVDLSQLSTNDSSQLKLPSSVTGGVVVYSVQAGLPAATAGLKAGDVITKVGDTAVTSSTDLQSALYSHNINDTVKVTYYRDGKSATANVKLSKSTSDLETNSSSSSN

SEQ ID NO: 20802 - protein, 621 aa, Ashbya gossypii ATCC 10895
MLRCIRRFSSRGAAASAVATGIPVGREAKRLMSKPLVTRLSVDGPIECPLSGMQLLNSPLFNKGSAFTQKERAAFGLEGLLPPQVNTLDEQVERAYKQLCYLKTPLAKNDFMTSMRMQNKVLFFELVRRHIRELVPIIYTPTEGDAIAAYSHRFRRPEGVFLDITEPDSIEERLASYGEDKDVDYVVVSDGEGILGIGDQGIGGIRIAISKLALMTLCGGIHPGRVMAVTLDVETNNKKLARDELYMGNRFARVRGKQYDEFLDKFIKALKKRFPSAVLHFEDFGVENARPLLDRYRTELPCFNDDIQGTGAVVMASFLAALKHTDRNLLDSKVLVYGAGSAGIGIADQIVNHMVSYGASVDEARSKIFTMDRRGLIMDSMRAGSTRAQQAYAKPDDEWEGVNTKSLVEVVSRIKPTCLIGCSTQAGAFNKAVVQEMHKHNERPIIFPLSNPTRLHEAVPEDLLEWTNYQALVATGSPFHPVNGYRISENNNCFSFPGIGLGAVLARATIISDKMISAAVDQLASLSPLKPGDSRPGLLPPLEVINDTSAKVATAVILQALEEGLARVEHEAVPNSTLGERVRVPRDFDKCLEWVKVQMWKPVYRPLLKVQHDPSVHTFQH

SEQ ID NO: 20803 - protein, 231 aa, Zea mays
MRIQCDACEAAAAAVVCCADEAALCARCDVEIHAANKLASKHQRLPLGDAAALPASLPRCDVCQERPAFIFCVEDRALLCRDCDEPIHVPGTLSGNHQRYLATGIRVGFSSVCGASAEGLPPAPPKGSSKPTAVVSAPAAGTTTKTRTVKDALPQEKDSSLGLKELEWFEDIDLFHAHSPAKTAMAEFFASPQPVSNAGFYKANGARLFKKSRMEVPDDDDEDYFIVPDLG

SEQ ID NO: 20804 - protein, 407 aa, Lactococcus lactis
MAKANIGKLLLTGVVGGAIALGGSAIYQSTTNQLGNANRSNTTSTKVSNVSVNVNTDVTSAIKKVSNSVVSVMNYQKQNSQSDFSSIFGGNSGSSSANDGLQLSSEGSGVIYKKSGGDAYLVTNYHVIAGNSSLDVLLSGGQKVKATVVGYDEYTDLAVLKISSDHVKDVATFADSSKLTIGEPAIAVGSPLGSQFANTATEGILSATSRQVTLTQENGQTTSINAIQTDAAINPGNSGGALINIEGQVIGITQSKITTTEDGSTSVEGLGFAIPSNDVVNIINKLETDGKISRPALGIRMVDLSQLSTNDSSQLKLPSSVTGGVVVYSVQAGLPAATAGLKAGDVITKVGDTAVTSSTDLQSALYSHNINDTVKVTYYRDGKSATANVKLSKSTSDLETNSSSSSN

SEQ ID NO: 20805 - protein, 574 aa, Escherichia coli O157:H7 EDL933
MDIQKRVSDMEPKTKKQRSLYIPYAGPVLLEFPLLNKGSAFSMEERRNFNLLGLLPEVVETIEEQAERAWIQYQGFKTEIDKHIYLRNIQDTNETLFYRLVNNHLDEMMPVIYTPTVGAACERFSEIYRRSRGVFISYQNRHNMDDILQNVPNHNIKVIVVTDGERILGLGDQGIGGMGIPIGKLSLYTACGGISPAYTLPVVLDVGTNNQQLLNDPLYMGWRNPRITDDEYYEFVDEFIQAVKQRWPDVLLQFEDFAQKNAMPLLNRYRNEICSFNDDIQGTAAVTVGTLIAASRAAGGQLSEKKIVFLGAGSAGCGIAEMIIAQTQREGLSEEAARQKVFMVDRFGLLTDKMPNLLPFQTKLVQKRENLSDRDTDSDVLSLLDVVRNVKPDILIGVSGQTGLFTEEIIREMHKHCPRPIVMPLSNPTSRVEATPQDIIAWTEGNALVATGSPFNPVVWKDKIYPIAQCNNAFIFPGIGLGVIASGASRITDEMLMSASETLAQYSPLVLNGEGLVLPELKDIQKVSRAIAFAVGKMAQQQGVAVKTSAEALQQAIDDNFWQAEYRDYRRTSI

SEQ ID NO: 20806 - protein, 151 aa, Arabidopsis thaliana
  misc_feature (74)..(74): Xaa can be any naturally occurring amino acid
  misc_feature (95)..(95): Xaa can be any naturally occurring amino acid
  unsure (1)..(151): unsure at all Xaa locations
MTEAMIRKKPGMASVKDMPLLQDGPPPGGFAPVRYARRISNTGPSAMAIFLTVSGAFAWGMYQVGQGNKIRRRXRKRNTLLVERFYQFFKLKKMXRFVSEWKKYLEYEADVMKDVPGWKVGENVYNSGRWMPPATGELRPDVFSIIYDDDE

SEQ ID NO: 20807 - protein, 533 aa, Pleurotus ostreatus
MFPGARILATLTLALHLLHGAHAAIGPAGNMYIVNEDVSPDGFARSAVVARSVPATDPTPATASIPGVLVQGNKGDNFQLNVVNQLSDTTMLKTTSIHWHGFFQAGSSWADGPAFVTQCPVASGDSFLYNFNVPDQAGTFWYHSHLSTQYCDGLRGPFVVYDPSDPHLSLYDIDNADTVITLEDWYHIVAPQNAAIPTPDSTLINGKGRYAGGPTSPLAIINVESNKRYRFRLVSMSCDPNFTFSIDGHSLLVIEADAVNIVPITVDSIQIFAGQRYSFVLTANQAVDNYWIRANPNLGSTGFVGGINSAILRYAGATEDDPTTTSSTSTPLLETNLVPLENPGAPGPPVPGGADININLAMAFDFTTFELTINGVPFLPPTAPVLLQILSGASTAASLLPSGSIYELEANKVVEISMPALAVGGPHPFHLHGHTFDVIRSAGSTTYNFDTPARRDVVNTGTGANDNVTIRFVTDNPGPWFLHCHIDWHLEIGLAVVFAEDVTSISAPPAAWDDLCPIYNALSDNDKGGIVPS

SEQ ID NO: 20808 - protein, 399 aa, Frankia sp. CcI3
MTLPARLVRRVIAGLPTGLLVLDAADRVVLVNMVARRMGVVAADEIAVAELADLVRATRLAGSDQERQLELPPVPEPPLTRPRPDQEGLAVRARARLLDSSGHVAVIVDDITESRRVEAVRRDFVANISHELKTPVGALHVLAEAVAAACEDPVAVRRFASRMTHESTRLARLVQEIIDLSRLQGADPLPNLRPMRASAVLTEAVDRTRLAAQAQAISVAVIGDGDLPVCGDEGQLVTAVANLLDNAISYSPRGTRVVLGVRRSGETVEISVADEGIGIAEKDLERVFERFYRADPARSRATGGTGLGLAIVKHIATNHGGVVSVWSAEGAGSTFTLRLPLFTGDDDDAMTDGSDETREDDGVDGFDVVGADADARGRGDGEHHGDGEHHGDDELGGGS

SEQ ID NO: 20809 - protein, 160 aa, Bacillus anthracis str. 'Ames Ancestor'
MTVYDFSAKTITGEEKSLKDYEGKVLLIVNVASKCGFTPQYKGLQEVYDKYKEQGLEILGFPCNQFGGQEPGTEADITSFCELNYGVNFPMFAKIDVKGDKAHPLYTYMTEQAPGLLGMKAVKWNFTKFLIGKDGKVVGRFAPQTKPVDLEVEIEKVLGE

SEQ ID NO: 20810 - protein, 333 aa, Frankia sp. CcI3
MGTGTGENQADTRPPGAVASPDGPPPLRAAAERPGVVQFRMNSCRAAGFLSCRRVTTGRRHDRPRAGESQATTGNAGRAGRRAGRISGMPTLVLLRHGESIWNRENLFTGWVDVDLSEKGAKEATRGGELLRESGVLPDVVHTSLLTRAIRTAWLALDAAGRTWVPVRRTWRLNERHYGGLQGLNKAETLEKFGAEQFQLWRRSYDTPPPEIGPEQVSGVDERYDDLAPDVIPRTECLADVVARMLPYWYDAIVPDLRTGRTVLVAAHGNSLRALVKHLDHISDTDIAGLNIPTGIPLRYELDDQLGVVSSGYLDPDAAALAAAAVAAQGTKK

SEQ ID NO: 20811 - protein, 343 aa, Bacillus cereus E33L
MKKIGVGIVGFGFSSTTFHIPLLQTIEEYDIRAVLSSKEEVVKETLPNANVVSTIDELVKRADIDLVVITSPNTTHFPYVKEAILNGKHVVVEKPFVVSIEEGEELISLAKKHNVVLSVYHNRRFDNDFLTIKKLLEEDRIGNVYAYEAHFDRFRPHVRDRWREKNLPGSGILYDLGSHLIDQALSLFGKPNAISADVIKQRPGAEIDDYFHIVLHYGVKRVILRSSSYVKKAGPHFTLHGDKGSIVKYGIDSQEEQLKNGMKPGRNNYGVDIEQNFATLETEEESVRIPTEVGCYDMYYKRVRDSIVNGEKPPVTAQEGLEVIKLIQLAVESSETGRIIFIK

SEQ ID NO: 20812 - protein, 322 aa, Staphylococcus aureus
MNNIGITVYGCEQDEADAFHALSPRFGVMATIINANVSESNAKSAPFNQCISVGHKSEISASILLALKRAGVKYISTRSIGCNHIDTTAAKRMGITVDNVAYSPDSVADYTMMLILMAVRNVKSIVRSVEKHDFRLDSDRGKVLSDMTVGVVGTGQIGKAVIERLRGFGCKVLAYSRSRSIEVNYVPFDELLQNSDIVTLHVPLNTDTHYIISHEQIQRMKQGAFLINTGRGPLVDTYELVKALENGKLGGAALDVLEGEEEFFYSDCTQKPIDNQFLLKLQRMPNVIITPHTAYYTEQALRDTVEKTIKNCLDFERRQEHE

SEQ ID NO: 20813 - protein, 587 aa, Zea mays
MAMIDEPLYPIAVLIDELKNEDIQLRLNSIRRLSTIARALGEERTRKELIPFLSENNDDEDEVLLAMAEELGVFIPYVGGVEHAHVLLPPLETLCTVEETCVRDKAVESLCRIGAQMKETDIVDWFIPVVKRLAAGEWFTARVSSCGLFHIAYPSALDQLKTELRTIYGQLCQDDMPMVRRAAASNLGKFAATVEQNHLKTEIMSIFDDLTQDDQDSVRLLAVEGCAALGKLLEPQDCVAHILPVIVNFSQDKSWRVRYMVANQLYELCEAVGPEPTRADLVPAYVRLLRDNEAEVRIAAAGKVTKFCRILNPQLSIQHILPCVKELSSDSSQHVRSALASVIMGMAPVLGKDATMEQLLPIFLSLLKDEFPDVRLNIISKLDQVNQVIGIDFLSQTLLPAIVELAEDRHWRVRLAIIEYIPLLASQLGVGFFDDKLGALCMQWLEDKVFSIRDAAANNLKRLAEEFGPEWAMQHIIPQVLEKINNPHYLYRMTILQAISLLAPVMGAEITCQKLLPVVINSSKDRVPNIKFNVAKVLKSLVPILDQSVVEKTVKPCLVELSEDPDVDVRYYANQALQACDQMMVSS

SEQ ID NO: 20814 - protein, 372 aa, Bacillus cereus ATCC 10987
MKAEEKFSPGLDGIVAAETKISFLDTVKGEIVIQGYDLIELSKTKEYLDIVHLLLEEHLPNEDEKAKLEKKLKEEYAVPEGVFNVLKALPKETHPMDGLRTGVSALAGYDNDIENRSLEVNKSRGYKLLSKVPNIVANSYHILNNEEPIEPLKELSYSANFFYMLTGKKPTELEEKIFDRSLVLYSEHEMPNSTFTARVIASTQSDLYGALTGAVASLKGSLHGGANEAVMYMLLEAGNVEKFEELLQKKLYNKEKIMGFGHRVYMKKMDPRALMMKEALKQLCDVKGDYTLYEMCEAGEKIMEKEKGIYPNLDYYAAPVYWMLGIPIQLYTPIFFSSRTVGLCAHVIEQHANNRLFRPRVNYIGERHVLSK

SEQ ID NO: 20815 - protein, 59 aa, Brassica napus
KRSEAMSMSKTGQAAEKDEQQQSRGIALMQGICAVVYRKADNTPCPIKQGLYLGSVGAA

SEQ ID NO: 20816 - protein, 397 aa, Streptococcus pneumoniae TIGR4
MEANMKHLKTFYKKWFQLLVVIVISFFSGALGSFSITQLTQKSSVNNSNNNSTITQTAYKNENSTTQAVNKVKDAVVSVITYSANRQNSVFGNDDTDTDSQRISSEGSGVIYKKNDKEAYIVTNNHVINGASKVDIRLSDGTKVPGEIVGADTFSDIAVVKISSEKVTTVAEFGDSSKLTVGETAIAIGSPLGSEYANTVTQGIVSSLNRNVSLKSEDGQAISTKAIQTDTAINPGNSGGPLINIQGQVIGITSSKIATNGGTSVEGLGFAIPANDAINIIEQLEKNGKVTRPALGIQMVNLSNVSTSDIRRLNIPSNVTSGVIVRSVQSNMPANGHLEKYDVITKVDDKEIASSTDLQSALYNHSIGDTIKITYYRNGKEETTSIKLNKSSGDLES

SEQ ID NO: 20817 - protein, 351 aa, Bordetella parapertussis 12822
MKRTALIAGPYGIVGNALVQHLARDAAWDVVTISRRQEATLPGVRHIAADLLDAAQAEAALAAFPGITHVFYCAYAPRPTLGEEAAPNLAMLANLVSAVDRHARGLARVVLVHGTKWYGNHLGPFRTPAREDDARHCPPNFYYDQQDWIAARQRESGRWSWTAFRPHGIFGYALGSPMNHLMALSLYASVMKAAATPLKFPGTPAAFAALNQCTDARLLARAMAWSVDVAACENEAFNFHNGEPERWANLWPAVAEAFGMQAGGVQQIRLAAMMPANEAAWQAICQRQGLRHFPLEAYVNWSFADWVYSNGFDQVCSLYKLRRAGWTEILLFDDMLKSMLSDLRQRKLLPA

SEQ ID NO: 20818 - protein, 136 aa, Oryza sativa
MSAEEVVADVPKELGEMDALKEVLKKALVHDGLKRGLHEAAKALDSRRARLCCLAQDCDEPSYSKLVRALCEEHGVNLILVPSGKQLGEWCGLCKIDATGEARKVVSTSCAVITDFGEESHALNVLLEYLKRQGEN

SEQ ID NO: 20819 - protein, 467 aa, Glycine max
MDGKVGEGEFIVSVTKEEIVVPELPMKEQWLPLSNLDLLIPPVDVSVFFCYKKPLPEKYYCFGTMVGSLKNALAQALVYYYPFAGEMVANTMGEPELFCSNRGVDFVEAVADVELQCLNLYNPDDTVEGKLVPRKKHGVLAVQATGLKCGGLVVACTFDHRIADAYSANMFLVSWAEAARPNKPIISAQPCFRRSLLTPRRPPSIHPLLHHMYVPVSALPPPSDPNKKLVFESEPLISRIYYVTSESLNRMQALASSNGTVKRTKLESFSAFLWKMVAEATASVDGKKNVAAKMGVVVDGRKMLCNDEKNMGSYFGNVLSIPYGGNAVDELVEKPLSWVAEKVHEFLKMGVTEDHFLGLVDWVEEHRPVPGLSRIYCGHGKEKGPSFVVSSGQRFPESKVDFGWGKPVFASYHFPWGGDSGYVMPMPCANGNGDWLVYMHLLKAHLNFMEVRAPQILRPFSWDYLLN

SEQ ID NO: 20820 - protein, 668 aa, Bacillus clausii KSM-K16
MTKTINVSQLSINTIRTLTLDAVEKAQHGHPGMPMGAAPMAYSLWKHFLNVNPENPNWFNRDRFVLSAGHGSTLIYSLLHLTGFDVTIEDLKNFRRLGSKTPGHPEYGVTPGIEATTGPLGQGIPASVGLAMAERHLAASYNREGFPVVDHYTYTICGDGDLMEGVSYEAASLAGHLKLGRLIVLYDSNDICLDGGLELAFSENIQQRFESMNWQYMKVEDGNDVDAIAKAIEEAKADETRPTIIEIKTVIGYGSSLQGTNNAHSDPMGKEEVAKTKKFYNWNYEEAFYVPEEVYADYATIRERGKQKEQEWNQLFSQYEAHYPELAQELKRIMEGQLPENWDEHLSSYEEGSSLATRVAGSEVLNAFVKRIPEFVGGSADLDSSTKTRLKEEIDFGNDRYGGRNIRFGVREFAMGAIANGLALHSLRPFVSTFFVFSDYLRPAIRLAALMGLPVTYVFTHDSVAVGQDGPTHEPVEQLASFRAMPGLTVIRPADANETKAAWKVAVEQTDRPTMLVLGRQNVPTLKDSDTLAEEGVRRGAYVISKAEGAPVGILVAAGSEVSLAINAQKELAKEGIYVNVVSMPSWDLFEKQSQKYKEGVLPSNLQTRLTIEMGSKLGWREYASTNGAVMSIDSFGESGPGEEVIAKFGFTVENVVDNFKQLLANVR

SEQ ID NO: 20821 - protein, 321 aa, Thermoplasma volcanium GSS1
MKVNIIGLNGFGKVHLEAWSKTDVDIEITERKKEIVEELKQKYNISKVYGSLEEALRSDAEIFDIVLPHSMHRDVAVKSLESGKHVLIEKPIATEVRDAQIMISTAEKNKRKFMVADQYFFDPSVKKIIDIIKAGDIGKVHSIIIRDQRKYNWHGWRAEAEHMGGGSLIDGGIHFIDTLLNIGGDYSAVRSLSYKSTQSIQEPDTVEAIFKFKNGSNGMFFYSWGYPFTPKLPAYEVIGETGSIVEDVVSKPVGFDAPKGKRAYGDPIVNAKLIDLGEHDIFYDEVSGFLKSVVKNENVPFDPYLALRDLVAVKDIYANQI

SEQ ID NO: 20822 - protein, 165 aa, Zea mays
MNVEKLKKMAGAVRTGGKGSVRRKKKAVHKTTTTDDKRLQSTLKRIGVNSIPGIEEVNIFKDDVVIQFVNPKVQASIGANTWVVSGTPQTKKLQDLLPSIINQLGPDNLDNLRRLAEQFQKQAPGASGAEAGASAGAAQDDDDDVPELVPGETFEEAAEEKKESS

SEQ ID NO: 20823 - protein, 408 aa, Lactococcus lactis
MAKANIGKLLLTGVVGGAIALGGSAIYQSTTNQSANNSRSNTTSTKVSNVSVNVNTDVTSAIKKVSNSVVSVMNYQKDNSQSSDFSSIFGGNSGSSSSTDGLQLSSEGSGVIYKKSGGDAYVVTNYHVIAGNSSLDVLFSGGQKVKASVVGYDEYTDLAVLKISSEHVKDVATFADSSKLTIGEPAIAVGSPLGSQFANTATEGILSATSRQVTLTQENGQTTNINAIQTDAAINPGNSGGALINIEGQVIGITQSKITTTEDGSTSVEGLGFAIPSNDVVNIINKLEADGKISRPALGIRMVDLSQLSTNDSSQLKLPSSVTGGVVVYSVQSGLPAASAGLKAGDVITKVGDTAVTSSTDLQSALYSHNINDTVKVTYYRDGKSNTADVKLSKSTSDLETSSSSSSN

SEQ ID NO: 20824 - protein, 408 aa, Lactococcus lactis
MAKANIGKLLLTGVVGGAIALGGSAIYQSTTNQSANNSRSNTTSTKVSNVSVNVNTDVTSAIKKVSNSVVSVMNYQKDNSQSSDFSSIFGGNSGSSSSTDGLQLSSEGSGVIYKKSGGDAYVVTNYHVIAGNSSLDVLLSGGQKVKASVVGYDEYTDLAVLKISSEHVKDVATFADSSKLTIGEPAIAVGSPLGSQFANTATEGILSATSRQVTLTQENGQTTNINAIQTDAAINPGNSGGALINIEGQAIGITQSKITTTEDGSTSVEGLGFAIPSNDVVNIINKLEADGKISRPALGIRMVDLSQLSTNDSSQLKLPSSVTGGVVVYSVQSGLPAASAGLKAGDVITKVGDTAVTSSTDLQSALYSHNINDTVKVTYYRDGKSNTADVKLSKSTSDLETSSSSSSN

SEQ ID NO: 20825 - protein, 246 aa, Glycine max
IRLEVDAIIKCQGLPTTSGYMVVNMEWGNFWSSHLPRTSYDIDLDSESPNPNDQGFEKMISGMYLGDIVRRVILRMSLESDMLGPISSKLSMPFMLRTPMMAAMHEDDSPDLREVARILKGILEIPDVPLKLRKVVVKVCDVVTRRAARLAAAGIVGILKKIGRDGSGGIAGGRRSDMKMKRTVVAIEGGLYSSYTLFRDYLHEALNDILGEDIARHVILKVTEDGSGVGAALLAASHSSYDVDTV

SEQ ID NO: 20826 - protein, 581 aa, Photorhabdus luminescens subsp. laumondii TTO1
MNDKDLSTWQTFCRLWPIVSPFRIGLIVAAVALILNAAGDTLMLSLLKPLLDEGFGKASSDVLKWMPLIVIALMIMRGLSGFVSSYCISWVSGKVVMQMRRRLFSHMMGMPVSFFDQQSTGTLLSRITYDSEQVASSSSSALITVVREGASIIGLFVLMFYYSWQLSLILIVIAPIVSLVIRVVSKRFRSISKNMQNSMGQVTASAEQMLKGHKEVLIFGGQNVETERFNKVSNHMRQQGMKMVSASSISDPIIQLIASFALAFVLYAASFPDIMETLTAGKITVVFSSMIALMRPLKSLTNVNAQFQRGMAACQTLFSILDMEQEKDDGKLELKKANGDIEFRNVTFCYPTKELPALQNISMYIPAGKIVALVGRSGSGKSTIANLLTRFYDVNEGNIFLDGHDLREYKLSSLRGQVALVSQNVHLFNDTVANNIAYASENRYSREEIEKAAEMAYAMDFIRKLDNGLDTMIGENGVLLSGGQRQRIAIARALLRDSPVLILDEATSALDTESERAIQAALDELQKNRTSLVIAHRLSTIENADEILVVEDGHIVERGDHLSLLERNGVYSQLHRMQFGQ

SEQ ID NO: 20827 - protein, 822 aa, Streptomyces avermitilis MA-4680
MSATQVPDVIEDMPATSIDLSVVVPAYNEEQRLGPTLDAIVDHLRENENRWGEWELIVVDDGSTDGTRDVVAAAKARDTRVQLVTSPRNRGKGHALRLGVLASYGRRVLVTDADLAAPIDELEQLDKALTDGQAAAIGSRATAGAAIERRQHRMRELLGRAGNLLIRRIAVPGIRDTQCGFKLFDGDRAREAFAASRLNGWGIDVEVLQHFRRSGWPVAEVPVRWAHQSGSKVRPADYGRVLAELTLLKARSVRPADLLAAALFLLLAVALQSGRWADPGHRYLPSSLQDQNQWEWFFAVTADNVSQLRNPLFTTFQGFPDGVNLMANTVMLGLSVPLAPLTLLAGPAFTLALVMTLGLAATAAAWYWLIVKRVVRQRGAAFVGAALAAFAPPMVSHANAHPNFVVLFMVPLIIDRALRLCTGARVVRDGVVLGLMVAYQIFLGEEPLLLASLGTVLFAGAYAAARREVARAAWRPLLKGLGIGAAVCLPIVALPLYWQFFGPQSYKSVLHGDNAGNSPLALLSFAERSAIAGDELTANALSLNPTEQNAFYGWPLAALAFAIVIRLWEHAVVKALAFTTIAAAVLSLGPRFRIPLTDITMPGPWALLADKPLFESVIEGRVAMICAPALGMLLALAIERLVRTPSQSTRLLGLTAVALALLPIVPAPLKTVERAEVPAFIADGTWKSYVDVDKGETLVPVPLPDSGNAEALHWQTAAGLGFKLPGGYFNGPYGKERIGIYGASPRSTSSLLSDIYYKGVVPQIGEDWQAQAKADFAYWKAGALVLAPQGREDALRAAVEKLVGRPGKWVDGVWVWDLHDGS

SEQ ID NO: 20828 - protein, 393 aa, Thermoplasma volcanium GSS1
MQKYNWVDEEISALKAEGRYVPIRTIESAQGAWVKINGKQVLNMCSNNYLGFANHPETKKAAIEAIEEYGVGAGAVRSIAGTDEIHIKLEEKIASFKHSEAALVYQGGLLANLGTVPALVGKDDIIFSEELNHASIIDGTRLSPAKRIVYKHLSVDDLEKQAKENRSSGKKALVITDGVFSMDGDIAPLPEIVDIAEKYDIMTYVDDAHGEGVLGDHGRGIVNYFHLEDKVDIEMGTFSKALGSMGGFVAGSAEMIDLLKQKARPFLFSSALNPGDAAAVLKAIEILEKDDSLVKKLWENADLLKKSLADLGYNTGHSKTPITPVIIGDEKKTVELSTKLYEEKNVFASPIVYPTVPKGTARIRLMPSAVHTHEDIMTAVNAFGELGKKLHII

SEQ ID NO: 20829 - protein, 291 aa, Triticum aestivum
MGRPPCCDKVGVKKGPWTPEEDLMLVSYIQEHGPGNWRAVPTNTGLMRCSKSCRLRWTNYLRPGIKRGNFNDQEEKLIVHLQALLGNRWAAIASYLPERTDNDIKNYWNTHLKKKLKKMQDAGGNDGGSEGAGAGGVGGGVTKAAAPKGQWERRLQTDIHTAREALRDALSLEPSQAARLAVPELPTPTPGSVTTYASSANNIARLLEGWMRPGDSTKGPEVSGPRRPLGEQPARSHSVLGRGGGPFREIQTGGPGGGGPPENPGGLHGKENSCRPPGPGGPPEGSQGRET

SEQ ID NO: 20830 - protein, 545 aa, Enterobacter aerogenes
MAAKDVKFGNDARVKMLRGVNVLADAVKVTLGPKGRNVVLDKSFGAPTITKDGVSVAREIELEDKFENMGAQMVKEVASKANDAAGDGTTTATVLAQAIVNEGLKAVAAGMNPMDLKRGIDKAVVAAVEELKALSVPCSDSKAIAQVGTISANSDETVGKLIAEAMDKVGKEGVITVEDGTGLQDELDVVEGMQFDRGYLSPYFINKPETGAVELESPFILLADKKISNIREMLPVLEAVAKAGKPLLIIAEDVEGEALATLVVNTMRGIVKVAAVKAPGFGDRRKAMLQDIATLTGGTVISEEIGMELEKATLEDLGQAKRVVINKDTTTIIDGVGDEAAIQGRVTQIRQQIEEATSDYDREKLQERVAKLAGGVAVIKVGAATEVEMKEKKARVEDALHATRAAVEEGVVAGGGVALIRVASKIAGLKGQNEDQNVGIKVALRAMEAPLRQIVLNCGEEPSVVANTVKAGDGNYGYNAATEEYGNMIDMGILDPTKVTRSALQYAASVAGLMITTECMVTDLPKSDAPDLGAAGGMGGMGGMM

SEQ ID NO: 20831 - protein, 97 aa, Enterobacter aerogenes
MNIRPLHDRVIVKRKEVETKSAGGIVLTGSAAAKSTRGEIIAVGKGHILEKGTVQPLDVKVGDIVIFNDGYGVKSEKIDNEEVLIMSESDILAIVEA

SEQ ID NO: 20832 - protein, 279 aa, Brassica napus
MTIINLDTYPRNKPGGAIAIREVWAENLESEFELISGIIDDYPFVSMDTEFPGVIFKSDLRRGNPADLYSLLKSNVDALSLIQVGLTLSDADGNLPDLGAGRRFIWEFNFKDFDVARDAHAPDSIELLRRQGIDFERNCRDGVDSERFAELMMSSGLVCNEEVSWVTFHSAYDFGYLMKILTRRELPCALGEFQRMMKALFGERVYDMKHMMRFCERKLYGGLDRVARTLEVSREVGKCHQAGSDSLLTWHAFQRTRASDFLQDGPEKHAGVLYGLEVF

SEQ ID NO: 20833 - protein, 93 aa, Brassica napus
  misc_feature (14)..(14): Xaa can be any naturally occurring amino acid
  unsure (1)..(93): unsure at all Xaa locations
ILGAVSLLAPVMGXEIPCSKLLPVVMTGVKAKVPPTKFKVGKGVQPPIPIVDQSVVKKTIRPGLVELSEDPNVYARFFATQAFQFIDNVMRSS

SEQ ID NO: 20834 - protein, 449 aa, Streptococcus pneumoniae R6
MLDLLKQTIFTRDFIFILILLGFILVVTLLLLENRRDNIQLKQINQKVKDLIAGDYSKVLDMQGGSEITNITNNLNDLSEVIRLTQENLEQESKRLNSILFYMTDGVLATNRRGQIIMINDTAKKQLGLVKEDVLNRSILELLKIEENYELRDLITQSPELLLDSQDINGEYLNLRVRFALIRRESGFISGLVAVLHDTTEQEKEERERRLFVSNVSHELRTPLTSVKSYLEALDEGALCETVAPDFIKVSLDETNRMMRMVTDLLHLSRIDNATSHLDVELINFTAFITFILNRFDKMKGQEKEKKYELVRDYPINSIWMEIDTDKMTQVVDNILNNAIKYSPDGGKITVRMKTTEDQMILSISDHGLGIPKQDLPRIFDRFYRVDRARSRAQGGTGLGLSIAKEIIKQHKGFIWAKSEYGKGSTFTIVLPYDKDAVKEEVWEDEVED

SEQ ID NO: 20835 - protein, 665 aa, Listeria monocytogenes str. 1/2a F6854
MSRIDEQMVNSIRVLSMDMIEKANSGHPGLPMGAAPMAFSLWKNHLKFNPEHPTWFNRDRFVLSAGHGSAMLYSLLHLFGYDLPMSELKNFRQTGSKTPGHPEFGHTVGVDATTGPLGQGFAMGVGMAMAEAHLGAKFNQPEFPVVDHNTYVLCGDGCLMEGISYEAASLAGHLKLGKLVVLYDSNDISLDGDLNESFSEDIELRFRAAGWQTLRVDDGNDLDALDAAIHLAKTEKSRPTLIEVKTVIGYGSPGKAGKSAAHGSPLGEKELKLAKEAYDWQMPPFELPKTVENQKEFYHSKGRASESSWLRTFNAYKQKYPALAESLQQLMDDNLDTDWDAELPVFDENADKPVATREVSGIVLQELEKKLPNLFGGAADLASSNKTHLKASERFAPGNYAAKNISFGVREFAMGAAINGMTLHGGVQAFGATFFVFSDYLRSAIRSAALMGIPSTFIMTHDSIAVGEDGPTHEPIEHLASFRAMPGLHVIRPADGNETVEAYRFAFTQKEQPTMLVLSRQNLPILPNSAAKAKTGLAKGAYILADSPLDKLDIILLASGSEVHLMTAVRDNLAKKGFGARVVSMPSFDLFDKQSPEYKESILPKAVKKRFAAEMGASYGWHKYLGDTGEILAIDSFGMSGPGDELAERFGFTVENLTELALKQL

SEQ ID NO: 20836 - protein, 227 aa, Arabidopsis thaliana
  misc_feature (210)..(210): Xaa can be any naturally occurring amino acid
  unsure (1)..(227): unsure at all Xaa locations
MTSGGGYGDPSQKIDYVFKVVLIGDSAVGKSQILARYARDEFSLDSKATIGVEFQTRTLVIDHKSVKAQIWDTAGQERYRAVTSAYYRGAVGAMLVYDITRRQTFDHIPRWLEELRAHADKNIVIILIGNKSDLVDQRAIPTEDAKEFAEKEGLFFLETSAFNATNVESAFSTVLTEIFNIVNKKSLAASEDQENGNPGSLAGKKIDIVXPGPGQVIPNKSNMCCNS

SEQ ID NO: 20837 - protein, 265 aa, Zea mays
MAEEYKNNVPEHETPTVATEESPATTTEVTDRGLFDFLGKKEEEVKPQETTTLESEFDHKAQISEPELAAEHEEVKENKITLLEELQEKTEEDEENKTSVIEKLHRSNSSSSSSSDEEGEEKKEKKKKIVEGEEDKKGLVEKIKEKLPGHHDKTAEDDVPVSTTIPVPVSESVVEHDHPEEEKKGLVEKIKEKLPGHHDEKAEDSPAVTSTPLVVTEHPVEPTTELPVEHPEEKKGILEKIKEKLPGYHAKTTEEEVKKEKESDD

SEQ ID NO: 20838 - protein, 161 aa, Oryza sativa (japonica cultivar-group)
MSLIRRSNVFDPFSLDLWDPFDGFPFGSGGSSSGSIFPSFPRGASSETAAFAGARIDWKETPEAHVFKADVPGLKKEEVKVEVDDGNILQISGERNKEQEEKTDQWHRVERSSGKFLRRFRLPDNAKPEQIKASMENGVLTVTVPKEEAKKPDVKSIQISG

SEQ ID NO: 20839 - protein, 199 aa, Thermoplasma volcanium GSS1
MEEEMLIPEEEYQKSGVHIGTQVKSSDMKPYIFKIRNDGLYILDVKKTNSKLIAAGKMLARFDPQDILVVAQRQYAFRPVAKFAEVTGAVSITGRFNPGTLTNPSLKFYKEVKVIVVTDPLADVQAMKEAIKIGIPIIALCDANNKTDFVDLVIPTNNKGRRSLAVIYWLLAREILKNRGTITSYDQFKYTIDDFEAQI

SEQ ID NO: 20840 - protein, 270 aa, Neisseria meningitidis Z2491
MDKIRVAAVQMVSGVSPETNVAAMKRLVARAAEQGVDWVLLPEYWVLMGANDTDKLALAEPLGGGRFQTALSETAKECGVVLFGGTVPLQSPEAGKVMNTLLVYGRDGKRTGLYHKMHLFGFSGLGERYAEADTILAGREVPHLLAEGVSVAAGICYDVRFPEFFRRQLPFDVLMLPAAFTHTTGKAHWELLLRARAVENQCYVVAAAQGGLHENGRRTFGHSMIVDPWGDVLDVLPEGEGIVTADIDANRLNSVRNRLPALKYRVLDAV

SEQ ID NO: 20841 - protein, 407 aa, Lactococcus lactis
MAKANIGKLLLTGVVGGAIALGGSAIYQSTTNQLGNANRSNTTSTKVSNVSVNVNTDVTSAIKKVSNSVVSVMNYQKQNSQSDFSSIFGGNSGSSSANDSLQLSSEGSGVIYKKSGGDAYVVTNYHVIAGNSSLDVLLSGGQKVKATVVGYDEYTDLAVLKISSDHVKDVATFADSSKLTIGEPAIAVGSPLGSQFANTATEGILSATSRQVTLTQENGQTTSINAIQTDAAINPGNSGGALINIEGQVIGITQSKITTTEDGSTSVEGLGFAIPSNDVVNIINKLETDGKISRPALGIRMVDLSQLSTNDSSQLKLPSSVTGGLVVYSVQAGLPAATAGLKAGDVITKVGDTAVTSSTDLQSALYSHNINDTVKVTYYRDGKSATANVKLSKSTSDLETNSSSSSN

SEQ ID NO: 20842 - protein, 133 aa, Archaeoglobus fulgidus DSM 4304
MAEKKKGGRWGIAHIYSSYNNTIITITDITGAEIIARVSGGMIVKADRDEGNPYTAMQAALRAAAIAKEKGIDGVHIKVRAPGGNKHTTPGPGAQAAIRALARAGLKIGRIEDVTPIPHDGTRPPGGKRGRRV

SEQ ID NO: 20843 - protein, 407 aa, Lactococcus lactis
MAKANIGKLLLTGVVGGAIALGGSAIYQSTTNQLGNANRSNTTSTKVSNVSVNVNTDVTSAIKKVSNSVVSVMNYQKQNSQSDFSSIFGGNSGSSSANDSLQLSSEGSGVIYKKSGGDAYVVTNYHVIAGNSFLDVLLSGGQKVKATVVGYDEYTDLAVLKISSDHVKDVATFADSSKLTIGEPAIAVGSPLGSQFANTATEGILSATSRQVTLTQENGQTTSINAIQTDAAINPGNSGGALINIEGQVIGITQSKITTTEDGSTSVEGLGFAIPSNDVVNIINKLETDGKISRPALGIRMVDLSQLSTNDSSQLKLPSSVTGGLVVYSVQAGLPAATAGLKAGDVITKVGDTAVTSSTDLQSALYSHNINDTVKVTYYRDGKSATANVKLSKSTSDLETNSSSSSN

SEQ ID NO: 20844 - protein, 179 aa, Daucus carota
MERADQQARGFQGYRKIHQQQQLPASGTASTGTDNNPAAGDQDCLVREQDRFMPIANVIRLMRKSIPSHAKISDDAKELVQESVSEFISFVTSEANYRCQKEQRKTITAEDVLWAMSSLGFDDYVEPLTFYLDRFREADGGERTALRGEPLVKKSGEHGHRGFLQHLHHGTIWGRIMRF

SEQ ID NO: 20845 - protein, 402 aa, Thermoplasma volcanium GSS1
MNYKFSEIFRYIKPSEIRSLLKYTSDPELISFGGGMPNPESFPVEEMKEILADIMDNYGKKALQYGTTEGLDVLRDELAKYVLKTEGINAKREEIILTTGSQQALYAIAKIFVNPNDPVITEGPTYVGAISAFNANTANMMAIDIDENGMNVDELEAKIKELSQNGLKPKFIYVIPTFQNPAGTTMSLDRRKRLLEISERYEIPIVEDNPYGQLRYDGEPVQSIKSMDKNGNVIYLGTFSKVMAPGLRLGYVIAPREVIDKINLLKQGLDLASDSLSEYIAYEYLKRGAIYRQIPKTVDLYRKKRDLMIKSLEEYFPEAATWTKPHGGMFLWVSLDERIDTTKMLDRALKAKVAYVSGSAFYPHGEKHNSMRLNFTYSDDDKIVEGIKRLAYVINEEMEVVE

SEQ ID NO: 20846 - protein, 407 aa, Lactococcus lactis
MAKANIGKLLLTGVVGGAIALGGSAIYQSTTNQLGNANRSNTTSTKVSNVSVNVNTDVTSAIKKVSNSVVSVMNYQKQNSQSDFSSIFGGNSGSSSANDGLQLSSEGSGVIYKKSGGDAYVVTNYHVIAGNSSLDVLLSGGQKVKATVVGYDEYTDLAVLKISSDHVKDVATFADSSKLTIGEPAIAVGSPLGSQFANTATEGILSATSRQVTLTQENGQTTSINAIQTDAAINPGNSGGALINIEGQVIGITQSKITTTEDGSTSVEGLGFAIPSNDVVNIINKLETDGKISRPALGIRMVDLSQLSTNDSSQLKLPSSVTGGVVVYSVQAGLPAATAGLKAGDVITKVGDTAVTSSTDLQSALYSHNINDTVKVTYYRDGKSATANVKLSKSTSDLETNSSSSSN

SEQ ID NO: 20847 - protein, 83 aa, Daucus carota
WPMAKLGFEDYIEPLKVYLARYREMEGDTKGSGKGAEGSSRKEGVQPVHQGQLVHQGSYPQGVIYGNSQQQTQHMMVPMQGPQ

SEQ ID NO: 20848 - protein, 364 aa, Aspergillus fumigatus
MRSFAPLVLSLLGASAVASADATADTTSDVVSLTKDSFKDFMKEHDLVLAEFYAPWCGHCKALAPKYEEAATELKGKNIPLVKVDCTEEEDLCKENGVEGILLSKNLRGPDNSKPYQGARRLTRLSSTWKTVPTRRGVKVRTSRLEPTKVMDLNDVLFGGPSVGGEDVQAAFYAPWCGHCKLAPKYDELAAAYFALHPDVVVKKVDAKIDNTNATVPDYGVSGFPTIKFSFKVSTESVDVNHGRSEQDFVSFLNEKTGIPRTVGGLLDATAGTIALAQNLVPSIKPVTSHAKAASELEDVYALKYSAALKYARYYLKVEDEELSKLEKYAIKEGAARLEVILIKGRSNILKKDEFEEKEAKDEL

SEQ ID NO: 20849 - protein, 719 aa, GIBBERELLA ZEAE PH-1
MRFVDFAIDLAAVLNASRGIAAKHVAHRGRQIDTYSRTSSIAAALRKRNAQKSPPTEDTTHSATRPNDDVIYEQTTPAARQTEPIVDTSNEGQNIQAEFTRADRVPFNGPTLNLGPSLQQQATSKPAKEDDFDLPPGVDVNIFHTARGSKVLDSLRKQGKPGAAPVRPGVGGPVKAHPMRDWPPRPPPELSFGAQPEKPQGSVARHAELSESVKPVEQEATIVQEKVKKEKLVEEALAPELEKTSPVVPEAEKKIDEDVIQAAKEIAGDSVAPSEAPHALRESSVPSSRISRIWNYGGLAAGMLGGAMTEGFSRAFGGGGEGSVLLSERNMERLVAKLSRMRGAALKLGQMMSFQDTKMLPAPIQQVLQRVQDRADYMPAWQRDRVLVANLGPEWRELFSEFEETPIAAASIGQVHKAVLKNGKRVAVKIQFPGVADSINSDLDNLSILLTATKLLPRGLYLNKTIDNARLELGWECDYERELQCAQRYKELLGSSEKDVFMVPNVYPEASGKQVLTMDFMDGIGVTRIKSFTQEQRDWIGTQLLRLCLREITEFRFMQTDPNWTNFLYNADVNKLELLDFGASREYPDEFVTQYVQLLAAASRSDKAAVKELSESLGYLTGHESRTMVEAHTKSVLTLAEPFLVSAPDVYDFKDQTITERVKALIPVMLQERLAPPPEETYSLHRKLSGAFLLCAKLGSKVPCKAMFEDALVKGGYTR

SEQ ID NO: 20850 - protein, 407 aa, Lactococcus lactis
MAKANIGKLLLTGVVGGAIALGGSAIYQSTTNQLGNANRSNTTSTKVSNVSVNVNTDVTSAIKKVSNSVVSVMNYQKQNSQSDFSSIFGGNSGSSSANDGLQLSSEGSGVIYKKSGGDAYVVTNYHVIAGNSSLDVLLSGGQKVKATVVGYDEYTDLAVLKISSDHVKDVATFADSSKLTIGEPAIAVGSPLGSQFANTATEGILSATSRQVTLTQENGQTTSINAIQTDAAINPGNSGGALINIEGQVIGITQSKITTTEDGSTSVEGLGFAIPSNDVVNIINKLETDGKISRSALGIRMVDLSQLSTNDSSQLKLPSSVTGGVVVYSVQAGLPAATAGLKAGDVITKVGDTAVTSSTDLQSALYSHNINDTVKVTYYRDGKSATANVKLSKSTSDLETNSSSSSN

SEQ ID NO: 20851 - protein, 437 aa, uncultured crenarchaeote 4B7
MTNTQEIYKKKTKNSAKLFTKSKKVHINGVHHNIRFFEPYPFITKSADGKFLKDVDSNKYVDYWMGHWSLILGHAQKQIQKKASGQLKKGWMHGTSNENAISLSEKISKAVPVAEKIRYASTGTEATMYSVRLARAVTGKKIIAKIDGGWHGYTTDLLKTVNWPFDVSESQGLTDEEHIISLPLNNLQESLKILNSIKNDLAGVLVEPILGGGGAIPATQEYLKGIQEMVKTNNALFMLDEIVTGFRFRYGCIYSKMKLDPDIVTLGKIIGGGFPIGVICGKDEIMEHANTSLNSKKNRTYIGGGTFSANPLTMIAGDTTLDVLKNKTNTLYKKLNGLGDNTSKMLKKIFSDDVIVTGKGSLFMTHFPRDEMTEINNAADAAKCDSTKLFNYHFEMITKNGIFFLPGKLGAFSDAHSTVDVKDMKKATEDFVSNFKK

SEQ ID NO: 20852 - protein, 62 aa, Daucus carota
WAMGTLGFEDYIEPLKVYLARYREMEGDTKRSGKGAEGSSRKEVYNRFIRDSLFIKVHIHRV

SEQ ID NO: 20853 - protein, 100 aa, Zea mays
  misc_feature (51)..(51): Xaa can be any naturally occurring amino acid
  misc_feature (64)..(64): Xaa can be any naturally occurring amino acid
  misc_feature (77)..(77): Xaa can be any naturally occurring amino acid
  unsure (1)..(100): unsure at all Xaa locations
GEHAIRRYESGQEPPAAGELCEAICPSNAITIEAPQREDRSRHTTRDDIDXTKCIYWGFCQEAXTIPCIFRAEPNFXCATETHEELLYDKNKLFQNGDPM

SEQ ID NO: 20854 - protein, 480 aa, Desulfovibrio desulfuricans G20
MNRYTKRLQLTLLTTVFALAATMAHAAGVPDFTALSAKAGPAVVNINTEKSVENKIPEQWREFFQNRPHGLPFDDFFNQFERFFNQPQRPRKQRSLGSGFIISPDGYIVTNNHVIAGADVVSVNVESAKGEPDTFEATVVGTDSETDLALLKIDAGRPLATLPFGDSDALQVGEWVMAIGNPFGLDHSVTAGIISALGRDIRSGPFDDFIQTDASINPGNSGGPLINSDGKVIGINTAIIASGQGIGFAVPSNLARRVIEELKTNKRVARGWIGVTIQDIDENTAKALGLKNTRGALIGNVLSGEPADKAGIRAGDIIIKVNRNEISGASDLLRTIADLSPGDKATVVAVRNGAQKTFTLTLGERGTEMAARDETPQQKQNAATGQLGLKLRQMTEQEAGQLGLESTNGLLVVGIQQNSPAAMADLRPGDVILMANLKPVNTVGQLQKIVEGDAAKRGAIMFQIYRRGETFFRTLSLSAE

SEQ ID NO: 20855 - protein, 407 aa, Lactococcus lactis
MAKANIGKLLLTGVVGGAIALGGSAIYQSTTNQLGNANRSNTTSTKVSNVSVNVNTDVTSAIKKVSNSVVSVMNYQKQNSQSDFSSIFGGNSGSSSANDGLQLSSEGSGVIYKKSGGDAYLVTNYHVIAGNSSLDVLLSGGQKVKATVVGYDEYTDLAVLKISSDHVKDVATFADSSKLTIGEPAIAVGSPLGSQFANTATEGILSATSRQVTLTQENGQTTSINAIQTDAAINPGNSGGALINIEGQVIGITQSKITTTEDGSTSVEGLGFAIPSNDVVNIINKLETDGKISRPALGIRMVDLSQLSTNDSSQLKLPSSVTGGVVVYSVQAGLPAATAGLKAGDVITKVGDTAVTSSTDLQSALYSHNINDTVKVTYSRDGKSATANVKLFKSTSDLETNSSSSSN

SEQ ID NO: 20856 - protein, 61 aa, Daucus carota
DPLKAYLARYRELEGDTKGSARGEGSAKKDQVGAHISNQQYAHQGSYSQGMSYVKLTHLLC

SEQ ID NO: 20857 - protein, 454 aa, ASPERGILLUS NIDULANS FGSC A4
MTSNGTNGSATAYHASSTQEAIQAENDFAAHNYHPLPVVFARAQGTSVWDPEGRHYLDFLSAYSAVNQGHCHPKLVAALVDQASRLTLSSRAFYNDVFPKFAEMVTKYFGFDMVLPMNTGAEAVETGIKIARKWGYKVKGIPENEAIILSAENNFHGRTMAAISLSSDPESRENYGPYVPNIGCTIPGTEKPITYNDKAALREAFEKAGSNLAAFLVEPIQGEAGIIVPDDDYLQLARSLCDQHNVLLICDEIQTGIARTGKLLCHEWSGIKPDMVLLGKAISGGMYPVSCVLGRKDVMLTVEPGTHGSTYGGNPLACAVAIRALEVVQEENMVERAEKLGQAFRSGLEAIQNPIIQTVRGKGLLNAIVIDESKTNGHTAWDLCMLMKEKGLLAKPTHQNIIRLAPPLVITEEEIAKALEIIKAAVAELPNLKGAAEDKVVPPPEKKVKITLEN

SEQ ID NO: 20858 - protein, 547 aa, Cochliobolus heterostrophus
MQSSNEGPADIIAKVAGVTQGGKREDDGPYFTNNEGIPWPDAEHSKTIGGIPVASDVFLFQKQQTFNRSKNLERMVHPCGSGAFGYFETTKDVTHLTKADFLKTVGEKTPIFIRFSTVTPGREYPDEARNPRGFAIKFYTGEGNYDIVGLNFPVFFCRDPIQGPDVIRSQWRNPKNFLFDYDAIFDLLANTPEGNHAGLMFFSDHGTPQGWRFNHGYGCHTFKWVNKDGQFVYIKYHFVAEHGQKQFTQEQATQMCGEDPDYSKRDLYETIENGEEVVWKAHVQVMSPEEADPDKLGFDPFDVTKVWPRKQFPMQEFGRLVLNKNPENFHRDVEQAAFSPGSMVPGVEDSPDPLLQFRMFFYRDAQYHRIGVNLHQIPVNCPFMAKSFASLNFDGQMRVDANHAGNKPYAPNSFAHKFRPDVAEAPYQVNDNIMSRKSHYWHEGKKNEYDQAKELWSRVMSVQEKQNTIKNTANMLKFVRYPEIQQYNIGTDLSRGIYDLLPKPAFDFSEVEELSHTAHEWYKEKKFRSIDGERLTGFPPSMPVYNY

SEQ ID NO: 20859 - protein, 637 aa, SYNECHOCOCCUS SP. WH 8102
MTASWMPTAREQQALQRHGHIQELERVDAVWPWLAERHGTITAVDAPHAAHAERFSFAELAQRIATAAAAFQRQGVQEGDVVALFAENSPRWLVADQGLMRCGAADAVRGASAPVEELRYILDDCNATALVVQNADLWRRLDLTASQRQGLRLVLQLEGEPEQGVLGWEAFLASGAGQQSVTPTSARTAIATVLYTSGTTGQPKGVPLTHANLLHQMQSLACVAHPQPGAPVLSVLPIWHAYERSASYYFLSCACTQTYTNIKQLKKDLPRVRPIAMATVPRLWESVQAGFEDVVKTFPPSRQRLLRAALANSAAHRKAVRTARNLLLQPVALPGRMTAAAVAALRWPLHALASALIWPKLRLQLSGGRLAYPISGGGAIAPHIDAFFEAVGIELLVGYGLTETSPVVSCRRPWRNIRGSSGLPMPDTEFRIVDQESGASLGFRERGRVLVRGPQVMGGYLGKPEASAKVLSADGWFDTGDLGMLLPDGSVALTGRAKDTIVLSSGENIEPGPLEEALVASPLIEQVMLVGQDERQLGALLVPRVEPIRAWASEQGLSVGEDLGGRPGDSVLLNLLMRECNLVLRLRPGARGDERLCGVGLVEPFSIENGLLTQTLKQRRDRISRRDAAVIERIYGR

SEQ ID NO: 20860 - protein, 740 aa, Cochliobolus heterostrophus
MASEILGNVTEKAKDLAGSKSTKMAQLAEVTKDVHDDKWRITSDYGVKQNNTDDWLKVATDDQTGPMLLEDQFAREKIHRFDHERIPERVVHARGSGAFGKFTLFESASDVTSAGILTDTSRETPVFLRFSTVLGSRGSADTVRDVRGFAVKFYTEEGNWDIVGNNIPVFFIQDSMKFPDVIHAGKPEPDCEVPQAQSAHNNFWDFQYMHPEATHMFMWAMSDRTIPRSYRMMQGFGVNTYTLINAKGERHFVKFHFTPELGVHSFVWDEALKIAGQDPDFHRKDLWMAIDSGAYPKWKFGIQVIPEAKEHDFEFDILDATKVWPEELVPVRYIGELELNKNPDEFFTQTEQVAFCTSHIVPGIGFSNDPLLQGRNFSYQDTQLSRLGINWEELPINKPVCPVMNFNRDGAMRHTITKGKVNYWPNRFQTVPPATEKEGGYVEFPEKTAGIKVRMQSKKFREHKSQAELFYNSMSENEKMHMKAAFAFELDHCDDPVVYERLCERLCEIDLELAQSVAEMVGGEQPTKQTRPKHNKTAKGLSQMDFQPEKPTIATRMVAILIADGYDKAAYTGMKAALTAAGALPFTISPRRNKIFADGEDRSGSGVVADHHLEGQRSTMYDSVFVPGGARSIETLSKNGRAVHWVREAFGHLKAIGGTGEAVSFIKQAVDLPGMEFSTSGDVVNSYGVVTATAVQPESFKEAVNMVKEAKDFASAYMYAISQHKNFERETAGLNAMVAY

SEQ ID NO: 20861 - protein, 683 aa, Oryza sativa (japonica cultivar-group)
MPQSVLVDRATSESLIGPDWSLNLEICDILNHDPSQAKDVVKSIKKRIGHKNSKIQLLALTLLETLIKNCGDFVHMHVAERDILHEMVKIAKKKPDYHVKEKILILIDTWQEAFGGSRARYPQYYVAYQELLRAGAVFPQRPDSSVPIYTPPQTQPLRNLPPALRNTERQQEAPESSSTPEVPTLSLTEIQNARGVMDVLSEMLNAIDPGNREGLRQEVIVDLVDQCRSYKQRVVQLVNSTTDEELLSQGLSLNDDLQRVLAKHDAIAAGIAVRVEKPKSVQARGDKSPSIKPEGAKQPDQRSSEAASTVTPFEQLALPAPASSSSSKPPVEPAVGPSIDLLSGDDYFKPEPVNSQALVSVGNPPAASANNTLDLVDMFAQSNVGNNPNPAVTSSMLNSNPSLSEPQLYPSQQTVPPQQPSPYSNGLTSNTMAPYDQPSDINATGSWNSQFAHGMLPPQLPPQLPPQQPPNYGQGQDQSGDLPPPPWETQPAESDQFQPGQPRGLAMPSGQIGGIQSQPVQVQPGQVAPLQPMLTGQPTGMQFQQGFGDQLGAQQTQPLHTQYGGMYPTMQGNQSAGMYPQQMAGDFYQQQMYGGQMAGYGYGQQSGGYYAPNAAYGYGGANELSQGMNGLAVQDNSLYGTSASSSFQQPMRPSRPEDSLFGDLVSIAKTKPSKTAANKAGGL

SEQ ID NO: 20862 - protein, 878 aa, Pseudomonas syringae pv. tomato str. DC3000
MADIDARLREDVHLLGELLGNTIREQRGAEFLDKIERIRKGAKAGRRGSAEGAEQLSSSVDGLEDDELLPVARAFNQFLNLANIAEQYQLMHRRDDAQPLPFESRVLSELLDRLKAEGHQPETLARQLSKLEIELVLTAHPTEVARRTLIQKYDAIATQLAALDHRDLNSAERAQITSRLQRLIAEAWHTEEIRRIRPTPVDEAKWGFAVIEHSLWHAIPNYLRKADHVLHAATGLHLPLESAPIRFASWMGGDRDGNPNVTAAVTREVLLLARWMAADLYLRDVDNLAAELSMQQASDALRASVGDSAEPYRAELKRLRERLRATRNWANASLTETLPAPEAVLRDNRELLDPLLLCFQSLHECGMGVIADGPLLDCLRRAVTFGLFLVRLDVRQDSTRHCAAMTEITDYLGLGRYEEWDEQTRIDFLLRELNNRRPLLPSYFKPAADTAEVLATCREVAAAPAASLGSYVISMAGSASDVLAVQLLLKESGLQRPMRVVPLFETLADLDNAGPVIETLLGLPGYRSRLQGPQEVMIGYSDSAKDAGTTAAAWAQYRAQEKLVEICREQQVELLLFHGRGGTVGRGGGPAHAAILSQPPGSVAGRFRTTEQGEMIRFKFGLPDIAEQNLNLYLAAVLEATLLPPPPPQPAWRTMMDQMASDGVSAYRAVVRENPEFVEYFRQATPEQELGRLPLGSRPAKRREGGVESLRAIPWIFAWTQTRLMLPAWLGWEAALSKALERGEGEVLAQMREQWPFFRTRIDMLEMVLAKADADIARLYDERLVTAELQHLGAHLRDLLSQACNVVLGLTGQTQLLAHSPETLEFISLRNAYLDPLHLLQAELLSRSRNREASLDSPLELALLVSVAGIAAGLRNTG

SEQ ID NO: 20863 - protein, 493 aa, Geobacillus kaustophilus HTA426
MKIQNYINGEWKEPSTGQFAPVINPATGETIAEVAMSGPNDIDEAVQAAKEAQKQWALVPAPKRAEILYKVGMLLKERKEQLARMLTMEMGKVIEEARGEVQEGIDMAFYMAGEGRRLFGDTTPSELKDKFAMSVRVPVGVVGIITPWNFPIAIATWKSFPAIVAGNAVVWKPAPETPIMAQELARIFEEAGLPPGVFHVVHGDGPTVGNALVEHPDVKVISFTGSNEVGRMIAEKCGRLLKKVSLEMGGKNAVIVMDDADLTLAVDGIIWSAFGTSGQRCTACSRVIVHERVKQELERRLLEAVKTLKIGNGLDETVKVGPVIHEEALQKIDRYVRIGVEEGAKLLVGGYILREGDYARGFYYAPTIFTDVTPNMRIAREEIFGPVVSIISVRSLDEAIAVNNSVDYGLSSAIFTRDVNNVFRAMRDLDTGIVYVNAGTTGAEIHLPFGGTKGTGNGHRDSGVAALDVFTEWRSIYVDFSGKLQRAQIDTDD

SEQ ID NO: 20864 - protein, 413 aa, Bacillus subtilis subsp. subtilis str. 168
MTKKRVVVTGLGALSPLGNDVDTSWNNAINGVSGIGPITRVDAEEYPAKVAAELKDFNVEDYMDKKEARKMDRFTQYAVVAAKMAVEDADLNITDEIAPRVGVWVGSGIGGLETLESQFEIFLTKGPRRVSPFFVPMMIPDMATGQISIALGAKGVNSCTVTACATGTNSIGDAFKVIQRGDADVMVTGGTEAPLTRMSFAGFSANKALSTNPDPKTASRPFDKNRDGFVMGEGAGIIVLEELEHALARGAKIYGEIVGYGSTGDAYHITAPAQDGEGGARAMQEAIKDAGIAPEEIDYINAHGTSTYYNDKYETMAIKTVFGEHAHKLAVSSTKSMTGHLLGAAGGIEAIFSILAIKEGVIPPTINIQTPDEECDLDYVPDEARRQELNYVLSNSLGFGGHNATLIFKKYQS

SEQ ID NO: 20865 - protein, 293 aa, Oryza sativa
MRTVALGIVAMACLVAIAHGGNFFQDAEVSWGQGRGKIVDGGRGLDLTLDRSSGSGFQSKSEYLFGKIDMQIKLVPGNSAGTVTTFYLSSQGSTHDEIDFEFLGNVTGEPYTLHTNVFTQGQGQREQQFRLWFDPTQSFHTYSIIWNPQHVIFAVDGTPIRDFKNHEARGVAFPKSQPMRVYASLWNADDWATQGGRVKADWSKAPFVASFRDFNADACVWSNGAQRCPVGTMETVAAPAGGRRGGAGGWWNQELSDMSYRRMRWVQRKFMIYNYCTDAKRFPQGTPAECKLR

SEQ ID NO: 20866 - protein, 372 aa, Nicotiana sp.
MNSTYTQFVASKRMGICDPIHQIGMWGDFKNSSFPDTSATLILEVENCLENEMPIMEKRPHNETEELSHGTVGTSNRYEPEARKPIDKVLRRLAQNREAARKSRLRKKAYVQQLENSKLKLLQLEQELERTRQQGQYAGVGLDESQIGYTGTANSGIVAFEMEYGHWVEEQDRQTDELRSALNSQVGEIELQLLVEGCLNHYFDLFRMKAAAAHADVLFLMTGTWKTSAERFFLWIAGFRPSELLKVLTPNVEPLTEQQLRDVCNLMQSCQQAEDALSQGMVKLHQILAEAVAAGTLGDGIILPKMAATIENLEALVRFVNQADHLRKETLLQMSCILTPQQSAQGLLALGEYFKRLRALSSLWTSRTSEPA

SEQ ID NO: 20867 - protein, 326 aa, Bacillus clausii KSM-K16
MPKQQMVPVTILTGFLGAGKTTLLNHFLKGIDEQNVAVIINEFSDTSIDSHLVVPTKEEIIEVNSGCICCNVRADLINRLRNLNEREESLDRIVIETTGMANPAPVIQTFLMDKETAHSFEIDHVITMVDAKHIWQHLAEEEPGQQIAFADVLLINKVDLITDDEKNKLGQRLTHMNPHAKQIYTTFAQVDSRDVVGKKSFDLKNVVKIDPTLLTEMHHHHHNELVTSFVFQEDHPLDLEKVNNWFAYLVQCKGETLFRYKGVLYIKQLEKRVVFQGVHMLFASTEGAPWAKEEKRQSEIVFIGKHLDKQELAKGFHYCRASFFAT

SEQ ID NO: 20868 - protein, 218 aa, Triticum aestivum
NKVEELSFGDQATEHREEASWTSLAGTSKESDLAELSIHGMLSPVGQGLSPAGAQTSAQGSKGKRRTKTEKTVSLPVLRQYFAGSLKDAARSLGVCPTTLKRICRQHGINRWPSRKIKKVDHSLRKLQQIIDSVHGGETAFQLNTLYKDLTNTSVSSDNNLSGSVTVPPHKQSNLTDFEGHRHHRLSSIVPSTSHSHSSCSQSSDSSPSSCSGGSTKH

SEQ ID NO: 20869 - protein, 154 aa, Oryza sativa (japonica cultivar-group)
MSMIRRSNVFDPFSLDLWDPFDGFPFGSGSGSLFPRANSDAAAFAGARIDWKETPEAHVFKADVPGLKKEEVKVEVEDGNVLQISGERIKEQEEKTDKWHRVERSSGKFLRRFRLPENTKPEQIKASMENGVLTVTVPKEEPKKPDVKSIQITG

SEQ ID NO: 20870 - protein, 384 aa, Arabidopsis thaliana
MALQATTTTFCFSGPTFRSTPHSLTSKRPISIKATTSSPSRLSNSRSNLKGRALSSDGSTQESPYVVCFGEMLIDFVPTTSGLSLADAPAFKKAPGGAPANVAVGIARLGGSSAFIGKVGEDEFGYMLANILKDNNVNNDGMRFDPGARTALAFVTLTNEGEREFMFYRNPSADMLLEESELDFDLIKKAKIFHYGSISLITEPCKSAHISAAKAAKEAGVILSYDPNLRLPLWPSADNAREEILSIWETADIIKISEEEIVFLTKGEDPYDDNVVRKLFHPKLKLLLVTEGPEGCRYYTKDFSGRVHGLKVDVVDTTGAGDAFVAGILSQLANDLSLLQDEERLREALMFANACGALTVKVRGAIPALPTKEAVHEALLKAVV

SEQ ID NO: 20871 - protein, 161 aa, Oryza sativa (japonica cultivar-group)
MSLIRRSNVFDPFSLDLWDPFDGFPFGSGSRSSGSIFPSFPRGTSSETAAFAGARIDWKETPEAHVFKADVPGLKKEEVKVEVEDGNVLQISGERSKEQEEKTDKWHRVERSSGKFLRRFRLPENTKPEQIKASMENGVLTVTVPKEEPKKPDVKSIQVTG

SEQ ID NO: 20872 - protein, 420 aa, Ipomoea purpurea
RFSFFNNHDSNSGLFRGRNPGAGNVKAYDVWDGTVAGEALVTHEEFIMAMPGNYVKAIAEAEAETGTKFGCFLTDAFLWFGGDLAAERGGVPWIALWTAGACSISAHLYTDFVRSLAAATPTGNGNVLEQKLKVIPGMSEISIGEMPGEILAKDLQEPFPGMIYNMALKLPGANAVVINSFQNLEPTVTDDIRSKLQKVFNIGPMILRQAAAATPKPPISDDHNCIPWVDSLPPASPPAVYLSFGSGLTPPPDEIVALAEALEAKRAPFLWSLKPHGVKHLPEGFLERTKEFGKIVPWAPQVQVLSHPGVGAFVTHCGWNSTLEAISFGVCLICRPFYGDQQINSRFVESVWEIGVKVEGGKFTKDETLKAINVVLDSDRGKLLKENVVKLKGEAMEAVKPHGSSTKEFQELVHLLNGYF

SEQ ID NO: 20873 - protein, 211 aa, Methanosarcina mazei Go1
MIYLKYNCPLTYLILLKLEGGKTVEEKTDAEQRNATSEEDTEIFENPGEGLEKATFAAGCFWGIEEAFRQIKGVVATAVGYSGGHFKRPTYEQVCTLDTGHAEAVRVIFDPEIVSYKTLLDVFWKIHDPTTKDRQGPDVGKQYRSVIFYHSDEQKAAALASKEELEKSGAFKNPVVTEIVPVSEFYMAEDYHQQYFEKKGFLQNIFRSFKK

SEQ ID NO: 20874 - protein, 386 aa, Arabidopsis thaliana
MVSAPYSEHWRNLRRIGAVEIFSNHRLNSFYTIRRDEIRRLIARLSRSPNASLEFAKVEMNSMLSNLAFNNIIRMVTGKCYYGDGAEDDPEAKRVRQLIAEAMSCFGAGHAADHLPMLRWITDFERRVKKIAARLDEFFQRLVDEKRVAKEKKENTMIDHLLSLQVSQPEYYTDHTIKGTMLSLILAGTDTSAVTLEWALSSLLNNPEVLKKVRDEIDNQIGLDRLLEESDIPNLPYLQNIVSETLRLYPAGPLLVPHISSEDCKVGGYDMPCGTMLLVNVWAIHRDPRLWDDPASFKPERFEKEGETHKLLTFGLGRRACPGSGLARRLVSLSLGSLIQCFEWERIGEEEVDMTEGGGLTMPRAIPLVAMCRARAFVGKIPHESG

SEQ ID NO: 20875 - protein, 159 aa, Oryza sativa (japonica cultivar-group)
MSLIRRGNAFDPFSLDLWDPVDGFPFGSGGSSSSSGSLFPRANSDAAAFAGARIDWKETPEVHVFKADVPGLKKEEVKVEVDDGNILQISGERSREQEEKSDKWHRVERSSGKFLRRFRLPENTKPEQIKASMENGVLTVTVPKEEPKKPDVKSIQISG

SEQ ID NO: 20876 - protein, 808 aa, Arabidopsis thaliana
MANAERVITRVHSQRERLDATLVAQKNEVFALLSRVEAKGKGILQHHQIIAEFEAMPLETQKKLKGGAFFEFLRSAQEAIVLPPFVALAVRPRPGVWEYVRVNLHDLVVEELQASEYLQFKEELVDGIKNGNFTLELDFEPFNAAFPRPTLNKYIGDGVEFLNRHLSAKLFHDKESLHPLLKFLRLHSHEGKTLMLNNRIQNLNTLQHNLRKAEEYLMELKPETLYSEFEHKFQEIGLERGWGDTAERVLNMIRLLLDLLEAPDPCTLENFLGRIPMVFNVVILSPHGYFAQDNVLGYPDTGGQVVYILDQVRALETEMLQRIKQQGLNITPRILIITRLLPDAAGTTCGQRLEKVYGSQYCDILRVPFRTEKGIVRKWISRFEVWPYLETFTEDVAAEISKELQGKPDLIIGNYSDGNLVASLLAHKLGVTQCTIAHALEKTKYPDSDIYWKKLDEKYHFSCQFTADLIAMNHTDFIITSTFQEIAGSKDTVGQYESHRSFTLPGLYRVVHGIDVFDPKFNIVSPGADMSIYFAYTEEKRRLTAFHLEIEELLYSDVENEEHLCVLKDKKKPIIFTMARLDRVKNLSGLVEWYGKNTRLRELVNLVVVGGDRRKESQDNEEKAEMKKMYELIEEYKLNGQFRWISSQMNRVRNGELYRYICDTKGAFVQPALYEAFGLTVVEAMTCGLPTFATCNGGPAEIIVHGKSGFHIDPYHGDKAAESLADFFTKCKHDPSHWDQISLGGLERIQEKYTWQIYSQRLLTLTGVYGFWKHVSNLDRLESRRYLEMFYALKYRPLAQAVPLAHEE

SEQ ID NO: 20877 - protein, 174 aa, Triticum aestivum
MAPAVMASSATTVAPFQGLKSTAGLPVSRRSSGSLGRVSNGGRIRCMQVWPIEGIKKFETLSYLPPLSTEALLKQVDYLIRSKWVPCLEFSKVGFVFREHNSSPGYYDGRYWTMWKLPMFGCTDATQVLNEVEEVKKEYPDAYVRVIGFDNLRQVQCVSFIAFRPPGCEESGKA

SEQ ID NO: 20878 - protein, 316 aa, Rubrivivax gelatinosus PM1
MSSQLEQLKAYTTVVADTGDFKQIAAFAPRDATTNPSLILKAVSQPAYAPLLAQTAAAHRGQPLDAIVDRVLVRFGCEILNVVPGRVSTEVDARLSFDAAATVARAQRIMALYESEGIARERVLIKIAATWEGIQAAKALEHHGIHCNLTLLFAFCQAVACGESGVRLISPFVGRIHDWHKKAAGARWDEAANAGANDPGVKSVAQIWRYFRKFGIETEVMGASFRNTGQILALAGCDLLTISPELLAQLQASEATVMRALDVDAALHCDAKALSFNEASFRYALNEDAMATEKLAEGIRAFAVDAAQLDRLIQAL

SEQ ID NO: 20879 - protein, 455 aa, Bacillus licheniformis ATCC 14580
MEKDMQKLERTMTSRHIMMMALGGAIGAGLFKGSSKAIDLAGPSVMIPYLIGGVILLFIMQGLAEMAVRNSEARTFRDLVQSILGPYAAYFLDWIYWKMWVLNIAAEAVVAAMFLQYWLPGLPIWVLALFVSLVITSVNLLSVKSFAETEYWLALIKITVIVVFIISGFILLFFSFGQHSAVGFTHLTDHGGFFPNGAGGLITAMLVVIYSYGGTEIIGVTLAETKNPEKVVPKAVRGTLTRIIAFYLLPFFVIVSLIPWNQVNGVSESPFVMVFKMIGVPGADHLMNAVILLAVISSMNSGLYGASRILYTQASDGRMPKIFSRLSARKVPVYSILLCTSFLYLGVLFSLFAGSQTFEYLMGSLGYTVLVIWMLIAAAHLKSRKRNQTAGNGYYVKWFPYTTWVAIISLTAILIGVILTTSIVITLVTAGIYLLISAAYFFKGRNQTAGQTAAS

SEQ ID NO: 20880 - protein, 407 aa, Lactococcus lactis
MAKANIGKLLLTGVVGGAIALGGSAIYQSTTNQLGNANRSNTTSTKVSNVSVNVNTDVTSAIKKVSNSVVSVMNYQKQNSQSDFSSIFGGNSGSSSANDGLQLSSEGSGVIYKKSGGDAYLVTNYHVIAGNSSLDVLLSGGQKVKATVVGYDEYTDLAVLKISSDHVKDVATFADSSKLTIGEPAIAVGSPLGSQFANTATEGILSATSRQVTLTQENGQTTSINAIQTDAAINPGNSGGALINIEGQVIGITQSKITTTEDGSTSVEGLGFAIPSNDVVNIINKLETDGKISRPALGIRMVDLSQLSTNDSSQLKLPSSVTGGVVVYSVQAGLPAATAGLKAGDVITKVGDTAVTSSTDLQSALYSHNINDTVKVTYYRDGKSATANVKLFKSTSDLETNSSSSSN

SEQ ID NO: 20881 - protein, 400 aa, Ralstonia eutropha JMP134
MIANTDDLAYLMTREQGKPLDEAKGEIAYAASFLEWFAEEAKRVDGEVLASPAADKRLVTLRQPVGVCAAITPWNFPAAMITRKAAPALAAGCAIVIKPAELTPLSAFALAELAHRAGVPAGVLQVVTGDARTIGAVLTASPIVRKLSFTGSTEVGRILMAQSAATVKRLSLELGGNAPFVVFDDADVDAAVDGAIAAKFRNGGQTCVCANRFYIQDGIYDAFATKFAQRASQLRVGNGLEQGVVIGPLIEEAAVEKVTSLVDDATSKGGRLLTGGLKHQLSGTYYAPTVIADATATMRVAREEIFGPLAPLFRFKRDEDAVAAANATEYGLAAYLYTRDIARAWRTAEALEYGMVGLNTGLISNEVAPFGGIKQSGLGREGSRHGIEEYLETKYLCLQM

SEQ ID NO: 20882 - protein, 59 aa, Physcomitrella patens
MPIGSRGAYTFVDVLLAIILPPLGVFLKYGLQSEFWICLVLTILGYLPGIIYAIYVIVG

SEQ ID NO: 20883 - protein, 408 aa, Lactococcus lactis
MAKANIGKLLLTGVVGGAIALGGSAIYQSTTNQLANNSRSNTTSTKVSNVSVNVNTDVTSAIKKVSNSVVSVMNYQKDNSQSSDFSSIFGGNSGSSSSTDGLQLSSEGSGVIYKKSGGDAYVVTNYHVIAGNSSLDVLLSGGQKVKASVVGYDEYTDLAVLKISSEHVKDVATFADSSKLTIGEPAIAVGSPLGSQFANTATEGILSATSRQVTLTQENGQTTNINAIQTDAAINPGNSGGALINIEGQVIGITQSKITTTEDGSTSVEGLGFAIPSNDVVNIINKLEADGKISRPALGIRMVDLSQLSTNDSSQLKLPSSVTGGVVVYSVQSGLPAASAGLKAGDVITKVGDTAVTSSTDLQSALYSHNINDTVKVTYYRDGKSNTADVKLSKSTSDLETSSSSSSN

SEQ ID NO: 20884 - protein, 414 aa, Archaeoglobus fulgidus DSM 4304
MTIDDVLSLLEKAESEDLNPRTGRLFAYVYETGDENIRKVAEKALVRFAEKNLLDFTVFRSAVFFEKEVVGFARNLMHGDAAVGSFTFGGTESIMLAVKAARDYYRKKEGTAEVPEILAPISIHPAFLKAADYLGLKVVRLPVKDAKGDVDAFAEAVSGKTALIALSAPNWPFGTIDPVEEIAEIAAERNVLLHVDACLGGFILPFFEMLGEKIPKFDFRVEGVTSISLDAHKYGYAPKGASVVLFRDAELKKCSMFVDVTSPGYVFVNQAVLSSRPEGPLAAAFAVIKYLGVEGYKELASKILSARDKIYRGLKSLGFESVGEVESSVLAMTNPDVDLMGFVNNMKKLGWQLHLQKGLKEYDIPDNIHLTLSPVHDGVAEKFVEDAAKALEMEPELTLSRFTQWLKGGSLPKS

SEQ ID NO: 20885 - protein, 536 aa, Chlamydia muridarum Nigg
MSFKSIFLTGGVVSSLGKGLTAASLALLLERQGLKVAMLKLDPYLNVDPGTMNPYEHGEVYVTDDGVETDLDLGHYHRFSSVQLSKHSTATSGQIYTRVITKERNGEFLGSTVQVIPHVTNEIINVIQACAEHHKPDVLIIEIGGTIGDIESLPFLEAVRQFRCEHPQDCLSIHMTYVPYLKSAKEIKTKPTQHSVQNLRSIGISPDVILCRSEVSLSSEVKRKISLFCNVPENAVFNAIDLENSIYEMPLLLARENIVDFLLSKFGFSPKSLDLTDWQNLVTTLCDGNRHLVRIGLVGKYLEHKDAYKSVFESLSHASIPANCSLEIVPISPESEALTNQLSQCDGCLIPGGFGTRSWEGKIAAARYCRDNNIPCFGICLGMQALVVEYARYALSLPLANSLEMDPNTPDPVVCMMQGQDTMIKGGTMRLGAYPCQITPKSLAFEAYKTDLVQERHRHRYEVNPAYVDLLQKNGLRIVGVCPQGDLCEIIEIPNHRWMLGVQFHPEFLSKLAAPHPLFVKFLSAALDYSLEKGRE

SEQ ID NO: 20886 - protein, 400 aa, Rubrivivax gelatinosus PM1
MVWMMAAGALVFFMQAGFALLESGMSRAKNAINVIMKNYCDTCFGAVAYWAVGFGLMFGANASGWIGTDRFLPHAMPEADYGLLFFQMMFAATAATIVSGAIAERARFWAYIVSSVLITGLIYPVFGSWAWGSLFSGQGWLREMGFIDFAGSTVVHSVGGWSALAAILVIGPRLGRFGPNGEARPMLGHNLTSVALGGFILWLGWFGFNGGSTAAATVGIGKIVLNTHLAGAAGAIGALAVLALGRQPVLMTAAVNGSIAGLVGITAGCHVMEPAYALLTGFVAGGLSVLAGWLLEAGRIDDVVGAVSVHAVGGVWGTLAAGLFKHDAMFDLRQLGVQAIGCGVAFAWSFGTALLMYWLLARGVGLRASTLDEQRGLDFTEHYEIGYPEFQQDAVHRGKR

SEQ ID NO: 20887 - protein, 633 aa, Lactobacillus plantarum WCFS1
MCGFAGCLTDRTKADNAAYDQTIHEMTKMIVHRGPDDDGYFADDNITMGFRRLSIIDLAGGHQPLSYDNERYWMTFNGEIYNYVELREQLKQEGYEFKTSSDSEVILAMYAKYHADATKYLRGMFAFVIWDKQEKTLFAARDQFGIKPFYYAISGDDFYYASESKAIYKILKDKTFDKNALQDYMTFQFVPEPETLTKEIKMLAPGCSLTKKLGSAPRIDRYYHREFHPVERSEDEYAQKIKDALIDSVKIHMRSDVPVGSFLSGGIDSSIIVAIAKNFNPNLETISVGFEREGYSELDVAQETAEKLGVKNYSMTITPEAFMKAFPHFVWSMDDPLADPAAVPQYFLAKEAVKHVKVCLTGEGADELFGGYTIYHEPESLKPFRYTKPINGALKRIALMMPEGMRGRSFLLRGTTPLENRYVGNAFIFGEQEKQAFFKNYNQNHPFQSITQPLYDESVDYDPISRMQFIDMHTWLNGDLLHNADRTTMAHSLELRTPFVDREVYNLAAEIPADLRISHGTTKYILRKAVEDIVPAHVLHRKKLGFPVPIRFWLKDEMYDWAKQIINDSQTDQYFNKDYFLKLLDDHKAGVRDNSRKLWTVLTFMMWHRLYVESDHLMDSPEANAVAEKVEEF

SEQ ID NO: 20888 - protein, 339 aa, Synechocystis sp. PCC 6803
MLKIGINGFGRIGRLVARIAMANPQVTLVGINDLVPASNLAYLFKYDSTHGSYGGTVVAKEEGIVIDDQFIPCFSQRNPAQLPWGDLGADYVVESTGLFTTYATAENHLKAGAKRVIISAPSKDPEKIPTFVVGVNHLNYNADTDKIVSNASCTTNCLAPIAKILDDNFGIVEGLMTTVHAMTATQPTVDGPSKKDFRGGRGAAQNIIPSSTGAAKAAALVLPQLKGKLTGMAFRVPTPNVSVVDLTFKTEKATSYEEICAAMKTAAEGELKGILGYTADDVVSMDFRTDPRSSIFDAGAGIGLNSNFFKVVSWYDNEWGYSCRVIDLMLTMASKDGLV

SEQ ID NO: 20889 - protein, 284 aa, Arabidopsis thaliana
MAITYLLPLFLSLIITSSVSANFQRDVEITWGDGRGQIKNNGELLTLSLDKSSGSGFQSKNEYLFGKVSMQMKLVPGNSAGTVTTLYLKSPGTTWDEIDFEFLGNSSGEPYTLHTNVYTQGKGDKEQQFKLWFDPTANFHTYTILWNPQRIIFTVDGTPIREFKNMESLGTLFPKNKPMRMYSSLWNADDWATRGGLVKTDWSKAPFTASYRGFQQEACVWSNGKSSCPNASKQGTTTGSWLSQELDSTAQQRMRWVQRNYMIYNYCTDAKRFPQGLPKECLAA

SEQ ID NO: 20890 - protein, 407 aa, Lactococcus lactis
MAKANIGKLLLTGVVGGAIALGGSAIYQSTTNQLGNANRSNTTSTKVSNVSLNVNTDVTSAIKKVSNSVVSVMNYQKQNSQSDFSSIFGGNSGSSSANDGLQLSSEGSGVIYKKSGGEAYVVTNYHVIAGNSSLDVLLSGGQKVKATVVGYDEYTDLAVLKISSDHVKDVATFADSSKLTIGEPAIAVGSPLGSQFANTATEGILSATSRQVTLTQENGQTTSINAIQTDAAINPGNSGGALINIEGQVIGITQSKITTTEDGSTSVEGLGFAIPSNDVVNIINKLETDGKISRPALGIRMVDLSQLSTNDSSQLKLPSSVTGGVVVYSVQAGLPAATAGLKAGDVITKVGDTAVTSSTDLQSALYSHNINDTVKVTYYRDGKSATANVKLSKSTSDLETNSSSSSN

SEQ ID NO: 20891 - protein, 730 aa, Cochliobolus heterostrophus
MVRSNVLTAIAAICHVAHAVCPYMDDQPLARREGATAMSTDDFMKQYEIDDSKAYLTSPVGGPQPDQESLSAGERGPSLLEDQILRRKIMSFDHERVPERAVHARGAGAHGTFKSYGDWSNITGASFLANSEKETPVFIRFSTVAGSRGSADTARDVHGFAVRFYTDEGNFDIVGNNIPVFFIQDAIKFPDLIHAVKPKPDREIPQAATAHDSAWDFFSQQPSTMHTLLWAMSGHGTIRSYRHTDGWGVHTFRFVRDDGKSKLVKFRFRSLQGKASLLWEEAQTTAGMNADMHRQDLFESIENGYYPEWIFEAQIMEESDQLRFGFDVLDPTKIVPEDIVPFTPLGKLTLNRNPRNYFAETEQIMFQPGHLVRGIDVSDDPLLQGRMFSYLDTQLNRNGGPNFEQIPINQPRVPVHNNERDGAGQMYIPLNTAAYSPNTLNGGYPKQATQAEGRGFFTAPSRSVSGNLVRTVSSTFADNWSQPRLFYNSLSAVEQQFVINAIRFETSQLQSEVVKQNVLIQLNRISHDIATRVATALGMTAPAPDDKFYHNNKTIGVNPAGEPLLKIEGLKVGYLTSAGSTGDKGKALKAALKDEKVSLTVVAEHLGAGIDQTYSATSAVNFDAIIVDGSASALFAPAGSLANSNSTAAKGRSTLYPAGRPLEILQTGYQFGKPVGVLGASNSTLSAAGVVAGTPGVYSFDSASDMAAVVTKITEGLRTFKFLDRYPLDN

SEQ ID NO: 20892 - protein, 228 aa, Penicillium citrinum
MGFTDFVSDAGLSLANNYLATRSYIVGHAPSQADVVTYKAFTASPDAEKYPHVARWYKHIASYESEFPTLPGDASKAFTAYGPEGSEASANPKDKPAEEEEEEDLFASDSEDEDPAVVAERNKNLEEYKKKKAAKGPKPAAKSLVTLEVKPWDDETNLEELEANVRAIEMDGLVWGASKFVAVGFGIKKLQINLVVEDEKVSTDELQAQIEEDEDHVQSTDVAAMQKL

SEQ ID NO: 20893 - protein, 144 aa, Arabidopsis thaliana
MSGDEAAPVVVPPPVAEPAAIPEDMDLMTALELTLRKARAYGGVVRGLHECAKLIEKRVAQLVVLAEDCNQPDYVKLVKALCADHEVRLLTVPSAKTLGEWAGLCKIDSEGNARKVVGCSCLVVKDFGEETTALSIVNKHIASQ

SEQ ID NO: 20894 - protein, 391 aa, Glycine max
MASRVSIGNLTSSAPYINSPHFRSPLKISNNPSLQNASHKVLMRDKTVLVTGGAGYIGSHTVLQLLLGGFRAVVLDNLENSSEVAIHRVRELAGEFGNNLSFHKVDLRDRAALDQIFSSTQFDAVIHFAGLKAVGESVQKPLLYYNNNLTGTITLLEVMAAHGCKKLVFSSSATVYGWPKEVPCTEEFPLSAMNPYGRTKLIIEEICRDVHCAEPDCKIILLRYFNPVGAHPSGYIGEDPRGIPNNLMPFVQQVAVGRRPALTVFGNDYNTSDGTGVRDYIHVVDLADGHIAALLKLDEPNIGCEVYNLGTGKGTSVLEMVRAFEMASGKKIPLVMAGRRPGDAEIVYASTKKAERELKWKAKYGIDEMCRDQWNWASKNPYGYGDQGSTD

SEQ ID NO: 20895 - protein, 515 aa, Zea mays
MQPDPQGPGRGKAGGANAHPRLPPPVTAGSAGRPASVLPHKTDNVRDHYRIGKKLGQGQFGTTYQCVGKADGGEYACKSIPKRKLLCREDYEDVWREIQIMHHLSEHPNVVRIRGAYEDALFVHLVMELCAGGELFDRIVAKGHYTERAAAQLIKTIVGVVQGCHSLGVMHRDLKPENFLFASTPEDAPLKATDFGLSVFYKPGDKFSDVVGSPYYVAPEVLQKCYGPESDVWSAGVILYILLCGVPPFWAESEAGIFRQILRGKLDLESEPWPSISDSAKDLVRKMLIRDPTKRFTAHEVLCHPWIVDDAVAPDKPIDSAVLSRLKNFSAMNKLKKMALRVIAESLSEEEIGGLKELFKMIDTDNSGTITYDELKDGLKRVGSDLMEPEIQALMDAADIDNSGTIDYGEFLAATLHMNKLEREESLVSAFAFFDKDGSGFITIDELSQACEQFGLSDVHLEDMIKDVDQNNDGQIDYSEFAAMMRKGNAGGAGRRTMRNSLHVNLGELLKPTET

SEQ ID NO: 20896 - protein, 468 aa, Bartonella quintana str. Toulouse
MSYDVVVIGAGPGGYVAAIKAAQLGFKTAIIEKRMTLGGTCLNVGCIPSKALLHTSEVFAETQHGFEKLGISISKPKLNLEQMMAHKKAVVTANTSGISFLMKKNKIDTFFGTAKILSAGQIEVVARDGNKQTIATKNIVIATGSESSGIPGVNVKIDEKIIVSSTGALALEKVPMRMIVVGAGVIGSELGSVWSRLGSKVTIIEYLNKVLGSMDGEVSRQFQKLMEKQGIEYKTGTKVTAIMQSGSTAQVTFETIKGGASETLEADVVLIATGRFPYTEGLGLVEAGVKLDERGFIAIDANWQTNIPGIYAIGDVVKGPMLAHKAEEEGVAVAEILAGQKGHVNFDVIPSVVYTQPEIASVGKTEEELKAAGIDYNVGKFLFTANGRARAMQKSDGFVKILADKKTDRVLGGHILGFGASEMIHEIAVLMEFGGSSEDLGRCCHAHPTLSEAVREAALATFAKPLHI

SEQ ID NO: 20897 - protein, 451 aa, Triticum aestivum
MATAHQSDGAAAANGKSNGHAVPPAANGESNGHAEAAPVNGESNGHAAAAAAEPEEAVEWNFAGGKDGILATTGAKMSIRAIRYKISASVQESGPRPVLPLAHGDPSVFPAFRTAVEAEDAVAAALRTGQFSCYPAGVGLPAARSAVAEHLSQGVPYKLSADDIFLTAGGTQAIEVIIPVLAQTAGANILLPRPGYPNYEARAAFNKLEVRHFDLIPEKGWEVDIDSLESIADKNTTAMVIINPNNPCGSVYSYDHLAKVAEVARKLGILVIADEVYGKLVLGCAPFIPMGVFGHTTPVLSIGSLSKSWIVPGWRLGWVAVYDPRKILEETKISTSITNYLNVSTDPATFIQAALPQILENTKEDFFKGIIGLLKESSEICYREIKENKYITCPHKPEGSMFVMVKLNLHLLEEIHDDIDFCCKLAKEESVILCPGRTAFSHLSTEIKCME

SEQ ID NO: 20898 - protein, 303 aa, SYNECHOCOCCUS SP. WH 8102
MTATAHQTADWGDQAIWRWRGWSCHWRVLGQDNDPAIVLLHGFGAASGHWRHTAPRLASQGWRVFSLDLLGFGASDQPAIPLDNRVWGQQVNAFVEQVVQRPAVLLGNSLGALTALTAAVLKPEQIRAVVAAPLPDPALIQPIPPRRPPWQRRWRRRLLRVVLRLLPLELLVPLIARTGLIRSGLQGAYHQSIASDQELLQLIARPARRPTAARALRAMSLGMALRPRGATAPGLLKQLHCPLLLIWGQQDRFVPLSVTRQIHACRPHTELQVIDACGHCPHDERPDQFVALVLPWLDRNLGV

SEQ ID NO: 20899 - protein, 413 aa, Burkholderia fungorum LB400
MPIYKGTLGPDVIDIRKLYGQTGKFTYDPGFMSTAACNSAITYIDGDKGELLYRGYPIDNLAENADFLETCYLLLKGELPNAQQNAEFVKTVTNHTMVHEQMHFFFRGFRRDAHPMAILVAAVGALSAFYHDSLDINNPRHREVSAIRMIAKLPTLVAMAYKYSIGQPFAYPKNDLSYSANFMHMMFSNPCEEYKVNDVLVRALDRILILHADHEQNASTSTVRLAGSSGANPFACIAAGIACLWGPAHGGANEAALNMLEEIGSVDNIPEFIKQVKDKNSGVKLMGFGHRVYKNYDPRAKLMRETCHEVLEELGLHDDPLFKLAMALEKIALEDEYFVSRKLYPNVDFYSGIVQRALGIPTSMFTCIFAMARTVGWIAQWNEMIADPEQKIGRPRQLFIGDTQREAKPIAQR

SEQ ID NO: 20900 - protein, 286 aa, Arabidopsis thaliana
MAFTLGGRARRLVSATSVHQNGCLHKLQQIGSDRFQLGEAKAIRLLPRRTNMVQELGIREEFMDLNRETETSYDFLDEMRHRFLKFKRQKYLPEIEKFKALAIAQSPKVMVIGCADSRVCPSYVLGFQPGEAFTIRNVANLVTPVQNGPTETNSALEFAVTTLQVENIIVMGHSNCGGIAALMSHQNHQGQHSRWVMNGKAAKLRTQLASSHLSFDEQCRNCEKESIKDSVMNLITYSWIRDRVKRGEVKIHGCYYNLSDCSLEKWRLSSDKTNYGFYISDREIWS

SEQ ID NO: 20901 - protein, 121 aa, Brassica napus
ASMIQDNLFIGGGLAARSVYTLQHLGITHILCLCANEIGQSDTQYPDLFKYKNFSITDDEDSKIEGIFQEALDFINHGEETGGKILVHCFEGRSRSATVVLAYLMLRKNLTLLEAWSRLRK

SEQ ID NO: 20902 - protein, 1423 aa, Nostoc punctiforme PCC 73102
MTNREELMKNESTSASNADVNFLIGGGEMGARMREWDWSKSSLGPTQQWPQSLKTAVRIMLTCRQPMFVWWGEELINLYNDPYKAIIGGKHPEALGQPASCVWREIWDQIGPRAESAMLKNEGTYDEALLLIMERNGYPEETYYTFSYSPVPNDQGDTGGIICANTDDTQRIIGERQLALLRELAARTADARTFDQACTLSANCLESNPYDLPFAMIYLVDPDEQQVFLTGTCRIGQNHVAAPETVDLDSDCVWPFAEVIETHQAKLISDLEVSFSSLPCGIWERSPHQAIAVPIAPSGQTGKAGILIAGLNPFRLFDDNYKRFIDLVAAQIAASIANAQAYEEERKRAEALAELDRAKTVFFSNVSHEFRTPLTLMLGPLEETLANCATLLPAHEREQLEMVQRNGLRLLKLVNSLLDFSRIEAGRVQASYEPTNLATFTAELASVFRSAVERAGMELSVNCPSLPAPVYVDREMWEKIVLNLLSNAFKFTMTGKIAVSLQWANDHIEFAVKDTGIGIPAEEIPHLFKRFHRVKGAQGRTFEGSGIGLSLVQELVQMHGGTVKVTSVLGAGSCFTISIPTGYAHLPPARISAPRTLASTALGATPYLEEALRWLPEEERETRGGGDKGSVAKEFSLSPYTLIPLSSSSARILLADDNSDMRDYVKRLLSQQYEVESVADGLAALDSARGRVPDLVLTDVMMPGLDGFGLLQELRANPQTKKVPIILLSARAGEEARVEGLEAGADDYLIKPFSARELLARVEAALKMAHLREEAMQREQGLRIEAEVAKAHLETVLAGIQDQFFVLDREWHYTFVNDRVAEVVGIQKEELLDRIIWELFPDVAKSEFYTQVHRAMAEQTVVQFEYFYPAWQRWFENRVYPFGEGVSIFVTEISDRKQAEKALRESEEQFRNMADNAPFMVWVTDTNNYCTYLSRSWYDFTGHNEETSLGFGWLNAVHPEDCDEVRNIFLEASKRCEAFRMEYRLHRKDGEYRWTINAANPWFGVDGQFKGYIGSVIDITERKTAEAERDRLLELEQVARTEAETANRIKDEFLAVLSHELRSPLNPILGWARLLQTREFQPAEIKKAIATIERNAKLQAQLIEDLLDVSRILQGKLNLKMFPVNLVLVIEAGLETVRLAAEAKDIQIQTMLDASLGQVLGDSDRLQQVIWNLLSNAVKFTPEEGKINIQLERIDSQAQITVSDTGKGISPEFLPHVFEYFRQADGTTTRRFGGLGLGLAIVRHLIELHGGTIWAESLGEGQGAIFRVRLPLIKKELTPKQQINIDPINASSTTEILTGIQILVVDDDDDTREFHTFVLEQAGAKVMAVASAKEALQALAESEPDILLSDIGMPETDGYMLMRQIRALQLKQAKQIPAIALTAYAGEINQQQAIASGFQRHLSKPVEPDELVKAIATLIGRNG

SEQ ID NO: 20903 - protein, 891 aa, Schizosaccharomyces pombe
MEYRTNNVPVGNETKSAALNALPKIKISDSPNRHHNLVDAFMQSPSYSTQPKSAVEPLGLSFSPGYISPSSQSPHHGPVRSPSSRKPLPASPSRTRDHSLRVPVSGHSYSADEKPRERRKVIGNYVLGKTIGAGSMGKVKVAHHLKTGEQFAIKIVTRLHPDITKAKAAASAEATKAAQSEKNKEIRTVREAALSTLLRHPYICEARDVYITNSHYYMVFEFVDGGQMLDYIISHGKLKEKQARKFVRQIGSALSYLHQNSVVHRDLKIENILISKTGDIKIIDFGLSNLYRRQSRLRTFCGSLYFAAPELLNAQPYIGPEVDVWSFGIVLYVLVCGKVPFDDQNMSALHAKIKKGTVEYPSYLSSDCKGLLSRMLVTDPLKRATLEEVLNHPWMIRNYEGPPASFAPERSPITLPLDPEIIREMNGFDFGPPEKIVRELTKVISSEAYQSLAKTGFYSGPNSADKKKSFFEFRIRHAAHDIENPILPSLSMNTDIYDAFHPLISIYYLVSERRVYEKGGNWNRIAKTPVSSVPSSPVQPTSYNRTLPPMPEVVAYKGDEESPRVSRNTSLARRKPLPDTESHSPSPSATSSIKKNPSSIFRRFSSRRKQNKSSTSTLQISAPLETSQSPPTPRTKPSHKPPVSYKNKLVTQSAIGRSTSVREGRYAGISSQMDSLNMDSTGPSASNMANAPPSVRNNRVLNPRGASLGHGRMSTSTTNRQKQILNETMGNPVDKNSTSPSKSTDKLDPIKPVFLKGLFSVSTTSTKSTESIQRDLIRVMGMLDIEYKEIKGGYACLYKPQGIRTPTKSTSVHTRRKPSYGSNSTTDSYGSVPDTVPLDDNGESPASNLAFEIYIVKVPILSLRGVSFHRISGNSWQYKTLASRILNELKL

SEQ ID NO: 20904 - protein, 482 aa, Shewanella sp. MR-4
MTPASASSPHEPLPTSVFLAIFSAVFLPMFLAAVDQTLLATATPAIVEDLGGLRQASWITIGYMLAMAASVPIYGWLGDNYGRAKILMIALVVFALGSIVSASAGTMDHMIAGRILQGLGGGGLMSLSQSLVGELVPIRQRARFQGYFAAMFTLASVGGPVIGGFVVHAYSWHWLFWANIPLVMLAVWRLNRLHKQSVKPVRQGRFDLLGVLLFPTIITALLYWLSVAGQDFAWLSATSLGFMGFICVGALVLLWWERRRESPFLPLDLLANKAIYMPLFTAALFAACLFAMIFFLPIYLQVGLHTNPAKTGLLLMPMTFGIVTGSTIAGRLLSRDVAPKWLPTFGMGLAFIGLLLIGLVPPNANLIGALGVLVGIGLGTVMPSVQLVVQSVSGKARLSQITAMVSLSRSMGAAIGTALFSLLLYGLLPLDGAQVGIAAIKQLPIEVVHHAFQWGFIAAALVALSSAIVGYLSPATALRDHE

SEQ ID NO: 20905 - protein, 398 aa, Arabidopsis thaliana
  misc_feature (227)..(227): Xaa can be any naturally occurring amino acid
  misc_feature (262)..(262): Xaa can be any naturally occurring amino acid
  unsure (1)..(398): unsure at all Xaa locations
MQIFVKTLTGKTITLEVESSDTIDNVKAKIQDKEGIPPDQQRLIFAGKQLEDGRTLADYNIQKESTLHLVLRLRGGMQIFVKTLTGKTITLEVESSDTIDNVKAKIQDKEGIPPDQQRLIFAGKQLEDGRTLADYNIQKESTLHLVLRLRGGMQIFVKTLTGKTISLEVESSDTIDNVKAKIQDKEGIPPDQQRLIFAGKQLEDGRTLADYNIQKESKLHLVLRLPXGMKIFVKTLTGKTITLEVESSNTIYNVKAKIQDKXEGIPPDQQRLIFAGKQLEDGRTLADYNIQKESTLHLVLRLRGGMQIFVKTLTGKTITLEVESSDTIDNVKAKIQDKEGIPPDQQRLIFAGKQLEDGRTLAGYNIQKESTLQFGVCGLPWEVCKIFRQGLPKGPSPL

SEQ ID NO: 20906 - protein, 663 aa, Methylobacillus flagellatus KT
MAASRQELANAIRVLSMDAVQKANSGHPGAPMGMADIAEVLWNHHLRHNPTNPSWADRDRFILSNGHGSMLIYSLLHLTGYDLNMDDIKSFRQLHSRCAGHPEYGYAPGVETTTGPLGQGITNAVGFAMAEKLLAHQFNKPGHEIVDHYTYCFLGDGCMMEGISHEAAALAGTWGLGKLIAFWDDNGISIDGHIEGWYTDDTAKRFEAYGWHVVPNVDGHDFDAVNAAIEAAKKVTDKPTLICCKTIIGKGSPNKCGSHDCHGSALGLEEVAATREALGWKHEPFVIPEEVYAGWDGKEKGAKLESEWNAKFEAYAKAYPAEAAEFKRRMAGELPANWKEVTDAFIKATNEKAESIATRKASQNAIAALAPVLPEFLGGSADLTGSNLTSCASFKHVSGKEPGNYISYGVREFGMFAIMNGMALHGGLLPFGGTFHMFSDYAKNALRMAALMKQRTIAVLTHDSIGQGEDGPTHQPIENTAGLRYIPRMDVWRPADSVETAIAWVAAVERKDGPTSLVLSRQNVPGIKHDEKHFELIRKGGYVFSDVEGKADVILIATGSELDLAIKAAAELNAAGTKVRVVSMPSTNVFDRQDQAYKDSVLTPGVKRVAVEAGVTDFWRKYVGLEGAVVGIDTFGESAPGGVLFKHFGFTVENVVNTVKSVL

SEQ ID NO: 20907 - protein, 333 aa, Methylobacillus flagellatus KT
MTIKVGINGFGRIGRMAFRAAIKDFTDIEVVAINDLLEPDYLAYMLKYDSVHGRFDGDVSVSGGNLVVNGKTIRLTAERDPANLKWDEVDVDVVVECTGFFLTEETCQKHIDAGAKKVVQSAPSKDDTPMFVYGVNHDTYKGQSIVSAASCTTNGLAPVAKVLQDSFGIKRGLMTTVHAATATQKTVDGPSNKDWRGGRGILENIIPSSTGAAKAVGKVIPELNKKLTGMAFRIPTSDVSVVDLTVELNKETTYEQIVAAMKAASESGPLKGVLGFTDEKVVSTDFRGNAYPSIFDADAGIQLDPTFVKVVAWYDNEYGYTCNMLRLVRHIAS

SEQ ID NO: 20908 - protein, 48 aa, Bursera tecomaca
YFHETIWKGVPRFLRRVDTALKNIGINKRVPYNAPLIQFSSWMGGDRD

SEQ ID NO: 20909 - protein, 418 aa, Haloarcula marismortui ATCC 43049
MSPEVNPFESLQEQIDDASDYLEYSTDVLERLKHPERVLETNLSVEMDDGSVEVFRAYRSQFNGDRGPYKGGIRYHPQVTRDEVKALSGWMVYKCAAVNIPYGGGKGGIEIDPRQYSASEIERITRSFAKELRLIIGEDRDIPAPDVNTGQREMNWIKDTYETLENTTEPGVITGKAPESGGSAGRVEATGRSVMLTAREAFDYLGKDIEDATVAVQGYGNAGSVAAKLIEDLGANIVAVSDSSGAVYNPDGLGARDAKAFKSETGSLAGYEGATEELTNEELLTMDVDLLVPAALENAIDGDLARDVQADIVVEAANGPLTPNADDVFTERDVAVFPDILANAGGVTVSYFEWVQNRQRFYWSEERVNDELETIITNAFDDLVETYEETGAPNFRTAMYVVAIQRVVAAAEEGGIWP

SEQ ID NO: 20910 - protein, 534 aa, Streptococcus agalactiae 2603V/R
MTKYIFVTGGVVSSIGKGIVAASLGRLLKNRGLKVTIQKFDPYINIDPGTMSPYQHGEVYVTDDGAETDLDLGHYERFIDINLNKYSNVTTGKIYSEVLKKERRGEYLGATVQVIPHVTDALKEKIKRAATTTDSDVIITEVGGTVGDIESLPFLEALRQMKADVGSDNVMYIHTTLLPYLKAAGEMKTKPTQHSVKELRGLGIQPNMLVIRTEQPAGQSIKNKLAQFCDVAPEAVIESLDVDHIYQIPLNMQAQNMDQIVCDHLKLETPAADMTEWSAMVDKVMNLEKKVKIALVGKYVELPDAYLSVVEALKHSGYVNDVAIDLKWVNAAEVTEDNIKELVGDADGIIVPGGFGQRGSEGKIEAIRYARENDVPMLGVCLGMQLTCVEFARNVLNLHGANSAELDPKTPFPIIDIMRDQIDIEDMGGTLRLGLYPCKLKSGSRAAAAYNNQEVVQRRHRHRYEFNTKFREQFEAAGFVFSGVSPDNRLMEVVELPEKKFFVAAQYHPELQSRPNHAEELYTAFVTAAVENMK

SEQ ID NO: 20911 - protein, 58 aa, Physcomitrella patens
MGKGGSTATFCEVLLAILLPPLGVFLRYACGLEFWICLLLTILGYIPGILYALYVIVR

SEQ ID NO: 20912 - protein, 543 aa, Malus x domestica
MGCYSSKENAPKPGSKGFGSSQPYQQPQTAAQPQKVSSQQPHNPPPPPRPQPQQRAQPAPQPRAQYQQPSPPPAKPAPQPNSILGKPFDDIKQYYTLGKELGRGQFGITYLCTENSTGHSYACKSILKRKLVSKNDRDDIKREIQIMQHLSGQPNIVEIKGAYEDRYSVHLVMELCAGGELFDRIIAQGQYSERAAAAILRDIVNVVHICHFMGVLHRDLKPENFLLSSKDEKAMLKATDFGLSVFIEEGKVYRDIVGSAYYVAPEVLRRSYGKEIDIWSAGVILYILLSGVPPFWAETERGIFDAILEGVIDFDSQPWPSISDSAKDLVRKMLTQDPRKRITSAEVLEHPWLRVGGVASDKPLDSAVLSRMKQSRAMNKLKQLALKVIAENLSEEEIKGLKTMFTNMDTDKSGTITYEELKTGLARIGSRLSEAEVRQLMDAADVDGNGSIDYIEFISATMHRQRLERDEHLYKAFQYFDKDSSGYITRDELEAAMKEHGMGDDNTIREIISEVDADNDGRINYSEFCAMMRSGAQQPAKLF

SEQ ID NO: 20913 - protein, 480 aa, Methylobacillus flagellatus KT
MALRKTKIVATLGPASSEEAVIERLVDAGMDVVRLNFSHGSAQDHIARAELVRDISRRSGRPVGVLCDLQGPKIRIGKFENDRILLKAGDRFILDAACKLGNQERVGLDYKTLPSEVEPGAVLLLDDGRIVLNVEAVNGGEVHCTVAAGGVLSNNKGINRKGGGLSAPALTLKDQEDIRTAVALEADYIAVSFPRSGADIELARHLVREAGGHAAIVAKIERAEAIDALEEIIDAADVIMVARGDLGVEVGDAAVPGLQKRMIRTARMRNKLVITATQMLESMISSPIPTRAEVSDVANAVLDGTDAVMLSGETAVGHYPVESIQAMHRVCLEAEKEYDSHHLQAPINDEFEFIDEAIAMASVYAAEHLNVKAIAALTKSGSSVTWLSRSNTNVPIYALTTERDTRRKLTLYRGVYPYHVEFASQELSKILYDAEETLLRLGAVQRGDLMMLTFGEPIGKAGGTNTLQIVRVGEHRRERH

SEQ ID NO: 20914 - protein, 259 aa, Arabidopsis thaliana
MAEEYKNTVPEQETPKVATEESSAPEIKERGMFDFLKKKEEVKPQETTTLASEFEHKTQISEPESFVAKHEEEEHKPTLLEQLHQKHEEEEENKPSLLDKLHRSNSSSSSVSKKGEDGEKKKKEKKKKIVEGDHVKTVEEENQGVMDRIKEKFPLGEKPGGDDVPVVTTMPAPHSVEDHKPEEEEKKGFMDKIKEKLPGHSKKPEDSQVVNTTPLVETATPIADIPEEKKGFMDKIKEKLPGYHAKTTGEEEKKEKVSD

SEQ ID NO: 20915 - protein, 294 aa, Allium cepa
MDQYEKVEKIGEGTYGVVYKARDRLTNETIALKKIRLEQEDEGVPSTAIREISLLKEMQHANIVRLQDVVHSEKRIYLVFEYLDLDLKKHMDSCPDFAKDSRLAKTFLYQLLRGIAYCHSHRVLHRDLKPQNLLIDRRTNSLKLADFGLARAFGIPVRTFTHEVVTLWYRAPEILLGARQYSTPVDIWSVGCIFAEMVNQRPLFPGDSEIDELFKIFRIMGTPNEDTWPGVTSLPDFKSAFPKWPAKDLATIVPKLDSAGIDLLYKMLHLEPSKRITARKALEHEYFRDLGTIP

SEQ ID NO: 20916 - protein, 614 aa, Bartonella henselae str. Houston-1
MVSTGSSLGARAGNAPYRTVDHKFDVVVVGAGGAGLRATLGMAEQGLKTACITKVFPTRSHTVAAQGGIAASLSNMGPDNWQWHLYDTVKGSDWLGDTDAMEYLVRNAPAAVYELEHYGVPFSRTQEGKIYQRPFGGHTTQFGEGPPVQRTCAAADRTGHAILHTLYGQSLKHNAQFFIEYFALDLIMTDGVCTGVVAWNLDDGVIHRFAAKMVVLATGGYGRAYFSATSAHTCTGDGGGMIARAGLPLQDMEFVQFHPTGIYGSGCLITEGARGEGGYLINSEGERFMERYAPSFKDLASRDLVSRCITLEIREGRGVGPRKDHIHLVLNHIDPAILHERLPGISESARIFAGVDVTKEPIPILPTVHYNMGGIPTNYYGEVLNPTPDSPDRVQPGLMAVGEAGCASVHGANRLGSNSLIDLVVFGRAAAIRAGEVIDRNAEIPPLNEVAIDEIMTRFDRLRFAQGAIPTAVLREKMQRTMQEDAAVFRTEDSLQQGCQRISQIWGELADLKVTDRSLIWNSDLVETLELENLMANAITTVYSAEARLESRGAHAREDYPERDDKNWRKHTLSHLSKDGKVTLSYRPVHIDPLTSEADGGIDLKRIAPKKRVY

SEQ ID NO: 20917 - protein, 480 aa, Vibrio parahaemolyticus RIMD 2210633
MTSKLRRTKIVTTLGPSTDKDNVLEEIIKAGANVVRMNFSHGTSEDHIQRAKKVRAIAARLGRQVAILGDLQGPKIRVSTFKDGKITLKVGDKFTLDSDLPKGEGNQESVGLDYKELPQDVSPNDILLLDDGRVQLQVTSVEGNKVHTRVTVGGPLSNNKGINKKGGGLSADALTEKDKADIITAAEIKVDYLAISFPRNGEDMHYARRLARDAGLEAKLVAKVERAETVATSESIDDIILASDVVMVARGDLGVEIGDPELIGVQKKLIRRARSLNRVVITATQMMESMINSPMPTRAEVMDVANAVLDGTDAVMLSGETAAGQYPVETVKSMADVCIGAEKMSEASLSTYRLDRTFETAEETIAMATMYSANHMEGIKAMIALTESGRTALMMSRLSSGLPIFALSRNESTLNRAALYRGVTPVYFDAKCDAGLPTAQAAISSLKDQGYLHEGDLVIITQGDVMDVVGSTNCMRILPV

SEQ ID NO: 20918 - protein, 336 aa, Pseudomonas tolaasii
MALSKEAPEFDIDDEVLLEMEILTEKESMSNDEGSATPSVRTKSKNSTALKQHKYIDYTRALDATQLYLNEIGFSPLLTPEEEVHFARLSQKGDPAGRKRMIESNLRLVVKIARRYVNRGLSLLDLIEEGNLGLIRAVEKFDPERGFRFSTYATWWIRQTIERAIMNQTRTIRLPIHVVKELNVYLRAARELTQKLDHEPSPEEIANLLEKPVGEVKRMLGLNERVSSVDVSLGPDSDKTLLDTLTDDRPTDPCELLQDDDLSQSIDQWLSELTDKQREVVIRRFGLRGHESSTLEDVGLEIGLTRERVRQIQVEGLKRLREILEKNGLSSESLFQ

SEQ ID NO: 20919 - protein, 408 aa, Lactococcus lactis
MAKANIGKLLLTGVVGGAIALGGSAIYQSTTNQSANNSRSNTTSTKVSNVSVNVNTDVTSAIKKVSNSVVSVMNYQKDNSQSSDFSSIFGGNSGSSSSTDGLQLSSEGSGVIYKKSGGDAYVVTNYHVIAGNSSLDVLLSGGQKVKASVVGYDEYTDLAVLKISSEHVKDVATFADSSKLTIGEPAIAVGSPLGSQFANTATEGILSATSRQVTLTQENGQTTNINAIQTDAAINPGNSGGALINIEGQVIGITQSKITTTEDGSTSVEGLGFAIPSNDVVNIINKLEADGKISRPALGIRMVDLSQLSTNDSSQLKLPSSVTGGVVVYSVQSGLPAASAGLKAGDVITKVGDTAGTSSTDLQSALYSHNINDTVKVTYYRDGKSNTADVKLSKSTSDLETSSSSSSN

SEQ ID NO: 20920 - protein, 217 aa, Thermoplasma volcanium GSS1
MDINDISKAVEAVKQSSPQRKFEESVEIAINLKDIDMTNPKNRINEEILLPNGRGKDVKVVIFGSEELKAKAKGVADYIFGPEDISKFAEDKKAFKKIVNDAYFFIAEATLMANIGKSLGQVLGPRGKMPRPIPPGQDPVPLIKALKNTVKARSRNSLTLHVPVGTRSMDTQKISENIMAILNRITGKLERGHSNIKNVYVKTTMGKAVQVGTGDQN

SEQ ID NO: 20921 - protein, 445 aa, Arabidopsis thaliana
MASNGVTNCNANANVWRFKGNGATSDAAAVTLRKLAFGMFKNCTMNSGKTILFPTPGEPSAHSNFRTCPEAEEAVAAAARSGMANSYAPSPGVFKARRAVAEYLNGELPTKLKAEDVYITGGCNQAIEIVIDSLAGNPSANILLPRPGYPHYDARAVYSGLEIRKYDLLPESDWEINLDGLEAAADENTVAMVIINPNNPCGNVYTYDHLNKVAEMARKLGIMIISDEVYDHVVYGDKPFIPMGKFASIAPVITLGSISKGWVNPGWRVGWIAMNDPNGIFVSTGVVQAIEDFLDLTPQPSFILQEALPDILEKTPKEFFEKKIKAMRRNVELSCERLKDIPCLFCPKKPESCSYLWLKLDTSMLNNIKNDFDFCTKLVSEESLILIPGVALGAENWVRISIGTDESVVQEIFDRLKGFYDRHAISKEAIKLSGHAINQIVVSVN

SEQ ID NO: 20922 - protein, 408 aa, Lactococcus lactis
MAKANIGKLLLTGVVGGAIALGGSAIYQSTTNQSANNSRSNTTSTKVSNVSVNVNTDVTSAIKKVSNSVVSVMNYQKDNSQSSDFSSIFGGNSGSSSSTDGLQLSSEGSGVIYKKSGGDAYVVTNYHVIAGNSSLDVLLSGGQKVKASVVGYDEYTDLAVLKISSEHVKDVATFADSSKLTIGEPAIAVGSPLGSQFANTATEGILSATSRQVTLTQENGQTTNINAIQTDAAINPGNSGGALINIEGQVIGITQSKITTTEDGSTSVEGLGFAIPSNDVVNIINKLEADGKISRPALGIRMVDLSQLSTNDSSQLKLPSSVTGGVVVYSVQSGLPAASAGLKAGDVITKVGDTAVTSSTDLQSALYSHNINDTVKVTYYRDGKSNTADVKLSKSTSDLETSSSSSSN

SEQ ID NO: 20923 - protein, 408 aa, Lactococcus lactis
MAKANIGKLLLTGVVGGAIALGGSAIYQSTTNQSANNSRSNTTSTKVSNVSVNVNTDVTSAIKKVSNSVVSVMNYQKDNSQSSDFSSIFGGNSGSSSSTDGLQLSSEGSGVIYKKSGGDAYVVTNYHVIAGNSSLDVLLSGGKKVKASVVGYDEYTDLAVLKISSEHVKDVATFADSSKLTIGEPAIAVGSPLGSQFANTATEGILSATSRQVTLTQENGQTTNINAIQTDAAINPGNSGGALINIEGQVIGITQSKITTTEDGSTSVEGLGFAIPSNDVVNIINKLEADGKISRPALGIRMVDLSQLSTNDSSQLKLPSSVTGGVVVYSVQSGLPAASAGLKAGDVITKVGDTAVTSSTDLQSALYSHNINDIVKVTYYRDGKSNTADVKLSKSTSDLETSSSSSSN

SEQ ID NO: 20924 - protein, 326 aa, Rhizobium leguminosarum bv. trifolii
MILCCGEALIDMLPRDTTLGEKGFAPYAGGAIFNTAIALGRLGIPTAFFTGIADDMMGEILLETLKASNVDYSPCAITPRPSTIAFVKLVNGQATYAFYDEGTAGRMITTADLPDLGDDCEALHFGAISLIPSPCGETYEALLDREAASRVISLDPNIRPGFIKDKPSHMARIKRMAAKSDIVKFSDEDLDWFGLQGDHDALAAHWLNHGAKLVVITKGAEGASGYTKDRKVTVPSERVTVVDTVGAGDTFDAGILASLKMDNLLTKRQVASLDEQALRNGPDPRRQSRRRHRLPRRRQSTLGARDWSLRLEQDSDPHPPDDTFSP

SEQ ID NO: 20925 - protein, 97 aa, Pseudomonas putida
MKLRPLHDRVVIRRSEEESKTAGGIVLPGSAAEKPNRGEIVAVGTGRILENGEVRALAVKVGDKVVFGPYSGSNTVKVDGEDLLVMAENEILAVIEG

SEQ ID NO: 20926 - protein, 591 aa, Burkholderia fungorum LB400
MAAIKNSLPRRKFDVVIVGAGGSGMRASLQLARAGLSVCVLSKVFPTRSHTVAAQGGIGASLGNMSEDNWHYHFYDTIKGSDWLGDQDAIEYMCREAPNAVYELEHFGMPFDRNADGTIYQRPFGGHTANYGEKPVQRACAAADRTGHALLHTLYQQNVAAKTQFFVEWMALDLIRDAEGDVLGVTALEMETGDVYILEGKTTLFATGGAGRIFAASTNAFINTGDGLGMAARSGIALQDMEFWQFHPTGVAGAGVLITEGVRGEGGILRNSNGERFMERYAPTLKDLAPRDFVSRSMDQEIKEGRGVGPNKDHVLLDLSHIGAETIMKRLPSIREIALKFANVDCIKEPIPVVPTIHYQMGGIPTNIHGQVVGTSKGAEDPVNGFYAVGECSCVSVHGANRLGTNSLLDLVVFGRAAGNHIVKHVKEIKEHKPLPADAADFALSRLAKLDSSSSGEYAQSVANDIRGTMQKHAGVFRTSALLAEGVERIREVADRVDNIHLKDKSKVFNTARIEALEVANLIEVARATMVSAEARKESRGAHAQDDFEHRDDENWLRHTLWFSKGDRLDYKPVHMQPLTVESVPPKARTF

SEQ ID NO: 20927 - protein, 256 aa, GIBBERELLA ZEAE PH-1
MPGVGFGTFANEGAKGETYKAVIAALKTGYRHLDCAWFYLNEGEVGQAVRDFLAEDNGVKREDLFICTKVWNHLHEPEEVKWSFENSLKNFGLDYIDLFLVHWPIAAEKGDDYQPKIGPDGKYVIKKDLTENPEPTWRAMEEIYASGKARAIGVSNWTIDGLKQLMAFAKVKPAVNQIEIHPFLPNEDLVKFCLENDILPAAYSPLGSQNQVPTTGETVRSNKTLNEVADRSGNTLAQVLIAWGLRRGYAPVRRGL

SEQ ID NO: 20928 - protein, 494 aa, Shewanella sp. MR-4
MKNQVQLITYVDRITGAGLKQLKALLDNELDGLFGGVHLLPFYYPIDGSDAGFDPIDHVQVDSRLGDWDDVKNIGEAFDIMADLIVNHMSAESPEFKDVLKHGKQSVYWDLFLTKDKVFPEGLSEQDQKAIYRPRPGSCFSTYTLADGSTEEFWTTFTRNQIDIDVNSAAGKDYLNRVLARFNHSKVNLIRLDAAGYAIKKPGTSCFMIEESFEFVDKLAKQANELGMTTLAEIHSHHMTQIDIAKRVDMVYDFALPPLILHTLFSQDCSALSHWLDMAPRNCITVLDTHDGIGIIDVGPMDGLRGLLDEKQIDNLVETIHGNSQGESLQATGAAASNVDLYQINCTYYDALGQNDLDYLMARAIQFFAPGIPQVYYTGLLAIPNDMTLLNQTHVGRDINRPYLNREKVQQALQKPVVKALIQLIKLRNKSAAFNGRFSMAASGKTLTLTWSAQNASASLSLDFAHKQGLITLLDEQGIETQIALADLLTQAQA

SEQ ID NO: 20929 - protein, 612 aa, Schizosaccharomyces pombe
MRLKSFSTTLDTLRRRFNDSSSEEDKLEKNIQDETSIKEVSLQDAKQSDEKGVEEKVFNDESFSIDVAPKPEDELSGIVKARYLTEHSSRISFYICYFSIFLLFFAISFQAECYYSLTAYATSAFAGHSLLSTIAVANNIISAAIKPPLARLSDVFGRLEAFLFSLLLYLVGLILMAASTNVQTYAGGSVLYNAGYTGVELIMTIFMADTSSMANRSLVLGISYLPFVVTIWIGPRVAQEFYMHSTWRWGIAVWTILIPACSIPFLAVYSYYQFRAWREGALKGTLTINPVELFKKLDIIGLILMTAGLALVLLSISLASYDTGKWSDAKFIVMIIIGGLCLIAFVLYEIFVASFPALPFRLMREPTIGACCAMSFLFYITFYCWDNYYYSFLQVVHYTSITAAGYISYTYSFTSCATGFFLGILIRLTKRYKWYFVASIPVYILGQGLMIRYRGEQYNWGYQIMPQIIVGIGGGVIANLLTVAVQTVVSTENFAIVTALVSTVTPIGGAVGSAISGAIWNSVMPKRLEKNLPSDLKDQAYTIFESLTVQLSYTRGTDARNAIILSYSEVQKILTSVATGFAGAMIFPVWFVANPRLSTVKTHIFDSKESKV

SEQ ID NO: 20930 - protein, 596 aa, Xanthomonas campestris pv. vesicatoria str. 85-10
MSAYKITEHKYDMVVVGAGGAGLRATFGLAQKGLQTVCLTKVFPTRSHTVAAQGGISAALGNMGEDDWRYHFYDTIKGSDWLGDQDAIEYMCREAIPAIIELEHYGVPFSRTEEGKIYQRPFGGMTTKYGEGPSAQRTCAAADRTGHAMLHTLYQQSLAHNARFMIEYFALDLIFDEEGVCRGVLALDMAEGSLHLFRAHGVVLATGGYGRAYFSATSAHTCTGDGGGLVMRAGLPVQDMEFVQFHPTGIYGAGCLITEGVRGEGGILRNSNGERFMERYAPHYKDLASRDVVSRSMTVEIREGRGVGEHKDHILLDLTHLGPEVINEKLPGIAESAHIFAGVDVTKQPIPVLPTVHYNMGGIPTNFYGEVVRKQGDDADAVVPGLYAIGEAACVSVHGANRLGSNSLLDLVVFGRAVANRCAETVKPNQPHKTLPSDACDKALGLLDKLRHANGSTPTAVIRDNMQRTMQSDAAVFRTSKTLKEGVDKMAEIFATFEDVKVSDRSLVWNSDLIETYELNNLLLNAVATINSAEQRKESRGAHSHEDFPDRDDVNWQKHTLVTVDDKGKCEFDYRPVHMYTLSKDVDVVPPKPRVY

SEQ ID NO: 20931 - protein, 66 aa, Triticum aestivum
  misc_feature (10)..(11): Xaa can be any naturally occurring amino acid
  misc_feature (41)..(42): Xaa can be any naturally occurring amino acid
  misc_feature (47)..(47): Xaa can be any naturally occurring amino acid
  unsure (1)..(66): unsure at all Xaa locations
ERERETLEHXXWSGANFYDRVLKTVQGGMSSTAAMGKGATXXQFWTXPGSESNNQARSQVQDVMKV

SEQ ID NO: 20932 - protein, 235 aa, Arabidopsis thaliana
MLRSSIRLLYIRRTSPLLRSLSSSSSSSSSSSSKRFDSAKPLFNSHRIISLPISTTGAKLSRSEHSMAASSEPKSLYDFTVKDAKGNDVDLSIYKGKVLLIVNVASQCGLTNSNYTELAQLYEKYKGHGFEILAFPCNQFGNQEPGTNEEIVQFACTRFKAEYPIFDKVDVNGDKAAPVYKFLKSSKGGLFGDGIKWNFAKFLVDKDGNVVDRFAPTTSPLSIEKDVKKLLGVTA

SEQ ID NO: 20933 - protein, 578 aa, Glycine max
  misc_feature (457)..(458): Xaa can be any naturally occurring amino acid
  unsure (1)..(578): unsure at all Xaa locations
MSATASLCATSRTTFSSSKPVARRSCFVAVPKIAFPKLRFKPVAMATLGARMVAAAPTVTPPASLDFETSVFKKEKINLAGHDEYIVKGGRDLFPLLQGAFKGIKQIGVIGWGSQGPAQAQNLRDSLADAKSDIVVKVGLRKGSRSFNEARAAGFSEENGTLGDIWETISGSDLVLLLISDAAQADNYEKIFSHMKPNSILGLSHGFLLGHLQSIGLDFPKHFSVIAVCPKGMGPSVRRLYVQGKEINGAGINSSFAVHQDVDGRATDVALAWSVALGSPFTFATSLEMEYRSDIFGERGILLGAVHGIVESLFRRYTEHGMSEDLAYNNTVESITGTISKIISTKGMLAVYNALSEDEKREFEKAYSASYYPCMDILYECYEDIAAGSEIRSVVLAGRRFYEKEGLPAFPMGKIDQTRMWKVGERVRSTRPAGDLGPLYPFTAGVYVALMMAQIEXXLRKKGRFLPLKLLTESVIESVDSLNPFMHARGVSFMVDNCSTTARLGSRKWAPRFDYILTQQALVAVDNGAPINQDLISNFLSDQVHGAIEVCAQLRPTVDISVPPDADFCRPELRQSSN

SEQ ID NO: 20934 - protein, 319 aa, Shewanella sp. MR-4
MTVLLSFGEVLVDLLPTDISGKSHQAIAGGAPANVAVGYAKLGGKSYFAGGISTDDYGAMLKQALANEGVVTDYLTQVPEAPTATVVVNLDEHGERTFEFNRQGTADLCYSQRHFDAIPWQQMDIFHLCSNTFTEASIFNASLYGARCANSFNKIVSFDVNLRLSLWPDTALLAERVEQCFRYTQVLKMSREEAEYLALTRNKSFEDYLQFCLAQGVEVILITDGANPVQCITVNERFSVPVPQIKAVDTTAAGDSFMAGFLFALGSELAFDLEHLTLKHRLACQTQLRKAIEFAVRCGAVTCGQKGAFPALPTLSQVS

SEQ ID NO: 20935 - protein, 327 aa, Burkholderia fungorum LB400
MAKPAKRVAVTGAAGQIAYSLLFRIANGDLLGKDQPVILQLLDLPQAQGAVKGVVMELDDCAFPLLSGVVITDDPKVAFKDADVALLVGARPRSKGMERKDLLSANAEIFTVQGKALNEVASRDVKVLVVGNPANTNAYIAMKSAPDLPKKNFTAMLRLDHNRALSQLAAKSGKPVASIEKLAVWGNHSPTMYPDFRVATAEGQDLTKLINDEEWNRNTFIPTVGKRGAAIIEARGLSSAASAANAAIDHVRDWVLGTNGKWVTMGIPSDGSYGIPEDIIYGVPVTCENGEYKRVEGLEIDAFSREKMDGTLQELLEERDGVQHLLG

SEQ ID NO: 20936 - protein, 395 aa, Burkholderia fungorum LB400
MSETTQTAGTPGGNEPKSGFKPKKSVALSGVTAGNTALCTVGKTGNDLHYRGYDILDIASACEFEEIAYLLVHEKLPTQAELTAYKTKLKALRGLPANVKAALEWIPAAAHPMDVMRTGVSVLGTVLPEKDDHNLPGARDIADRLMASLGSMLLYWYHYSHNGKRIEVETDDDSIGGHFLHLLHGVEPSNAWVDAMHVSLNLYAEHEFNASTFTGRVIAGTGSDIYSALTGAIGALRGPKHGGANEVAFEIQSRYQTPDEAEADIRRRVENKEVVIGFGHPVYTISDPRNKVIKEVAKKLSKEAGNTRLFSIAERLESVMWDAKKMFPNLDWFSAVSYHMMGVPTAMFTPLFVIARTAGWSAHIIEQRIDNKIIRPSANYTGPENLKYLPLNRRK

SEQ ID NO: 20937 - protein, 196 aa, Escherichia coli
RELKARHLTMIAIGGSIGTGLFVASGATISQAGPGGALLSYMLIGLMVYFLMTSLGELAAYMPVSGSFATYGQNYVEEGFGFALGWNYWYNWAVTIAVDLVAAQLVMSWWFPDTPGWIWSALFLGVIFLLNYISVRGFGEAEYWFSLIKVTTVIVFIIVGVLMIIGIFKGAQPAGWSNWTIGEAPFAGGFAAMIGV

SEQ ID NO: 20938 - protein, 467 aa, Schizosaccharomyces pombe
MIGITKLISIWNAIWNFLLLPEIIISQTDTSSTGIYQMQSKVRSLVPVLTERSDYFSYYRVNLYRSSCPLWENDNAMCSNQGCAVKSLNEIEIPKVWKKLSDFEPHSKKNDTKCNWKYNPDLDYCYLDNSTSPDEYVYVSLVQNPERFTGYAGDHSAAIWRSIYEQNCFVVDDDDNPSEQPKSNALFRPNQIPLNLFTENHDDTSLSPSVACLEKRMFNRIISGFHASISTHVCQNYYDVEEQRWTQNLDWWRAKVGSFPDRIENIFFNYALLHQALVQIATQMKNITSDSSFTFCPTDKDVDWRTHTAFEQLVYHAYQDRHVINREQFFADEEAKRFKDSFRKHFRDISRIMDCVGCDKCRLWGKVQITGYGTALKLLLEPETQLSDLRPEEVVALVNTFDRISHSVEATFWFSLKAKTNDTLDAIKALIYKTYRSPSKEILAFFIDQTWYLFYALFFICNVPRVI

SEQ ID NO: 20939 - protein, 466 aa, Arabidopsis thaliana
MKNLVIFAFLFLSITTVINGGITSKFVRQALPSIEMSLDTFPSPGGYNTPEQVHLTQGDHDGRGMIVSWVTPLNLAGSNVVTYWIATNGSDVKPAKKRAHASTKSYRFYDYSSGFLHHATIKGLEYDTKYIYEVGTDKSVRQFSFTTPPKIGPDVPYTFGIIGDLGQTYASNETLYHYMSNPKGQAVLFAGDLSYADDHPNHDQRKWDTWGRFMEPCAAYQPFIFAAGNHEIDFVPNIGEPHAFKPYTHRYPNAYKASQSTSPLWYSVRRASAHIIVLSSYSAYGKYTPQYIWLEQELKNVNREETPWLIVIVHSPWYNSNNYHYMEGESMRVMFESWLVNSKVDLVLSGHVHAYERSERISNIKYNITNGLSSPVKDPNAPIYITIGDGGNIEGIANSFVDPQPSYSAYREASFGHAVLEIMNRTHAQYTWHRNQDNEPVAADSIMLHNRHFFPVEEIVSSNIRA

SEQ ID NO: 20940 - protein, 377 aa, Zea mays
MAQDEAVATQKTGNTTSPSKDYPTPSPYPDWSTMQAYYGPGVLPPTYFTPAIAPGHPPPYMWGPQPIMPPPFGTPYAAVYPHGGAYPHPLVPMMSTSMSVEPAKSANSKEKNSNKKLKEIDRTAVSAGSGNSKRTVSSIEDYSAEASSDVNDQNVNETSRKRSSDGGPGAETTTGGNTECVLAPNHTLGNATILPQHCFSAPVIKPSATNVANSRAIGTALSPPPGVMVPVHNAVPSDLSVKDERELKREKRKQSNRESARRSRLRKQAETEELATQVESLAAENTSLRSEIGRLTESSEKLRLENSALMVKLKDTAEPSPSKAAASPSSPRASAENFLSMIDSANAPSVSRHTEHGGPRLRQLLDSSSATDVAAVS

SEQ ID NO: 20941 - protein, 205 aa, Escherichia coli
RRELKARHLTMIAIGGSIGTGLFVASGATISQAGPGGALLSYMLIGLMVYFLMTSLGELAAYMPVSGSFATYGQNYVEEGFGFALGWNYWYNWAVTIAVDLVAAQLVMSWWFPDTPGWIWSALFLGVIFLLNYISVRGFGEAEYWFSLIKVTTVIVFIIVGVLMIIGIFKGAQPAGWSNWTIGEAPFAGGFAAMIGVAMIVGFSI

SEQ ID NO: 20942 - protein, 188 aa, Shigella flexneri
LKARHLTMIAIGGSIGTGLFVASGATISQAGPGGALLSYMLIGLMVYFLMTSLGELAAYMPVSGSFATYGQNYVEEGFGFALGWNYWYNWAVTIAVDLVAAQLVMSWWFPDTPGWIWSALFLGVIFLLNYISVRGFGEAEYWFSLIKVTTVIVFIIVGVLMIIGIFKGAQPAGWSNWTIGEAPFAGGF

SEQ ID NO: 20943 - protein, 155 aa, Glycine max
MACSSGTSSGATSSMLQNNSGSEEELQALMEQRKRKRMISNRESARRSRMRKQKHLDDLASQVTQLRNENHQILTSVNLTTQKYLAVEAENSVLRAQVNELSHWLESLNEIIHFLNATDGGPPPPPSSFFEPDATFFNKAYLSQPIMASADMLQY

SEQ ID NO: 20944 - protein, 394 aa, Nostoc punctiforme PCC 73102
MLTHIKDLAAKLAPRLIEIRRHIHSHPELSGQEYQTAAFVAGVLSSSGLHVQEGVGKTGVVGELQGTGQNDRLLAIRTDMDALPIQEGTNLEYASRAEGVMHACGHDVHTTVGLGTAMVLSQMAEELGGKVRFLFQPAEEIAQGASWMVKDGAMENVSAVLGIHVFPSIPAGSIGVRYGALTAAADDLEILIMGESGHGARPHEAIDAIWIACQVITALQQAISRTQNPLRPVVLSIGKINGGRAPNIIADKVQLLGTVRSLHPETRAHLPNWIENIVSSVCQTYGAKYQVNYRQGVPSVQNDYALTQLLQSAAEEAWSSDRVQVLPEPSLGAEDFSMYLEHVPGSMFRLGVGYKERMINHPLHHPQFEVDESAILTGVVTMAYAAYKYCQQNF

SEQ ID NO: 20945 - protein, 455 aa, Geobacillus kaustophilus HTA426
MATTAPPNGKWRRLFALFLPIFVSQTGQYAMNFVDVAMSGHASAEDLAGVAIGSSLWVPVFTGAGGILLALSPIVSHHFGAGRHDSITRAVAQALYLAVALAVAIVLIGAAAVPFILKQMSLDENVRHIAFHYLRALSFGIIPLFLYSVLRYFIDALGQTKVTMWITLTALPVNMLFNWLLIYGHGGFPRLGGIGTGYATAITYAYCFAAAAFAALKFRRLAPYRVLVRFYRPSWAAWKELLKTGVPIGSAIFFETSIFAAVTLLVGRFGAETVAAHQSALNFASLLYMIPLSLSMALTIAVGVEAGANRYEAAKQYCLIGITLALAVAAAAALFLSAFRSHVARLYTNDPTVAALTGKFLLYAIFFQVSDAIAAPIQGALRGYKEVNAVFWSALLAYWGVGLPLGCALALLTAAGAFGYWIGLIAGLATGALFLSFRLRAVWRRHDSGRAPCAF

SEQ ID NO: 20946 - protein, 547 aa, Rhodopseudomonas palustris CGA009
MSAKEVKFGVDARDRMLRGVDILANAVKVTLGPKGRNVVLDKSFGAPRITKDGVTVAKDIELDDKFENMGAQMVREVASKSADAAGDGTTTATVLAQAIVREGAKAVAAGMNPMDLKRGIDLAVEAVVADLVKNSKKVTSNDEIAQVGTISANGDAEIGKFLADAMKKVGNEGVITVEEAKSLETELDVVEGMQFDRGYISPYFVTNADKMRVEFDDAYILINEKKLSNLNELLPLLEAVVQTGKPLVIVAEDVEGEALATLVVNRLRGGLKVAAVKAPGFGDRRKAMLQDIAILTGGQAISEDLGIKMENVTLQMLGRAKKVMIDKENTTIVNGAGKKADIEARVAQIKAQIEETTSDYDREKLQERLAKLAGGVAVIRVGGATEVEVKERKDRVDDAMHATRAAVEEGIVPGGGVALLRASEQLKGLKTKNDDQKTGVEIVRRALSAPARQIAINAGEDGSVIVGKVLEKEQYAFGFDSQSGEYGDLVKKGIIDPTKVVRTAIQNAASVAALLITTEAMIAELPKKGGAGAGGMPPGGGMGGMDF

SEQ ID NO: 20947 - protein, 386 aa, Ipomoea purpurea
MVDGNHPLPAPKVCVTGAAGFIGSWLVKTLLQRGYHVHATVRDPGNTKKVKHLVELPKADTNLTVWKGVMEEEGSFDEAIAGCEGVFHVATPMDFDSKDPENEVIKPTINGVLNIINSCVKAKTVKRLVFTSSAGTLNVQPQQKPVYDETCWSDLDFIYAKKMTGWMYFASKILAEKEAWKATKEKKIDFISIIPPLVVGPFITPTFPPSLITALSLITGNEAHYSIIKQGQYVHLDDLCEAHIFLYEHPKAEGRFICSSHHTTIHGLAEMITQNWPEYYIPSQFKGIEKELAVVYFSSKKLQDMGFQFKYSLEDMYRGAIETLRKKGLLPYSTKEAAAIEEEQETVPLKVEEPTAIEQKQETVPLKLEEEPIAIEKKQEVVPLKA

SEQ ID NO: 20948 - protein, 451 aa, Oryza sativa (japonica cultivar-group)
MVLRRFAWPYGGQRASFCGSFTGWRECPMGLVGAEFQVVFDLPPGVYQYRFLVDGVWRCDETKPCVRDEYGLISNEVLVDNTHPVVQPETSIRVVSMDEGTILTTMPPDQLSQNSGVQIAIFRHRVSEILLHNTIYDVVPVSSKIAVLDARLPVKQAFKIMHDEGLSLVPLWDDQQQTVTGMLTASDFVLILRKLQRNIRTLGHEELEMHSVSAWKEAKLQFYGGPDVAAIQRRPLIHVKDSDNLRDVALAIIRNEISSVPIFKPSTDSSGMPLLGLATLPGIVKFICSKLQEQPEGYSFLQNQIVSMPIGTWSPHTGKASNRQLRTSRPSTPLNSCLDLLLEDRVSSIPIVDDNGALLDVYSLSDIMALGKNDVYTRIELEQVTVEHALELQYQVNGRRHCHTCLSTSTFLEVLEQLSAPGVRRVVVIEPRSRFVQGIISLRDAFTFLIG

SEQ ID NO: 20949 - protein, 164 aa, Zea mays
  misc_feature (20)..(20): Xaa can be any naturally occurring amino acid
  unsure (1)..(164): unsure at all Xaa locations
MHLSFSRYVNDGRPFWQYIXSSSTGCSNLEYFEELYQYYTTEKAWHLCDPDAGRVFEALRKAGVKTAVVSNFDTRLRPLLQALKCDRWFDAVAVSAEVAAENPNPTIFLKACELLGVKPEEVVHIGDDRRNDLWGARDAGCDAWLWGSDVYSFKEVAERIGVEV

SEQ ID NO: 20950 - protein, 554 aa, Vibrio vulnificus CMCP6
MCSVFGILDIKSDAAALRPIALEMSKKLRHRGPDWSGIYASDRAILAHERLAIVGLNSGAQPLYSPDKKLILAVNGEIYNHKEIRARYEGKYDFQTDSDCEVILALYQEMGADLLEELNGIFAFVLYDEEKDQYLIGRDHIGIIPLYQGYDEHGNYYVASEMKALVPVCKTISEFPPGSYYSSTDAGPQRYYIRDWNEYAAVQGNTSSKEELTAALEAAVKRQLMTDVPYGVLLSGGLDSSITSAVAKRYAAMRIEDDEQTEAWWPQLHSFAIGLDGAPDLKAAREVAAKIGTVHHEMTYTIQEGLDAIRDVIYHIETYDVTTIRASTPMYLMGRKIKAMGIKMVLSGEGADEIFGGYLYFHKAPNAQEFHEETVRKLLALNMFDCARANKSLAAWGVEGRVPFLDKEFIDVAMRLNPADKMCGNGKMEKHILRECFEHYLPDSIAWRQKEQFSDGVGYGWIDTLKAVAEEKVTDQQMEAAKFRFPYNTPTTKEGYVYREIFEELFPLTSAAECVPGGPSVACSSAKAIEWDESFKNCIDPSGRAVKAVHNEAY

SEQ ID NO: 20951 - protein, 104 aa, Rhodopseudomonas palustris CGA009
MNFRPLHDRVVVKRIDAEEKTAGGIIIPDTAKEKPSQGEIVAVGPGGRDEAGKLIPIDLKVGDRVLFGKWSGTEVKIDGKELLIMKESDIMGVITDVGAKKKAA

SEQ ID NO: 20952 - protein, 417 aa, Neurospora crassa
MFSRAARLSTRVAAPVRARVAAPRVVIPSIAARRSVTTNAASAQLEKPLPESETEPFQVTLSDESFETYELDPPPYTLNVTKKELKQMYYDMVVVRQMEMAADRLYKEKKIRGFCHLSVGQEAVAVGIEHAIERADDVITSYRCHGFAYMRGGTVRSIIGELLGRRGGIAYGKGGSMHMFTKGFYGGNGIVGAQVAVGAGLAFAHKYTGRKNASIILYGDGASNQGQVFESFNMAKLWNLPALFGCENNKYGMGTSAARSSALTDYYKRGQYIPGLKVNGMDVLAVKAAVAYGKQWTNNDNGPLVLEYVTYRYGGHSMSDPGTTYRTREEIQRMRSTNDPIAGLKQHILEWGVASEEELKNLDKEARAYVNEEVAAAEAMPPPEANQQILFEDIYVKGTEPDFIRGRTPDELFYFKH

SEQ ID NO: 20953 - protein, 462 aa, Vibrio vulnificus CMCP6
MPNQHQYFGHPRGLFLLFGTELWERFSYYAMRAILVLYLTDTTINGGLGWTTKDALDLYGTYTGLVYITPLIGGYLADNYLGQRRSILIGGALMAIGQFTLALPADALGLGSLHTFYLGLALLIAGNGLFKPNISTMVGDLYQEGDNRRDGAFTIFYMGINLGALIAGVVSGSVTTEFGWKAGFVAAGIGMLISLVMQMALAQSWLGDIGREPAAKRDLAIKKSAQKEALTKEEVDRIKVILVMSLFTIVFWAGFEQAGGLMNIYTQQYTDRMIGSFEIPAAWFQSLNPFFIITLAPVLAVLWVKLGKREPNSPVKFALAMFFLALGFLCMVGAVVEQSGDTSVKTSMLWLVGAFFFHTLGELCLSPIGLSLVTKLAPLRLASLMMGAWFGCNAIANYVAGYVGSHVGELGAFAIFSGIAVTATVSGVILLLFSNQLVHWMHGAESGSSTAEQIEEQQALVS

SEQ ID NO: 20954 - protein, 283 aa, Burkholderia pseudomallei K96243
MVRAALVTALPGFRLRRGDVHQIEDDGHDLDVAPRCRFYSSRREVPIDGCHKVQNIAVAAALDGGQAPPSAHGAGQFTDRKLMDKLHAERNVEWQTTSVSRRDRESRQAHGALAVWLTGLPGAGKSTLAIEAERCLHQAGKRTYVLDGDNLRHGLCRDLGFSADDRAENIRRAGEVARLFVDAGVIVLSAFISPFRFDRAKVRALFDAGDFIEVYCDCDPRICEIRDVKGLYRRARAGLISEFTGISSPYEPPRHPDVYVNTGKESLDACVDRIVRRVLHSLR

SEQ ID NO: 20955 - protein, 272 aa, Staphylococcus aureus subsp. aureus MRSA252
MNVYLAEFLGTAILILFGGGVCANVNLKRSAANGADWIVITAGWGLAVTMGVYAVGQFSGAHLNPAVSLALALDGSFDWSLVPGYIVAQMLGAIVGATIVWLMYLPHWKATEEAGAKLGVFSTAPAIKNYFANFLSEIIGTMALTLGILFIGVNKIADGLNPLIVGALIVAIGLSLGGATGYAINPARDLGPRIAHAILPIAGKGGSNWSYAIVPILGPIAGGLLGAVVYAVFYKHTFNIGCAIAIVVVIITLILGYILNKSSKKGDIESIY

SEQ ID NO: 20956 - protein, 545 aa, Pseudomonas putida
MAAKDVKFGDSARKKMLVGVNVLADAVKATLGPKGRNVVLAKSFGAPTITKDGVSVAKEIELKDAFENMGAQLVKEVASKANDAAGDGTTTATVLAQSIVNEGLKAVAAGMNPMDLKRGIDKATAAVVAELKNLSKPCADSKAIAQVGTISANSDSSIGEIIAEAMEKVGKEGVITVEEGSGLENELSVVEGMQFDRGYLSPYFVNKPDTMVAELEGPLLLLVDKKISTSRAAASTERASAGRPLLIVAEDVEGEALATLVVNNMRGIVKVAAVKAPGFGDRRKAMLQDIAVLTGGQVISEEIGVSLETATLEHLGNAKRVILSKENTTIIDGAGADTEIEARVKQIRAQIEETSSDYDREKLQERLAKLAGGVAVIKVGAGTEVEMKEKKARVEDALHATRAAVEEGVVPGGGVALVRALNAIVDLKGDNEDQNVGIALLRRAVESPLRQITANAGDEPSVVANKVKQGSGNFGYNAATGEYGDMIEMGILDPAKVTRSALQAAASIGGLMITTEAMIADAPSDAPAGGGMPDMGGMGGMGGMM

SEQ ID NO: 20957 - protein, 416 aa, Vibrio parahaemolyticus RIMD 2210633
MSKRRVVVTGMGMLSPVGNTVESSWKALLEGKSGIVNIEHFDTTNFSTRFAGLVKDFDCTEYMSKKDARKMDLFIQYGIAAGIQALDDSGLQITEENAPRVGVAIGSGIGGLDLIETGHSALVEKGPRKVSPFFVPSTIVNMVAGNLSIMRGLRGPNIAISTACTTGLHNIGHAARMIAYGDADAMVAGGAEKASTPLGMAGFGAAKALSTRNDEPQKASRPWDKGRDGFVLGDGAGVMVLEEYEHAKARGAKIYAELVGFGMSGDAYHMTSPSEDGSGGALAMEAAMRDANITGTQVGYVNAHGTSTPAGDVAEIKGVKRALGEEGAKQVLVSSTKSMTGHLLGAAGSVEAIITIMSLVDQIVPPTINLDDPEEGLDIDLVPHTARKVEGMEYAICNSFGFGGTNGSLIFKKFAE

SEQ ID NO: 20958 - protein, 67 aa, GIBBERELLA ZEAE PH-1
MPFTASITAYTNIFFSDICKIILAIILPPVGVFLERGCGADFFINILLTILGYIPGIIHALYIILKY

SEQ ID NO: 20959 - protein, 533 aa, Ricinus communis
MQSSTSKENKQPPSSQPHPPPLMVAGAAEPNSSPLRKVVMVASIAAGIQFGWALQLSLLTPYVQLLGIPHTWAAFIWLCGPISGMLVQPIVGYHSDRCTSRFGRRRPFIASGAAFVAIAVFLIGYAADLGHLSGDSLDKSPKTRAIAIFVVGFWILDVANNMLQGPCRALLADLSGTSQKKTRTANALFSFFMAVGNVLGYAAGAYTHLYKLFPFTKTTACDVYCANLKSCFFISIVLLLSLTVLALSYVKEKPWSPDQAVDNAEDDTASQASSSAQPMPFFGEILGAFKNLKRPMWILLLVTCLNWIAWFPFLLFDTDWMGREVYGGDSSGSAEQLKLYDRGVRAGALGLMLNSVVLGFTSLGVEVLARGVGGVKRLWGIVNFVLAVCLAMTVLVTKQAESTRRFATVSGGAKVPLPPPSGVKAGALALFAVMGVPQAITYSIPFALASIFSNTSGAGQGLSLGVLNLSIVIPQMIVSVAAGPWDALFGGGNLPAFVVGAVAALASGIFALTMLPSPQPDMPSAKALTAAFH

SEQ ID NO: 20960 - protein, 130 aa, Brassica napus
PSAYISAATLVIHLVLSWIAVYRLGFGLLALSLIHSLSWWIIVAAQIVYIKMSPKCRRTWEGFSWKAFEGLWDFFRLSAASAVMLCLESWYSQILVLLAGLLKNPELALDSLAICMSISAISFMVFRGIN

SEQ ID NO: 20961 - protein, 158 aa, Staphylococcus aureus subsp. aureus MRSA252
METIYDFVVETNKGVTYKLDAYKGDVMLIVNTASECGFTSQFEGLQSLYEKYKDQGFVILGFPCNQFGGQEPGSGEEAAQNCKLNYGVTFPMHQKIDVKGEHQLPLFRYLTAAQHGFFNEKIKWNFTKFLVDREGNVVKRFAPQKKPVQIEREIEKLL

SEQ ID NO: 20962 - protein, 422 aa, Chlamydia muridarum Nigg
MPHLFSKACQYFPGGVNSPVRACRSVDITPPVVTRASGDFFTDSQGKTYIDFCGSWGSLIHGHSHPYICEAIQQGLQRGCSYGLTSEQEISFAEEIFSYLEISNDHKIRFMSTGSEATMTAVRLARGVTERPIIIKFSGCYHGHSDVFLQEIHFQQTILDTVDLTQPLTLSLPFNNLSLFLDVMNQIGHRVAGVIFEPICANMGVVLPLPGFIEGIIQTCRKTGSLSIMDEVVTGFRVSKGGAAALHPLKPDILVFGKILGGGLPASAVCAPAAIMDYLAPVGKVFQAGTLSGNPLAMSAGKASIALCREKNFYTQLSAIEDDFLSPIEQMIQQSGIPVTLVRYGNLFSFFFSENRPNNLKEVQLCNTDIFRTFYQQAFLKGIYLSPSPFEASFLSTAHSMENLNYAQQVLIESLEQACSLV

SEQ ID NO: 20963 - protein, 450 aa, Laccaria bicolor
MVLPVEPEYEQALSELPNSLKPFLAANPDYGKALEIVPIPERVLQFRVIWEDDQGKAQVNRGFRVQYNSALGPYKGGLRLHPSVNLSILKFLGFEQTFKNALTGLSMGGGKGGSDFDPKGKSDGEIRRFCTSFMSELFRHIGQDTDVPAGDIGTGAREIGYLFGAYKKLQNEFVGMLTGKGLAWGGSFIRPEATGYGLIYYVEHMIAKAAPEYSLSKPETLVAISGSGNVGQFTALKVIELGATVLSLSDSKGSLIAEKGYTKEFIKEIGQLKLKGGALESLAQREGYTYHAGKRPWSLLPVVHVALPGATQNEVSKTEAEDLIKAGVRIVAEGSNMGCTEDAIAVFEESRKAGAGGVWYAPGKASNCGGVAVSGLEMAQNSQRLAWTTDQVDQKLKKIMAECYEICLSAGTKWSGEEIKDGVLPSLLSGANVAGFIKVADAMREHGDWW

SEQ ID NO: 20964 - protein, 284 aa, Triticum aestivum
  misc_feature (45)..(45): Xaa can be any naturally occurring amino acid
  misc_feature (73)..(73): Xaa can be any naturally occurring amino acid
  misc_feature (139)..(139): Xaa can be any naturally occurring amino acid
  misc_feature (150)..(150): Xaa can be any naturally occurring amino acid
  unsure (1)..(284): unsure at all Xaa locations
PLVFRLRGGMQIFVKTLTGKTITLKVESSDTIDNVKAKIQDKEGXIPPDQQRFIFAGKQLENGRTLADYNIQXKESTLHLVLRLRGGMQIFVKTLTGKTITLEVESSDTIDNVKAKIQDKEGIPPDQQRLIFAGKQLEXGRTLADYNIQXKESTLHLVLRLRGGMQIFVKTLTGKTITLEVESSDTIDNVKAKIQDKEGIPPDQQRLIFAGKQLEDGRTLADYNIQKESTLHLVLRLRGGPVSSWAMELLLSLGSQVSVSPVSSNGVWVCVCRCLNCLCFCTIL

SEQ ID NO: 20965 - protein, 616 aa, Colwellia psychrerythraea 34H
MEPAPQSRLKDLITKGKEQGYLTFAQVNDHLPQDIIDSDQVEDIVSMINDMGIQVFENAPDQDTLMMAEANTDEDAAEAAAQALATVESEIGRTTDPVRMYMREMGTVELLTRKGEIVIAKRIEEGIKEVQRSVSEYPPAINYLLDMWDNFEAEEVRLTDIIIGFLDPDAEDDDVAAAATHVGSELSKEDLANEDSEKKEGDAEEEDEEEEDTGPDPELAREKFTLLREAHENATKVVKKKGRGHKDAQEAIDAVAEVFKEFRLIPKLFDKLVKNMRGMMDRLRVQERLIMKHCVSAGMPKTTFIKIFPGNETSKEWFEAEKAAGNPYSTKLGDIEHDVERCIYKLNQIEEETHLNIHGIKDINRRMSIGEAKARRAKKEMVEANLRLVISIAKKYTNRGLQFLDLIQEGNIGLMKAVDKFEYRRGYKFSTYATWWIRQAITRSIADQARTIRIPVHMIETINKLNRVSRQMLQEMGREPTPEELAERMVMPEDKIRKVLKIAKEPISMETPIGDDEDSHLGDFIEDGSGELPVDSATSENLKGATHEVLAGLTAREAKVLRMRFGIDMNTDHTLEEVGKQFDVTRERIRQIEAKALRKLRHPSRSEQLKSFLDGE

SEQ ID NO: 20966 - protein, 285 aa, ASPERGILLUS NIDULANS FGSC A4
MGVPRMPTNTTKLRTTSNSYLQPSNKYPALDTMSLQGKVYAITGGASGIGLATAKLLSSRGGTVCIADVNPTTLAEAESYFSSKTPVVQYTITQVDVSNRQQVDCWIASILTKYQRLDGAANIAGIVGKDHGVKSVAELDDDEWDRILGVNLTGLMYCLRAELKNIANGGSIVNMASIHSTTGVPKYGAYAASKHGVLGLTRVAAKENGHREVRVNAVAPGPIYTPLMQGQWDRIGRPSDAPFDDPIAFRRQGTADEAANVVVFLLSPESSFVTGACYSVDGGWI

SEQ ID NO: 20967 - protein, 322 aa, Hyphomicrobium methylovorum
MSKKKILITWPLPEAAMARARESYDVIAHGDDPKITIDEMIETAKSVDALLITLNEKCRKEVIDRIPENIKCISTYSIGFDHIDLDACKARGIKVGNAPHGVTVATAEIAMLLLLGSARRAGEGEKMIRTRSWPGWEPLELVGEKLDNKTLGIYGFGSIGQALAKRAQGFDMDIDYFDTHRASSSDEASYQATFHDSLDSLLSVSQFFSLNAPSTPETRYFFNKATIKSLPQGAIVVNTARGDLVDNELVVAALEAGRLAYAGFDVFAGEPNINEGYYDLPNTFLFPHIGSAATQAREDMAHQANDLIDALFGGADMSYALA

SEQ ID NO: 20968 - protein, 103 aa, Cyanothece sp. PCC 8801
MAAISINVSTVKPLGDRVFVKVSASEEKTAGGILLPDTAKEKPQIGEIVTVGPGKRNDDGSRSEPEVKVGDKVLYSKYAGTDIKLGGEDYVLLSEKDILAIVD

SEQ ID NO: 20969 - protein, 494 aa, Oryza sativa
  misc_feature (181)..(181): Xaa can be any naturally occurring amino acid
  misc_feature (263)..(263): Xaa can be any naturally occurring amino acid
  unsure (1)..(494): unsure at all Xaa locations
MDPYKHRPSSSFNGPLWSTNSGAPVWNNNNSLTVGSRGPILLEDYHLVEKLANFDRERIPERVVHARGASAKGFFEVTHDITHLTCADFLRAPGVQTPVIVRFSTVIHERGSPETLRDPRGFAIKFYTREGNWDLVGNNFPVFFIRDGMKFPDMVHSLKPNPKSHVQENWRILDFFSHHPXESLHMFTFLFDDIGIPADYRHMDGSGVNTYTLVNRAGKSHYVKFHWKPTCGVKSLLDDEAVTVGGTNHSHATQDLYDSIAAXGNFPEWKLFIQTIDPDHEDRFDFDPLDVTKTWPEDIVPLQPVGRMVLNRNIDNFFSENEQLAFCPGIIVPGIYYSDDKLLQTRIFSYSDTQRHRLGPNYLLLPPNAPKCAHHNNHYDGFMNFMHRDEEVDYFPSRYDPAKHAPRYPIPSATLTGRREKVVIAKENNFKQPGERYRSWDPARQDRFIKRWIDALSDPRLTHEIRSIWLSYWSQADRSLGQKLASRLSAKPSM

SEQ ID NO: 20970 - protein, 319 aa, Streptomyces lividans
MSGKYLVTGGAGYVGSVVAQHLVEAGNEVVVLHNLSTGFREVCRRVPRSSRRHPGRRQVRGRLSFDGVLHFAAFSQVGESVVKPEKYWDNNVGGTMALLEAMRGAGVRRLVFSSTAATYGEPEQVPIVESAPTRPTNPYGASKLAVDHMITGEAAAHGLGAVSVPYFNVAGAYGEYGERHDPESHLIPLVLQVAQGRREAISVYGDDYPTPDRPVCATTSTSPTWPRPTCWPCAAAPGEHLICNLGNGNGFSVREVVETVRRVTGHPIPEIMAPRRGRDPAVLVASAGTAREKLGWNPSRADLAIVSDAWELPQRRAGQ

SEQ ID NO: 20971 - protein, 481 aa, Helicobacter pylori J99
MVVRTQNSESKIKEFFEFCKENEVEFVDFRFSDIKGTWNHIAYSFGALTHDMFKEGIPFDASSFKGWQGIEHSDMILTPDLVRYFIDPFSADVSAVVFCDVYDVYKNQPYEKCPRSIAKKALKHLRDLGLGDVAYFGAENEFFIFDSIKIKDASNSQYYEVDSEEGEWNRDKSFENGVNFGHRPGKQGGYMPVPPTDTMMDIRTEIVKVLNQVGLETFVVHHEVAQAQGEVGVKFGDLVEAADNVQKLKYVVKMVAHLNGKTATFMPKPLYGDNGSGMHTHVSIWKNNENLFGGETYKGLSEFALYFLGGVLRHARGLAAFTNASTNSYKRLIPGYEAPSILTYSASNRSASVRIPYGISKNSARFEFRFPDSSSNPYLAFGAILMAGIDGIKNKMDPGEAMDINLFKLTLDEIREKGIKQMPHTLRRSLEEMLADKQYLKEGQVFSEEFIQAYQSLKFHSEVFPWESKPHPFEFITTYSC

SEQ ID NO: 20972 - protein, 374 aa, Mycoplasma synoviae
MSTKYKYLVDKDGKDVVMTDPSKLIRVLDVNGNLIDKKYKPQLTDKQLVEGYKWMVLSRQQDTYMLQLQRQGRMLTFAPNLGEEALQVATAFALDKKKDWFLPAFRSNATMLALGVPMVNQMLYWNGNERGSKIPEGVNVTPINIVIGTQISQAAGVAFALKQNKTGGVALCFIGNGGTAEGEFYEGMNFASVRSWPAVFCVNNNQWAISTPNHLESISSTIAAKAVAAAVPGVVVDGNDLLASYDVIKEAVEFARKESRPVLVEFVTWRQGPHTTSDNPRVYRTETEEKEQEVWEPMHRIEKYLLDRKLLTKKEIEKIWADSLEVAKKTYEESVKLNEATLDEVFDYTYAELTPELKEQKQEALDFFKAHGGK

SEQ ID NO: 20973 - protein, 207 aa, Shigella boydii
RRELKARHLTMIAIGGSIGTGLFVASGATISQAGPGGALLSYMLIGLMVYFLMTSLGELAAYMPVSGSFATYGQNYVEEGFGFALGWNYWYNWAVTIAVDLVAAQLVMSWWFPDTPGWIWSALFLGVIFLLNYISVRGFGEAEYWFSLIKVTTVIVFIIVGVLMIIGIFKGAQPAGWSNWTIGEAPFAGGFAAMIGVAMIVGFSFQG

SEQ ID NO: 20974 - protein, 503 aa, Zea mays
MEGAGRDANPLSGYRIGKTLGIGSFGKVKIAEHILTGHKVAIKILNRKKIRSMDMEEKVKREIKILRLFMHPHIIRLYEVIDTPADIYVVMEYVKSGELFDYIVEKGRLHEEEARHFFQQIISGVEYCHRNMVAHRDLKPENLLLDSKYNIKIADFGLSNVMRDGHFLKTSCGSPNYAAPEVISGKLYAGPEVDVWSCGVILYALLCGTLPFDDENIPNLFKKIKGGIYTLPSHLSPSARDLIPRMLVVDPMKRITIREIREHVWFKIRLPRYLAVPPPDTAQQVKKVDEETLNDVIKMGFDKNQLIESLQNRLQNEATVAYYLLLDNRLRTTSGYLGSEFQESMDSSFSQVIAETPTSATELRQHGFSESPGSGLRQHFAAERKWALGLQSRAHPREIISEVLKALQELNVYWKKIGHYNMKCRWSPGCLESMMHNSDSFSAESAIIETDVFMEKSTPTVKFEIQLYKTRDEKYLLDLQRVSGSHLLFLDLCSAFLTQLRVL

SEQ ID NO: 20975 - protein, 208 aa, Shigella flexneri
LRRELKARHLTMIAIGGSIGTGLFVASGATISQAGPGGALLSYMLIGLMVYFLMTSLGELAAYMPVSGSFATYGQNYVEEGFGFALGWNYWYNWAVTIAVDLVAAQLVMSWWFPDTPGWIWSALFLGVIFLLNYISVRGFGEAEYWFSLIKVTTVIVFIIVGVLMIIGIFKGAQPAGWSNWTIGEAPFAGGFAAMIGVAMIVGFSFQG

SEQ ID NO: 20976 - protein, 48 aa, Bursera longipes
YFHATIWKGVPKFLRRVDTALKNIGINERFPYNAPLIQFSSWMGGDRD

SEQ ID NO: 20977 - protein, 202 aa, Oryza sativa
MAGGEKVDYVFKVVLIGDSAVGKSQILARFARNEFSIDSKATIGVEFQTRTLLIDHKYRAVTSAYYRGALGALLVYDITKRQSFDHIPRWLEELRGHADKNIVIMLVGNKSDLEDERAVSTEDAKEFAEKENLFFLETSALQATNVENAFQTVLSEIFKIHSKKNMAADPKANGAAPSLAGKKVVVPGPAQEIPKSKCCSSM

SEQ ID NO: 20978 - protein, 404 aa, Oryza sativa (japonica cultivar-group)
MAEICCEVVAGSSSEGKGPECDTGSRAARRRRMEIRRLRVVAERGAEEETSGKRRRLDGGGGEASTDEEDREVERARYGFTSVCGRRRDMEDSVSACPGFLPGHHFFGVFDGHGCSHVATSCGQRMHEIVVDEAGAAAGSAGLDEEARWRGVMERSFARMDAEAVASSRGSVAPAPTCRCEMQLPKCDHVGSTAVVAVLGPRHVVVANCGDSRAVLCRGGAAIPLSCDHKPDRPDELERIHAAGGRVIFWDGARVFGMLAMSRAIGDSYLKPYVICDPEVRVMERKDGEDEFLILASDGLWDVVSNEVACNVVRACLRSSGRRERNRSSPTSNLSPRQSSSSGDEAPNDGAPSAAAGSESDEESAAEEDKACAEAAVLLTKLALARQTSDNVSVVVVNLRRRKL

SEQ ID NO: 20979 - protein, 187 aa, Triticum aestivum
PKSTVGTPAYIAPEVLLKKEYDGKTADVWSCGVTLYVMVVGAYPFEDPEEPKNFRKTIQRILNVQYSIPENVDISPECRHLISRIFVGDPSLRITIPEIRSHGWFLKNLPADLMDDDSMSSQYEEPDQPMQTMDQIMQILTEATIPPACSRINHILTDGLDLDDDMDDLDSDSDIDVDSSGEIVYAM

SEQ ID NO: 20980 - protein, 554 aa, Shewanella oneidensis MR-1
MCSIFSILDIQSDAKELRQVALEMSKLMRHRGPDWSGIYASDKAILAHERLAIVDIEHGAQPLLTEDGSLILAVNGEIYNHKELKAQLGDKYSYQTNSDCEVILALYQEYGTEFLDKLNGIFAFVLYDKAKDAYLIGRDHMGIIPLYTGRDAAGNLYVASEMKALMPVCKTVEEFQPGQYLYSSDAAAVKYYTRDWQQYDAVKDNGASQEELREALEAAVKRQLMSDVPYGVLLSGGLDSSVISAITQTFAKRRIEDDGETGAWWPQLHSFAVGLKGAPDLIAAKKVADAIGTIHHEINFTFQEGLDAIKEVIYHLETYDVTTIRAATPMYLMARKIKAMGIKMVLSGEGADELFGGYLYFHKAPNAQAFHEELVRKLDKLHLFDCLRANKAMAAWGLEARVPFLDKEFMDVAMRINPEAKMSKDGRIEKHILRQAFEHKLPKEVAWRQKEQFSDGVGYSWIDGLKAHAAEQVDDLQLANAKFRFPYNTPETKEAYFYRCFFEEHYPLPSAAETVPGGKSVACSTPEALAWDESLRGIIDPSGRAVRSVHAASY

SEQ ID NO: 20981 - protein, 202 aa, Shigella sonnei
KARHLTMIAIGGSIGTGLFVASGATISQAGPGGALLSYMLIGLMVYFLMTSLGELAAYMPVSGSFATYGQNYVEEGFGFALGWNYWYNWAVTIAVDLVAAQLVMSWWFPDTPGWIWSALFLGVIFLLNYISVRGFGEAEYWFSLIKVTTVIVFIIVGVLMIIGIFKGAQPAGWSNWTIGEAPFAGGFAAMIGVAMIVGFSFQ

SEQ ID NO: 20982 - protein, 48 aa, Bursera odorata
YFHETIWKGVPRFLRRVDTALKNIGINERVPYNAPLLQFSSWMGGDRD

SEQ ID NO: 20983 - protein, 293 aa, Oryza sativa (japonica cultivar-group)
MAAAETSGTVAAPGRWSLHGKMALVTGGTRGIGRAVVEELAALGAAVHTCSRNEAELGERLKEWEARGFRVTISVCDLSARDQRERLIGDVADRFGGKLDILVNNVGTNIRKPTTEYSADEYSFLMATNLESAYHLCQLGHPLLKASGSGSIVFISSVAGIVALFSGTIYAMTKGAMNQLTKNLACEWAKDNIRTNCVAPGYILTSLSEGILANKEFEGSVKSRTPLRRVGEPAEISSLVAFLCMPGSTYITGQTIAVDGDAKKASPRTLQQNGVSNCPLRDAAAFCLDGHRP

SEQ ID NO: 20984 - protein, 261 aa, Geobacter metallireducens GS-15
MGKLAGKVAIITGGSRGMGRATVEVFTKEGARVIIADVLDAEGTALAQEMGDGAIYRHLDVSDERGWGDVARSAIDSFGRIDILVNNAAIFLYALIDETRSEAFRRLLDINVIGPYLGMKTVIPIMKKQRSGSIVNVSSTDGLRGSCGMGAYNASKWGVRGLTKCVAMEVGPFGIRVNSLHPGTVDTPMFNPHGLDRDALNASFGKQFPGVSLSRVGDPSEIARASLFLASDDASYVSGAELAVDGAWTCGVYLQEKPEPN

SEQ ID NO: 20985 - protein, 218 aa, Bartonella henselae str. Houston-1
MTRLPERLLSGYRSFIKNHFFYKTAHYQQLAIEGQKPEILVIACCDSRAIPETIFDAKPGEIFTLRNVANLVPPFSPDNQYHATSAAIEYAVQLLEVKHIVVFGHAHCGGVNTALEGTCKSLSSNDFIGQWISLLIPAAQTIIENKSLTPSEQQTALEKLSIRHSLKNLETFPWIKARKDQGILTLHGVWFDISSGELWSMEQETGHFMRVEVGNFEE

SEQ ID NO: 20986 - protein, 190 aa, Glycine max
MVALVSQDNVVALVSRTGRELQRYRKGRRQVVGCIPYRYKIGDQTSLEAQEELEVLVISSQKGKGMLFPKGGWELDESKKEAALRETMEEAGVRGTVEGKLGKWSFKSKTHDTFYEGYMFPLLVQEQLEFWPEQNVRQRIWMSVSEAREVCQHWWMKEALERLVNRKLGRVTQIEIVGSIHCIGDGNSDL

SEQ ID NO: 20987 - protein, 279 aa, Colwellia psychrerythraea 34H
MNKNLNTFTSMRNDRQLHLYLAWGCPFCHRILASLAITKLDDNISITWMENIKGEAGWKMYFIEDPLFNSDSLKAVYQQLEPTVEHRYSVPLLVDKKNNLLLSTSSPEIVRYVAKGFDDAFSVAYDLIPNKLIKDIDEMNQWLHDKINRAVYLVGFATQQSDYEYKLYELFKALDELEERLKKQLFLFGNQLTESDLYLLATLERFDNIYFCLFKCSLKRIADYPALFRYHNQLRGMESLASTYQPVLTKEHYFMSTMHVLGEARELNPSKIIPIDYYP

SEQ ID NO: 20988 - protein, 589 aa, Desulfovibrio desulfuricans G20
MGNIKEIQQIKTLIAKGKVAGFLTFEEVNKALPAEVNTPEQIEEIIGIFDQLDIAIVDSEKDGKKISVSPAEADDEGGDGGLELTDEDDPADYSSRSTDPVRMYLREMGAVPLLDRDGEVNIAKKIETGEQDVLYALVEVPIAVEELISVGEDLKENRIKLKDVVKTIEEDDPSEDEMNQRQRVILLLDEIQSTFKKKRKVYQRLDECCTLERRVYGIQKEIIAYKEEIVSRLRDIKLEKTLIDRIIETVEDYVRQMHNCQRDLSAYILSTGKTQTEMRELFRQLDDREINPVVAADSLNLTVEELFSFKEMIMGKMEILNRLQEKCCHNVTDLEEVLWRIKRGNSHAMRAKQELIRSNLRLVVSIAKKYTNRGLQFLDLIQEGNIGLMKAVDKFEYQRGYKFSTYATWWIRQAITRAIADQARTIRIPVHMIETINKLIRTSRYLVQELGRDPTPEEIAERMDYPIDKVKKVLKIAKEPISLETPIGDEEDSSLGDFIEDKKAVAPAEEVVNTKLSEQIAAVLADLTPREEQVLRKRFGINEKSDHTLEEVGKLFNVTRERIRQIEAKALRKLRHPVRSQTLRSYYES

SEQ ID NO: 20989 - protein, 389 aa, Digitalis grandiflora
MSWWWAGAIGAAKKKLEEDDAPTKHSSVALIVGVTGIIGNSLAEILPLADTPGGPWKVYGVARRTRPAWHEDNPINYIQCDISDPDDSQAKLSPLTDVTHVFYVTWANRSTEQENCEANSKMFRNVLDAVIPNCPNLKHISLQTGRKHYMGPFESYGKIESHDPPYTEDLPRLKYMNFYYDLEDIMLEEVEKKEGLTWSVHRPGNIFGFSPYSVMNLVGTLCVYAAICKHEGKVLRFTGCKAAWDGYSDCSDADLIAEHHIWAAVDPYAKNEAFNVSNGDVFKWKHFWKVLAEQFGVECGEYEEGVDLKLQDLMKGKEPVWEEIVRENGLTPTKLKDIGIWWFGDVILGNECFLDSMNKSKEHGFLGFRNSKNAFISWIDKAKAYKIVP

SEQ ID NO: 20990 - protein, 249 aa, Desulfovibrio vulgaris subsp. vulgaris str. Hildenborough
MFRSRSIHLSLHIHKNPAAMAERAAHLLADCCEQAIAERGVFNLALSGGSTPIPLFRLLSSSDWAERLPWEKIAVYWVDERCVGPEHPQSNYGVARRELLGNVPATRFYRMKGEADPVDAALAYEKLLREHFNLGPGEFPRFDCVILGMGDDGHTASLFPGEPGLQECERLVIDQYVRRLKTDRLTLTLPVLNNARCCLFLVTGEEKHDVLSKALNLLSEPSLPAHFVRPPSGDLVWIVDDAAARGPEK

SEQ ID NO: 20991 - protein, 886 aa, GIBBERELLA ZEAE PH-1
MAANSENNGSEPTLRRRESLSEIRAANPDLALSGNIISATFNTPHSFVYRKGGDWDLKSRRGQSALFDSFAYLSSDATPWNHTVVAWTGEIDAPTDDVVSLPGTPAPNTLGATSLNALSAPVPIDGNTRLPTPPPVDGLWVPREDQDRLEYRLSHNKTIRTYPVWLSDESEATSEGILLKDQARWRRYAEHDLYTLLHYKQHEPTDGRRERVQWADYYRMNQKFANKIIEIYKPGDIVIVHDYFLMLLPSMLRQRVPNMYISFFLHSPFPSSEFLRCLPRRKEVLEGVLGSNLIGFQSYSYSRHFLSCCTRILGFPSDTLGIDAYGTRVQVGVFPIGIDAAKVENFAWTDAVTEKCNALRQLYRGKKIIVGRDRLDSVRGVAQKLQAFERFLEMYPEWREKVVLIQVTSPTSVEAEKEDLEDDTKVATRVNELVMRINGMYGSLGFSPVQYYPQYLSQNEYFALLRASDMGLITSVRDGMNTTSLEYIICQKVGNAPLILSEFSGTASSLGDAIHINPWDLSGVAEKINAALTMSDDKRQEMQSRLYRHVTEHNVQSWITKFIRKVYNVLGDTSSANSTPLLDRALLLTQYRSANKRLFMFDYDGTLTPIVREPSAAVPSQRLIHTLDLLAADPKNAVWIISGRDQEFLKQHLGNNTRLGFSAEHGSFMKHPGSDEWENLAETFDMGWQAEVMEVFQKYTDRVQGSFIERKRCALTWHYRLADPEQGIHMSRECHKELESTVASKWDVEVMPGKANIEVRPTFINKGEIAKRLITMYHTPGTADDNDGNGHLEFALCMGDDFTDEDMFRSLNAASGPVLDANHVFTVTIGASTKVTLAKSHLLEPEDVIECVALLAGVQDQGERLGEVNLGALSAVEGHVPEQQEM

SEQ ID NO: 20992 - protein, 389 aa, Digitalis parviflora
MSWWWAGAIGSAKKKLEEDDAPSKHSSVALIVGVTGIIGNSLAEILPLADTPGGPWKVYGVARRTRPSWHEDNPINYVQCDISDPDDSQAKLSPLTDVTHVFYVTWANRSTEQENCEANSQMFRNVLDAVIPNCPNLKHISLQTGRKHYMGPFESYGKIESHDPPYSEDLPRLKYMNFYYDLEDIMLEEVEKKEGLTWSVHRPGNIFGFSPYSMMNLVGTLCVYAAICKHEGKVLRFTGCKAAWDGYSDCSDADLIAEHHIWAAVDPYAKNEAFNVSNGDVFKWKHFWKVLAEQFGVECGEYEEGVDLKLQDLMKGKEPVWEEIVRENGLTPTKLKDVGIWWFGDVILGNECFLDSMNKSKEHGFLGFRNSKNAFISWIDKAKAYKIVP

SEQ ID NO: 20993 - protein, 331 aa, Ralstonia eutropha JMP134
MLVTEEKTGLRAIIAIHSTARGPAFGGCRYWSYGSDLAAMEDALRLSRGMSLKNAMADLPFGGGKAVILRGDGQHERNAMYQAFGRAVQVLAGTYITGEDVGTSVADMLAVREVTPYAAGIPRPDGFGGNPSPKTALGVFAAIERGASHVFGARELSGLRVAVQGLGAVGWALAERLHRAGCKLVVADIDDSRTAAARRAFNAVVVAVDDIATQDVDILAPCALGATLHRQSIPALRARLVAGAANNQLATNGDGDALHERGIAYLPDYLVNAGGIISCVREYQGGFAEADVDAEVLRIANRVDSLFVRASSAGEPLSRAADRWALEKLAS

SEQ ID NO: 20994 - protein, 430 aa, GIBBERELLA ZEAE PH-1
MGQTLSEPVVEKTSEKGEDERLIYGVSAMQGWRISMEDAHTTVLDLDTAKTHDSKLSFFGVFDGHGGDKVALFTGQNIHNIIFKQDTFKSGDYAQGLKDGFLATDRAILNDPKYEEEVSGCTACVSLIAGNKLYVANAGDSRGVLGIKGRAKPLSQDHKPQLENEKNRITAAGGFVDFGRVNGNLALSRAIGDFEFKKSAELSPENQIVTAYPDVEQHDLTDEDEFLVLACDGIWDCQSSQAVVEFVRRGIAAKQELEKICENMMDNCLASNSETGGVGCDNMTMCIIGFLNGKSKDEWYEEIARRVANGDGPCAPPEYAEFRGPGVHHNFEDSDSGYEMDPENKGRSFGVGGYRGRIIFLGDGTEVLTDSDDTEMFDNADEDKDLASQVSKNPTSAEKDTAPVAAPGAAENASADTKPADSAKTEVKKE

SEQ ID NO: 20995 - protein, 233 aa, Glycine max
MTRLCSCRYYLKDAVLEGGIPFNKAYGMTAFEYHGTDPRFNKVFNKGMADHSTITMKKILETYTGFEGLKSLVDVGGGTGAVVNMIVSKYPTIKGINFDLPHVIEDAPSYPGVEHVGGDMFVSVPKADAIFMKWICHDWSDEHCLKFLKNCYEALPDNGKVIVAECILPVAPDSSLATKGVVHIDVIMLAHNPGGKERTEKEFEALAKGSGFQGFQVLCCAFNTYVMEFLKKV

SEQ ID NO: 20996 - protein, 624 aa, Mycoplasma synoviae
MKMYTFKFADIGEGLHEGVVAEIYVKVGQQVKEGDNLFSVETDKVTSDIPSPVSGTVTAIKMAQGDTIHVGQDIFVFDDGKGDAPVAEAPAPKAEAKEEAASVVGEVKVNNDLIDFSKMFSGQPAPKAEEVKSSAAPAPSAEDKTFDEGKKYTGKVDESYDVIVVGSGPGGYLAAEEAGKAGLKTLIVEKKYWGGVCLNTGCIPTKTLLKSADVISYLEHAADYGIVAEKAKIDFSKSWVKMHQRKADVVKKISSSVEMLMKMSKVTSVFGEAKFVGARALEVNGKVYEAKNVILATGSTANKLLKVPGFKSGYKSGEILTSEEAINFDKKLPKKVTIVGGGVIGIEFANVFAKAGSKVTVVQNGPVLLPGMDSDVSKLAKEMLEGMGVEVLLNANTLGYEKKTLKVEVDSKTLSLKQDVVLTAIGRSANAINAAEVGVKLGERGEVLVDSLQRTNVAGVYAIGDVTNQKMLAHVAYAHALVAVFHILGDKQKGSYHPKAVPGCVYTSPEIAFIGMTEAEAKAQGRNVMTAKYSFANLGKAIASNKTKGLVKLVVDKEFGEILGAWMVGENVTDYIAEVAMAMENEISVHEIAHTIHPHPTYNEMIWEAARSASLTLTLAAMKK

SEQ ID NO: 20997 - protein, 347 aa, Brassica napus
  misc_feature (280)..(280): Xaa can be any naturally occurring amino acid
  misc_feature (342)..(342): Xaa can be any naturally occurring amino acid
  unsure (1)..(347): unsure at all Xaa locations
RPTRPTDIDIMKEAKPGFYMKHILPLLLKNRVVHFFGFGNRLAFDPIPFQLQRLRCRCNFHALNFVPKIQETGAILVRRLRDSGSHLAPVDPYLVGPKYASFILDKKAGPLHKASKYLAVHLRFEIDMVAHSLCYFGGGDAEKTELSAYREKHFPTLANLTKTKKMPSPEDLRTEGLCPLSPEEAVLMLAGLGFNRKTRVFVAGANIYGGAKRLAALTSLYPNLVTKENVLSETELEPFKNHSSQLAVLDFIACAASDAFAMPDSGSQLSSLVSGYRIYXGAGKMPTIRPNKRRFSDILLKTNPIEWKVFEQRVRKNVRQPTHVLVRPTGRSVSRYPRCKEXMCNED

SEQ ID NO: 20998 - protein, 389 aa, Digitalis lanata
MSWWWAGAIGAAKKRLEEDDAQPKHSSVALIVGVTGIIGNSLAEILPLADTPGGPWKVYGVARRTRPAWHEDNPINYVQCDISDPDDSQAKLSPLTDVTHVFYVTWANRSTEQENCEANSKMFRNVLDAVIPNCPNLKHISLQTGRKHYMGPFESYGKIESHDPPYTEDLPRLKYMNFYYDLEDIMLEEVEKKEGLTWSVHRPGNIFGFSPYSMMNLVGTLCVYAAICKHEGKVLRFTGCKAAWDGYSDCSDADLIAEHHIWAAVDPYAKNEAFNVSNGDVFKWKHFWKVLAEQFGVGCGEYEEGVDLKLQDLMKGKEPVWEEIVRENGLTPTKLKDVGIWWFGDVILGNECFLDSMNKSKEHGFLGFRNSKNAFISWIDKAKAYKIVP

SEQ ID NO: 20999 - protein, 389 aa, Digitalis purpurea
MSWWWAGAIGAAKKKLEEDDAPPKHSSVALIVGVTGIIGNSLAEILPLADTPGGPWKVYGVARRTRPAWHEDNPINYIQCDISDPDDSLAKLSPLTDVTHVFYVTWANRSTEPENCEANSKMFRNVLDAVIPNCPNLKHISLQTGRKHYMGPFESYGKIESHDPPYTEDMPRLKYINFYYDLEDIMLEEVEKKEGLTWSVHRPGNIFGFSPYSMMNLVGTLCVYAATCKHEGKLLRFPGCKAAWDGYSDCSGADLIAEHHIWAAVDPYAKNEAFNVSNGDVFKWKHFWKVLAEQFGVECGEYEEGVDLKLQDLMKGKEAVWEEIVRENGLTPTKLKDIGIWWFGDVILGNECFLDSMNKSKEHGFLGFRNSKNAFISWIDKAKAYKIVP

SEQ ID NO: 21000 - protein, 270 aa, Oryza sativa (japonica cultivar-group)
MGRGRIEIKRIENTTSRQVTFCKRRNGLLKKAYELSVLCDAEVALIVFSSRGRLYEYSNNNNVKATIDRYKKAHACGSTSGAPLIEVNAQQYYQQESAKLRHQIQMLQNTNKHLVGDNVSNLSLKELKQLESRLEKGISKIRARKNELLASEINYMAKREIELQNDNMDLRTKIAEEEQQLQQVTVARSAAMELQAAAAAQQQQQNPFAVAAAQLDMKCFFPLNLFEAAAQVQAVAAQRQQIIPTELNLGYHHHLAIPGAAAADAPPPHF

SEQ ID NO: 21001 - protein, 514 aa, Glycine max
MDRSTGRGGGGSVDMFLRNYKLGKTLGIGSFGKVKIAEHVRTGHKVAIKILNRHKIKNMEMEEKVRREIKILRLFMHHHIIRLYEVVETPTDIYVVMEYVKSGELFDYIVEKGRLQEDEARHFFQQIISGVEYCHRNMVVHRDLKPENLLLDSKFNIKIADFGLSNIMRDGHFLKTSCGSPNYAAPEVISGKLYAGPEVDVWSCGVILYALLCGTLPFDDENIPNLFKKIKGGIYTLPSHLSPGARDLIPRMLVVDPMKRMTIPEIRQHPWFQVHLPRYLAVPPPDTLQQAKKIDEEILQEVVNMGFDRNQLVESLSNRIQNEGTVTYYLLLDNRFRVSSGYLGAEFQETMDSGFNRMHSGEVASPVVGHHSTGYMDYQGVGMRQQFPVERKWALGLQSRAQPREIMTEVLKALQELNVCLEEDWTLYHECRWVAGTAGHHEMINNSLHSNHYFGNDSGIIENEAVSKSNVVKFEVQLYKTREEKYLLDLQRVQGPQFLFLDLCAAFLSQLRVL

SEQ ID NO: 21002 - protein, 196 aa, Shigella boydii
LTMIAIGGSIGTGLFVASGATISQAGPGGALLSYMLIGLMVYFLMTSLGELAAYMPVSGSFATYGQNYVEEGFGFALGWNYWYNWAVTIAVDLVAAQLVMSWWFPDTPGWIWSALFLGVIFLLNYISVRGFGEAEYWFSLIKVTTVIVFIIVGVLMIIGIFKGAQPAGWSNWTIGEAPFAGGLAAMIGVAMIVGFS

SEQ ID NO: 21003 - protein, 230 aa, Streptococcus pyogenes M49 591
  misc_feature (196)..(196): Xaa can be any naturally occurring amino acid
  unsure (1)..(230): unsure at all Xaa locations
MTKYIFVTGGVVSSIGKGIVAASLGRLLKNRGLKVTIQKFDPYINIDPGTMSPYQHGEVYVTDDGAETDLDLGHYERFIDINLNKYSNVTTGKIYSEVLRKERKGEYLGATVQVIPHITDALKEKIKRAASTTDSDVIITEVGGTVGDIESLPFLEALRQMKADVGSENVMYIHTTLLPYLKAAGEMKTKPTQHSXKELRGLGIPPNMLVIRTEEPVEQGIKINWLSSVM

SEQ ID NO: 21004 - protein, 121 aa, Triticum aestivum
MASGKVHTHKAFLLCNYALLGAASSCIFLTLSLRLLPSPCGLLLIFLHALTADFLAELQSYVRDDDGAVILKMVGGLGTAIFVLEWAALALAFSLRLDDAEDDDGQDDLRRAKNWADAYHV

SEQ ID NO: 21005 - protein, 203 aa, Geobacillus kaustophilus HTA426
MSTNIVWHHTSVTKEDRRKRNGHHSAILWFTGLSGSGKSTVANAVSRRLFELGIQNYVLDGDNIRHGLNKDLGFSAADRTENIRRIGEVAKLFVDSGQFVLTAFISPFAEDRALVRRLVEEDEFIEIYVNCPLEECEKRDPKGLYQKARRGEIREFTGIDSPYEAPEAPELTIETHRYSVDECAEQVLAYLRERGMIPAAKTD

SEQ ID NO: 21006 - protein, 306 aa, Hordeum vulgare subsp. vulgare
MANFQITPSAAFVEITELNFSNLYLFHTPLGSNQNQSVIIDSNATTGLGSTVVNNWSICDGPSPGATVVARAQGLHIYAGNWENTFSITFEIERFKGSTLQVMGISVEEGEWAIVGGTGQFAMANGVIHKKFHEQRSDGNIIELTIHGFCPVLKSESLLTKLGPWGGNGGGDKDILEAVPRRLESITVSSGSIIDSIKFSYVDQTGQKHNAGPWGGSGGNQNTFVLGASEFVKEVSGTFGIYDKDLHNIITSLKFITNVKTYGPFGEAKGTPFTIAVQKNSSIVGFFARTGYILMRLVPTCAHSNQ

SEQ ID NO: 21007 - protein, 145 aa, Lactobacillus acidophilus NCFM
MVLDESKKKQALKKLTQEEYDVTQNAATEYPFTGKYDNFYEKGIYVDVVSGEPLFSSQDKYDAGCGWPSFTKPIEKLQYHRDQSHGMERTEVVSPEAQSHLGHVFTDGPVDRGGLRYCINSAALKFIPYDQLNEAGYGEYKKLFK

SEQ ID NO: 21008 - protein, 412 aa, Shewanella oneidensis MR-1
MSKRRVVVTGLGLVTPVGNTVDTTWKALLSGKSGIAPITKFDASEFTTRFSGSVKDFDVEQYLTKKDARKMDLFIQYGMAAGIQAIQDSGLDMSKVNPGRVGTAIGAGMGGMWLIEQNHSALMNGGPRKISPFFVPSTIINMIAGHLSIMYGMTGPNFAVTTACTTGVHNIGFAARTIAYGDADVMVAGGAEDVTCPLGVGGFGAAKALSTRNDDPTAASRPWDKDRDGFVIGDGAGVMVMEEYEHAKARGATIYGELVGFGMSGDAFHMTSPPSDGAGAAAAMVNAVNDAKLPLEKIGYINAHGTSTPAGDKAEAAAVKSVFGDHAYNLLVSSTKSMTGHLLGAAGAVEAIFTLLALRDQAVPPTINLDNPDEGCDLDFVAHTARDVKLDYALCNSFGFGGTNGSLLFKKV

SEQ ID NO: 21009 - protein, 543 aa, Pseudomonas syringae pv. tomato str. DC3000
MTRYIFVTGGVVSSLGKGIASASLAAILEARGLKVTMLKLDPYINVDPGTMSPFQHGEVFVTHDGAETDLDLGHYERFIRTTMTQNNNFTTGRVYEHVLRKERRGDYLGATIQVIPHITDEIKRRIIKGAGDADVALVEIGGTVGDIESQPFLEAIRQLRFEVGARRAMLMHLTLVPYIATAGETKTKPTQHSVKELRSIGLQPDVLVCRSDHPIDISSRRKIAQFTNVEERAVIALEDADTIYKIPGILHSQGLDDFVVERFGLQCGGADLSEWDKVVDAKLNPEHEVTIAMVGKYMELLDAYKSLIEAMSHAGITNRTKVNLRYIDSEDIENQGTGLLEGVDAILVPGGFGLRGVEGKITAVQFARENKVPYLGICLGMQVAVIEFARNVLGWKDANSTEFDRTSAHAVVGLITEWEDATGAVETRTESSDLGGTMRLGAQDCQLEAGSLVHDCYRKDVIVERHRHRYEVNNNLLPQLIEAGLKISGRSGDGALVEVVEAPDHPWFVACQFHPEFTSTPRDGHPLFSGFVKAALAQHQKNS

SEQ ID NO: 21010 - protein, 376 aa, Populus tremula x Populus tremuloides
MASMYNPETSAVQDQQQNPTLLYDALYCSEENWVEEVREDWFQDELEGESYCSNNSNKLNTFPILLEQDLSWEDEELSSLFAKEEQNQLCKDLETNPSLARARCEAVEWILKVNEHYSFTALTAVLAVNYLDRFLFSVHLQKEKPWMAQLAAVSCLSLAAKVEETQVPLLLDFQVEDSKYVFEAKTIQRMEILVLSTLKWKMNPVTPISFLDYITRRLGLEHYLCLEFLKRCERMVLSILADSRSMPYVPSVMAAATMLYVIDNIEPSLAAEYQSQLLSILGIDKDKVEDCSKFLMEFALRDHFKLLSNKRKFCSLPGSPSGVVDVSFSSDSSNDSWSVASSVSSSPKPLSKKSRALQSLNNATTSDFSQHSSPVP

SEQ ID NO: 21011 - protein, 207 aa, Shigella sonnei
RELKARHLTMIAIGGSIGTGLFVASGATISQAGPGGALLSYMLIGLMVYFLMTSLGELAAYMPVSGSFATYGQNYVEEGFGFALGWNYWYNWAVTIAVDLVAAQLVMSWWFPDTPGWIWSALFLGVIFLLNYISVRGFGEAEYWFSLIKVTTVIVFIIVGVLMIIGIFKGAQPAGWSNWTIGEAPFAGGFAAMIGVAMIVGFSFQGT

SEQ ID NO: 21012 - protein, 340 aa, Rhodopseudomonas palustris CGA009
MLFPTTIAGSLPKPEWLAEPNKLWAPWKSTGAELLRAKRDATILALKLQEDSGIDIVTEGEQARQHFVHGFLEAVEGIDFAHKVEMGIRNDRYKAMVPQVVAPLRLKGRVHGFEGQIARAHSTHKIKFTLPGPMTIIDTIADRHYGDRVKMAFAFAELLNEEAKALQADGIDMIQFDEPAFNVYMSEAADWGVKALERAAQDLTCATAVHICYGYGIKANTDWKETLGAEWRQYEDIFPAIDASSIQQVAVECRNSKVPLELLSLLKGKIVQAGVIDVASDEVETAEDVCATIEAVMQHVPKSNIIATTNCGMAPMRREIAEAKLAALGAGAELARERFK

SEQ ID NO: 21013 - protein, 777 aa, Oryza sativa
MRWWKRSVSPSPSPSSSSASASTPASPARASTSRVGGGVPSRRRDVVGFGWGGGSDPQPRLTRQRRLRHVDDIEVGVSALGLDSSPSPAAPSSCPSSRDSVGFGLLTASSTPISRTASNMEVAPPRSSSSPVLLPHPLPLPDEGDSPCRGSGRSLPSPKLFEGDCNGSAVESNLLGVSEIGSDRASLFPRVMAKTVQKNPEHGDLRSNGTNGINCGQRRKAFKEKLQDKSSAETLTFRLNIPAKSAPSSGFSSPVQSPRRLSSVDFLSTATSTQGANLSSAQSVWSPDLYGSSPRCASPEKIMGSQERSPRSSPLRSPVLRSKNPSAPPSPMHPKLFPENHVSRPEGNGSVNFHPLPLPPASVSPKQTNFSHQPVPKVDAPSMAGQWQKGKLIGSGTFGCVYEAANRHTGALCAMKEVNIIPDDAKSAESLKQLEQEIKFLSQFKHENIVQYYGSEYIEDRFYIYLEYVHPGSINKYVNQHCGAMTESVIRSFTRHILKGLAFLHSQKIMHRDIKGANLLVDVNGVVKLADFGMAKHLSTAAPNLSLKGTPYWMAPEVVQATLVKDVGYDLAVDIWSLGCTIIEMFTGKPPWSGLEGPAAMFKVLHKDPSIPDSLSPEGKEFLRCCFRRNPAERPTASKLLEHPFVHNSNNFNQHSALHSPTGLKSTDTGHNARDKKSCKIVSCMRGKNMITTGETSSARSPGSLSNRVAVGLTALPNLETRSLSPTPMSLRSSPGSAAHTPSMHFSIAYHQPSPLPRPNGKEAINLFTLKHDELPT

SEQ ID NO: 21014 - protein, 556 aa, Arabidopsis thaliana
MSGSVSGCGSGGCSIVWFRRDLRVEDNPALAAAVRAGPVIALFVWAPEEEGHYHPGRVSRWWLKNSLAQLDSSLRSLGTCLITKRSTDSVASLLDVVKSTGASQIFFNHLYDPLSLVRDHRAKDVLTAQGIAVRSFNADLLYEPWEVTDELGRPFSMFAAFWERCLSMPYDPESPLLPPKKIISGDVSKCVADPLVFEDDSEKGSNALLARAWSPGWSNGDKALTTFINGPLLEYSKNRRKADSATTSFLSPHLHFGEVSVRKVFHLVRIKQVAWANEGNEAGEESVNLFLKSIGLREYSRYISFNHPYSHERPLLGHLKFFPWAVDENYFKAWRQGRTGYPLVDAGMRELWATGWLHDRIRVVVSSFFVKVLQLPWRWGMKYFWDTLLDADLESDALGWQYITGTLPDSREFDRIDNPQFEGYKFDPNGEYVRRWLPELSRLPTDWIHHPWNAPESVLQAAGIELGSNYPLPIVGLDEAKARLHEALSQMWQLEAASRAAIENGSEEGLGDSAEVEEAPIEFPRDITMEETEPTRLNPNRRYEDGSKHYFFFDQT

SEQ ID NO: 21015 - protein, 285 aa, Methylobacillus flagellatus KT
MAIKSREKVAKSKNKNSIPGIHRIAAIQMASGPYVAANLSEAERLIEIAVNMGARLIALPEYFAIMGLKDTDKVAVREKEGSGPIQRFLSKTAKKHQVWIIGGSVPLECGNPDKVRNTCLVFDDRGKQVARYDKIHLFGFEKGDEHYQEKKTIEPGNKVVTVDTPFGKLGLSICYDLRFPELYRAMGEVDIIAVPSAFTETTGKAHWETLVRARAIENLCYVIAPGQGGYHASGRETHGNSMIVDPWGVVQDRLPRGSGIVISSINTAYLKSLRKSLPALKHRKL

SEQ ID NO: 21016 - protein, 206 aa, Shigella boydii
RELKARHLTMIAIGGSIGTGLFVASGATISQAGPGGALLSYMLIGLMVYFLMTSLGELAAYMPVSGSFATYGQNYVEEGFGFALGWNYWYNWAVTIAVDLVAAQLVMSWWFPDTPGWIWSALFLGVIFLLNYISVRGFGEAEYWFSLIKVTTVIVFIIVGVLMIIGIFKGAQPAGWSNWTIGEAPFAGGLAAMIGVAMIVGFSFQG

SEQ ID NO: 21017 - protein, 48 aa, Bursera schlechtendalii
YFHETIWKGVPRFLRRVDTALKNIGINERVPYNAPLIQFSSWMGGDRD

SEQ ID NO: 21018 - protein, 272 aa, Haloarcula marismortui ATCC 43049
MRLTLAQTDVSSDSVTENVSRATTAIRDAAAEGADLVVLPELFSIGYFAFDRYAREAEGLNGETLSQVRSVAADHDVAVLAGSVVEDLAASADSGFDVPADEGLANTAVFFDRDGERRAVYRKHHLFGYDSAESQLLEPGETVPTVDFEEFTIGVTTCYDLRFPELYRHLVDEGVTLTLVPSAWPYPRVEHWKLFGRARAVENQLYVAAANGVGQFEEAELLGRSTVYDPWGTTLASADDHPALVTATLDPARVEQVREEFPALADRRTDWP

SEQ ID NO: 21019 - protein, 257 aa, Geobacillus kaustophilus HTA426
MFLPSFRLDGKTALVTGAGRGIGRAIAIGFAEAGADVALIARTEADLQETASHIEQFGRKAYIYPLDVIDRKAVHDAVANVKQQAGSLDIVVNNAGMNIRTPALDVTDHEWETIMNTNLKSAFLVSQEAGRVMKEQKQGGNIINIASVAGHVALRTGVVYAATKAALIQMTKVLAFEWGRYGIRVNAIGPWYFRTPLTKTLLEDEAYVNDILAVTPLKRIGELPELVGPAVFLASDASSYITGQTLFVDGGMTIHGF

SEQ ID NO: 21020 - protein, 340 aa, Geobacter metallireducens GS-15
MRAAVFHQIGKPLAIESLNDPIPLDGEVIVNVKACGICGTDIHATADKEMRLADGTVLGHEFAGEIVEVGPQVAVGWAQGDRLCTLPYIGCGHCLACLTGMPWQCKLKKVIGIQTAGGFAEYARVHVNEAVRLPVSVSWQEGALVEPLAIGLHAVRLSRGVAGKSVLVTGAGPIGLAVALWCRFFGARQVVVSEFDPERSKMALAMGATHAVDAKADVGAQYQEITGELPELIFECVGIPGLIAQCVDRAAFGAEIVVVGFCMRPDTFVPALAMLKEITVKFSIGNNKSDFQFIVDMLSSGRISVKPMITAAVSLDDLPKTFESLRTPGEHCKVVVEPGR

SEQ ID NO: 21021 - protein, 372 aa, Ralstonia metallidurans CH34
MQSVIAQAKRIVVKVGSSLVTNDGKGLDHDAIARWAAQIAKLRGTGKEVVLVSSGAIAEGMQRLGWARRPKEIHELQAAAAVGQMGLAQVYESQFGRYGIRTAQVLLTHADLADRERYLNARSTLLTLLSLGVVPIINENDTVVTDEIKFGDNDTLGALVTNLIEGDALVILTDQRGLYTADPRKDPNAEFVHEALAGTPELEAMAGGAGSSIGRGGMLTKILAAKRAAKSGAHTTIASGREADVLGRLAAGEAIGTQLLAPTGRLTARKQWMADHLQLRGRVIIDAGAVEKLTSGGKSLLPIGVVEVQGEFARGEVIACASPEGKEVARGITNYSSAEARLIARKPSSEIESVLGHLNEPELIHRDNLVLV

SEQ ID NO: 21022 - protein, 124 aa, Chlorella pyrenoidosa
YLPPLTDAEISRQVDYIVNNGWTPCLEFAESTSAYASNENCIRMNNTTCLYYDNRYWTMWKLPMFGCTDGHQVLAEVSNCRRAFPDAYIRLVGFDPVRQVQVAGFLVHRPPSARDHQSPATRSV

SEQ ID NO: 21023 - protein, 265 aa, Zea mays
  misc_feature (243)..(243): Xaa can be any naturally occurring amino acid
  misc_feature (252)..(252): Xaa can be any naturally occurring amino acid
  misc_feature (263)..(263): Xaa can be any naturally occurring amino acid
  unsure (1)..(265): unsure at all Xaa locations
MASAPRLSSAFRAATPLRTTAFNGLRFYSSKTTSLKETFANKLPGEIEKIKKLRKEHGNKVIGEVTLDQVYGGARGIKSLVWEGSVLDSEEGIRFRGKTIPECQELLPKAPGGQEPLPEGLFWLLLTGEVPSEQQVRDLSAEWAARSDVPKFVEELIDRCPSDLHPMAQFSLAVTALEHESNFAKAYAKGMHKSQYWEHTFEDSMDLIAKLPTIAAKIYRNIYKDGKVAPIQKDKDYSFNLAXQLGFSENRXFVELMRLYLTXHT

SEQ ID NO: 21024 - protein, 215 aa, Bacillus licheniformis
MQTGGSFFEPFNSYNSGLWQKANGYSNGDMFNCTWRANNVSMTSSGEMLLALTSPSYNKFDCGENRSVQTYGYGLYEVRMKPAKNTGIVSSFFTYTGPTDGTPWDEIDIEFLGKDTTKVQFNYYTNGAGNHEKVADLGFDAANAYHTYAFDWQPNSIKWYVDGQLKHTATSQIPTTPGKIMMNLWNGIGVDDWLGSYNGVNPLYAHYDWVRYTKK

SEQ ID NO: 21025 - protein, 453 aa, Rickettsia prowazekii str. Madrid E
MVIGSGPAGYTGSIRAAQLGLKVACIEKNDTLGGTCLNIGCIPSKALLNTSKKYEEAIRHFDSIGIIADIKLDLQKMLSNKDKIVLDLTKGIESLFIKNKITKIKGEAKIISNNIVEVNKEQIKAKNILITTGSSVIEIPNITIDEEFIVSSTGALKLSKVPKHLIVVGGGYIGLELGSVWRRLGAKVTVVEYASSIVPMLDKEIAKQFMTIQQKQGIEFKLNTKVIASEVKSGKVNLTIEEWDKRSIITSDVVLIAVGRKAYTKNLGFESVGITTDNKGRIEINERFQTAVSNIYAVGDVVKGAMLAHKAEEEAIAAVEIMVGQAGHVNYNLIPSVIYTYPEVASVGATEEQLQEQGINYKVGKFPFLANSRARAIGSTEGMVKILADSKTDRVLGAHIIGSDAGTLIAELIAYMEFGASSEDIARTCHAHPTLSEAIKEAALNVDKRTINI

SEQ ID NO: 21026 - protein, 274 aa, Arabidopsis thaliana
MMLSFAIAYTAKRFVHRSLVVRGNAATVSPSFSFCRRRAFSGKTSYDYREKLSRNGLTELKLDDAVALFGEMVKSRPLPSIVEFNKLLSAIAKMNKFDLKVLEVYKGFEDVNTLVDVGGGIGTIIGQVTSKYPHIKGINFDLASVLAHAPFNKGVEHVSGDMFKEIPKGDAIFMKWILHDWTDEDCVKILKNYWKSLPEKGKVIIVEVVTPEEPKINDISSNIVFGMDMLMLAVSSGGKERSLSQFETLASDSGFLRCEIICHAFSYSVIELHK

SEQ ID NO: 21027 - protein, 458 aa, ASPERGILLUS NIDULANS FGSC A4
MRILLPVLATASLAHAVSITGCHKHGDDVYCLTDDGGEVQVLLDNPPAGDPPSEYTDCHEHGSTWYCVDAGGNDVEILGEITDSSTSTNSTNEETTTTESTEESTEGENCHFHAGVEHCLAPGESESGGSTSESSCGIQTRDYDMPLRIGTLFVVLVTSSIGVFLPMGLVKLPSATINVWASTIIKQFGTGVILSTAFVHLYTHADLMFGNECLGELDYEATTSAVVMAGIFLSFLTEYMGHRFILARAARSAERSQPAENGSNISSKSAAEQEPQPHHHATLAGLGHHHGGDPTNPNTKLSVLVMEAGVIFHSILIGVTLVVAGDSFYKTLLVVIVFHQFFEGLALGARIALLPGRTFPSKAIMGGVFALITPIGMAIGMGVIHSFNGQDRQTLVALGTLDALSAGILVWVGVVDMWARDWVIEGGDMFSAPLGHVAAGGISLVAGMILMGVLGKWA

SEQ ID NO: 21028 - protein, 303 aa, Enterococcus faecalis V583
MNAVTIIGSINLDTTLRVKEMPKPGETIHAIEHFTAGGGKGANQAVAAKRSGAETYFIGAVGNDGAGAMMTDLMSQDEINLTGVTTLEKTATGQAFIMVDNAGENSIMIYAGANNAFTPKQVQEHQEIIEKSDFVIAQFESAIDSTIAAFKIAKKAGVKTILNPAPALEQVPEELLNVTDMIVPNETETEILTGIKITDEASMRKAAEALHQLGIEAVIITVGSKGAFYDVNGRSGIVPAFKVKAVDTTAAGDTFIGALSSILEKDFSNLEEAIRYGNKASSLTVQRFGAQPSIPYQHELADK

SEQ ID NO: 21029 - protein, 212 aa, Bacteroides fragilis NCTC 9343
MKETDLLDEYILQHIDEEGEYLKSLYRDTHVKLLRPRMASGHLQGRMLKMFVRMIRPRQILEIGTYSGYSALCLAEGLEEGGMLHTFEINDEQEDFTRPWLENSAYADKIKFYIGDALRLIPALGITFDLAFVDGDKRKYIDYYEMTLAHLSVGGYIIADNTLWDGHVLEEPHSNDHQTIGIKAFNELVAHDERVEKVILPLRDGLTIIRKK

SEQ ID NO: 21030 - protein, 583 aa, Triticum aestivum
MAAPTSSAASTLAPFSHPKTLAAATAAGGSSSVAFSPAASHPACALSVSGARRRAVAAMVAAPAKVGAAMPSLDFDTAVFNKEKVSLAGHEEYIVRGGRNLFPLLPEAFKGVKQIGVIGWGSQGPAQAQNLRDSLVEAKSDIVVKIGLRKGSKSFEEARGAGFTEENGTLGDIWETVSGSDLVLLLISDSAQADNYEKIFSHMKPNSILGLSHGFLLGHLQSHGLDFPKNISVVAVCPKGMGPSVRRLYVQGKEVNGAGINASFAVHQDVDGRATDVALGWSVALGSPFTFATTLEQEYKSDIFGERGILLGAVHGIVEALFRRYTEQGMDEELAYKSTVEGITGIISKTISKKGMLEVYNSLSEEGKKEFNKAYSASFYPCMDILYECYEDVASGSEIRSVVLAGRRFYDKEGLPAFPMGKIDQTRMWKVGEKVRSTRPDGDLGPLHPFTAGVYVALMMAQIEVLRKKGHSYSEIINESVIESVDSLNPFMHARGVAFMVDNCSTTARLGSRKWAPRFDYILTQQAFVTVDKDEPVNQDLISNFMSDPVHGAIEVCAELRPTVDISVTADADFVRPELRQSA

SEQ ID NO: 21031 - protein, 485 aa, Bacteroides fragilis NCTC 9343
MLLKQTKIVASISDRRCDVDFIKELFDAGMNVVRMNTAHASREGFEALIANVRAVSNRIAILMDTKGPEVRTTANADPILYQIGEKVKIVGDPDRETTRECIAVSYPNFVHDLNVGGTILIDDGDLELRVIDKTTEYLLCEVQNEATLGSRKSVNVPGVRINLPSLTEKDRNNILYAIEKDIDFIAHSFVRNRQDVLDIRGILDAHNSDIRIIAKIENQEGVDNIDEILEVADGVMVARGDLGIEVPQERIPGIQRMLIRKCILAKKPVIVATQMLHTMINNPRPTRAEVTDIANAIYYRTDALMLSGETAYGKYPVEAVKTMTKIAAQAEKDKLEENDIRIPLDENSNDVTAFLAKQAVKATTKLKIRAIITDSYQGRTARNLAAFRGKYPVLAICYKEKTMRHLALSYGVEAIYMPELANGQEYYFAALRRLLKEGRLHPTDMVGYLSSGKAGTQTSFLEINVVEDALKHAGDSVLPNSNRYL

SEQ ID NO: 21032 - protein, 587 aa, Geobacillus stearothermophilus
MKRKTKIVCTIGPASESVDKLVQLMEAGMNVARLNFSHGDHEEHGRRIANIREAAKRTGRTVAILLDTKGPEIRTHNMENGAIELKEGSKLVISMSEVLGTPEKISVTYPSLIDDVSVGAKILLDDGLISLEVNAVDKQAGEIVTTVLNGGVLKNKKGVNVPGVKVNLPGITEKDRADILFGIRQGIDFIAASFVRRASDVLEIRELLEAHDALHIQIIAKIENEEGVANIDEILEAADGLMVARGDLGVEIPAEEVPLIQKLLIKKCNMLGKPVITATQMLDSMQRNPRPTRAEASDVANAIFDGTDAVMLSGETAAGQYPVEAVKTMHQIALRTEQALEHRDILSQRTKESQTTITDAIGQSVAHTALNLDVAAIVTPTVSGKTPQMVAKYRPKAPIIAVTSNEAVSRRLALVWGVYTKEAPHVNTTDEMLDVAVDAAVRSGLVKHGDLVVITAGVPVGETGSTNLMKVHVISDLLAKGQGIGRKSAFGKAVVAKTAEEARQKMVDGGILVTVSTDADMMPAIEKAAAIITEEGGLTSHAAVVGLSLGIPVIVGVENATTLFKDGQEITVDGGFGAVYRGHASVL

SEQ ID NO: 21033 - protein, 151 aa, Debaryomyces hansenii CBS767
MQIFVKTLTGKTITLEVESSDTIDNVKSKIQDKEGIPPDQQRLIFAGKQLEDGRTLSDYNIQKESTLHLVLRLRGGGKKRKKKVYTTPKKIRHKHRKHKLAVLTYYKVDNDGKVERLRRECPSITCGAGIFMADMKDRQYCGKCHTTFKSN

SEQ ID NO: 21034 - protein, 204 aa, Shigella boydii
RRELKARHLTMIAIGGSIGTGLFVASGATISQAGPGGALLSYMLIGLMVYFLMTSLGELAAYMPVSGSFATYGQNYVEEGFGFALGWNYWYNWAVTIAVDLVAAQLVMSWWFPDTPGWIWSALFLGVIFLLNYISVRGFGEAEYWFSLIKVTTVIVFIIVGVLMIIGIFKGAQPAGWSNWTIGEAPFAGGLAAMIGVAMIVGFS

SEQ ID NO: 21035 - protein, 350 aa, Geobacillus kaustophilus HTA426
MNKVFAWMTWIGVPVSVIGGFLHWPTVLMFVLYCLTIIALASYMGRATESLAIVAGPRIGGLLNATFGNAVELIISIFALQAGLVDVVLASLTGSVLGNLLLVAGLSFFVGGLKYKRQEFNIYDARHNAGLLTFAIFIAFVIPEVFTMHMNHSEQVALSVGISIIMILLYAAALYFRLVTHRGVYQHKSEEVEEHEEPEWGKGKATAILALATVAVAYLSERLVHTFETVAESFGWSELFIGIIIVAIVGNAAEHASAVIMAYKNKMNVAVEIAVGSTLQIAMFVAPVLVLVSLLFPEKMPLVFSLPELVAMAASVLLMIVLSNDGDTNWFEGATLLAAYTIMGIGFYLL

SEQ ID NO: 21036 - protein, 48 aa, Bursera simaruba
YFHQTIWKGVPKFLRRVDTALKNIGINERVPYNAPLIQFSSWMGGDRD

SEQ ID NO: 21037 - protein, 389 aa, Mycobacterium avium subsp. paratuberculosis K-10
MHLLVELEKTVAEAVIVSALRTPIGTARKGTLRDTSAFDLAHHVVSEAVKDIDPTQVDDVILGEGLYGGGVLARHAAITAGLTQVPGLANNRHCAAGQAAVQSAAASVRAGMDQLVIAGGVNSASTSPRSRMQVDGEWVDWFPPTHPDRPDAPNMDMSITVGWNAAVKAGVSREEMDAWALRSHRNAIAAIDEGRFKEEIVPIDTPHGLFSVDEHPRRDTSMEKLAALKPLHPEIEGFSITAGNACGANDGAAVLTIASDRLGLRPLATIRSWASVGVDPAITGLAPVEAIPKALGRAGLSISDVDLFEINEAFAAMCVATVKLLELDPDKVNVSGSGCSLGHPVAATGARMLVTLVHELRRRGGGIGVAAMCAGGGMGSATVIEVAGE

SEQ ID NO: 21038 - protein, 401 aa, Solanum tuberosum
MAFSAGKSYAFSTNFDPLQQNLWGSKPPISSLSIKDIDFKQCDKHNILSKKPLYISAVLSGFGHADESKEFKSRDPLVQCNAYEASQPQSIPIDIEFGQEAQAAATQKLKIGLYFATWWALNVVFNIYNKKVLNAFPFPWLTSTLSLAAGSLMMLVSWATKIAETPKTDFDFWKALFPVAVAHTIGHVAATVSMSKVAVSFTHIIKSGEPAFSVLVSRLLGETFPLPVYLSLLPIIGGCGLAAITELNFNLIGFMGAMISNLAFVFRNIFSKKGMKGKSVGGMNYYACLSMMSLLILIPFAIAVEGPQVWALGWQNAVSQIGPNFIWWVVAQSVFYHLYNQVSYMSLNEISPLTFSIGNTMKRISVIVSSIIIFQIPIQPINALGAAIAILGTFLYSQAKQ

SEQ ID NO: 21039 - protein, 375 aa, Pseudomonas fluorescens Pf-5
MAEAKVLSGAGLRGQVAGQTALSTVGQAGAGLTYRGYDVRELAADAQFEEVAYLLLYGDLPTQEQLAAYSAKLSKLRDLPQALKEVLERIPAQAHPMDVMRTGCSFLGNIEPEKDFSQQHDVTDRLLAAFPAIMCYWYRFSHEGVRINCVSDEQTIGGHFLHLLHGKKPSDLHVKVMNVSLILYAEHEFNASTFTARVCASTLSDLYSCVTAAIGSLRGPLHGGANEAAMELIERFQSPEEATAELLRMLERKDKIMGFGHAIYKDSDPRNEVIKGWSQKLADEVGDKVLFPVSEAIDKTMWEQKKLFPNADFYHASAYHFMGIPTKLFTPIFVCSRLTGWAAHVFEQRANNRIIRPSAEYIGVEQRKFVPIERR

SEQ ID NO: 21040 - protein, 348 aa, Arabidopsis thaliana
MLWFFLLQYDTKYYYVLGVGQTERKFWFFTPPEIGPDVPYTFGLIGDLGQSYDSNITLTHYENNPTKGQAVLFVGDISYADTYPDHDNRRWDSWGRFAERSTAYQPWIWTTGNHELDFAPEIGENRPFKPFTHRYRTPYRSSGSTEPFWYSIKRGPAYIIVLASYSAYGKYTPQYQWLEEEFPKVNRTETPWLIVLMHSPWYNSYDYHYMEGETMRVMYEAWFVKYKVDVVFAGHVHAYERSERVSNIAYNVVNGICTPVKDQSAPVYITIGDGGNIEGLATKMTEPQPKYSAFREASFGHAIFSIKNRTHAHYGWHRNHDGYAVEGDRMWFYNRFWHPVDDSPSCNS

SEQ ID NO: 21041 - protein, 321 aa, Mucor mucedo
MSTDYLTLNRTGDKMPIRGFGCWKIDTKDCEETVYQAIKTGYRLFDGACDYGNEVEVGRGINKAINEGLVKREDLFIVTKLWNTFHSKKHVRALFDRQLKDTGLEYFDLYLIHFPVPLQYVDPATVYPPGWYVGDAKSLQFEQSPIHECWAELEKIVDAGLARNIGVANFNCQAILDLLTYARIKPAVLQIELHPYLPQERLVKWVKEQGIQITAYSSFGPTSYVDLTESGKTYTSLLEHASVKSVADKHNVSTGQVLLRWALDREFAVIPKSVNAGRMKANLEILDIKLDAEDNKTLDSLKTNQRFNDPMTYGFGLPLFD

SEQ ID NO: 21042 - protein, 159 aa, Bacillus licheniformis ATCC 14580
MSIYDISVKTIKGEDTTLRPYKGKVLLIVNTASKCGFTPQYQQLQDLYETYKDRGLEILGFPSNQFMNQEPGDEKSIEEFCSVNYGVTFPMFSKVNVKGDQIHPLFRHLTNKAKGMLGTKAVKWNFTKFLVDQTGENVVRFSPQTNPKEMEETIQKWLG

SEQ ID NO: 21043 - protein, 476 aa, Burkholderia pseudomallei K96243
MSSERQFQAIAQREGGLRRTLSARQMTMIAIGGAIGTGLFLGSGFAIGFAGPSVLISYAIGALISLLLMGCLAEMTVAHPTSGSFGAHAEHYLGPWAGFLVRYAYWACIVLAVGTEVTAVALYMKYWLPAVPGWVWIAGFSAVLVFVNALSVDVFGSVEYGFSVVKIAAIVAFIAIGGYVVFVDPSLVADPNAGAPGLRHYFGHGGFFPKGLWGTWVAVIVSIFSYLSIEMIAVAAGEAQDPERAVTRAFRSTVIRLVLFYLVTLALMLAIVPWTAAGRDESPFVKVMIAIHLPGAAGVINFVVLIAALSAMNSQLYITTRMMFSLACAGHAPRGLGRLTRRGVPLNALLLSTAGIAIATLVSVAYPDASFTIMMAISMFGAMFTWTMIFVTHYFFRRKRAAQGLPPPRFRMPGFPLATLAGAALMLAIMATTYFTPEFHMTLVFGAPFLAALSVLYFARYRRRPHALARAESQPR

SEQ ID NO: 21044 - protein, 246 aa, Helianthus annuus
QHVPGPSLARQSSINLAQDLRKKTVDEVWQGIQQGKNKGSNNSSGSGNNDGDKRGNRERQPTLGEMTLEDFLLKAGVVTGSGKKNVDVNQENANHQQAQWMQYQVAPIPQQHVYMSGHHPVQQSLSIGANPMMDMVYPETQMAMSPSHLMHNLSDTQTPGRKRVASGDVIEKTVERRQKRMIKNRESAARSRARKQAYTHELENKISRLEEENELLKRQKEVGMVLPSAPPPKPKYQLRRTSSASF

SEQ ID NO: 21045 - protein, 608 aa, Vibrio parahaemolyticus RIMD 2210633
MSLPFLFHSQTVDGLAFDGKRVKVCLKTEALTFDAVYVRIEPDNEEYLVAMVQCGRAGELLLWEVSFEPNRDRDITHYVFKVVRNGQQYWLDARGVQKRIPPKEFHFKLNVNHQPPKWVQEQVFYQIFPDRFAASQSESAIREAYYEYDPDAEIKMWGEPVGNHQNSGAREFFGGDLKGVEQKLGYLEQLGVTALYFNPIFSSPSNHKYDTTDYFTIDPMLGTNEHFASLCEKIRSKNMKIVLDAVFNHTSVHHPWFDIQQKGKGAYGNPKSDFRDYYFFDGESNHYIGWKGIDNLPVLNFENHEVREYIYQGEASVIKHWLKPPYSVDGWRFDVIHMLGEGEGAKNNAHYVKAFRQATKSVNPNAYVLGEHFFEATQWLQGEQEDGAMNYYGFAHPVRAFIAHQDITYDPIDIDGFEFKAWLDEARAKVPFANQLSQLNQLDSHDTARFLTLVNGDEKKMKIALALLMTYVGAPCIYYGSEVGLEGSFDPDNRRCFPWHLVQGSPWLHLYQQWIEIRKQFQALQSGSMQWLYCDERAFAYARQLGEETIIVAVNIGLQESTIDLPLWQLGLNAKHLHQLLDKCEIIDYEGHVSVNMAALSINLWQVK

SEQ ID NO: 21046 - protein, 439 aa, Streptococcus pneumoniae R6
MGSFLMPKSEVYMKQESTVDLLLDVDQRPSDGKGILLSFQHVFAMFGATILVPLILGMPVSVALFASGVGTLIYMIATGFKVPVYLGSSFAFITAMSLAMKEMGGDVSAAQTGVILTGLVYVLVATSIRFVGTKWIDKLLPPIIIGPMIIVIGLGLAGSAVTNAGLVADGNWKNALVAVVTFLIAAFINTKGKGFLRIIPFLFAIIGGYLFALTLGLVDFTPVLKANWFEIPGFYLPFSTGGAFKEYNLYFGPEAIAILPIAIVTISEHIGDHTVLGQICGRQFLKEPGLHRTLLGDGIATSVSAFLGGPANTTYGENTGVIGMTRIASVSVIRNAAFIAIALSFLGKFTALISTIPNAVLGGMSILLYGVIASNGLKVLIKERVDFAQMRNLIIASAMLVLGLGGAILKLGPVTLSGTALSAMTGIILNLILPYENKD

SEQ ID NO: 21047 - protein, 97 aa, Buchnera aphidicola str. Bp (Baizongia pistaciae)
MKIRPLHDRVIVKRKEAESKSAGGIVLTGSAAGKSTRGTVIAVGNGRILDNGNLKSLDVKVGDTVIFNEGYGAKVEKIDNEELLILTESDILAIVEE

SEQ ID NO: 21048 - protein, 277 aa, Ricinus communis
TNNNELFLNLVMEYVPESMYRVLKHYSNAKQTMPLVYVKLYMYQIFRGLAYIHTVPGVCHRDLKPQNILVDPLTHQVKLCDFGSAKVLVKGEANISYICSRFYRAPELIFGATEYTTSIDIWSAGCVLAELLLGQPLFPGENAVDQLVEIIKVLGTPTREEIRCMNPNYTDFRFPQIKAHPWHKVFHKRMPPEAIDLASRLLQYSPSLRCTALEACAHPFFDELREPNARLPNGRPLPPLFNFKQELNGASPELVNKLIPDHMKRQMGLNFLHLAGT

SEQ ID NO: 21049 - protein, 260 aa, Geobacter metallireducens GS-15
MGKLDGKVAIVTGGARGMGQTTAEVFVQEGASVVIVDVLDVEGEALAKRLGRNTMYQHLDVTDEQGWEQLVEGIIDRYGCIDILVNNAAVFFSSPIDETRSEAFRRILDINLIGPYLGMKAVIPTMKKNRRGSIINVSSVNGLRGSSGSGAYSASKWGVRGLTKCVAMEVGPFGIRVNSLHPGWIVTPMNNPDGKSFEEVNAELKIKFPGIALSRVGQSEEIARASLFLASDDSSYISGAELAVDGAWSCGVYLQDKPMP

SEQ ID NO: 21050 - protein, 591 aa, Bordetella bronchiseptica RB50
MSNIVEIKVPDIGDFKEVEVIEVLVAAGDTIKAEQSLITVESDKASMEIPASSAGVVKSVKVKVGDKVAEGTVILDVEAAGEAAAAPKAEAPKTEAPKAEAPKAPAAKASAPAAAAYSGSADLECDMLVLGAGPGGYSAAFRAADLGMDTVMVERYATLGGVCLNVGCIPSKALLHNAAVIDEARALAAHGISFGEPKVDLDKLRGYKDSVVAKLTGGLAGMARARKVRVVTGTGEFADPHHLTVTDGEGKKQTIRFKQAIIAAGSQSVKLPFLPDDERIVDSTGALQLRAIPKKMLIIGGGIIGLEMGTVYSTLGARLDVVEMLDGLMQGADRDLVKVWQKMNAPRFDNIMLKTKTVGAEARKDGIYVSFEGEGAPKEPQRYDLVLQAVGRSPNGKKIGAERAGVAVTERGFIEVDRQMRTNVPHIYAIGDVVGQPMLAHKAVHEGHVAAEAAHGEKSFFDARVIPSVAYTDPEVAWVGLTEDEAKKQGVKVEKGLFPWAASGRAIANGRDEGFTKLLFDAETHRIVGGGIVGTHAGDLISEIALAIEMGADMVDIGKTIHPHPTLGESVGMAAEVAEGVCTDLPPMRKK

SEQ ID NO: 21051 - protein, 1035 aa, GIBBERELLA ZEAE PH-1
MDGFYSPHQQQQQQQQQFQQQQQQQQQQQQQQQRMQQNQPNHMQHNMNDSPYFPGGDSLDDIVRDNQDKLYRRQSMPQAFANHMGQFQMPQHQEQHHQGQRRMSAVGNGDIMTFGTDNGDLNSYQFNQPMGAGFPTINTSIGMDQMGNYLTADPNDYSAISPDMMSSMMPNTFASMNVGAQMAGNGSPMNLYSPSIGQFPQGQLTPQVQVGNDFSMDLSPDGSSMNMNQSNPPQPNSIPAPANTAMDTIEDPGDNIMNNHQSYNNTSNGDSSQTLPPLSRQVSTASGSVVSPPQQQSHGTVSTTVTQPTSASVATTPSTGDGPRDSKEKTIYSKSGFDMLKALWLVATRKNPRIQLGAVDMSCAFVVCDVSMNDCPIIYVSDNFQNLTGYSRHEIVGQNCRFLQAPDGKVEAGSKREFVDDGAVYNLKKMVHEGREVQQSLINYRKGGKPFLNLLTMIPIPWDTDEIRYFIGFQIDLVECPDAIASNQDLGGVKVNYKHSDIGQYIWTPPQSSQWEPENGQTLGVDDVSTLLQQFTPKGLTSDWHKQSWDKMLLENTDDVVHVLSLKGLFLYLSPSCKKVLEYEAADLVGNSLSTVCHPSDIVPVTRELKDTTTGNPVNIVFRIRRKHSGYTWFESHGSLFVEQGKGRKCIILVGRKRPVFALSRRNLEANGGIGDSELWTKLSTSGLFLYVSSNIRSLLDLQPDSLVGTSIQDLMRKESRPEFGRTMEKARRGKTVTCKHEVQNRRGQVLQAQTTLYPGDASEGQKPSFLLAQTKLLKASSRNLAPASASGSRSIAATPRSNNGNESHATGHVSQPAGGALAPGTQDAALASEDNIFDELRTTKCSSWQFELRQMEKVNRILAEELGGLLSSKKKRKRRKGVGNVVRDCANCHTRNTPEWRRGPSGQRDLCNSCGLRWAKQTGRVSPRNSSRGANTANGDSRSKKSNSPSSPLHKELSADSSSAQAANSENGINPAQLTKQKIVNGTAAPSGAPSATGVKTSAGMPPLSHSSMLGVGQPSSMASIQEERETSQS

SEQ ID NO: 21052 - protein, 642 aa, Gloeobacter violaceus PCC 7421
MFRGYALSLYSRGIKGDPMDTQKIGEVEPHSQIEVQEKEDEFVNLLQLSDIEFRGETIYFIVVDRFFNGDPDNDDGPDPSLYDPERQDWGKYWGGDLQGIIEKLDYLQQLGVTAVWVTPLFEQVEAMAWEAAPIHGYWTRDFKRINPRWVAGEHEVRLFERNDTTFDRLIEALHKRGMKLVLDIVCNHSSPDAGGIKGQLFDDGKLIADYNDDKDHWYHHYGEVNNWDDEWQVQNCDLAGLATFNENNVRYRNYIKGAIKLWLDKGVDALRVDTVKHMPIWFWQEFNSDIQAHKPDVFVFGEWIYSHPLGERPVEFANYSGMTILDFGLCVAIRKALGQGGVGGFHLIEDVFKEDWRYRGATELVTFVDNHDMPRFQSLGADGEALRLAVDLIMTCRGIPCLYYGTEQYLHDDTDGGNDPYNRPMMDRWDTDTPLFQDIRVLSEVRRRNPAVKWGGQWTRYITPDVFAYVRKYRDSRCFVAMNRSHEAVRLEAVLTELPDGAHRCVLSEAAFTIQDGRLEKLELAPRQVVVISFVGRPVRGREIVRIQVNGFRTQPGEVVAVIGDCPELGDWDLSRAFRLEYINDNTWFGEIPFNKSANQIVAYKYVIFRENGPPINENRTSRRRFVPDKSIAKWRDVWEEG

SEQ ID NO: 21053 - protein, 506 aa, Sesamum indicum
MEAEMLYSALALTFAIFMVYRILSNSQDKRSLTKLPPSPPGWLPVIGHAHLMKNLLHRTLYDFSQKLGPIFSIRFGSRLVVVVSSSSLVEECFTKYDIVLANRPQASVDRRSLGFSTTSVIGAPYGDHWRNLRKLCDLEVFAPTRLASFLSIRLDERDRMISALYKISSAGFAKVNLEAKIVELTFNNIMRMVAAKRYYGEEAEDDEEAKRFRDLTKEALELTSASNPGEIFPILRWLGCNGLEKKLAVHSRKTDEFMQGLLDEHRRGERQNTMVDHLLSLQESQPEYYTDEIITGLIVALIIAGTDASVVTTEWAMSLLLNHPKVLEKARKELDTLVGHERMVDEHDLPKLRYLHCIVLETLRLFPSVPTLVPHEPSEDCKIGGYNVPKGTMVLVNAWAIHRDPKVWDDPLSFKPDRFEIMEVETHKLLPFGMGRRACPGAGLAQKFVGLALGSLIQCFDWERTSPEKIDLNEGSGITLPKAKTLEAMCKPRHVMEKVLRQVSNV

SEQ ID NO: 21054 - protein, 487 aa, Arabidopsis thaliana
MGSKLKLYPLLNHSSVFHPDSRYQSAPTMEEEQQQLRVLFAKYEMGRLLGKGTFGKVYYGKEITTGESVAIKIINKDQVKREGMMEQIKREISIMRLVRHPNIVELKEVMATKTKIFFIMEYVKGGELFSKIVKGKLKEDSARKYFQQLISAVDFCHSRGVSHRDLKPENLLVDENGDLKVSDFGLSALPEQILQDGLLHTQCGTPAYVAPEVLRKKGYDGAKGDIWSCGIILYVLLAGFLPFQDENLMKMYRKIFKSEFEYPPWFSPESKRLISKLLVVDPNKRISIPAIMRTPWFRKNINSPIEFKIDELEIQNVEDETPTTTATTATTTTPVSPKFFNAFEFISSMSSGFDLSSLFESKRKLRSMFTSRWSASEIMGKLEGIGKEMNMKVKRTKDFKVKLFGKTEGRKGQIAVTAEVFEVAPEVAVVELCKSAGDTLEYNRLYEEHVRPALEEIVWSWHGDNHNNNIVKSNGNYVSDENSGSDC

SEQ ID NO: 21055 - protein, 407 aa, Gloeobacter violaceus PCC 7421
MLLRRPRRTVMSDTPRPRPSIGALQPQLVQWRRHLHRFPELGFQEQATSRFIAQKLASWGIDVQTGVAKTGVVATIAGRGDGPVVAVRADMDALPILEGNRVEYASENTGIMHACGHDGHVAIALGTARWLAEHRDALPATVKILFQPAEEGPGGAKPMIEAGALASPDVAAIVGLHLWNNMPLGQVGVKGGPSFANAAKFKATILGRGGHGAIPQQTVDAVVVGAQVVNALQTIVARNVDPFEPAVVTVGKFQSGTNFNVIAQSAYLEGTVRCFSPELETRLPERIEQVIAGICQAHGASYEFEYDRHYPVLMNDPAVAELVRSVAEEFLGRGRVRPETTLGGEDMAFFLQKVPGCYFFLGSANPERGLDKPHHHPCFDFDETALGLGVELFVRCLERFWERSMAE

SEQ ID NO: 21056 - protein, 139 aa, Desulfovibrio vulgaris subsp. vulgaris str. Hildenborough
MVERTFSIIKPDAVERNLQGEVLAMIQGAGLKVVAMKMIHLTKAQAEGFYAVHRERPFFDSLTTYMCSGPVVCSVLEGENAISRYREIMGATNPANAAEGTIRKKYAVSLEANSVHGSDAPETAAFEISYFFNALEIVG

SEQ ID NO: 21057 - protein, 340 aa, Chlamydia muridarum Nigg
MHPLTYNIASEETTEAQVSFVIENFGNDFCINLLKKMLLIREFEIRGEEAYLEGLVGGFYHSYIGQESVATAALACTGTDHWFFSSYRCHGVAILLDIPLRQLAAELLGKETGCALGRGGSMHMCGDRLPGGFGIVGGQIPLAAGAAFSMKYQKLPSISLCFIGDGAVAQGVFHETLNFASLHTLPLMLIIENNGWGMGTALHRAIAKQPIAESQASSYGLSSITLNGFDLFNSLIGFKEAYQHMQKTGAPVVVEALCSRFRGHSISDPNLYRSKEEMQCLLKRDPILFAKEWLIRANVLSEDDFKDLRQTSKEAVLEAFSQARLDPEPAVATLEEGIYA

SEQ ID NO: 21058 - protein, 497 aa, Leifsonia xyli subsp. xyli str. CTCB07
MSENHTTTQTGTPVASDAHSLTAGQDGATALHDRYLVEKLAQFNRERIPERIVHAKGGGAFGTFAVTGDVTAYTKAAVFQPGAKTETVQRFSSVAGEQGSPDTWRDVRGFSVKFYTSEGNYDIVGNNTPVFFIRDGMKFPDFIHSQKRLPGSGLRDADMQWDFWTLSPESAHQVTYLMGDRGLPRSWRTMPGYGSHTYQWINAAGERFWVKYHFHALHGNEEMHGAEAEKIAGEDADYYRRDLYEAIERGDFPAWKLSVQVMPYEDAKTYRLNPFDLTKVWPHSDYPLIEVGVHTLNRNPENFFAQIEQAAFSPANTVPGIDISPDKMLTARVFSYPDAQRYRVGTNYNELPVNAPVAPVHNYSQDGAARHGFKAAEAPVYAPNSFGGPVADPALAGEGSWESDGALVRAAATLHAEDDDFGQAGSLYRDVFDAKAKERFLDTIAGAVGGVQRDDIRERAIQYWTSVDAGLGGLLRTRLASGVTDADEAAEFVGVAG

SEQ ID NO: 21059 - protein, 430 aa, Arabidopsis thaliana
MITDLPKDLIEEILSRVSMTSMRVVRLTCKSWNTLSNSESFKKMHIGKVTSTREGESRVIMLIDYNLFLMSAVLMDDVDPSIEFKGKLSCLKEQVKISQVFHCEGLLLCILKDDTRIVVWNPYRQETRWIIPRYSHRPYVMNNIRYALGYENNKSGRSLKLLRFIDYCYTEKHICWHEIYDFDSDLWTTLDVTPHWYILSNWSCVQGVSLKGNTYWCAREENSDGYNHIICFDFTRERFGPLLPLPVNVIDNEYEYVTSSCVREGKIAALFQHNDSYPYELEIWITTKIEAEMVSWNKFLRIDIEPNNNIMVPFIYGGFFIDEEKKKVALGFDEEFGRKTFNIIGEDGYFREFDRITFNIIEEAGERAGVNCGSYVCSYVPSLVRIKKPAQGKRKRQSSLEKLRFDQNTWIFDSIYQATASQIRRRRPTR

SEQ ID NO: 21060 - protein, 143 aa, Arabidopsis thaliana
MTEAMIRNKPGMASVKDMPLLQDGPPPGGFAPVRYARRISNTGPSAMAMFLAVSGAFAWGMYQVGQGNKIRRALKEEKYAARRTILPILQAEEDERFVSEWKKYLEYEADVMKDVPGWKVGENVYNSGRWMPPATGELRPDVW

SEQ ID NO: 21061 - protein, 349 aa, Vicia faba
MDMPPPIMHDSDRYDFVRDIGSGNFGVARLMTDKLTKDLVAVKYIERGDKIDENVKREIINHRSLRHPNIVRFKEVILTPTHLAIVMEYASGGEMSDRISKAGRFTEDEARFFFQQLISGVSYCHSMQVCHRDLKLENTLLDGDPALHLKICDFGYSKSSVLHSQPKSTVGTPAYIAPEVLLKQEYDGKIADVWSCGVTLYVMLVGSYPFEDPDNPKDFRKTIQRVLSVQYSVPDFVQISPECRDIISRIFVFDPAERITIPEIMKNEWFRKNLPADLVNENIMDNQFEEPDQPMQSMDTIMQIISEATVPAAGSYYFDEFIEVDEDMDEIDSDYELDVDSSGEIVYAI

SEQ ID NO: 21062 - protein, 335 aa, Pseudomonas syringae pv. tomato str. DC3000
MALGNEAPEFDIDDEVLLMEAGIVLKEASNEKQPAAASGRTKAKQSTSLKQHKYIDYTRALDATQLYLNEIGFSPLLSPEEEVHFARLSQSGDPAGRKRMIESNLRLVVKIARRYVNRGLSLLDLIEEGNLGLIRAVEKFDPERGFRFSTYATWWIRQTIERAIMNQTRTIRLPIHVVKELNVYLRAARELTQKLDHEPSPEEIANLLEKPVGEVKRMLGLNERVSSVDVSLGPDSDKTLLDTLTDDRPTDPCELLQDDDLSQSIDQWLSELTEKQREVVIRRFGLRGHESSTLEDVGLEIGLTRERVRQIQVEGLKRLREILEKNGLSSESLFQ

SEQ ID NO: 21063 - protein, 326 aa, Sinorhizobium fredii
MQNNNILVVGGAGYIGSHTCLRLAEKGYHPVVYDNLSNGHEEFVRWGVLEKGDIRDRRRLDEVLARHKPRAVLHFAAMIEVGESVKDPVAFYDNNVIGTLTLLSATLAAGIEAFVFSSTCATYGLPDSVPMDETHKQAPINPYGRTKWVCEQALKDYGLYKGLRSVILRYFNAAGADFEGRIGEWHEPETHAIPLAIDAALGRRDGFKVFGTDYETRDGTCVRDYIHVLDLADAHVRAVDYLLEGGDSVELNLGTGTGTTVKELLDAIEKVSRRPFDVSYVGRRDGDSTTLVANNDKARQVLGWEPQYDLAAITESAWNWHSRRNG

SEQ ID NO: 21064 - protein, 138 aa, Euglena gracilis
MKVWNPVNNKFWETFSYLPPLSDAEIAKQVDMIIAKGWIPCLEFSLREISERAYPCCYIANDNTYRFSGTAAGYYDNRYWTMWKLPMFGCTDASQVLKELSPLEFAAPENFVRLAAFDSVKQVQVTSFVVQRPSGSSW

SEQ ID NO: 21065 - protein, 352 aa, Cytophaga hutchinsonii
MTHINKEKPVLVTGATGYVAGWIVKKLLDEGFTVHASVRNPTDNDKLKYLNTLAQQASGTIKYFKADLLEAGSYDEAMEGCELVFHTASPFINKVADPQRDLVDPALIGTKNVLASVNKTASVKRVVLTSSVAAIIGDAIDCSKMPDGAGTEAHWNTTSTLNHQPYNYSKTVAERAAWEINKKQNRWDLVVINPSLVIGPGLNPFATSESFNIVRQVGDGSMRFGIPDFTIGVVDVRDLAEAHVIAGLKPDAEGRNIISAQNTGLLELAGMLRKKFGTAYHFPTRLLPKSLVWLLAPLAGFKRDMINRNVGYPWRVDNTKSIQKLGIHYRPIEESIVELFQQMIDNGIVKKK

SEQ ID NO: 21066 - protein, 208 aa, Shigella dysenteriae
RRELKARHLTMIAIGGSIGTGLFVASGATISQAGPGGALLSYMLIGLMVYFLMTSLGELAAYMPVSGSFATYGQNYVEEGFGFALGWNYWYNWAVTIAVDLVAAQLVMSWWFPDTPGWIWSALFLGVIFLLNYISVRGFGEAEYWFSLIKVTTVIVFIIVGVLMIIGIFKGAQPAGWSNWTIGEAPFAGGLAAMIGVAMIVGFSFQGT

SEQ ID NO: 21067 - protein, 556 aa, Zea mays
MQGGGVAAAAVPVHAAVGGDGGGAAAAPPPPFLMKTYEMVDDPATDGVVSWGPGNNSFIVWNTPEFARDLLPKYFKHSNFSSFVRQLNTYVSHRIPADATLALLFVISGCAQMGCHKSGRIYEMPMHRDMETETVSVARLLPLTFKLFLGFRKVDPDRWEFANEGFLRGQKHLLKTINRRKPSLQGNSQPQQPQSQNAPVPSCVEVGKFGLEEEIERLKRDKNVLMQELVRLRQQQQTTDHQLQTLGKRLQGMESRQQQMMSFLAKAMQSPGFLAQFVQRNENSRRRIVAANKKRRLPKQDGGLESESSAASLDGQIIKYQPSINEAAKAMLRKILNVDSSHRFESMGNSDNSNNNNILLEDYMPAAQAFESSSSTRNSGVTLAEVPANSGLAYVGTSSAICSPPAAPEMQCPVVLDNKAYKQVASMSAVPPVSSDMGIIPEFSDLADLVSVDILGGAFEMMPGPEFPLPEEGDDGTTMYNNNDEEAQSLPGIINSIWEQFLVGSPLSTDNEEVDSAGGLYAQEDGWSKVGNIANLTEQMGLVSSTNHRDSGNGLY

SEQ ID NO: 21068 - protein, 457 aa, Staphylococcus aureus subsp. aureus MW2
MHINTVNGRGMYMSKAHQLIQEDEHYFAKSGRIKYYPLVIDHGYGATLVDIEGKTYIDLLSSASSQNVGHAPREVTEAIKAQVDKFIHYTPAYMYHEPLVRLAKKLCEITPGDFEKRVTFDLTGSDANDGIIKFARAYTGRPYIISFTNAYHGSTFGSLSMSAISLNMRKHYGPLLNGFYHIPFPDKYRGMYEQPQANSVEEYLAPLKEMFAKYVPADEVACIVIETIQGDGGLLEPVPGYFEALEKICREHGILIAVDDIQQGFGRTGTWSSVSHFNFTPDLITFGKSLAGGMPMSAIVGRKEIMNCLEAPAHLFTTGANPVSCEAALATIQMIEDQSLLQASAEKGEYVRKRMDQWVSKYNSVGDVRGKGLSIGIDIVSDKKLKTRDGSAALKICNYCFEHGVVIIAVAGNVLRFQPPLVITYEQLDTALNTIEDALTALEAGNLDQYDISGQGW

SEQ ID NO: 21069 - protein, 564 aa, ASPERGILLUS NIDULANS FGSC A4
MAAAWENKGAQEASTAAPEPPPGYTEANRATHLPQSDLDAREMSPGVRRIELINTQLGRYGRIAMFFGIWLIAYVYGLDGGVRNTYQVHTSAFPSKARPAPRNGELCHSQPAFDGTGAAECDCGCGAAMTTLTWIGRTFCAGAVIYQIGYTGIMFLVEVLIGDTTSTRSRLLFSYIPATPFIINTWIGGNVTDAVLKVTSWRWGIGMFAIIFPVCSIPLFLILLYGHSKAKKITAYPSLIETHGLKHFLLDVFWRMDVLGIILLIAVFALILVPFTLAGGNAEQWKQAKIIAPLVIGVLCVPLWIVWESKCRYPMVPFKLLKDRAVYGAIGIAIMLNTGNYLYTVLMVSFDESNLSATRISSLYSFASVITGCILGAIVIKIRRLKPFIVAGTFLFTVAFGILYRFRGGPSGDSYAGIVAGEVVLGIAGGMFPYPAQASIQTATKHEHLAIVTALFLSSYNIGSALGGSISGAIWSQTLLPNLTRQLGGNSTLASQVYADPFAFALSNPVGTPDRDAVIAAYMDTQRLLCITGLCLTVPLIGFALCIRNPRLNEKQSLEDAEKD

SEQ ID NO: 21070 - protein, 550 aa, Buchnera aphidicola str. Bp (Baizongia pistaciae)
MAAKDVKFGNEARVKMLRGVNVLADAVKVTLGPKGRNVVLDKSFGAPSITKDGVSVAREIELEDKFENMGAQMVKEVASKANDAAGDGTTTATLLAQAIVNEGLKAVAAGMNPMDLKRGIDKAVISAVEELRIMSVPCADSKAITQVGTISANADEKVGSLIADAMDKVGKDGVITVEEGTGLQDELEVVKGMQFDRGYLSPYFINKPETGIVELENPYILMADKKISNVRELLPILEAVAKSGKPLLIISEDLEGEALATLVVNSMRGIVKVAAVKAPGFGDRRKAMLQDISILTSGSVISEELAMELEKSTLEDLGQAKRVVINKDTTTIIGGIGEKYNIQSRISQIRQQIQEATSDYDKEKLNERLAKLSGGVAVLKVGAATEVEMKEKKARVEDALHATRAAVEEGVVPGGGVALVRVAAKISNIVGQNEDQNVGIRVALRAMEAPLRQIVSNSGEEPSVVTNNVKDGKGNYGYNAATDEYGDMISFGILDPTKVTRSALQYASSVAGLMITTECMVTDLPKDEKSDLGNSSAPSAGGMGGMGGMM

SEQ ID NO: 21071 - protein, 428 aa, Panicum miliaceum
MAALSRAASCLTRRPQMQPSRLQAARAMASSLFGHVEPAPKDPILGVTEAFLADPSPDKVNVGVGAYRDDNGKPLVLDCVREAERRIAGNLNMEYLPMGGSIKTIEESLKLAYGEDSEHIKDKRIAAVQALSGTGACRLFADFQKRFLPDSQIYIPTPTWSNHHNIWRDAQVPQKTFTYYHPETRGLDFAGLMNDIKNAPDGSFFLLHACAHNPTGVDPTEEQWREISHQFKVKKHFPFFDMAYQGFASGDPERDAKAIRIFLEDGHQIGCAQSYAKNMGLYGQRVGCLSILCEDEMQAVSVKSQLQQIARPMYSNPPVHGALVVSIILSDPELKSLWLKEVKGMADRIIGMRTALKENLEKLGSSLSWEHITNQIGMFCYSGMTPEQVDRLTNEFHIYMTRNGRISMAGVTTGNVAYLANAIHEVTK

SEQ ID NO: 21072 - protein, 218 aa, Coffea arabica
VMTQSPMKGMLTGPVTILNWSFVRNDQPRFETCYQIALAIKDEVEDLEKAGINVIQIDEAALREGLPLRKAEHAFYLDWAVHSFRITNCGVQDTTQIHTHMCYSNFNDIIHSIIDMDADVITIENSRSDEKLLSVFREGVKYGAGIGPGVYDIHSPRIPSTEEIADRVNKMLAVLDTNILWVNPDCGLKTRKYAEVKPALQNMVAAAKQIRTQLASAK

SEQ ID NO: 21073 - protein, 323 aa, Dechloromonas aromatica RCB
MLALAALIPHATMAADPTPDASQVVAAVEGVFGVTPGERRNHIKGTCAAGEFVGTKEAAKLSRSPLFSGKPVPVVARFSLSGGNPKAPDVAKSARGMALQFQLPKGQLHHITMLNTPMFGAANPQTFLDLMQALQPDPATGKPDPEKMKAFKASHPDNQAQAQYLASNNPPASYASSSYWGIHTFKFVDKKGKATLVRWQFVPQDGEKRLSDDELKTAGANFLESALIERAKQGAVRWDMMVSIGQPGDSETDPTVLWPAERPRIKAGTLTIRSAEAQKGAPCEPINFDPLVMAPGIQPTDDPVLRFRSPAYAVSFGKRLSER

SEQ ID NO: 21074 - protein, 511 aa, Oryza sativa (japonica cultivar-group)
MEGRAAGWVRVAAVGWAVAACAVAAGMVARRGAARVRWNRAVAVVRDLEERCATPAELLQRVVNSLAIEMFAGLASDGGSKVRMLLTCVDALPDGSSHDMTRSEEGISYAIDLGGTSFRVLKVELGAGSTIINRKVEHQPIPENLTKGTSDDLFNFIASALKNFIEREGGEVEGRALGFTFSFPVRQTSISSGTLIRWTKEFSIEEAVGKDVAQCLNEALARNGLNMKVNVLVNNTVGTLALGHYYDDDTVAAVIIGAGTNACYIERNDAIIKSLGRVTNSERTVVNVEWGSFRPPQIELTPYDICFNNETWNYYDQGFEKMISGVYLGEIARLVFQKMAEESDIFGTAVDGLSTPFVLSTPNLAAIREDDSPDLREVGKILEEHLKLPDVPLKTRKLVARVSDIITRRAARLAAAAIVAILQKIGCDGTLCGSTQVRTMRGVRRRTVVAIEGGLFEGYSVFREYLNEALVEILGEEIAATVSLRVMEEGSGTGAALLAAAYSSARQKNSE

SEQ ID NO: 21075 - protein, 368 aa, Zea mays
MGHDEAVGTQNSVKAPSPPKDQPAIYPCFDWSTVQAYYGPGVLPPAFFNPGIAPGHAPPPYVWGPQTMPPAAFGKSYAAIYPHAGGFLHPLMPLVVNPLSAEPAKSGNSKDNSLNKKLKEIDGSAVSSGNSEKTSGDHSLEGSSDGNNPKVSGTPKKRSLDDRTTSETCGVSAINDTPGESGRLPALSSVRIPDTTMKPCVSTGSDFKVSGATSTEWPAKDDKASKRERRKQSNRESARRSRLRKQAETEELARRVELLTAENTSLRSEISRLTESSQKLRMENSALMEKLADGTSDQAQEASAGHQTPTAPSSACVVKNFLWMMDGEGASRGGGGSGCSSRRRDHGAPMLRQLLSSGPLAADAVAAS

SEQ ID NO: 21076 - protein, 465 aa, Haloarcula marismortui ATCC 43049
MRLHWHRRDLRATDNAGLAAATPSDPVVPVFIFDTAVLDHAGPPRVAFMLDALDSLREWYRDKGSDLVVAEGDPTSVLPELAAQHGAEKVTWGKDYSGLARERDAAVRQALDDADVAREAVQNAVLHEPGEITTNDGDPYSVFTYFGRKWHDREKAAPYDPPSADTLADVDGDALPTLADLGFEEPEADVPAAGTEEARALLDDFLDENVYEYEERRDFPADECTSRLSAHLKFGTIGIREVYDRTQAAKEGTGGDRRDSVREFQSQLAWREFYTQVLFAHPHVVSSNYKSYENPIEWENDEELLQAWKDGDTGYPIVDAGMRQLRDEAYMHNRVRMIVASFLTKDLLIDWRHGYEWFREKLVDHDTANDNGGWQWAASTGTDAQPYFRIFNPMTQGEDYDPNAEYIKEYVPELRDAAPEIIHDWNDCSLTQRRSAAPEYPDPVVDHSERREEALAMFERARGDD

SEQ ID NO: 21077 - protein, 601 aa, Shewanella oneidensis MR-1
MTASPKNEMWTVFKRLMGYLKPMKGMFLLSVVGLIVYGLVDAAFISFIGPFIDKGFSSSAPAISNGIALPTSQGFHADNQVLLMAPIVVILMFSLRGFANFVSTYGISYMSARLIMDMRQQVFEHYLSLPVSYMDKENTGNLISKVTFDTEQIARASGSALISIVRDSVTIIGMLGLMFYNSWKLSLCILVIGPIMGVVITIVSRRFRKVSKQIQTAMGDVSAATEQMIKGHKNVLAFGGQETETARFAKINDRNRHQNMKLAVAQAVSQPLIMVIGSFALAFVLYAASLDSMKADLTAGTFATILGAMMAMLQPIKNLTRVNAEFQRGIAACTTVFELLDTVPESDTGTYTVARAKGNLRFDNVSFSYEGQERRALEKIDFEVSQGQTLALVGRSGSGKSTIASLVTRFYTGLESGDILLDDVSIYDYSLKSLRSQVALVSQQVTLFNDTIANNIAYAYPGEVTREQIIEAATLAHAMEFIEQLPDGLDTQVGENGVLLSGGQRQRIAIARAMLRDAPVLILDEATSALDTESEKAIQQGLDNLRQNRTSVVIAHRLSTIESADQILVVDQGRIVERGTHKSLLELGGMYAKLYQMQFGS

SEQ ID NO: 21078 - protein, 533 aa, Mycobacterium avium subsp. paratuberculosis K-10
MPVPPAGDTPSERRQLSRRGFMAAGIAGGLALAGCGQSKPDPSRNTRMAAAIATAEAARPHSGRTVTAHLTPQPVQIDLGGPVVRTLAFGDSIPGPVIRAAIGDEVAVTVANRLDHPTSVHWHGISLRNDMDGAEPATPNIAAGHDFTYRFSVPNPGTYWAHPHTGLDEDTGLYLPVIVDDPAEADYDAEWIVVLDDWTDGVGKSPAQLYGELSNPNKPPRNPPETTTTSTNPTTTETSPVTTTETTSTTPTTAAAAPPGVGSSELLGGDAGAIAYPYYLVNGRIAAFPKTFNAKPGQRIRIRLINTASDTAFRVALAGHSMTVTHTDGYPVVPAQVDALLIGMAERYDVTVTAGDGVFPLVAVAEGKNALGRALLSTAAGSTPDPQFQPGELTKRVGTVEMFTATTPVNLGRPDAGLDLPIVLGGNMIQYNWTINGEPYSKTNPLLVHEGQRPTLSFENTTMMYHPIHLHGHTFQVIKPDGSPGARKDTVMVLPKQKLAAVLSADNPGTWVMHCHNTYHQVAGMETRLDYVL

SEQ ID NO: 21079 - protein, 227 aa, Desulfitobacterium hafniense DCB-2
MQKLKGIKILIIDDEPNILEFLEMGLLNEGFEVQTAADGMTGVTLAKQLHPHLVILDIMMPGMDGFEVCRMLKKSENVSIIMLTAKDEVEDRVKGLTIGADDYMAKPFSFEELLARIHARIRNQFPTLLGEVVMGPFRLDDRRKEIQFQDKVLELSPTEYELLKFLILNQGLVLSKTMILDKVWGYDFAGDDNIVEVYIRSLREKLGDKEHRLIRTLRGSGYRMDLI

SEQ ID NO: 21080 - protein, 315 aa, Vibrio parahaemolyticus RIMD 2210633
MGKLVEGVWHDVWYDTKANGGKFVREDAGFRDWIKNDSEAVFQPESGRYHLYVSLACPWAHRTLIFRKLKGLEPHIDVTVVCPDMLSQGWQMGLPEPLFGHTRMHQIYTQAKPDYTGRVTVPVLWDKKTNTIVSNESSEIIRMFNSAFNDLTGNHDDYYPEPLRGVIDEWNDYIYPNVNNGVYRCGFATSQEAYEEAFESLFSALDKIDAHLATHRYLAGNKITEADWRLFTTLVRFDAVYVGHFKCNKQRIADYVNIQGYLKELYQIDGIADTTDFYHVKRHYYFSHTGINPTQVVPKGPDLDFSSPHQREMIG

SEQ ID NO: 21081 - protein, 353 aa, Bartonella henselae str. Houston-1
MKTKRIPLTLITGFLGSGKTTLLNRMLRDPLLADSAVIINEFGDVSIDHLLVKKTTEGIIELANGCLCCNLRSDLIDTLIDLIDRVHTGHLKKLNRIIIETTGMADPAPILQALLNHPLLMQTLSIDAVLVTFDTLNTLSIFKRHPEIHKQLSLADKIILTKTDLTHPKTLSNTLLTTLKAINPIAQIIDVHSDHFCSTAFISKILWDEKTENTRLKQCCSIAPHDHTHQSTIRAFSLDYEETIDYATLDTFLDLLKNFYGAKLLRIKAIIALHDDPLRPLVLHSVQTFFHPPIRLPAWPKGITQTRFVIIADGIEKEAIQKLFNALLNKPAIDTADKTAILENPLLIPGIKF

SEQ ID NO: 21082 - protein, 246 aa, Malus x domestica
QMKSESYISLLIASFFVLLLPAFSSAAEESSTPIGCGHTSHRNMATLGGVHESHGAQNSAEVEDLARFAVQEHNNKENALLEFVSVVKAKEQVVAGTLHHLTIEAIEAGKKKLYQAKVWVKPWMGFKEVQEFKHADEEETPSVTSSDLGVKQGGHPPGWQSVPPHDPQVQDAANHAVKSLQQRSNSLLPYELQEVVHAQAEVAEEHAKFNMLLKVKRGSKEEKFKAEVHKNMEGTFSLNQMEADHS

SEQ ID NO: 21083 - protein, 437 aa, Methylobacillus flagellatus KT
MPISLLPLTLLFSLCIVPLPVSAGEGAPQALAVDSVWVAISGALVFMMQAGFAMLESGMTRAKNAVNVMMKNYMDLAVGALLFWLVGYGLMFGSNPSGWIGTDHFALAHGDDWGASMLFFQVMFAATAATIVSGAMAERTNFIAYLLGACGIMALIYPVFGSWAWNEHGWLKQMGFIDFAGSTVVHSVGAWCALAGIMVLGPRLGRFGSKGEVHMIPGHNLSLVAMGGFLLWFGWFGFNGGSTLAAGVEIGPILLNTHMAGAAGAVGALLVALAMRRPILMAYVVNGSLGGLVAITAGCASMDVPFAVLTGFIGGIVTMLGVWALEKLRLDDVVGAVAVHGFSGVWGTVAAGLFLKDNMFDLNQVLVQMIGVAVAFVWVFLSALLMYGLLARTIGLRVSTMHEQRGLDITEHGEVGYPEFNREAAYQPEHVQHLSRL

SEQ ID NO: 21084 - protein, 584 aa, Dechloromonas aromatica RCB
MIVGAGGAGLRSAIQLSEAGLKTAVLSKVFPTRSHTVAAQGGVAASLGNSEEDHWTWHMYDTVKGSDWLGDQDAIEFMCKKANEVVVELEHYGMPFDRTDDGKIYQRPFGGHMSNFGEKPVRRSCAAADRTGHAMLHAMYQRNVKANTQFFVEWMALDLIRDEEGHVLGVTAMEMETGQIVIFHARATIFATGGAGRIFYSSTNAFINTGDGLGMAARAGIPLEDMEFWQFHPTGVAGAGVLITEGVRGEGGILRNSSKERFMERYAPNAKDLASRDVVSRAMATEIKEGRGCGVNKDYVLLDITHLDPATIMKRLPGIHEIGLQFAGVDCLKEPLPVVPTCHYQMGGIPTHYSGRVVMPKNGDMNSVVPGFYAGGECACASVHGANRLGTNSLLDLLVFGKSAGDSAVEDLKAGRAHRELPKDVADKTLARISALDNRKGGANVHETRLAMQRTMQDHAGVFRFGDMLKQGVEKILEVEKAARQLEIKDKSMAWNTARTEALEMENLIEVAKATMISAEARKESRGAHVRDDAPDTAEFPNGRNDKEWLKHTLFSPVDNSISYKPVNMQPLTVEAVALKTRSY

SEQ ID NO: 21085 - protein, 160 aa, Methanosarcina mazei Go1
MPVSSNTEGVHMEQTYVMVKPDGVQRGLVGEVISRIEKRGLKIVALRMNVIAEATAKEHYGEHAARPFFPSLIEFITSGPSVSMVVAGKDAIKVMRAINGATNPVDAAPGTIRGDFALDVGRNVVHASDSPEAAAREIAIHFKDSEIANYSRVDEVCLYE

SEQ ID NO: 21086 - protein, 474 aa, Bacillus subtilis
MATEYDVVILGGGTGGYVAAIRAAQLGLKTAVVEKEKLGGTCLHKGCIPSKALLRSAEVYRTAREADQFGVETAGVSLNFEKVQQRKQAVVDKLAAGVNHLMKKGKIDVYTGYGRILGPSIFSPLPGTISVERGNGEENDMLIPKQVIIATGSRPRMLPGLEVDGKSVLTSDEALQMEELPQSIIIVGGGVIGIEWASMLHDFGVKVTVIEYADRILPTEDLEISKEMESLLKKKGIQFITGAKVLPDTMTKTSDDISIQAEKDGETVTYSAEKMLVSIGRQANIEGIGLENTDIVTENGMISVNESCQTKESHIYAIGDVIGGLQLAHVASHEGIIAVEHFAGLNPHPLDPTLVPKCIYSSPEAASVGLTEDEAKANGHNVKIGKFPFMAIGKALVYGESDGFVKIVADRDTDDILGVHMIGPHVTDMISEAGLAKVLDATPWEVGQTIHPHPTLSEAIGEAALAADGKAIHF

SEQ ID NO: 21087 - protein, 478 aa, Pseudomonas putida
MTQKFDVVVIGAGPGGYVAAIKAAQLGLKTACIEKYTDAEGKLALGGTCLNVGCIPSKALLDSSWKYKEAKESFNVHGISTGEVKMDVAAMVGRKAGIVKNLTGGVATLFKANGVTSIQGHGKLLAGKKVEVTKADGTTEVIEAENVILASGSRPIDIPPAPVDQNVIVDSTGALEFQAVPKRLGVIGAGVIGLELGSVWARLGAEVTVLEALDTFLMAADTAVSKEAQKTLTKQGLDIKLGARVTGSKVNGNEVEVTYTNAEGEQKITFDKLIVAVGRRPVTTDLLAADSGVTIDERGYIFVDDYCATSVPGVYAIGDVVRGMMLAHKASEEGIMVVERIKGHKAQMNYDLIPSVIYTHPEIAWVGKTEQALKAEGVEVNVGTFPFAASGRAMAANDTGGFVKVIADAKTDRVLGVHVIGPSAAELVQQGAIAMEFGTSAEDLGMMVFSHPTLSEALHEAALAVNGGAIHVANRKKR

SEQ ID NO: 21088 - protein, 457 aa, Antirrhinum majus
MGEEYKKTHTIVFHTSEEHLNSSIALAKFITKHHSSISITIISTAPAESSEVAKIINNPSITYRGLTAVALPENLTSNINKNPVELFFEIPRLQNANLREALLDISRKSDIKALIIDFFCNAAFEVSTSMNIPTYFDVSGGAFLLCTFLHHPTLHQTVRGDIADLNDSVEMPGFPLIHSSDLPMSLFYRKTNVYKHFLDTSLNMRKSSGILVNTFVALEFRAKEALSNGLYGPTPPLYLLSHTIAEPHDTKVLVNQHECLSWLDLQPSKSVIFLCFGRRGAFSAQQLKEIAIGLEKSGCRFLWLARISPEMDLNALLPEGFLSRTKGVGFVTNTWVPQKEVLSHDAVGGFVTHCGWSSVLEALSFGVPMIGWPLYAEQRINRVFMVEEIKVALPLDEEDGFVTAMELEKRVRELMESVKGKEVKRRVAELKISTKAAVSKGGSSLASLEKFINSVTR

SEQ ID NO: 21089 - protein, 492 aa, Arabidopsis thaliana
MDLNQILILSFLSLFTLAIFLLTRSKRKLNLPPSPAISLPVIGHLHLLKPPLHRTFLSLSKSIGNAPVFHLRLGNRLVYVISSRSIAEECFTKNDVVLANRPKFTISKHLGYNATYLLSASYGDHWRNLRRIAAVEIFSTHRLNSFLYIRKDEIRRLISHLSRDSLHGFVEVEMKTLLTNLASNTTIRMLAGKRYFGEDNDDAKLVKNLVSEAVTSAGAGNPIDYLSILRWVSSYEKRIKNLGNRFDTFLQKLVDEKRAEKEKGETMIDHLLALQDIQPDYYTDVIIKGIILTLIIAGTDTSSVTLEWAMSNLLNHPEILKKARMEIDEKVGLDRLVDESDIVNLSYLQSIVLETLRMYPAVPLLLPHLSSEDCKVGGYDIPSGTMVLTNAWAMHRDPEVWEDPEIFKPERFEKEGEAEKLISFGMGRRACPGAGLAHRLINQALGSLVQCFEWERVGEDFVDMTEDKGATLPKAIPLRAMCKARSIVDKLI

SEQ ID NO: 21090 - protein, 154 aa, Oryza sativa (japonica cultivar-group)
MSMIRRSNVFDPFSLDLWDPFDGFPFGSGSGSLFPRANSDAAAFAGARIDWKETPEAHVFKADVPGLKKEEVKVEVEDGNVLQISGERIKEQEEKTDKWHRVERSSGKFLRRFRLPEDTKPEQIKASMENGVLTVTVPKEEPKKPDVKSIQITG

SEQ ID NO: 21091 - protein, 131 aa, Rickettsia prowazekii str. Madrid E
MAYSKKVIDHYENPRNVGSLDKKKKNVGTGLVGAPACGDVMKLQIEVGDDEIITDAKFKTFGCGSAIASSSLVTEWIKGKSVEDAKEIKNTEIAKELSLPPVKLHCSLLAEDAIKAAIADYKQKRENKKDS

SEQ ID NO: 21092 - protein, 453 aa, Arabidopsis lyrata subsp. petraea
MESSISQTLSKVSDPTTALLIVVSLFIFIGFITRRRRPPYPPGPRGWPIIGNMLMMDQLTHRGLANLAKKYGGLCHLRMGFLHMYAVSSPDVARQVLQVQDSVFSNRPATIAISYLTYDRADMAFAHYGPFWRQMRKVCVMKVFSRKRAESWASVRDEVDKMVRSVSCNVGKPINVGEHIFALTRNITYRAAFGSACEKGQDEFIRILQEFSKLFGAFNVADFIPYFGWIDPQGINKRLVKARNDLDGFIDDIIDEHMKKKENQNAVDDGDVVDTDMVDDLLAFYSEEAKLVSEAADLQNSIKLTRDNIKAIIMDVMFGGTETVASAIEWALTELLRSPEDLKRVQQELAEVVGLDRRVEEADIEKLTYLKCTLKETLRMHPPIPLLLHETAEDTSIDGFFIPKKSRVMINAFAIGRDPTSWADPDTFRPSRFLEPGVPDFKGSNFEFIPFGS

SEQ ID NO: 21093 - protein, 465 aa, Oryza sativa
  misc_feature (203)..(203): Xaa can be any naturally occurring amino acid
  unsure (1)..(465): unsure at all Xaa locations
MQSLLLPTFAAASAAPPRRGRVPPAGRASVSVRASASAAAVAPRRETDPRKRVVITGMGLVSVFGNDVDAYYDRLLAGESGIGPIDRFDASNFPTRFAGQIRGFSSEGYIDGKNDRRLDDCLRYCIVSGKKALESAGLALGSKSMDKIEKTRAGVLVGTGMGGLTVFSDGVQNLIEKGHRKITPFFIPYAITNMARGLLEWTXGFMGPNYSISTACATSNYCFYAAANHIRRGEADVMIAGGTEAAIIPIGVGGFVACRALSQRNDDPKTASRPWDQDRDGFVMGEGAGVLVMESLEHAMKRDAPIIAEYLGGAVNCDAYHMTDPRSDGLGVSSCIKQSLADAGVAPEEVNYINAHATSTLAGDLAEVNAIRQVFKDPSEIKINATKSMIGHCLGAAGGLEAIATVKAITTGWVHPSINQFNPEPAVEFDTVPNVKKQHEVNVGISNSFGFGGHNSVVVFAPFKP

SEQ ID NO: 21094 - protein, 547 aa, Exiguobacterium sp. 255-15
MTLMTTDWRKSAVYQIYPKSFYSPEGKPTGTLRGVTAKLDYLAELGVDYLWLTPVYASPQRDNGYDVSDYYAIDPSYGTMTDFDQLIAEAGKRQLSVMMDIVVNHCSTDHEWFRQGRHPDSPYHDYFIWRDEPTDWVSKFGGPAWSFDEVAGKYYLHLFDETQADLNWENPALREAVYQMMCFWRDKGVRGFRLDVINLISKDDSFANDPTGDGRKHYTDGPRVHDYLQEMNQRVFAGHDLMTVGEMSSTTLDHCLRYSNLNEQELKMTFNFHHLKVDYPNGEKWTAAPFDFLELKRIISDWQVGMQGNAWNAIFWCNHDQPRVVSRFGDDTVYRVESAKMLATTLHGLQGTPYIYQGEEIGTPNPDFTDLTDYRDVETLNAYTEKAALRETEADILAAIRQKSRDNARTPMQWDASPHAGFSTATPWIPVPENHTSINVEAALADPDSVFYHYKQLIHLRKQYDVLTNGSYRLLTPDDLSLWAYERATDDEQLLVLSNFYGTDRPFTLPDEWLDYQVLIQNYPEVSEKSGQLILRPYESVMLYRTV

SEQ ID NO: 21095 - protein, 196 aa, Escherichia coli
ARHLTMIAIGGSIGTGLFVASGATISQAGPGGALLSYMLIGLMVYFLMTSLGELAAYMPVSGSFATYGQNYVEEGFGFALGWNYWYNWAVTIAVDLVAAQLVMSWWFPDTPGWIWSALFLGVIFLLNYISVRGFGEAEYWFSLIKVTTVIVFIIVGVLMIIGIFKGAQPAGWSNWTIGEAPFAGGFAAMIGVAMIV

SEQ ID NO: 21096 - protein, 157 aa, Brassica rapa
MSLIPSFFGGRRTNVFDPFSLDLYDPFEGFLTPSGMTNATSKDVAAFTNAKVDWRETPEAHVFKADLPGLKKEEVKVEVEDGNILQISGERSSENEEKSDRWHRVERSSGKFMRRFKLPENAKVDEVKASMENGVLSVTVPKMAERKPEVKSIDISG

SEQ ID NO: 21097 - protein, 208 aa, Escherichia coli
RRELKARHLTMIAIGGSIGTGLFVASGATISQAGPGGALLSYMLIGLMVYFLMTSLGELAAYMPVSGSFATYGQNYVEEGFGFALGWNYWYNWAVTIAVDLVAAQLVMSWWFPDTPGWIWSALFLGVIFLLNYISVRGFGEAEYWFSLIKVTTVIVFIIVGVLMIIGIFKGAQPAGWSNWTIGEAPFAGGFAAMIGVAMIVGFSFQGT

SEQ ID NO: 21098 - protein, 602 aa, Solibacter usitatus Ellin6076
MPDPGQNPLTLKRLLRPHAKSLALGVLVVGGGSIADLLQPWPLKIIIDTVLKGHVGKGWLNDFVRDAAGKDPLNILRFAALAVLGIAALGASCSYAEKSLTTTIGQKVMHELRRTLYAQIQRLSLAYHDRKQTGDLISRVTGDIDSVQGFLASGLLSTLVSLLTLFGMIGVMFSISWKFTLIALSIVPVLFAVVFTYTRKIKKASRAVRKKEGEMVSIIHEVFSAVRVVRAFAREDYEQRRYEVESMESVSIALRARGLKAKLSPLVEMIVACGTCMVLWFGARMVLDGSLSTGSLIVFVLYLSKMYKPMQELSKMTDTYTKAAVAWERIQEVLQTRRDVEDLPGALSAPLFRGEIEFDHVGFSYDSKAPVLRDVNLHIAPGEMAALVGPTGSGKTTITSLVARFYDPTDGVVRIDGYDVRKLQQTSLRQQISFVLQETLLFHGTIATNIAYGKSGATMEEIVRAAEQANASEFIDRMPDGYDTVVGERGVTLSGGQKQRIAIARALIRKLPILILDEPTSGLDAESEQLVFDALDRLMEGKTSIVIAHRLATIRRADRIFVIDGGAIVETGKHADLLARGGLYAKLHEIQFRTQASVTAAS

SEQ ID NO: 21099 - protein, 535 aa, Lycopersicon esculentum
MAGGGGGGAAPAAKASEPVPHPPKDQLPNVSYCITSPPPWPEAILLGFQHYLVMLGTIVIIPTALVPQMGGGNEEKAQVIQTSLFVAGLNTLLQSIFGTRLPAVIGGSYTFVAPTISIILSGQWNDEDPVSKFKKIMRATQGALIVASTLQIVLGFSGLWRNVTRFLSPLSAVPLVSLVGFGLYEFGFPGVAKCVEIGLPELVLLVIFSQYLAHLIRPGKNIFDRFAVLFTVIIVWIYAHLLTVGGAYNGKPPKTQASCRTDRAGLISGAQWISIPYPFQWGPPSFNAGEAFAMMMASFVALVESTGAFIAVARYASATPLPPSILSRGVGWQGVGILLSGLFGTGNGSSVSVENAGLLALTRVGSRRVVQISAAFMIFFSILGKFGAVFASIPAPIVGALYCLFFAYVGAGGLGFLQFCNLNSFRTKFILGFSVFLGLSIPQYFNEYTAVAGYGPVHTHARWFNDMANVPFQSKAFVAGIVAFFLDNTMHKKDGQTRKDRGKHWWDKFKSFKTDTRSEEFYSLPFNLNKYFPSV

SEQ ID NO: 21100 - protein, 205 aa, Escherichia coli
RELKARHLTMIAIGGSIGTGLFVASGATISQAGPGGALLSYMLIGLMVYFLMTSLGELAAYMPVSGSFATYGQNYVEEGFGFALGWNYWYNWAVTIAVDLVAAQLVMSWWFPDTPGWIWSALFLGVIFLLNYISVRGFGEAEYWFSLIKVTTVIVFIIVGVLMIIGIFKGAQPAGWSNWTIGEAPFAGGFAAMIGVAMIVGFSFQ

SEQ ID NO: 21101 - protein, 756 aa, Buchnera aphidicola str. Bp (Baizongia pistaciae)
MINNHTLGFPRIGLFRELKVAQEKYWSRKISKEELFSVGKTLRVRHWQQQKELGINYIPVGDFSWYDHVLGTSMLLGNIPKRHKNGNDLVTLDTLFRVARGVAPTGASVSASEMTKWFNTNYHYIVPEFSIKSEFCFSWRQILDEIDEALLLGHQVKPVILGPLTYLWLGKVKGKKFDRLNLLKEILPVYKYLLSEINDRNISWVQIDEPILTLELPEKWKNAFRFAYQSLYGYNSLLLTTYFGSVQHNFSLICELPIQGVHLDLVHGKYDLVFLNSFIPEKWLISLGIINGKNIWKADLVMWFKRLQLFSKLRHSLWIGTSCSLLHVPIDLKLENKISSEVRSWFSFALQKCQELTLLRDALNNSNTVTEDIRVWSQPIHSRKKSAIVHNVDVKERLKSITSNDFKRNNVFSVRKQKQHKNLKLPILPTTTIGSFPQTADIRKARFDFKKGNINHDQYNTFISKHIQNAILKQEKLGIDVLVHGEFERNDMVEYFGEHLNGFVFTEFGWVQSYGSRCVKPPIIIGDVSRSKPISLDWIKYAQTLTSKPVKGMLTGPVTILLWSFVREDLSKKIISRQIALALRDEVLDLEQSGVKIIQIDEPALREGLPLRLSLRNEYLSWAVDSFKLSSSGVCDETQIHTHMCYCEFNDIMNAIVLLDADVITIETSRSDMELLEFFKEFKYPNDIGPGVYDIHSPNIPSIEWIMTLLRQAMHYIPVKRLWVNPDCGLKTRTWDETYYSLENMVRAAKILRKKL

SEQ ID NO: 21102 - protein, 966 aa, Flaveria trinervia
MANRNVEKLASIDAQLRLLVPGKVSEDDKLVEYDALLLDKFLDILQDLHGEDLKEAVQQCYELSAEYEGKHDPKKLEELGSLLTSLDTGDSIVIAKAFSHMLNLANLAEELQIAYRRRIKLKSGDFADEANATTESDIEETFKRLVHKLNKSPEEVFDALKNQTVELVLTAHPTQSVRRSLLQKHGRIRNCLAQLYAKDITPDDKQELDEALHREIQAAFRTDEIRRTPPTPQDEMRAGMSYFHETIWKGVPKFLRRVDTALKNIGINERFPYNAPLIQFSSWMGGDRDGNPRVTPEVTRDVCLLARMMTSNMYFSQIEDLMIEMSMWRCNSELRVRAEELYRTARKDVKHYIEFWKRIPPNQPYRVILGDVRDKLYNTRERSRHLLVDGKSDIPDEAVYTNVEQLLEPLELCYRSLCDCGDHVIADGSLLDFLRQVSTFGLSLVKLDIRQESDRHTEVLDAITQHLGIGSYREWSEEKRQEWLLAELSGKRPLIGPDLPKTEEVKDCLDTFKVLAELPSDCFGAYIISMATSTSDVLAVELLQREYHIKHPLRVVPLFEKLADLEAAPAAMTRLFSMDWYRNRIDGKQEVMIGYSDSGKDAGRFSAAWQLYKTQEQIVKIAKEFGVKLVIFHGRGGTVGRGGGPTHLALLSQPPDTINGSLRVTVQGEVIEQSFGEEHLCFRTLQRFCAATLEHGMNPPISPRPEWRELMDQMAVVATEEYRSVVFKEPRFVEYFRLATPELEFGRMNIGSRPSKRKPSGGIESLRAIPWIFSWTQTRFHLPVWLGFGAAFKHAIQKDSKNLQMLQEMYKTWPFFRVTIDLVEMVFAKGNPGIAALNDKLLVSEDLRPFGESLRANYEETKNYLLKIAGHKDLLEGDPYLKQGIRLRDPYITTLNVCQAYTLKRIRDPNYHVTLRPHISKEYAAEPSKPADELIHLNPTSEYAPGLEDTLILTMKGIAAGMQNTG

SEQ ID NO: 21103 - protein, 438 aa, Bacillus licheniformis ATCC 14580
MKLTAGKTVSLSIQHVLAMYAGAVVVPLIVGGALGLTPAQLTYLVSADILMCGVATLLQVWKNRFFGIGLPVVLGCTFTAVSPMISIASTYGIPAIYGSIIAGGVIVVIISFFFGKLVKFFPPVVTGSVVTVIGITLIPVAMNNMAGGEGSSDFGELSNLALAFSVLLVIVLLYRFTSGFIKSISILIGLIAGTAGAALMGKVDFTEVANAGWVQMIHPFYFGAPVFEVTPILTMSLVLIVSLVESTGVYFALGDLTDRRLTEKDLGKGYRAEGIAVLLGGVFNAFPYTAYSQNVGLVQLTGVKKNSVIALAGAFLILLGLFPKAAALTTIIPKPVLGGAMVAMFGMVIAYGIKMLSRVDFGKQENLLIVACSIGIGLGVTVVPQMFQNLPDAVKLLTENGIVAGSFTAILLNAIFHIHPFSRHAEQPEAVSAEKSAV

SEQ ID NO: 21104 - protein, 705 aa, Solibacter usitatus Ellin6076
MPTDSKTLEELCINTIRILAADAVQNANSGHPGMPMGAAAMAYTLWSRYLKHNPKNPGWFDRDRFVLSAGHGSMLLYGLLHLTGYDLPLEEIKRFRQLGSKTPGHPERGLTPGVEVSTGPLGQGFSNGVGMAIAQNFLAARFNRPGHNIIDHYIYAICGDGDLMEGITQEAASLAGHLQLGKLVYLYDNNHISLAGQTSLCFTENVQERFNAYQWHTHAVADGNDTAEIAAAIEEARKDPRPSLILVRTHIGYGSPHKHDNFGSHGSPLGEEELSATKKALGWPTLDKFYIPDEARAQFRGAIEKGAAAEAEWSGRLNAYRAAFPTECAQLESMMAGQLPEGWDADLPKWKLSDKAIATRVAGGQALNAIAKRMTNLIGGSADLNPSTETALKGLGDFQPPNTDGTNVQGEVGGVWSYAGQNVAFGVREHAMGAAVNGMAAHGGVHPFSATFLVFSDYMKPAIRLGALSDLKALYIFTHDSIGVGEDGPTHEPVEQLAGLRAIPGLVVIRPADPNETSEAYRFAIPHDGPVLIALTRQNVPHVSQNPPVAKGAYVLADSEGTPDVILVGTGSEVALCVKAQEKLKQFGVKARVVSMPSWELFEKQDAAYREQVLPKTVRKRVCVEAESPFGWERWAGDEGAIIGINRYGLSAPGAEVMKYFGFTVERVTSTALRLLGKVREAEEVEPGFGGETAVKPTSPQEGHS

SEQ ID NO: 21105 - protein, 214 aa, Zea mays
ACSVSAAPTPSPSPSSTGSTSSHERIAPLHLLILRRLSLSLSLSLLDSLLNPSLGLLFLPILPPPHPPPNRFNPTRQASMSSSRRSSSPDSNDTTDERKRKRMLSNRESARRSRARKQQRLEELVAEVARLQAENAATQARTAALERDLGRVDGDNAVLRARHAELAGRLQSLGGVLEVLQMAGAAVDIPEMVTDDPMLRPWQPSFPPMQPIGF

SEQ ID NO: 21106 - protein, 802 aa, Saccharum officinarum
  misc_feature (521)..(521): Xaa can be any naturally occurring amino acid
  misc_feature (537)..(537): Xaa can be any naturally occurring amino acid
  unsure (1)..(802): unsure at all Xaa locations
MAAKLTRLHSLRERLGATFSSHPNELIALFSRYVNQGKGMLQRHQLLAEFDALFDSDKEKYAPFEDFLRAAQEAIVLPPWVALAIRPRPGVWDYIRVNVSELAVEELSVSEYLAFKEQLVDGNSNSNFVLELDFEPFNASFPRPSMSKSIGNGVQFLNRHLSSKLFQDKESLYPLLNFLKAHNYKGTTMMLNDRIQSLRGLQSSLRKAEEYLLSVPQDTPYSEFNHRFQELGLEKGLGDTAKRVLDTLHLLLDLLEAPDPANLEKFLGTIPMMFNVVILSPHGYFAQSNVLGYPDTGGQVVYILDQVRALENEMLLRIKQQGLDITPKILIVTRLLPDAVGTTCGQRLEKVIGTEHTDIIRIPFRNENGILRKWISRFDVWPYLETYTEDVASEIMLEMQAKPDLIVGNYSDGNLVATLLAHKLGVTQCTIAHALEKTKYPNSDIYLDKFDSQYHFSCQFTADLIAMNHTDFIITSTFQEIAGSKDTVGQYESHIAFTLPGLYRVVHGIDVFDPKFNIVSXGADMSVYYPYTETDKXLTAFHPEIEELIYSDVENDEHKFVLKDKNKPIIFSMARLDRVKNMTGLVEMYGKNARLRELANLVIVAGDHGKESKDREEQAEFKKMYSLIDEYNLKGHIRWISAQMNRVRNAELYRYICDTKGAFVQPAFYEAFGLTVIESMTCGLPTIATCHGGPAEIIVDGVSGLHIDPYHSDKAADILVNFFEKCKADPSYWDKISQGGLQRIYEKYTWKLYSERLMTLTGVYGFWKYVSNLERRETRRYLEMFYALKYRSLASAVPLSFD

SEQ ID NO: 21107 - protein, 454 aa, Linaria vulgaris
MEDTIVFYTPSDHSQPTIALAKFISKHHPSISMTIISTAAFPSSAAVLPKTISYHPLPAVPMPPNLSSNPVEFLFEIPRLHNTKLREALERISETSKIKALVIDFFCNSAFEVSRSLNIPTFFEASLGASGLCEFLYHPTFHKTVPGDIADFNDFLEIPGCPPLHSADVPKGLFRRKTIAYKHFLDTANNMRMSSGILLHAFDALEYRAKEALSNGLCNPDGPTPPVYFVSPTVAETLAYRENTAALRHECLTWLDLQPDKSVIFLCFGRRGTFSMQQLHEIAVGLERSGRRFLWAIRSSGAGNGEPDLSVVLPEGFLERTKDIGLVITTWAPQKEVLSHVAVCGFVTHCGWNSVLEAVSFGVPMIGWPLYAEQRMNRVFMVEEIKVALPLEEEADGLVRATELEKRVRELTESVRGKAVSRRVEEMRLSAEKAVSKGGTSLIALEKFMDSITL

SEQ ID NO: 21108 - protein, 316 aa, Zea mays
  misc_feature (35)..(35): Xaa can be any naturally occurring amino acid
  unsure (1)..(316): unsure at all Xaa locations
RSSAAHDSYNFLVNWLERFPQYKHRDFYITGESYXGHYVPQLSQLVYRNNKGIEKPILNFKGFMVGNAVIDDYHDFIGTFEYLWTHGLISDETYGKLRLACQFDVSEHASKECNKVFDIAEAEEGNIDAYSIYTPTCKKTSLHKRRLIRGRTPWLPRGYDPCTEKYSTKYYNLPEVQRALHANVTGIPYPWVTCSDPVYDFWKDSPRSMLPIYRELIAAGIRIWVFSGDADSVVPLTATRYSIDALFLPTITNWYPWYDDEEVGGWCQVYEGLTLVTVRGAGHEVPLHRPRQGLKLFEHFLRGEPMPRPVDSVQSF

SEQ ID NO: 21109 - protein, 235 aa, Populus kitakamiensis
MAFVLPAKGILQSEALKQYIYETSAYPGEHEQLKELREATTKKYGSLSGMSVPVDEGRFLSMLLKLMNAKRTLEVGVFTGYSLLSTALALPEDGQVTAIDKDRGAYEIGLPFIQKAGVEDKINFIQSEAPPILNEMLCNDKQPEFDFAFVDADKSSYKHYHEQLLKLVKIGGIIAYDNTLWYGLVAKEVDDEVPEPLRMVRTVIMEFNKLLSSDLRVEISQISIGDGVTLCRRLC

SEQ ID NO: 21110 - protein, 342 aa, Escherichia coli
MFRQGITGRSHLMSQNTLKVHDLNEDAEFDENGVEVFDEKALVEEEPSDNDLAEEELLSQGATQRVLDATQLYLGEIGYSPLLTAEEEVYFARRALRGDVASRRRMIESNLRLVVKIARRYGNRGLALLDLIEEGNLGLIRAVEKFDPERGFRFSTYATWWIRQTIERAIMNQTRTIRLPIHIVKELNVYLRTARELSHKLDHEPSAEEIAEQLDKPVDDVSRMLRLNERITSVDTPLGGDSEKALLDILADEKENGPEDTTQDDDMKQSIVKWLFELNAKQREVLARRFGLLGYEAATLEDVGREIGLTRERVRQIQVEGLRRLREILQTQGLNIEALFRE

SEQ ID NO: 21111 - protein, 247 aa, Populus tremuloides
MATNGEEQQSQAGRHQEVGHKSLLQSDALYQYILETSVYPREPECMKELREVTAKHPWNIMTTSADEGQFLNMLLKLVNAKNTMEIGVYTGYSLLATALAIPEDGKILAMDINRENYELGLPVIQKAGVAHKIDFKEGPALPVLDQMIEDGKYHGSFDFIFVDADKDNYINYHKRLIELVKVGGLIGYDNTLWNGSVVAPPDAPMRKYVRYYRDFVLELNKALAADPRIEICMLPVGDGITLCRRIQ

SEQ ID NO: 21112 - protein, 412 aa, Helicobacter pylori J99
MRRIVVTGMGMINSLGLNKEDSFLAIAKGECGIKNIESFDANAFPVRIAGEITDFDPTEVMNPKDVKKAGRFIQLALKATREAMKDSGILDAHNRCPEELANRMGVSSGSGIGGLGNIEANSIFCFEKGPRKVNPFFITSALVNMIGGFTSIEFGIKGPNLSSVTACAAGTHAIIEAVKTILLNGADRMLVVGAESTICPVGIGGFASIKALSTRNDDPKKASRPFDKDRNGFVMGEGAGALVLEEYESAKKRGAKIYAEFAGYGESGDANHITAPAPEGEGAFRAMKMALEMAKVEVGYVNAHGTSTHYNDWYESIALKNVFGSKEKVPPVSSTKGQIGHCLGAAGALEAVISIMAMNQGILPPTINQETPDPECDLDYIPNTAREKQVNAVMSNSFGFGGTNGVVIFKKA

SEQ ID NO: 21113 - protein, 243 aa, GIBBERELLA ZEAE PH-1
MVRESGISATKPIFPNFLLPSIKLPFSRRHSASSSSAESAASSAVTTPASSPPNDGHLAKAGRNRLSRTSPNTLRCSTCSADIAFASQVISKGFTGRYGRAFLVAPPALPAPQTLSNIRIGKSENRQLVTGWHVVADINCGACSSKLGWKYVDAKEQGQKYKVGKFILEMERVVTYRSWEDAIDEHEEEPPATSKKSSDNEVEFDSDNDDECEDIFAGTWDPEVVEGRRRRMMARRSQAESDE

SEQ ID NO: 21114 - protein, 738 aa, GIBBERELLA ZEAE PH-1
MAAPSNHRSRGSDDLGVFDDAKSYYTAERHQNRAGPRTRTYSQNSLMSRFERVNLREPFRRGSHDENSQQNRRFLIQVDSTLESLSLQEDPNGNMQITIEDNGPKVISLRTAASAGHNRFDVRGTYMLSNLLQELTLAKEYGRKQIVLDEGRLNENPVDRLSRMIRDHFWENLTRRIDASTVDIAARDPKDWTADPRPRIYIPYRCPRQYEFYKRVAEERPEMRLDVQMLPEEITTDLVRDMNDAPGLLAVDVQEVSEPEHPSGWTLKGMPFVVPGGRFNELYGWDSYMASLGLLINDRVDLAKSMVINFCFCIEHYGKILNATRSYYLCRSQPPFLTDMALRVYEKIKHEPDAKEFLRRSILAAIKEYHSVWVSEPRLDPTTGLSRYRPEGRGVPPETEATHFVHILDPYIKKHNTTFEDFVRKYNHGEIEEPELDEYFMHDRAVRESGHDTSYRLEGVCANLATIDLNSLLFKYETDIARTIRSVFNDKLTMPEEFCAGTPYQPGEVLSSAAWDRRAKRRKLTVDKLMWDEKEGMFFDYDTAKRERCTYESCTTLWALWAGIATPKQAAEMVRKALPKFEAYGGLVSGTEESRGAVGLDRPNRQWDYPYGWPPQQMLAWTGLIRYSFTEEAERIAYKWLFMVTKAFVDFHGVVVEKYDVTRPADPHRVDAEYGNQGLGFRGVNKEGFAWVNASYIYGLQIINAHMRRALGALTPYDTLMKAIEQNEEKTLAGLLSS

SEQ ID NO: 21115 - protein, 756 aa, Silicibacter sp. TM1040
MEQTQPDTDGPLSQHNARFSPRGLLIRYAVIRARMYYARMFAAAGLTSVLAVIFGPFWPLVFFVLYLITDKAETTYLRGLPERLENGTSLAKAKRIIFVFSVLYAGSVCGFAAIPYVQMHTEAGAHEILAEPFFALCIVLGPALSAALDLRYVPLAASVRLLMLSLLPFGLTAHILLQNQTHGADLQLMVAGLVAFFFTQIWFVVMVQKRHRNSRRNLRSQALQRQALEDAYMRLFDQKQEARRLAMIAEHANDGVMLIGRDGIVRWANDGFSRLTGYTFDELVGQNPGKILNSENTDPAALRVIEAGREKGEPFRAELINRRKDGKEIWIETNQVPVFDDTGQIETYIAVERDVTATKEYERQLKEARLAAEEGARIKEEFLATMSHEFRTPMNGVIGMAQMLQATDLSEDQRLYTDTILGSSRALLALINDVLDLSHMNAAGVSLFNVDFDLHACVGDIVRLLSGQADEKHLELSVEIDPDVPVWVTGDDRRLRQILVNLLGNAVKFTTSGSIFIRLRGVVTGDQVALKIEVEDTGIGIPADKLEKIFERFSQADNAISRKYGGSGLGLSISRGLAQAMGGDIDVTSVEGEGACFTLMLDMGVADCPSIVADEAEDADSLPALDQLQGLRLLVAEDNRVNRLLIRKFLDDAPLELRFATNGAEAQELAKRFRPQVILMDMSMPEVNGLEATRAIRSFDITQPYIAALTANVDETSRQACVDAGMDTFLSKPLSRKELLNLLLTFSERARASERG

SEQ ID NO: 21116 - protein, 546 aa, GIBBERELLA ZEAE PH-1
MASQNMTNPSINPDIEDELFQKEVEAVKTWWSDSRWRQTKRPFTAEQIVSKRGYLPIDYASNTQAKKLWKILEHRFENRDASYTYGCLEPTMVTQMAKYLDTVYVSGWQSSSTASASDEPGPDLADYPYTTVPNKVGHLFMAQLFHDRKQRQERLSVPKEQRANLLNIDYLRPIVADADTGHGGLTAVMKLTKLFIEKGAAGIHIEDQAPGTKKCGHMAGKVLVPIQEHINRLVAIRAQADIMGSDLLAIARTDAEAATLLSTNIDPRDHAFILGSTNSTLKPLNDLMIAAEATGKSGAELQRIEDEWLAKANLSSFDDAVAAAIDAGSFSDKAGIKQEYTSRAKGKSNFEARAVARQLLGRDIFFDWDAPRTREGYFRLKGGCDCAVNRAIAYAPYCDAIWMESKLPDFAQAEQFAQGVHAVWPEKKLAYNLSPSFNWKTAMPRDEQETYIRRLAKLGYCWQFITLAGLHTTALISDQFAKAYSTVGMRAYGELVQEPEMDQKVDVVKHQKWSGATYVDELQKMVTGGISSTAAMGAGVTEDQFK

SEQ ID NO: 21117 - protein, 253 aa, Listeria innocua Clip11262
MGKLAGKVAVVTGAASGMGQQIAVLFAKEGAKVVVADLNLEAAQKTVALIEDEQGTALAVVANVTKQDDIESMINKATETYGTLDILVNNAGIMDNFVPAGELTDELWDKVFAINTTGVMRATRKALHIFEEKGQGVIVNIASAGGLFGSRAGAAYTASKHAVVGFTKNVGFQYANKNIRCNAIAPGAVNTNIGTTIYAPDQFGQERAMIGMGTNPRAGDASEIAKVALFLASDDASFVNGTVITADAGWTAY

SEQ ID NO: 21118 - protein, 376 aa, uncultured archaeon GZfos24D9
MEERGISKQELKSFLKEQRQKDLTYRKVLSSMCSYPHEMATYAHNLFLDSNLGDSGLFPGTKAMEDELIRMIGALLGNENAHGYISTGGTESNIQAIRAIRNRKRKERLQEMNIIVPKTAHFSFDKIEDLLSLEVKKAGLDDKLRVDVNLVEELIDDNTISIVGIAGTTEFGQIDPIKELADIAHDSDIFLHVDAAFGGFVIPFLDAEYQFDFSLDAVSSVSIDPHKMGMSTIPAGCILFRDESYLADLAVDTPYLTTNEQCSLIGTRSGAPVAATFAVLKYLGRSGLKAIVDDCMQLTRMLVRGAKAMDIYPVIEPVTNVVTLRFPDVDRVAKALEARGWRVSTTRAPKALRLVIMPHVTEDTIELFLNDLACVT

SEQ ID NO: 21119 - protein, 79 aa, Brassica napus
MELSRKLFTAVLLVMLLLLSAEVGPVAVAEARTCQSQSHRFRGPCLRRSNCANVCRTEGFPGGRCRGFRRRCFCTTHCH

SEQ ID NO: 21120 - protein, 402 aa, Enterococcus faecalis V583
MYQQPNFVRRTIMTPGPVEAHPSVLRQMGQPILGQFDPEFLQIMDEVREMIKVPFATKNQQAFAIDGTSRSGLEAGLFALIEPGDKVLVPTYGRFAYLLGEICERARAEVIYLEKDWLAPFEQTTVIEAIKEHQPKIVAMVHGETANAQMQPLDQIGAFCRENEIFFVVDMVATYGGVETKVDDWKIDIAVAGTQKCVSVPSGLSLITYNQRVADYLAGRYQKELGLGADARNERFIQSNYLDLSQLEKYWGPERLNHHTEATTMIYGLHEGLRLLLQEGMENVYARHRKNNRILVESLQKMGLEIFGKLDTKTPTVIPVVIPEGIDGEKVRSLLLDHFKVEIASSFGDLKGKIWRVGNMGYSSREDNVLHFLSAFETVLKHQGYQFEGGSGSTHALAEYLN

SEQ ID NO: 21121 - protein, 308 aa, Escherichia coli
INGFGRIGRIVFRAAQKRSDIEIVAINDLLDADYMAIMLKYDSTHGRFDGTVEVKDGHLIVNGKKIRVTAERDPANLKWDEVGVDVVAEATGLFLTDETARKHITAGAKKVVMTGPSKDNTPMFVKGANFDKYAGQDIVSNASCTTNCLAPLAKVINDNFGIIEGLMTTVHATTATQKTVDGPSHKDWRGGRGASQNIIPSSTGAAKAVGKVLPELNGKLTGMAFRVPTPNVSVVDLTVRLEKAATYEQIKAAVKAAAEGEMKGVLGYTEDDVVSTDFNGEVCTSVFDAKAGIALNDNFVKLVSWYDN

SEQ ID NO: 21122 - protein, 90 aa, Bacillus subtilis
LGDRVVIELVESEEKTASGIVLPDSAKEKPQEGKIVAAGSGRVLESGERVALEVKEGDRIIFSKYAGTEVKYEGTEYLILRESDILAVIG

SEQ ID NO: 21123 - protein, 403 aa, Exiguobacterium sp. 255-15
MTIQTIRENLTQTIEQDIEQKRESYLETSHRIHATPEIGNEEYFASRHHAERLTAEGFTVELGVAGHETAFLARKVSDKPGATIAFLAEYDALPGIGHACGHNIIGTTSVAAAIALSKVIDEVGGSVVVLGTPAEEGGPNGSAKGSFVKHDLLTGIDAALMVHPSGQTRITGSSLAVDPLDFAFTGKPAHAAASPEEGINALDAVIQLFNGINALRQQLPSDIRIHGIITDGGDAPNIIPEYAKARFFIRATTRERLNAVTKKVKAVAEGAALATGATLEVIAFQNEVDNLLFNRTFDEIFREEATALGEDVKTDERPGLGSTDAGNISQVLPTIHPYIKIGADDLVAHTESFREAAKSEQGDEALITGAKILARTGLRLLTDDSLLGTVKQEFHDRKNGYLA

SEQ ID NO: 21124 - protein, 466 aa, Lycopersicon esculentum
MAFAAQQKKAIHSMLANKLTHLKIPDSSSSSSPPPTDPDFDFSDVFGAPTSPSSSSSFLTDPQIIHSRSHSFVGPSPRITLSKPLPFHQEVDSEGESDSDKVNTHVGTHQTECSDGIEEISGDEGSAVTKFGPGDFEILRMIGKGSFGKVFQVKMKGYGGEGEGDGILAMKVMRKDTVIKNNHVDYMRAERDILTKVEHPFIVQLRYSFQTKSKLYLILDFINGGHLFYHLYRQGIFSEDQARIYAAEIVSAVSHLHQRGIVHRDLKPENILMDGDGHVMLTDFGLAKEIDESSRSNSMCGTMEYMAPEIIQSKGHNKDADWWSVGVLLYEMLTGQPPFTHANRKKLQEKIISEKLKLLPRLTGEAHSLLKGLLQKDPSKRLGSGPRGGDEIKSHKWFRTINWKKLDARELQPKFKPDVIGRDCTANFDKCWTTMPPDDSPASTPTTGEHFQGYTYVAPNPWLSSS

SEQ ID NO: 21125 - protein, 308 aa, Escherichia coli
INGFGRIGRIVFRAAQKRSDIEIVAINDLLDADYMAYMLKYDSTHGRFDGTVEVKDGHLIVNGKKIRVTAERDPANLKWDEVGVDVVAEATGLFLTDETARKHITAGAKKVVMTGPSKDNTPMFVKGANFDKYAGQDIVSNASCTTNCLAPLAKVINDNFGIIEGLMTTVHATTATQKTVDGPSHKDWRGGRGASQNIIPSSTGAAKAVGKVLPELNGKLTGMAFRVPTPNVSVVDLTVRLEKAATYEQIKAAVKAAAEGAMKGVLGYTEDDVVSTDFNGEVCTSVFDAKAGIALNDNFVKLVSWYDN

SEQ ID NO: 21126 - protein, 308 aa, Escherichia coli
INGFGRIGRIVFRAAQKRSDIEIVAINDLLDADYMAYMLKYDSTHGRFDGTVEVKDGHLIVNGKKIRVTAERDPANLKWDEVGVDVVAEATGLFLTDETARKHITAGAKKVVMTGPSKDNTPMFVKGANFDKYAGQDIVSNASCTTNCLAPLAKVINDNFGIIEGLMTTVHATTATQKTVDGPSHKDWRGGRGASQNIIPSSTGAAKAVGKVLPELNGKLTGMAFRVPTPNVSVVDLTVRLEKAATYEQIKAAVKAAAEDEMKGVLGYTEDDVVSTDFNGEVCTSVFDAKAGIALNDNFVKLVSWYDN

SEQ ID NO: 21127 - protein, 254 aa, Zea mays
  misc_feature (32)..(32): Xaa can be any naturally occurring amino acid
  unsure (1)..(254): unsure at all Xaa locations
AHAPQGGQALRHDCHCPVIGIDLLSQSLLPAXIVELAEDRHWRVRLAIIEYIPLLASQLGVGFFDDKLGALCMQWLEDKVFSIRDAAANNLKRLAEEFGPEWAMQHIIPQVLEKINNPHYLYRMTILQAISLLAPVMGAEITCQKLLPVVINSSKDRVPNIKFNVAKVLQSLVPILDQSVSSSSYSAHMLPTFSKKAVHLYFSWYWGISSVLTPQVVEKTVKPCLVELSEDPDVDVRYYANQALQACDQMMVSS

SEQ ID NO: 21128 - protein, 609 aa, Cyanidium caldarium
MWRKGYVPGFLCPLSSSFSTIQDNTFSHKSCNSCVSLVLVKSRVLFVVQQASSADNRFRAQRLFCPKYCSRTESSFVYSTSGDDSQLGVCRDNPTKVRKVLAVSTLSKEKSTAAVSSKNEPIRNRSKLVNSPESTRNSTRKKQRIQEYVQSGDYSSAQRLEDVLSLESSEDADQYYSNESLVSSSSKSRSSEKYSLMRSSRKNRKSSNVDDMSMEDIHYLEKQEKEILSMAITKEDALLIESIVNRPTTASSKQIKKGSSMGAFLKEIGSVPLLTESQVVSLAREIRKLALWNATRIQLRHEYGKEPDRTEWAKALNMSAEELTRNLLRAQRARESLVAANLRLVVSVAKQFTNRGLSMQDLIQEGSIGLIKGAERFDYRTGFRFSTYAMWWIRQAMQRAIADTSRPIRIPSTITDLSVQIYRARLELSSTLGRDPTDAELADFLDISVQRLQDVKLYTNQSATVSLDAPVSRQVTNTCIKSKGTGDTDVFSSKADGKLSKNGYGSRHKLGDFTLGDTVQTDESVSPEHMMADSLMRDDIECALSLLNPYEREVIRMRFGLDDGRMKSVDEVCAYYCVQTSRIRRIEARALRKLRHPSVWHMLRDYISN

SEQ ID NO: 21129 - protein, 425 aa, Lactobacillus acidophilus NCFM
MSFLNTTEVIIITILSLYPILGAMFWFWGAVAYVIFRRKDELPKDKKLDHEPFITIMVPAHNEEIVIENTLTYLLTKLNYHNYEVLVMDDGSTDKTPEILHRMQEQYSKLRVIRVEKNSGKAHAFNIGMFFAKGEYILSNDADTVPESDVLNKYMLYFTSPKGLNYAAITANMDVYNRSSILGKSQTVEFSSIVGIIKRSQTAVNDTMYAYSGANTMYRRDFLISVGGFRQDRATEDISIAWDHTFNNLTPKFAPDIVFHMNVPEGLIDLYHQRKRWAQGGTEVWLTNFAKVLKHPWKNRFVIPMMTDTTLSIVWSFFFWITTIIFIISMICFAVAGNWERVYHGIVMSLIYVNFQMIAGILQVLAALILDFNGVKFKYLLFAPIYLIFTWIVNPLTIVTTFVRAVQTIMGHGSGKWISPKRKVD

SEQ ID NO: 21130 - protein, 448 aa, Saccharum officinarum
MGKEKSHINIVVIGHVDSGKSTTTGHLIYKLGGIDKRVIERFEKEAAEMNKRSFKYAWVLDKLKAERERGITIDIALWKFETTKYYCTVIDAPGHRDFIKNMITGTSQADCAVLIIDSTTGGFEAGISKDGQTREHALLAFTLGVKQMICCCCCNKMDATTPKYSKARYDEIVKEVSSYLKKVGYNPDKIAFVPISGFEGDNMIERSTNLDWYKGPTLLEALDQITEPKRPSDKPLRLPLQDVYKIGGIGTVPVGRVETGVIKPGMVVTFGPTGLTTEVKSVEMHHEALQEALPGDNVGFNVKNVAVKDLKRGYVASNSKDDPAKEAASFTSQVIMNHPGQIGNGYAPVLDCHTSHIAVKFAELITKIDRRSGKELEKEAKFLKNGDAGMVKMIPTKPMVVETFSEYPPLGRFAVRDMRQTVAVGIIKSVEKKDPTGAKVTKAAAKKK

SEQ ID NO: 21131 - protein, 522 aa, Arabidopsis thaliana
MRPSCASSSSSSASPSLRLSSVTVAVDKATSELLRTPDWTIIIAICDSLNSNRWQCKDAIKAVKRRLQHKSSRVQLLTLTLLEAMLKNCGDFVHSHIAEKHLLEDMVKLVRKKGDFEVRNKLLILLDTWNEAFSGVACKHPHYNWAYQELKRCGVKFPQRSKEAPLMLEPPPPVTQSSSSSSMNLMSIGSFRRLDETMATEIESLSLSSLESMRNVMDLVNDMVQAVNPSDKSALKDELIVDLVEQCRSNQKKLIQMLTTTADEDVLARGLELNDSLQAPEPRETSSSLKTCGAAALESADSESSSSSSSSESETDEVEDVKDDFIQLAKRHALLNALHSDEEEETLLLGNDNEKTAEAEAKTQCKDLALFDTTTTTTTKSEQDIIELLSLTLSTTALPSPQTQPQTQHPSFFADDNILMNSYVVPWAQSQEEPQVPKMTQFAPSGPQFQPWPLQQQHRYSYGYPQPQWSGGQVTSNDSTFWSQGGNENMVFERNLQVSNSFPARATGTSGAATAATVDRQP

SEQ ID NO: 21132 - protein, 73 aa, Citrus x paradisi
MKSFFGIFLLLLILFASQEIMVPAEGRVCQSQSHHFHGACFSHHNCAFVCRNEGFSGGKCRGVRRRCFCSKLC

SEQ ID NO: 21133 - protein, 336 aa, Glycine max
MEERYEPLKELGAGNFGVARLAKDKKTGELVAVKYIERGKKIDENVQREIINHRSLRHPNIIRFKEVLLTPTHLAIVLEYASGGELFERICTAGRFSEDEARYFFQQLISGVSYCHSMEICHRDLKLENTLLDGNPSPRLKICDFGYSKSALLHSQPKSTVGTPAYIAPEVLSRKEYDGKISDVWSCGVTLYVMLVGAYPFEDPEDPRNFRKTIGRIIGIQYSIPDYVRVSSDCRNLLSRIFVADPAKRITIPEIKQYPWFLKNMPKEIIEAERKGFEETTKDQPNQKVEEIMRIIQAARIPGQGSKAGEGGQAGTGSLDIEDDEEIDVSGDYEQV

SEQ ID NO: 21134 - protein, 118 aa, Citrus x paradisi
MNQRFCCLIVLFLSVVPLLAAGDRKGALVGGWKPIEDPKEKHVMEIGQFAVTEYNKQSKSALKFESVEKGETQVVSGTNYRLILVVKDGPSTKKFEAVVWEKPWEHFKSLTSFKPMVK

SEQ ID NO: 21135 - protein, 463 aa, Burkholderia vietnamiensis G4
MSGSNTGLGTGLKQRHVTMMSIAGVIGAGLFVGSGHAIAEAGPASILAYAIAGVLVVLVMRMLGEMAVAHPDSGSFSTYADRAIGHWAGFSIGWLYWWFWVLVIPIEATAAATILNAWFPGVATWIFALGITLLLTITNLFSVKNYGEFEFWFALIKVVAIVVFLCIGGAAILGIVPAPAVSGVSNLFAHQGFMPNGAGAVLAAMLTTMFSFLGTEIVTIAAAESDNPQRQIVRATNSVIWRITLFYLGSILVVAAIVPWNDPLLPKHGSYQRAMELIGVPNAKAIIDVIVLVSVASCLNSALYTASRMLFSLSKRKDAPAFLHRTDSTGTPRAAVLASTAFGFLTVIANYLMPEQVFGFLLATSGAIALLVYLVIAISQLRMRKTLESTGADLALRMWLFPWLTWAVILFICGTLTVMFVSEAHRMEVGATAVLALLVLFASWLNKRARDARAVAGGRVSAT

SEQ ID NO: 21136 - protein, 360 aa, Arabidopsis thaliana
MQIYSITLDVESSDTINNVKDIEGIPQDQQRLIFSGKLLDDGPTLADYSIQKDSILHLALRLRGGMQIFVKTLTDTIDNVKAKIQDKEGIPPDQQRLIFAGKQLEDGRTLADYNIQKESTLHLVLRLRGGMQIFLKTLTGKTKVLEVESSDTIDNVKAKIQDIEGIPPDQHRLIFAGKQLEDGRTLADYNVQEDSTLHLLLRFRGGMQIFVKTLTGKTITLEVESSDTIDNLKAKIQDKEGIPPDQQRLIFAGKQLEDGRTLADYNIQKESTLHLVLRLRGGMQIFVKTLTGKTITLEVESSDTIDNVKAKIQDKEGISPDQQRLIFAGKQHEDGRTLADYNIQKESTLHLVLRLRGGSF

SEQ ID NO: 21137 - protein, 658 aa, Desulfitobacterium hafniense DCB-2
MTSNEGITISDDENTLTAGERGPTLIEDFLSREKLAHFDRERIPERVVHARGYGAHGEFQPYESLADLTMADFLQDPNKKTPLFVRFSQVVGSKGCNETNRDVRGFSIKFYTDEGNFDLIAINMPVFFIQDAIKFPDLIHAVKPEPDNEYPQGQTDHNTFWDFMANNKETAHMSLWIASNRAFPKSFRTMEGFGVHTFRLVNKDGKSHFVKFHIKPLLGVHSLIWDEAQRLGSDADFHRRDLWENIEIGNYPEYEMAIQVIKEEDEFAYDFDLLDPTKLWPEEEIPLRRIGKIILNRNVENAFAETEQSAFHPGNIVRGIDFSNDPLLQGRLFSYTDAQQARLGPNHQQLPINRPVCPFANNQRDGASRLVIDRGKVAYHRNGLANNSPYTVPGTQGGFVTYPSTVEGHKVRSTAPSFKDHYSQAKMFWNSMSEVEKRQIIGAYCFELGKCGPFVRQEWVDVLAHISTELAKSVSKELGTTVPADVEESPVTKSSPALSLHNTIFVPDTLRVAVFLAQGFDGPGVSKVLETLAEAKLRVVIVHDTLGKVSGTEGVTYEVHDSFLTGSPLVYDGILIVGSGNITPYFTYTAQKFTTDIYNHFKPIGIIQKGDAVLEPLGLLADEGIVTDSGPDFAGRFIKAMAKQRFWNRPSFLYPAMV

SEQ ID NO: 21138 - protein, 291 aa, Oryza sativa
MESDCQFLVAPPQPHMYYDTAAAAVDEAQFLRQMVAAADHHAAAAGRGGGDGDGGGGGGGGGGERKRRFTEEQVRSLETTFHARRAKLEPREKADVARELGLQPRQVAIWFQNKRARWRSKQIEHDYAALRAQYDALHARVESLRQEKLALADQVRAPLPTNHQLYLLHTCTHGDNARFAFLQVDELRGKLNERQDQSGSCDGGGAEGDDDDKRNSVMNASSSGLVEEDYVSCLAVPVVDVSEDGSAACGGSSYEYDHHLDYLGGGQLPDPFCGMPDLWEIWPMVEWNAVA

SEQ ID NO: 21139 - protein, 488 aa, Chlamydophila pneumoniae AR39
  misc_feature (17)..(17): Xaa can be any naturally occurring amino acid
  unsure (1)..(488): unsure at all Xaa locations
MITKQLRSWLAVLVGSXLLALPLSGQAVGKKESRVSELPQDVLLKEISGGFSKVATKATPAVVYIESFPKSQAVTHPSPGRRGPYENPFDYFNDEFFNRFFGLPSQREKPQSKEAVRGTGFLVSPDGYIVTNNHVVEDTGKIHVTLHDGQKYPATVIGLDPKTDLAVIKIKSQNLPYLSFGNSDHLKVGDWAIAIGNPFGLQATVTVGVISAKGRNQLHIADFEDFIQTDAAINPGNSGGPLLNIDGQVIGVNTAIVSGSGGYIGIGFAIPSLMANRIIDQLIRDGQVTRGFLGVTLQPIDAELAACYKLEKVYGALVTDVVKGSPADKAGLKQEDVIIAYNGKEVDSLSMFRNAVSLMNPDTRIVLKVVREGKVIEIPVTVSQAPKEDGMSALQRVGIRVQNLTPETAKKLGIAPETKGILIISVEPGSVAASSGIAPGQLILAVNRQKVSSIEDLNRTLKDSNNENILLMVSQGDVIRFIALKPEE

SEQ ID NO: 21140 - protein, 609 aa, Buchnera aphidicola str. Bp (Baizongia pistaciae)
MEQNPQSQLKLLVTYGKEQGYLTYSEINDHLSDNIINSDQIEDIIQMINDMGIQVVEKAPDSDDLILHEIKRNNETDEDIVEATAQVLSTVESELGRTTDPVRMYMREMGTVELLTREGEIDIAKRIEDGINQVQCSVAEYPEAITHLLEQYNRVELGELRLSELIHGFVDPNAEAVHTSITNHINTNSEEHHHNDNTEENNDDDHLVDPELAREKFIALKNQYHITNYAIKTKNRNHQDTLIEINNLSEIFKQFRLVPKQFDHLVINMRKMMQKIRIQERNIAKLCIEYGNIPKKALLNFFSLQKTNQIWSKIVQNIKKPWIDKFNTIKPDIQMILKKLQKVEEETGLTIHQVKNINKRISLGEAKAKRAKKEMVEANLRLVISIAKKYTNRGLQFLDLIQEGNIGLMKAVDKFEYRRGYKFSTYATWWIRQAITRSIADQARTIRIPVHMIETINKLNRISRQILQEIGREPTPEELSERMLIPEDKIRKVLKIAKEPISMETPIGEDDDSHLGDFLEDTNIELPLDSATSASLRSATKNVLSGLTTREAKVLRMRFGIDMNTDHTLEEVGKQFDVTRERIRQIEAKALRKLRHPSRSEILRSFLDD

SEQ ID NO: 21141 - protein, 366 aa, Escherichia coli
MFRQGITGRSHLMSQNTLKVHDLNEDAEFDENGVEVFDEKALVEEEPSDNDLAEEELLSQGATQRVLDATQLYLGEIGYSPLLTAEEEVYFARRALRGDVASRRRMIESNLRLVVKIARRYGNRGLALLDLIEEGNLGLIRAVEKFDPERGFRFSTYATWWIRQTIERAIMNQTRTIRLPIHIVKELNVYLRTARELSHKLDHEPSAEEIAEQLDKPVDDVSRMLRLNERITSVDTPLGGDSEKALLDILADEKENGPEDTTQDDDMKQSIVKWLFELNAKQREVLARRFGLLGYEAATLEDVGREIGLTRERVRQIQVEGLRRLREILQTQGLNIEALFREKVSICQKGQSQARLAFFLLVHGTC

SEQ ID NO: 21142 - protein, 711 aa, GIBBERELLA ZEAE PH-1
MAPRGFEDEELTISLSSSHVRRPQQTQPQSQSQQQDDSHDAPQAASRPADAPLKERIKTEQRIGAYKVLRTLGEGSFGKVKLAIHNGTGQQVALKIIARKKLISRDMAGRVEREIEYLQLLRHPHIIKLFTVIKTPNEIIMVLEYAGGELFDYIVQHGRMKEPEARRFFQQMLCAVEYCHRHKIVHRDLKPENLLLDENLNVKIADFGLSNIMTDGNFLKTSCGSPNYAAPEVIGGKLYAGPEVDVWSCGVILYVLLVGRLPFDDEHIPSLFAKIAKGTYSIPQWMPTGAANLIKKMLVVNPVHRATIEDIRADPWFTTELPVYLQLPVEEFFNTGVDPNKAIKKNDIAPNASEKVQERLHNEVTEKISKTMGYGKSDVEEALQAAEPSAIKDAYMIVRENKMMQVNHNSEALLAEPEGSSPMLSMSSARSTISQATTTPRPYVSKVGILPSSLPAYHKDYMEREKAGSVENSPPKVLINDEPQLNRTDAEKEETARRLRPHSRSQLRIDEANTRPQGMTPINPPKKTKPVRWQFGIRSRNSPWEALLCIHKALYKLGATYIPDEDYESRTAEERAEASGDSSFVDSHDGYRGSTSSIDPKKRYNLPADPWHINVRWDTSAIKKKAGNTPSAPSTPSSPSTPDGHHAKEPFVALHLDIQIYEMEHGVYLVDFKCSGYETAHGRLLEEKDVTSPFPFLDMAAKLIMQLAEAD

SEQ ID NO: 21143 - protein, 333 aa, Arabidopsis thaliana
MGAPLVCHGHSRPVVDVAYSPVTPDGFFLISASKDSNPMLRNGETGDWIGTFEGHKGAVWSCSLDKNAIRAASASADFTAKIWNALTGDELHSFEHKHIVRACAFSEDTHRLLTGGMEKILRIFDLNRPDAPPKEVGNSPGSIRTVEWLHSDNTILSSCTDTGDIRLWDIRSDKIVHTLETKSPVTSAEVSQDGRYITTADGSSVKFWDAKNFGLLKSYDMPCNVESASLEPKHGNTFIAGGEDMWVHRFDFQTGEEIGCNKGHHGPVHCVRYAPGGESYTSGSEDGTVRIWVVGSVNHPEESNLSGHVKLVAEEVVRKAESLRISEKAAEAK

SEQ ID NO: 21144 - protein, 500 aa, Pichia angusta
MPRQWTRFFEYKYLEMRRFSRLINTNSFFATMKDSMTEDLAADYDKADMVWVMVSGVLVWIMIPGVGLLYSGLSRKKHALSLLWASLMAICLISFQWFFWGYSLTFGTNSSVFLGSLDNFCLMKVLGDSNALSTVPDIVFCFFQGMFAMITGCIMLGGACERARLGPMMVFLFLWMTVVYCPCAMWTWNANGWLATLGAYDFAGGGPVHQASGFGALAYALICGKRHDPVAGSNLPKYRPHSVTSVVLGTVFLWFGWFGFNGGSSGDASIRGFYACVNTNLAAACGGLAWMFLDYFRCGRKWTTVGMCSGAVAGLVGITPAAGFVPVYFAVPIGALTAIACNYSVDIKNMIGIDDGLDVWCLHGVGGFTGSVLTGLFAADYIIATDYGVSGEGGWLNHHYKQLGYQLAASVSIDAWSFVVTSILLLVLNRIPFLKIRLSEEEEELGTDAAQIGEFTYQESRVYIPEPVRSVKSIPGTKATKSNELDADAVPLPKDEKVDV

SEQ ID NO: 21145 - protein, 229 aa, Streptococcus agalactiae NEM316
MGKKILIIEDEKNLARFVSLELLHEGYDVVVETNGREGLDTALEKDFDLILLDLMLPEMDGFEITRRLQAEKTTYIMMMTARDSVMDIVAGLDRGADDYIVKPFAIEELLARVRAIFRRQEIETKTKEKGDSGSFRDLSLNTHNRSAMRGDEEISLTKREFDLLNVLMTNMNRVMTREELLEHVWKYDVAAETNVVDVYIRYLRGKIDIPGRESYIQTVRGMGYVIREK

SEQ ID NO: 21146 - protein, 177 aa, Methanosarcina mazei Go1
MGCPEVQDRPGSGYELEETPAPVPVEPCLGSRPWTLSGGLSMVLKNIKYALKNIPKERVTRLCPEVESPLSERFRGLQTLDKSKCIGCGICANTCPNSAIKIVKAPIAPGSEKKRWFPQIDIGHCLFCGLCIDQCPKGALSSGKEYCKGMVKWAHKDLLMTPEKLAREVDIQEGDER

SEQ ID NO: 21147 - protein, 474 aa, Pseudomonas savastanoi
MSRLVVVSNRIAPPDEHAASAGGLAVGILGALKAAGGLWFGWSGETGNEDQPLKKVKKGNITWASFNLSEQDLDEYYNQFSNAVLWPAFHYRLDLVQFQRPAWDGYLRVNALLADKLLPLLQDDDIIWIHDYHLLPFAHELRKRGVNNRIGFLLHIPFPTPEIFNALPTYDTLLEQLCDYDLLGFQTENDRLAFLDCLSNLTRVTTRSAKSHTAWGKAFRTEVYPIGIEPKEIAKQAAGPLPPKLAQLKAELKNVQNIFSVERLDYSKGLPERFLAYEALLEKYPQHHGKIRYTQIAPTSRGDVQAYQDIRHQLENEAGRINGKYGQLGWTPLYYLNQHFDRKLLMKIFRYSDVGLVTPLRDGMNLVAKEYVAAQDPANPGVLVLSQFAGAANELTSALIVNPYDRDEVAAALDRALTMSLAERISRHAEMLDVIVKNDINHWQECFISDLKQIVPRSAESQQRDKVATFPKLA

SEQ ID NO: 21148 - protein, 299 aa, Ganoderma lucidum
GTFWYHRHLSTQYCDGLRGPLVVYDPQDPHASLYDVDDDSTVITLSDWYHVAASLGNRFPYGADSTLINGLGRSTGTAEADLAVISVTQGKRYRFRLVSMSCDPFHTFSIDNHTLNVIEADGVNAKPLTVDSIPIFAGQRYSCVLTANQTIDNYWIRAQPNIGTTGFANGINSAILRYDGAAPVEPTTSLAPVSSSPLVETNLHPLESMPVPGTATAGGVDKAINLDFTFDGTYFYTNGATFTPPSVPVLLQILSGTQAAQDLLPSGAVIELPSEWSIEVTMPATANAPGVPHPLHLHG

SEQ ID NO: 21149 - protein, 70 aa, Chlamydomonas reinhardtii
MSTEVVLKVDMMCNGCVGAVQRVLGKLDGVDSYEVSLEKQQAVVRGKALDPQAVLEKVAKTGKKAELVSS

SEQ ID NO: 21150 - protein, 518 aa, GIBBERELLA ZEAE PH-1
MSDPFAPRSMKRKNVKGLALKAAAPRPPPTAETSNHEYSGSQDAGRDEQLEIGIEYKLDLRPEDLEILKELGSGNGGTVSKVKHITTGTVMARKVIHVEAKREIRKRIVRELQIMHGCHSDYIVTFYGAFLTPNNDVIMCMEYMDVGALDRVSRVFGPVRVDVLGKIAEATLGGLTYLYTKHHIMHRDIKPSNILVNSRGGIKLCDFGVSGELVNSIADTFVGTSTYMAPERIQGEKYTVKSDVWSFGLSIMELAIGKFPFAASEQVSDGDFAPAGILDLLQQIVHEPAPKLPKSDAFPSILDDMIQKCLYKEPERRPTPQELFDRDHFVQAAKRTPVDLREWAVGMMERDNRKSHLAPQLSPSTQDLLRSSDSPTQSQQAQAQAQAQPEERSHTPTSGEIPIGGAGITSPRDQYGSNQNRSPPRNGHASSRTPASAHPGLGSRVITTNSIPKVSGYPDNVGPVSANAATFSLPVRPAPPGGPLPPPPPRKETPDELRRENRRQATFGLPPNPSYGIQ

SEQ ID NO: 21151 - protein, 561 aa, Leifsonia xyli subsp. xyli str. CTCB07
MIPPLLTQRAFDDGLFPKTGRPDLPMLIETVALMVVVFVSSALLGVWQTYLTASVGNKLMMGALRVRLFSHLQSMELSFFTKTKTGIIQSRLQNDVGGVANVLTNTVSSVLGNTVTVIAALVAMLLLNGQLTIVAVILMPLLVIAQRRVGQARARIVTKTQESLSDMTAITQETLSVSGILLAKSFNRQRAEVERYSDENRTQIRLQVSQAMSGQWFFAMVNIFLSSIPAIVYLVSGWLVLGGATDITAGTIVAFTTVQARLLFPLLALMRVALDLQTSGALFARIFEYLDLKPAIVDRPDAAPVDSGRELGRIEFDRVAFRYPDARQGERNTLDDVFFVIEPGQFAAFVGPSGAGKTTVSYLIPRFYDATSGRILFGGTDLRALRQESLVSHIGVVSQETYLFHATIAENLRYARPDATQEEVESAARRANIHDTIVGFPDGYETVVGERGYRLSGGEKQRIAIARVLLKDPAVLILDEATSALDSISERVVQQALDTASRGRTTIAIAHRLSTIVAADVIFVVDRGRIVERGNHRQLLEAGGVYALLHGEQLEGSLLDS

SEQ ID NO: 21152 - protein, 57 aa, Oryza sativa
MPFTASDICKIILAIILPPVGVFLERGCGADFFINILLTILGYIPGIIHALYIILKY

SEQ ID NO: 21153 - protein, 875 aa, Thermobifida fusca YX
MTRDSARQEMPDQLRRDVRLLGEMLGTVLAESGGQDLLDDVERLRRAVIGAREGTVEGKEITELVASWPLERAKQVARAFTVYFHLVNLAEEHHRMRALRERDDAATPQRESLAAAVHSIREDAGPERLRELIAGMEFHPVLTAHPTEARRRAVSTAIQRISAQLERLHAAHPGSGAEAEARRRLLEEIDLLWRTSQLRYTKMDPLDEVRTAMAAFDETIFTVIPEVYRSLDRALDPEGCGRRPALAKAFVRYGSWIGGDRDGNPFVTHEVTREAITIQSEHVLRALENACERIGRTHTEYTGLTPPSAELRAALSSARAAYPRLMQEIIKRSPNEPHRQLLLLAAERLRATRLRNADLGYPNPEAFLADLRTVQESLAAAGAVRQAYGELQNLIWQAETFGFHLAELEIRQHSAVHAAALKEIRAGGELSERTEEVLATLRVVAWIQERFGVEACRRYIVSFTQSADDIAAVYELAEHAMPPGKAPILDVIPLFETGADLDAAPQVLDGMLRLPAVQRRLEQTGRRMEVMLGYSDSAKDVGPVSATLRLYDAQARLAEWAREHDIKLTLFHGRGGALGRGGGPANRAVLAQAPGSVDGRFKVTEQGEVIFARYGQRAIAHRHIEQVGHAVLMASTESVQRRAAEAAARFRGMADRIAEAAHAAYRALVDTEGFAEWFSRVSPLEELSELRLGSRPARRSAARGLDDLRAIPWVFAWTQTRVNLPGWYGLGSGLAAVDDLEALHTAYKEWPLFASLLDNAEMSLAKTDRVIAERYLALGGRPELTEQVLAEYDRTRELVLKVTRHTRLLENRRVLSRAVDLRNPYVDALSHLQLRALEALRTGEADRLSEEDRNHLERLLLLSVNGVAAGLQNTG

SEQ ID NO: 21154 - protein, 243 aa, Pseudomonas aeruginosa
MGGVGMAISELKLPAGVGLQVWGSAAEQARGLAAEVAGRLRSALAEQGQALLVVSGGRSPVAFLEALSEEPLDWSRITVSLADERWVPESHADSNAGLVRRHLLRGEAAKARFIGLYQPAASLEEAAELADHHLHELPLPIDVLVLGMGDDGHTASLFPNSPGLDLAMDPQGTRRCLPMWAPSVPHQRLTLPRAVLAAAKVQLLAIQGQSKLATLNAALAVEDERRMPVRAFLRAPLTIHWYP

SEQ ID NO: 21155 - protein, 246 aa, Thermococcus kodakarensis KOD1
MKLVSFDVWNTLLDMNGMLDAFSAELSNIMGTCIVDVVEAIMLTRARIKGMRARGEGDPKRALEESQEMLAEILGVDIEVIRRAAARATLNVGDLVLPGAEDALKDAKRRGLKVTVTGNVMFWPGSYTRLLLERVGLMRYIDRTFFADEVGAFKPLPEMFRKPLEVFGVEPEEALHVGDTYAEDFEGALRVGMWGAWINPEAEGVRRISERGFEIPSIGELPEVLDMLTGDMGKAYKSTGQRSPEV

SEQ ID NO: 21156 - protein, 460 aa, Thermobifida fusca YX
MTKVVIIGGGPGGYEAALVAAQLGADVTVIERDGIGGASVLTDCVPSKTLIATSVRTSYVKEAATLGINVGNEPEDKDLVRVELKTVNARVKRLAQAQSVDTANRLRTEGVEIIIGEARLVDPHIVAVGDERIRADVVLIATGAHPRELPTARPDGERILTWRQLYDLNELPEKLIVVGSGVTGAEFANAYQALGSDVTLVSSRDRVMPTQDADAARVLEDVFARRGMTVLGNSRAESVTRTDAGVLVRLTDGRVIEGSHCLMTVGMVPNTANLGLEEAGIRLDERGFVQVDRVSRTSTPGVYAAGDCTGVNMLASVAAMQGRIAMWHALGAAVSPLRLSTVASTVFTHPELAAVGATEDDVVSGRVDGRIVKLPLATNPRAKMHNTRDGFVKLICRQHTGIVLGGVIVGPRASELILAVSLAVQQRLTVDDVAHTFAVYPSLSGSVTEAARSLMQGFPE

SEQ ID NO: 21157 - protein, 304 aa, Arabidopsis thaliana
TGAKFPSVGLGTWQASPGLVGDAVAAAVKIGYRHIDCAQIYGNEKEIGAVLKKLFEDRVVKREDLFITSKLWCTDHDPQDVPEALNRTLKDLQLEYVDLYLIHWPARIKKGSVGIKPENLLPVDIPSTWKAMEALYDSGKARAIGVSNFSTKKLADLLELARVPPAVNQVECHPSWRQTKLQEFCKSKGVHLSAYSPLGSPGTTWLKSDVLKNPILNMVAEKLGKSPAQVALRWGLQMGHSVLPKSTNEGRIKENFNVFDWSIPDYMFAKFAEIEQARLVTGSFLVHETLSPYKSIEELWDGEI

SEQ ID NO: 21158 - protein, 237 aa, Arabidopsis thaliana
MISFKAYDPNKKALNGERRRGEGRRREAMVSLKLQKRLAASVMKCGKGKVWLDPNESGDISMANSRQNIRKLVKDGFIIRKPTKIHSRSRARALNEAKRKGRHSGYGKRKGTREARLPTKILWMRRMRVLRRFLSKYRESKKIDRHMYHDMYMKVKGNVFKNKRVLMESIHKMKAEKAREKTLADQFEAKRIKNKASRERKFARREERLAQGPGGGETTTPAGAPQQPEVTKKKSKK

SEQ ID NO: 21159 - protein, 358 aa, Arabidopsis thaliana
MDKYEVVKDLGAGNFGVARLLRHKETKELVAMKYIERGRKIDENVAREIINHRSLRHPNIIRFKEVILTPTHLAIVMEYASGGELFERICNAGRFSEAEARYFFQQLICGVDYCHSLQICHRDLKLENTLLDGSPAPLLKICDFGYSKSSLLHSRPKSTVGTPAYIAPEVLSRREYDGKHADVWSCGVTLYVMLVGGYPFEDPDDPRNFRKTIQRIMAVQYKIPDYVHISQECRHLLSRIFVTNSAKRITLKEIKKHPWYLKNLPKELTEPAQAAYYKRETPSFSLQSVEDIMKIVGEARNPAPSSNAVKGFDDDEEDVEDEVEEEEEEEEEEEEEEEEDEYEKHVKEAHSCQEPPKA

SEQ ID NO: 21160 - protein, 215 aa, Exiguobacterium sp. 255-15
MRFFIDTANVEDIKKAHKMGILDGVTTNPSLVAKEGVDFHTRLREICEIVGDVSVSAEVIALDAEGMIREGKELAQIAPNITVKVPMTPAGLEAVAALSKENITTNVTLIFNPNQALLAARAGATYVSPFLGRLDDIGQDGMGLVETIAQIFVIHDIPTQIIAASVRNPVHVTNAALAGADIATIPLNVIESLTQHPLTTQGIERFLADWEKAQQ

SEQ ID NO: 21161 - protein, 268 aa, Zea mays
MATGGAAPTASDAGSKKKLLIFDSEEDLAVSLAKYTAELSEKFAAERGAFTAVLSGGSLIEALRKLTEPPYLDSVDWSKWHVFWVDERVVPKDHVDSNYKLAYDGFLSKVPIPPGQVYAINDALSAEGAADDYEACLKQLVKNGVISMSAATGFPRFDLQLLGMGPDGHIASLFPGHPLVNEKERWVTYIKDSPKPPPERITFTFPVINSSAYVAMVVTGAGKAAAVQKALSDKQTSSDLLPVEMPVLQDGEFTWFTDKAAVSLLQNK

SEQ ID NO: 21162 - protein, 531 aa, Exiguobacterium sp. 255-15
MTKYIFVTGGVVSSLGKGITAASLARLLKNRGLNVTIQKFDPYINIDPGTMSPYQHGEVFVTDDGAETDLDLGHYERFIDINLSQNANVTSGRIYSTVLKKERRGDYNGGTVQVIPHITNEIKDRVFRAGKETGADVVITEIGGTVGDIESLPFIEAIRQVKNDIGKENVMYVHCTLVPYLAAAGELKTKPTQHSVKELRSYGIQPDIIVLRAEHDVPQEMKDKIALFCDTRPEAVIEAKDASTLYEVPLNLQRQGMDQLVCDYFKFDTPAADMTAWKQLVHTVTHLEKKTKIALVGKYVELRDAYISVAEALKHAGFAFNSDIEIDWINAEDVTRDNVQELLGSANGILVPGGFGERGIEGKIEATRFARENNVPFFGICLGMQLATVEFARNVLNLEGAHSAEIDPATPYPIIDLLPEQKDIEDLGGTLRLGLYPCKLEDGSKARAAYSSELVYERHRHRYEFGNEFREQFEANGMIFSGTSPDGRLVEIIEIPEHKWFVACQFHPELISRPERPQALFHDFIQASLGE

SEQ ID NO: 21163 - protein, 257 aa, Zea mays
PAGDVRTALAMAPPRRPSMGRQKIEIRRIESDEARQVCFSKRRAGLFKKASELSILCGADVAAVVFSPAGKAFSFGHPSVESVVDRFLASSTPSPAGAGAGAGHSSAGGGEDRAVSELNRQHGDLRAQLDAEKARQERADEAIRKEREAGSPAMAWIDADLGAMGHDDLVAFWAALAGVQAAVAASADQLLRDALLVGRRGRQQQQPAAQLGGGGVAFDVGAFGIGVQVPPPPGFAGVDLQGFGGQAAAILGAGGPS

SEQ ID NO: 21164 - protein, 476 aa, Escherichia coli
MTMSRLVVVSNRIAPPDEHAASAGGLAVGILGALKAAGGLWFGWSGETGNEDQPLKKVKKGNITWASFNLSEQDLDEYYNQFSNAVLWPAFHYRLDLVQFQRPAWDGYLRVNALLADKLLPLLQDDDIIWIHDYHLLPFAHELRKRGVNNRIGFFLHIPFPTPEIFNALPTYDTLLEQLCDYDLLGFQTENDRLAFLDCLSNLTRVTTRSAKSHTAWGKAFRTEVYPIGIEPKEIAKQAAGPLPPKLAQLKAELKNVQNIFSVERLDYSKGLPERFLAYEALLEKYPQHHGKIRYTQIAPTSRGDVQAYQDIRHQLENEAGRINGKYGQLGWTPLYYLNQHFDRKLLMKIFRYSDVGLVTPLRDGMNLVAKEYVAAQDPANPGVLVLSQFAGAANELTSALIVNPYDRDEVAAALDRALTMSLAERISRHAEMLDVIVKNDINHWQECFISDLKQIVPRSAESQQRDKVATFPKLA

SEQ ID NO: 21165 - protein, 389 aa, Geobacillus kaustophilus HTA426
MRRDAVIVSAVRTAIARQGDALATMPAHIYGAEVIKEAMRRANIGPEHVDDVIMGNVLSGGGNIARLTALQTGLSLELTGVTVDRQCGSGINAVNLAAQAIWAGDGDVYIAGGVESMSRAPYLMDRPEKPYSSTPPSFRKSQLSPKEIGDPPMGITAENLAKKYGISREEQDAFALRSQQRMARAMQEGRFDEQIVPIAVPVKKGEPFVFDTDEHPRPNTTMEALSKLPPAFLEGGTVTAGNSSGLNDAASALVIMSREKAEELGVKPLAVIRAHAVAGVDPNIMGIGPVPATRKVLEKAGLTLDEMDIIEINEAFAAQVIACDRELEMDPEKVNINGGAIAHGHPLGATGAILITKAVYELKRRSGKYALITACIGGGQGIATIIERE

SEQ ID NO: 21166 - protein, 389 aa, Salmonella enterica subsp. enterica serovar Typhi Ty2
MDTLRHPKRALIVDIPVQMDDGTIRHFEGYRVQHNLSRGPGKGGVRYHPDVDLNEVMALSAWMTIKCAALNLPYGGAKGGIRVDPFSLSEGELERLTRRYTSEIGIIIGPQKDIPAPDVGTNGKVMAWMMDTYSMNHGTTVTGVVTGKPIHLGGSLGREKATGRGVFVSGLEAARRANIAVEGARVAVQGFGNVGSEAARLFAGAGARVVAIQDHTATLFNATGIDMKALTAWQTEHKQIAGFPGAETIASDAFWRLEMDILIPAALEGQITRQRAEALTCKLVLEGANGPTYPDADDVLASRGILVVPDVVCNAGGVTVSYFEWVQDMASFFWSEEEINARMDKIMTDAIVHVWEKAAEKSCSLRTAAYIVACERILLARKDRGIYPG

SEQ ID NO: 21167 - protein, 337 aa, Triticum aestivum
MAPLGDAVAPAAAAAAPGLVVSFGEMLIDFVPDVAGVSLAESGGFVKAPGGAPANVACAISKLGGSSAFIGKFGDDEFGHMLVEILKQNGVNAEGCLFDQHARTALAFVTLKSNGEREFMFYRNPSADMLLTEAELNLDLIRRARIFHYGSISLITEPCRSAHVAATRAAKSAGILCSYDPNVRLPLWPSAQAARDGIMSIWKEADFIKVSDEEVAFLTQGDATDEKNVLSLWFEGLKLLIVTDGEKGCRYFTKDFKGSVPGYSVNTVDTTGAGDAFVGSLLVSVSKDDSIFYNEAKLREVLQFSNACGAICTTKKGAIPALPTTATALELISKGSN

SEQ ID NO: 21168 - protein, 170 aa, Capsicum chinense
MASSSGTSSGSSFLQNSGSEEDLQLLMDQRKRKRMISNRESARRSRMRKQKHLDDLMAQVSTLRKENDQILTSMNVTTQHYLNVEAENSILRAQLSELSHRLESLNEIIAYMDANNNNNSCSNGLAMDHNEPYSFNFAQSDTVVDGFNMTNSWNYFCSNQPIMTAHVLQY

SEQ ID NO: 21169 - protein, 696 aa, Penicillium janthinellum
TASGKLQRKFLDRFAISMGRGVALGKTYGTLGAASRGATLLQDLLFTEIIFAFDRERVPERAVHARGTGAHGTFLSYEDWSNLTAASFLSAEGKFTPEMTRFSTVSGARGSADTARDVHGFATRFYVDEGNFDIVGNNIPVFFIWDVIIEPTLMALHAQKPNPRFHLPRGQQDPNRISDNLTARGDSLAQGSQISSERGSPKAYSNTEPNKHRSFRLVTDNGKQFQCSNHWQPLQGFIDLGVEEAWRFPEEGEGYVAENLFESIELLTVGDEELEIQSMSFNNDLRERFNSSEVTKSSVVRLVPLITQGKLVFNKNIQMLFNEVIGAMFQPGHIVRGVDFTEDPLLQGRLFSYLDTQLNRHGPNIQQLGFNRPPRAPIHNNNRDGAGEMIDLPPFASFVETQEWGAKDIKQTAVGQNKFDQEHRFSHWKFGVNGFVHTRNDDNVTHARGFFTAPERGQQKKRVAAFDRMFTVVGLSVDGQQANSDQYADFDAAAGKKVAKAIGVEAPKPNSNYFHPTDVFGEHIAASGTKYGVPEGNTKGVLLASVNKPASIAQGAKLQVVASSGDFAEFFISAKQLNMREVTQGIIPLVPVLKLAKLDLGKTFRFQLMQVGNIEELERFGFDLPDLTDKQVDLSAMGMFETTFRPTSRAAQFEQGKTKLVKGLQGKNAFMDRALKQPSNNREKIQRFADRFAVQD

SEQ ID NO: 21170 - protein, 238 aa, Gloeobacter violaceus PCC 7421
MEPLSIMLREGTRQAHTMAENVGFVKCFLKGTVERSSYRQLMANFYFIYGALEDALEAHRDHPVLRGLYYPELYRRASIETDLRYYYGPGWADQVRPSAAAERYVERIRTVARTEPALLVSHSYTRYLGDLSGGQVLKEIAQRSMGLGDGTGTAFYDFETIADARTFKAGYRAALDTLPVDGPLAGRITEEAIEAFRYNMRLFEELEGSLIRAIGQMVFNSLTRRRSRQNREVVTASE

SEQ ID NO: 21171 - protein, 309 aa, Hypocrea jecorina
MVATSFKLNNGLEIPAVGLGTWQSKAGEVKAAVSYALQIGYKLIDGAYCYGNEDEVGEGLKEAFAAGVKREDIFVVTKIWATYNTRVVLGLDKSLRSLGLDYVDLLLVHWPVLLNPEGNHDKFPTLPDGKRDVIWDYNHVDGWKQMEAVLATGKTKSIGVSNYSKKYLEQLLPHATVIPAVNQIENHPSLPQQEIVDFCKEKGIHIMAYSPLGSTGSPLMSADPVVKIAEKKGISPTTVLLSYHVNRGSTVLAKSVTPARIKANLEIVDLDDEDMKLLNDYSNDLASKGELKRYVYPPFGIDFGFPDKS

SEQ ID NO: 21172 - protein, 501 aa, Silicibacter sp. TM1040
MTETTPQYDYDLIVIGSGPSGRTAAIQAAKLKRRVLVIDRKDRLGGVSVHTGTVPSKTLRETVLNLTGWRERSFYGRAYRVKDQIKAEDLKARLHMTLDHEVDVLEHQFNRNHVDMLAGMAHFTGPNEVEVEVEAGDTTRVTGEKFLIATGTRTYRPDSVPFNGTTVVDGDEFLEMAEIPRSLIVVGAGVIGVEYATMFSALDVRVTLIEPRDTFLDFIDRTLIQEFTHQIRENGVDLRLGSAIESIEDEGSHIEVTLENGRHVRGEMLLFAAGRMGNTDRLNLKAVGLETDHRGRLEVERKTYQTKVSHIYATGDVIGHPSLASTSLQQGRVAACHAMDVPTVPESPWFPYGIYSVPEMSTCGMSEEELKERGVPYEVGIARFRETSRGHIMGLEHGMLKMLFSLKTRRVLGVQIVGEGATELIHIAQAVLNLKGTVDYFVQNTFNYPTLAEAYKIAGLDAFNRMPIPDEYKDLRAPSKAKKAPAKKTETKSAAKDKAPE

SEQ ID NO: 21173 - protein, 133 aa, Triticum aestivum
  misc_feature (71)..(71): Xaa can be any naturally occurring amino acid
  misc_feature (118)..(118): Xaa can be any naturally occurring amino acid
  unsure (1)..(133): unsure at all Xaa locations
MADPSHSSPTAGDALLPPPASDAPEAPLPAAAADLDKEFGFQREELHTEKLAGTVGFHERHVFLCYKGPEXWPSHLEATESDRLPRLLAAAIKARKPDLKKSTKLTICEGEDGTESSXGDVLIFPDMIRYRGL

SEQ ID NO: 21174 - protein, 461 aa, Zea mays
MEKAVDRQRVLLRHLNPAAAGSPAPPAISASACAAGDSAAYHRRPAFADDVVIVAAYRTAICKAKRGGFKDTFAEDLLVPVFKALVDKTKLDPSEVGDIVVGTVLAPGSQRAIECRMAALYAGFPDTVPLKTVNRQCSSGLQAVADVATAIKAGLYDIGIAAGLESMTVNKVSLDGQANPKVELFSQARDCLLPMGLTSENVAHRFGITRLDQDQAAVESHRKAAAAAAAGKFKEEIVPVHTKIVDPKTGEEKKIVVSADDGIRVDTSLAVLSKLKPAFSKDGSTTAGNASQVSDGAGAVLLMRRDVAMKKGLPVLGVFRTFAAVGVDPAVMGIGPAVAIPAAVKAAGLQMDDIDLFEINEAFASQYVYCCKKLELDPAKVNVNGGAMALGHPLGATGARCVSTLLNEMKRRGKDCRFGVISMCIGSGMGAAAVFERGDGVDELTNARGISTHNWLSKDAM

SEQ ID NO: 21175 - protein, 512 aa, Oryza sativa
MDKAYIAVFSIVILFLLVDYLRRLRGGGTSNGKNKGMRLPPGLPAVPIIGHLHLVKKPMHATLSRLAARHGPVFSLRLGSRRAVVVSSPGCARECFTEHDVAFANRPRFESQLLMSFDGTALAMASYGPHWRNLRRVAAVQLLSARRVGLMSGLIAGEVRAMVRSLCRRPAAAAPVQLKRRLFELSLSVLMETIAQSKATRPETTDTDTDMSMEAQEYKQVVEEILERIGTGNLCDYLPALRWFDVFGVRNRILAAVSRRDAFLRRLIYAARWRMDDGEKKSMIAVLLTLQKTQPEVYTDNMITALCSNLLGAGTETTSTTIEWAMSLLLNHPETLKKAQAEIDASVGNSRLITADDVPRITYLQCIVRETLRLYPAAPMLIPHESSADCEVGGYSVPRGTMLLVNAYAIHRDPAAWEEPERFVPERFEGGGCDGNLSMPFGMGRRRCPGETLALHTVGLVLGTLIQCFDWERVDGVEVDMAEGGGLTMPKVVPLEAVCRPRDAMGGVLREL

SEQ ID NO: 21176 - protein, 375 aa, Populus alba x Populus tremula
MGRAPCCEKNGLKRGPWTPDEDQKLIGYIQKHGYGNWRTLPKNAELQRCGKSCRLRWTNYLRPDIKRGRFSFEEEETIIQLHGILGNKWSAIAARLPGRTDNEIKNYWNTHIRKRLLRMGIDPVTHSPRLDLLDLSSILNSPLYDSSRMNMSRILGVQPLGDPELLRLATSLLSSQRDQTQDFAIPNGHQENHLSSPQVHQNQNQSIIHQANQFQPAGQEMPACTALTTTPCVTFSNEAQQMDPNGDQYHLSTITTFSSPNSQVSTHDQWQSNRMGSNLSEDYYVPAVSSYNSADNCRGTDLVDPSSEASTFISNNSNQTFGFASVLSTPSSSPAPLNSNSTYINCSSTEDERDSYCSNFLKFEIPDILDVSNFM

SEQ ID NO: 21177 - protein, 437 aa, Leifsonia xyli subsp. xyli str. CTCB07
MSNSSTSPLALDIVVPVYNEEATLQTSIRRLHAYLNGAVQASWRITIADNASTDAKPALADALAAELPRVAAVHLPLKGRGCALKAVWGSSPAEVHVYLDEDLSTDLAALPPLVAPLLSGHSDLAIGTRLGSSARVTRGGKREFISRSYNLLLRRTMAVGFSDAQCGFKAIRREAAQRLLPLVEDDGWFFDTELLILAERAGLRIHEIPVDWVDDPHSSVDIVRTAREDLKGMLRVGTNIARGRIPLESVYAELGRRPFAPAREPGFFGQVVRFAVVGALSTAAYAVLYLLFSGLVGGQTANFAALLITAVANTGANRRFTFGVRGRPGMARHQFQGLIVFGIAWALTGCSLALLHTPAPGASSHVELLVLTVANLAATLLRFALLRLWVFRASRRQETARATEAPAAPAVLPAAVPPAPAPASGTPLVLTITETEQ

SEQ ID NO: 21178 - protein, 351 aa, Streptococcus agalactiae NEM316
MRAATYLSANELSLTDKAKPQVIKPTDAVVRLVKTTICGTDLHILGGDVPACKPGTTLGHEGIGIVEEVGSAVNHFKVGDKVIISCVTACNTCYYCKHQLPSHCEDGGWILGHLIEGTQAEYVHIPHADGSLYHAPEGVCDDALVMLSDILPTSYEIGVLPSHIKPGDTVCIVGAGAIGLSALLTAQFYSPAKIIMVDLSQKRLEASKKFGATHTILSTSTQEVKEEIDKITKGRGVDVVLECVGYPATFDICQNVVSIGGHIANVGVHGKPVEFNLQDLWIKNITLNTGLVNANTTEMLLEVLETGKIDATQLVTHHFKLSEIEEAYKVFKAAEENNTLKVIIENDITPA

SEQ ID NO: 21179 - protein, 317 aa, Arabidopsis thaliana
SATLKVSDSVPAPSDDAEQLRTAFEGWGTNEDLIISILAHRSAEQRKVIRQAYHETYGEDLLKTLDKELSNDFERAILLWTLEPGERDALLANEATKRWTSSNQVLMEVACTRTSTQLLHARQAYHARYKKSLEEDVAHHTTGDFRKLLVSLVTSYRYEGDEVNMTLAKQEAKLVHEKIKDKHYNDEDVIRILSTRSKAQINATFNRYQDDHGEEILKSLEEGDDDDKFLALLRSTIQCLTRPELYFVDVLRSAINKTGTDEGALTRIVTTRAEIDLKVIGEEYQRRNSIPLEKAITKDTRGDYEKMLVALLGEDDA

SEQ ID NO: 21180 - protein, 939 aa, Gloeobacter violaceus PCC 7421
MNWDTPIDLAAAGSPSALSHQSLRDNIELVEQLLRQVAAQEGGGDLVELLDRLWASHQDRTGEGLALIRELSLEKSVLAIRAFSIYFQLINIVEQHHERKRLRLQASFSADTAQPGSFCWLFDEMKSLGVSTPEIERVLQQLDVRLVFTAHPTEIVRRTIRTKHRRIVHLLDDLDNALSEWQQQQVHTTMLEEIRIWWRTDELHQVRPTVLDEVAHTVHYFEEVLFEAMPRVRSELVRCLDMFHPSLTRSLGTFCRFGSWVGSDRDGNPSVNALVTWKTACHQRSRVLAKYIKSVERLRDLLSLAEGNPPQDLLLALEQDQRDLGEVYERYSVVYLQEPYRLKLSYILERLEHTRERNAWLEVHGPQRLSQPDEPGWLHYYRHAHELLAELHLLRQCLRTTGIGCRPLETLIDQVEVFGFHLAGLDVRQDSTRHEDTLTEVSAKLRLTATPYAELDEQARLEWLVRELQTLRPLIPAELPFSARTEETIQTFRMIRRLQKEFGSEICHTYIISMSKQASDLLEVLLLAEEAGLFDPATGTGTLMVVPLFETVEDLRNAPHVLEQLFSLPLYRCYLTCHQNLQEVMLGYSDSNKDSGFLSSSWEIFLAQQHIQQVARRHGVQLRIFHGRGGTVGRGGGPSYQAILAQPDGTVSGRIKITEQGEVLASKYSLFELAAFNIETVTAAVIQASVLPTSPPGSRNWELRLQELSDVARRTYRQLVYEQEGFIDFFCHVTPIDEISQLQISSRPSRREGRRDLASLRAIPWVFSWTQSRFLLQAWYGLGTALDGFIRCNRERNLAELRSMYRQWPFFRTLISKVEMTLAKVDLQVAANYVQELLPKEHEHTGECIFALIAAELERTRECVLAITEHRQLLEDNPPLQRSIALRNATIAPLGYLQATLLKYLRYENRQPRSYSRNELLRGALLTINGIAAGMRNTG

SEQ ID NO: 21181 - protein, 457 aa, Bacteroides fragilis NCTC 9343
MNRENKPLFLYTFITVFGGLIVGLNMAGISGAVPFLQEQFMLDDMALGLVVSILTVGCLCGALLGGGFSDRYGRQKVMFSSAVFFIVSSLGCALSGNLVSLLVFRLICGLGIGVISAVAPIYISEISPARLRGTLVSYNQLAIVIGILIAYIVDYILLDYERNWRLMLGFPFFFSVAYLLLLGILPESPRWLSARGKAGRARQVASKLNLEAGEMTVSDTNTQEGRDRIKVTELFKGNLAKVVFIGSILAALQQITGINVIINYAPSIFEMTGVAGDIALVQSILVGVVNLLFTLIAVWLVDKVGRKILLLCGSLGMGISLLYLVYTFVVPAANGIGALIAVLCYIGFFAASLAPLMWVVTSEIYPSRIRGTAMSLSTGISWLCTFLTVQFFPWILNNLGGSVAFGIFAIFSIAAFAFILFCVPETKGKSLEAIEKELGVDKEAEENVKEEHAFSKI

SEQ ID NO: 21182 - protein, 445 aa, Colwellia psychrerythraea 34H
MNNNQTKHGITQAQLDAHWMAFTGNREFKKDPRIIVSAQGNYYTDADGRKIFDGLSGLWCCGAGHSRPEITEAVSKQLKQLDYAPAFQFGHPKAFQLAEKIVEFMPKGINRVFYTGSGSEAAETSLKMARAYWRKKGLASKTKLIGRGLGYHGVNFGGISVGGIGANRSLFGPAVDADHLRHTMLDENKFVKGQPQTGVELANELLDLVALHDASNIAAVIVEPMAGSAGVIPPPVGYLNRLREICDQHNILLIFDEVICAFGRMGANTGAEAFGVTPDIINIAKQMTNGTIPMGAVIAKQEIYETFMEQGGPEYMVEFPHGYTYSAHPVACAAGLAALEILQTDKLIERVKDHSPYFEESVHNLKGCKHVTDIRSYGFAAGFTIDPVPGEPALRPYQIAMKMWQKGFYVRYGGATIQLGLPFTSEREEIDSLLSALGETFNEIA

SEQ ID NO: 21183 - protein, 206 aa, Brassica napus
  misc_feature (154)..(154): Xaa can be any naturally occurring amino acid
  misc_feature (156)..(157): Xaa can be any naturally occurring amino acid
  misc_feature (163)..(163): Xaa can be any naturally occurring amino acid
  misc_feature (175)..(175): Xaa can be any naturally occurring amino acid
  unsure (1)..(206): unsure at all Xaa locations
MMCQVLQTNLFDNILQEKEFWTDTENAIRNAYRSTDAVILQQSLKLGKGGSTAVTGILIDGQKLVVANVGDSRAVMSKNGVAHQLSVDHDPSKERKDIEKRGGFVSNIPGDVPRVDGQLAVARAFGDKSLKIHLSSEPDITHQAIDEQTEFIVXAXXGIWKVXSNQEAVDVIKSXKDPQAAAKHLIEVAISKKSKDDISCIVVKFH

SEQ ID NO: 21184 - protein, 410 aa, Thermobifida fusca YX
MQGRDLREQLAVFLAHREREFVEFRRDLHRHPELAFAEHRTTQRIEERLIDAGLKPLRLPQGTGLICDIGTGEGPTVALRADIDALPLNDEKDVPYRSTVPGVAHACGHDVHTTIVLAAGLFLAQQERAGALPGRVRLLFQPAEELPGGAREVINAGGLEGVDRIFALHCDPRLPVGQVGLRSGPITAACDQVLVRLSGPGGHTARPHLTADLVYALSKIVTELPAALSRRVDPRAGLSLVWGRISAGSAPNAIPDDGVVEGTLRCLDDEAWHAAPDVVKELLDSVVAAYGVQAELDYRRGVPPTINEPNSVEIFRAACVQVLGEQAVAATPQSLGGEDFAWYLETTPGAYARLGTHWGNSDRPMLDLHRGTFDVDETAIGVGTRFMVATALAALRAEQRGGLDDTAEAD

SEQ ID NO: 21185 - protein, 74 aa, Brassica napus
MASNMEVFCEILIAILLPSLGVCLKRGCCTVEFLICLVLTILGYIPGIIYALYVIVFQNREGETQDYSAPLNSA

SEQ ID NO: 21186 - protein, 368 aa, ASPERGILLUS NIDULANS FGSC A4
MVRASTLLLSGLVTLATARSAVLDLIPKNFDKVVLNSGKPALVEFFAPWCGHCKNLAPVYEELGQAFAHAEDKVSIAKVDADANRDLGKRFGIQGFPTIKWFDGKSETPEDYKGGRDLESLTAFVTEKTGIKAKGAKKEPSNVEMLTDTTFKSVVGGDKDVFVAFTAPWCGHCKKLAPTWETLATDFALEPNVIIAKVDAEAESSKATARSQGVTGYPTIKFFPKGSTEGIVYQGARTEEAFVDFVNNNAGTHRAPGGTLNEKAGTILALDEIVAKYITSKNFGELVDEAKKVAKTVGGKYAEYYVKVAEKLAQNEEYAAKELERLKKVLSKGGSAPEKLDDMVSRSNVLRKFLEVEEKVEDVVKDEL

SEQ ID NO: 21187 - protein, 180 aa, Rhizobium gallicum bv. gallicum
EFDAFPALEQLPLWGFDGSSTMQAEGRSSDCVLKPVAVYPDPARTNGALVMCEVMMPDGVTPHPSNSRATILDDEDAWFGFEQEYFFYEDGRPLGFPEQGYPAPQGPYYTGVGYKNVGSVAREIVEEHLDLCLAAGINHEGINAEVAKGQWEFQIFGKGSKRAADQIWMARYLLLRLCEK

SEQ ID NO: 21188 - protein, 163 aa, Staphylococcus sp. MRCNS378
MNNTNVDLVEKHLSNHTGGLKMIKKNKEELNDMEYLVTQENGTEPPFQNEYWNHFEKGIYVDKLSGKPLFTSEDKFESNCGWPSFSKALNDDEIVELVDKSFGMIRTEVRSEKANSHLGHVFNDGPKEKGGLRYCINSAAIQFIPYDKLEELGYGDLIKHFKK

SEQ ID NO: 21189 - protein, 448 aa, Bradyrhizobium sp. BTAi1
MGRGFVRTVSALLWRGVIVAALGAIGITGVPSGASAQSLAGADTVYASAPPRLLQIRTLLADAGRQTSTGSGFLVSADGLAITNYHVVSDAALEPKTYRLEYTGADGTQGGVTLLAVDLPNDLALVRVDKHDAPFFTFDKAALEGSLPKGERLYSLGNPLDLGFTIIEGTYNGLVEHSYNDHIHFTGALNPGMSGGPAVNAQGQVVGVNVATRRGGQLISFLVPARFAAALLIRGKDIRPEAADLRKDVVAQLASWRGALYKSLAEEGFHDRVFGSYQAPETHAAWFECWASTNASASPKPRASINSTSCKADASVYVASDLNTGTVEINHSYAKSIDLNQFQFATVLTQLAQPRLTLGGTFRKWYTPQHCHEDFVGIAPPADHPPLRVLWCAQGYREFDGLYDVAVVAVTQDRADEALVSRLNLQAIAYDDALRLGRSFLERLQVAR

SEQ ID NO: 21190 - protein, 413 aa, Listeria innocua Clip11262
MDRRRVVVTGIGAVTPIGNDAETSWENAKKGVNGVAEMTRLNPDDFPVKIAAELKDFDVEKYLEKKEARKMDRFTHYAIASAEMAVQDSGLIIDDSNATRVGVWIGSGIGGMETFETQYEVFLNRGHRRVSPFFVPMMIPDMGSGQVSIRFGAKGINSTTVTACATATNSIGDAFKVIERGDADAMITGGAEAPITKMSLAGFTANKALSLNPDPETACRPFDKDRDGFIIGEGAGVVILEEYEHAKARGAKIYAEVVGYGATGDAYHITAPAPNGEGAARAMKMAIDDAGLTPDKVDYINAHGTSTPYNDEYETQAIKTVFGEHAKKLAISSTKSMTGHTLGASGGIEAIFALLSIRDNIIAPTIHLENQDEVCDLDYVPNKAREAEVNVVMSNSFGFGGHNATLVFKRIED

SEQ ID NO: 21191 - protein, 433 aa, Burkholderia fungorum LB400
MAMGVTDTILLGSLGPDALAAGGLGANLFFVVVTLLQGVLTSVSVSVSHARGAADEGRVPHIYWTGFVLSVLLSVPAFFLLSFATPILLAFGEPALLAHNVGEYAAVLRWGSLGSLVGVGLMRSFLPAIGAAKRLLWVSLASVGVNGFLNYGLIHGAYGLPRLGFLGSAAATSITVWLSALVLMALLHLRPRYRHFVVATRPNVPLMGELFGIGWPVAITYGVESTLFLATGLMVGLLGESQLAAHQIALNVASVAFMVPLAIGQAANVRVGFWSGAGQPLAARHAGFVALALGVGFMTLSGLVLIAAPHWIVGLYLHLDDPANAATVALASSLLGVAAIFQIVDGLQTVGSGCLRGLKDTRVPMIAAAFGYWVIGFPTGYTLAFHFGLGARGLWWGLAAGLASVALLMTLRFHKLSLRRVPAKPGAQPAKSV

SEQ ID NO: 21192 - protein, 346 aa, Exiguobacterium sp. 255-15
MTTIQTTLVGFGFSAVTFHAPLIQALPEYTVRQVVSSQADKVAAVFPEAAVIGTLEEALQDEQTELVIITTPTALHFEMAKQAIEAKKHVLLEKPAVVTMEEAIELQRLATQHGVSVAVYQNRRYDGDFLTVEQLVEMNEIGDWQLVESRFDRYRPVVRDRWREKAGPGSGILFDLGSHLIDQALALFGEPDAVVGDVLSQRDGAETDDGFHITLFYGKRRVILRSNSFIQGATPRFELHATRGSYLKYGMDPQEARLASGQTVDAAIGQEETVNYGYLQIADHPAERLATLPGNYLGFYKALAEGLKTGDVPVDLTDALKTMQIIEAVRLSSETGRKIFRKEWEQ

SEQ ID NO: 21193 - protein, 256 aa, Brassica oleracea var. botrytis
MGRGRVQLKRIENKINRQVTFSKRRAGLFKKAHEISVLCDAEVALVVFSHKGKLFEYSTDPCMEKILERYERYSYAERQLIAPESDVNTNWSMEYNRLKAKIELLERNQRHYLGEDLQAMSPKELQNLEQQLDTALKHIRSRKNQLMYESINELQRKEKAIQEQNSMLSKQIKERENVLRAQQEQWDEQNHGHNMPPPPPPQQHQIQHPYMLSHQPSPFLNMGGLYQEEDQMAMRRNDLDLSLEPVYNCNLGSFAA

SEQ ID NO: 21194 - protein, 100 aa, Glycine max
  misc_feature (62)..(62): Xaa can be any naturally occurring amino acid
  unsure (1)..(100): unsure at all Xaa locations
CVLHDWSDEWCLKVLKNCYVAIPNDGKVIVEEVLPFEPLTTGAVKSISQFDVLMMTTNPGAXGKERSEGEFMALAKGVGFISGIRYTCFVCDLWVMEFFK

SEQ ID NO: 21195 - protein, 664 aa, ASPERGILLUS NIDULANS FGSC A4
MLRSSFLLFFYALYASASWVFEHDFQPEERSLLFGTDVSPLKRRQEEGSSSASDSILSVAGGGGGRSSGRPQPTSTSFTQTRTTSTRPTSTNTRTGTRSSSNTTTRTSTSATSTPTTTATGTPCAGNTPDTRREWCDYSIDTNYHDITPDTGVVREYWLELDEITVSPDGISRPAVAVNGTIPGPTIFADWGDEVVVHIKNNLHETLNGSTIHWHGIRQLNTNEHDGVVSITQCPITPDHEYTYRWRAQQYGTTWYHSHISLQAWDGVVGPIIINGPATENYDVDAGTIFLNDWTHQTFEELFWYAQIVGPPLLNNSLINGTGVYGSSFSGHRAKGQKETGERFSMKVEEGTSYRLRLINGAIDTHYKFMIDSHELTVIAMDLVPVKPYKTTAVSLAMGQRYDVIVTANQRSKSDSFWLRSIPQQSCSDVEDPGNIRGIFYYGDRPSTPKTEPYPFEDSCMDEPMASLVPHVARDVQPPDYQNNALASVSFNEDHFFRWFLNSTTMQVYWEDPTLLQILNGDDSFENSSAVIELPNANEWVYMIVNTTIPVSHPIHLHGHDFFILAQGTNPWDGKYQTSNPPRRDTAVLPGNGYLVMAWETDNPGAWLMHCHIGWHTTEGFALQFVERIDEIRENVDRDFVVNACNTWNGYGEEYGVEQYDSGV

SEQ ID NO: 21196 - protein, 205 aa, Burkholderia sp. 383
MKLYGFAGTRSQRALWGLKELDADFEFISVNLLQGEHKRPEFLRLNPAGKVPVLVDGDLVIPESAAIVLYLADKYPEKALLPVDPALRAEAYRWVMFAVTELEQPLWRITRHSFIYPPEKRSPADIELAREDFKTMAAILDKHLEGREFIVGDTLTVADCVTAYLIDWAGECNLIESFPQLRAYLERLYARPKAPQRIADARKAA

SEQ ID NO: 21197 - protein, 1060 aa, Legionella pneumophila
MVWSGISLSAWVWCSACHSRKDSIVALIRFLWKDTNMVQKDLRCLIRNYCFIFSFLLLGSSALFAQHEQHGASTQPLPHPKTTSSQSKPAQYKMKQPIPVKTVTPLTMTGGAKRTVNLVVAYKTVNFAGKPRRAIAVNGQIPAPTLHFKEGDDVTINVYNHLDEGTSIHWHGLLVPWQMDGVDEVSQKPIPPGGVFHYRFKLYQRGTYWYHAHAKVQEQEGLYGTFIIDPPKPPSYQYTKDYVVVLSDWSNTPAEQVLANLKKDGDYYGPRFPLQPSLMKFLHDYRKASPEERKKLIADYKMMQQMRMSIYDLSDVAYDAYLLNGHPKSHPWTAPVKVGDRVRLRFIGAGASTIYRVKIPDAKVEMVHIQGNDVRPYPIEDFWIAPGETYDVLVTIQKNKPYVIYAESIDTLGKAYGALVTYPNQVVNYQHVTPFPEPLPVTREMMANMMMSMNGGGMGGNQQHALMNKKTSSTAMKPSMTMPSHSQAMSSQSANHSMSSKTIQKKMDKASNHSAHTSSMKSKSSSTSMNKSMDMPGMNHGAMSQNKTSNSAQMKSDSSSTSMNKSMAMPGMNHGAMSQSKTSNSAQIKSDSSSTSMNKSMAMPDMNHSAMGQNKTSNSANDTSMNRNMKSDRPMEQGMSMNGSMNMKMPIEPTIIGDKIEPPDSAKATTLGTKYQELKGAVKTNNPNKPVDGIIKMELFGYMDRYIWFINGLPEYKAKPILIEPGKRYRIIFTNNSMMRHPMHIHGHWFILRNGHGAYDPLLHTIEVPPGATAVADFDTEASGQWFFHCHHLLHMTAGMARVFQYTTIIEIANGTRKPDNYAYQQAYINRPVVREDEVMPLDASLIKHPAGHHQGFYRSSYIELGEDPFHNAQEMTFRGLYGPDYNKLQLYTEDAEIYKGTVENADIDVFYWHLISQFWAVKGGVNYFYRPGGPYWQPGIGIEGLMPWYIDTNIRTYYRDGSVKFDIQLARANQLTNNFFFLTGIRSILATHTVVKNEIGNGLNQMRYILRPYYRLKPGLNIFSEYEHDVEYGALKRILRSQGEPTTQDTITLGVAVLF

SEQ ID NO: 21198 - protein, 587 aa, Saccharomyces cerevisiae
MDKYLNSFVDHLSEWSSRAFRNNSSSANQSASNKELEQVFEQINAIVENHNNKLTTAFDKISYRVAHKITHLVESHSLVFNYATLVLIASALVVIGSFTSISSIPFTALPPTREHSLFDPTDFDVDHDCHVIYRENDEDKKKKKKSKRFFDMMDEKHAIILPLTSGCTLLALYFVIKKLHLNWLKYVVKILNFNITLLNIPAGTFVYSYFLNSLFRNLSHLASWNPLVVLPRYRVTIADDNEDLNKIGGFVTNLNYKDGLTNSVVHKKTLDEIEKDHWMKHFYRRELVEPKDIKSKRQISNMYLNSALIVSFVLSIVSTVYFYLSPNDWLISNAVSMNMAIWSIAQLKLKNLKSGALILIALFFYDICFVFGTDVMVTVATNLDIPVKLSLPVKFNTAQNNFNFSILGLGDIALPGMFIAMCYKYDIWKWHLDHDDTEFHFLNWSYVGKYFITAMVSYVASLVSAMVSLSIFNTAQPALLYIVPSLLISTILVACWNKDFKQFWNFQYDTIEVDKSLKKAIEKKENSITYSTFILSEYYNDADKYALLGDDVNENFDDDEEFVQEEDLSDSSEEELSEEDLLDDESS

SEQ ID NO: 21199 - protein, 291 aa, Saccharomyces cerevisiae
  misc_feature (1)..(1): Xaa can be any naturally occurring amino acid
  unsure (1)..(291): unsure at all Xaa locations
XVHVASVEKGRSYEDFQKVYNAIALKLREDDEYDNYIGYGPVLVRLAWHISGTWDKHDNTGGSYGGTYRFKKEFNDPSNAGLQNGFKFLEPIHKEFPWISSGDLFSLGGVTAVQEMQGPKIPWRCGRVDTPEDTTPDNGRLPDADKDAGYVRTFFQRLNMNDREVVALMGAHALGKTHLKNSGYEGPWGAANNVFTNEYYLNLLNEDWKLEKNDANNEQWDSKSGYMMLPTDYSLIQDPKYLSIVKEYANDQDKFFKDFSKAFEKLLENGITFPKDAPSPFIFKTLEEQGL

SEQ ID NO: 21200 - protein, 462 aa, Phaseolus vulgaris
MRDSTVLALPLPAQGHVNPMMTFSQKLLENGCKVIFVNTDFNHRRVVSSMVEQQDCSSLDEQESVLKLVSIPDGLGPDEDRNDQAKLYEAIPKTMPGALEKLIEDIHLKGENKINFIVADLCMAWALDVGSKLGIKGAVLCPASAAIFTLVYSIPVLIDEGIIDSDLGLTSTTKKRIQISPSMPEMDPEDFFWFNMGDLTTGKNVLKYLLHCARSLQLTQWWLCNSTHELEPGTLLFLPKIIPIGPLLRSNDNDHNKSAATKSMGQFWKEDQSCMSWLDEQADGSVLYVAFGSITLFDQNQFNELALGLDLTNRPFLWVIREDNKMAYPHEFQGHKGKIVNWAPQQKVLSHPAIACFVTHCGWNSTMEGLSSGVPLLCWPYFGDQLYNKAHICDELKVGLGIDKDQNGVVSRGELKTKVEQIFNDENIKFRCVVLKEKVMKNIAKGGTSYENFKNFVKEIKE

SEQ ID NO: 21201 - protein, 291 aa, Saccharomyces cerevisiae
  misc_feature (1)..(1): Xaa can be any naturally occurring amino acid
  unsure (1)..(291): unsure at all Xaa locations
XVHVASVEKGRSYEDFQKVYNAIALKLREDDEYDNYIGYGPVLVRLAWHISGTWDKHDNTGGSYGGTYRFKKEFNDPSNAGLQNGFKFLEPIHKEFPWISSGDLFSLGGVTAVQEMQGPKIPWRCGRVDTPEDTTPDNGRLPDADKDAGYVRTFFQRLNMNDREVVALMGAHALGKTHLKNSGYEGPWGAANNVFTNEKYLNLLNEDWKLEKNDANNEQWDSKSGYMMLPTDYSLIQDPKYLSIVKEYANDQDKFFKDFSKAFEKLLENGITFPKDAPSPFIFKTLEEQGL

SEQ ID NO: 21202 - protein, 608 aa, Neurospora crassa
MGSVNNASLCVGKTPWWKEAVFYQVYPASFKDSNNDGWGDIPGLIAKIDYLHDLGVDCVWLSPMFESPQKDMGYDISDYQAVYSRYGTLSDVDNLIAACHVRGMKLILDLVVNHTSDQHPWFQESRSSKTNPKRDWYMWKPARYDANGNRIPPTNWRSYFAGPTWTWDELTQEYYLHLYDNSQPDLNWENEECRKAIYNEAMRFWLDRGVDGFRIDTVNKYSKRTDFPDAPVTMPGETDQPAAEMWCNGPRIHEFIREMNEQVLAPYNAVSVGELSNTPLPSQVLPYVSAAAKELDMVFEFSTIRLGTGGPFHGKYLYREFPLSELKAYVATWQQWLEGTDGWHTVFCENHDNGRAVSRFGDDSTVESWEASAKTIALWQATLTGTIFLYQGQEIGMVNMPKEWRIEQEYKDVESLNFYREAKAFGDAERIRKTEEGLRILARDHSRIPMQWDASPNAGFTSAGVTPWMRVHDGFKDLNVEKQEGDDESILGFYKKILKLRKEYSGLFVHGAFRPSLQEDETLFVYVKDDQGSEESGVQADKRRKALVVMNFSGQPAILREHNLNVAATLGCKQGEERLLVTTLKKKDTPRMEAGVLEPWESRMYLNF

SEQ ID NO: 21203 - protein, 250 aa, Pisum sativum
MGKSYPTVSPDYQKAIEKAKRKLRGFIAEKKCAPLILRLAWHSAGTFDSKTKTGGPFGTIKHQAELAHGANNGLDIAVRLLEPIKEQFPIVSYADFYQLAGVVAVEITGGPEVPFHPGREDKPEPPPEGRLPDATKGSDHLRDVFGKAMGLSDQDIVALSGGHTIGAAHKERSGFEGPWTSNPLIFDNSYFTELLTGEKDGLLQLPSDKALLTDSVFRPLVEKYAADEDVFFADYAEAHLKLSELGFAEA

SEQ ID NO: 21204 - protein, 212 aa, Arabidopsis thaliana
MDSLKNRTLLKVIVLGDSGVGKTSLMNQYVYKKFNKQYKATIGADFVTKELHIDEKSVTLQIWDTAGQERFQSLGAAFYRGADCCVLVYDVNNLKSFETLNNWHTEFLKQANPMEPETFPFVLIGNKTDVDGGNSRVVSNKRAIEWCGSKGNIPYHETSAKEDTNIDEAFLSVAHIALSNERKQSNDIYPRGQYHDSVTDIIDPDQSRGCAC

SEQ ID NO: 21205 - protein, 235 aa, Methylococcus capsulatus str. Bath
MTEIRWFDDNTSLAPALAAAVAEDVRAALATDPAAILAVSGGRSPVPVFEALREADLDWARVIVTLVDERWVPETDPASNAALVKTHLLQGKAAAARFLPLYTGDASAAAAETRLARSFAELPRPFAALILGMGDDGHTASLFPASPNLEAGLALGGTVENTPPCLAQVGAIAPTERVSLTLPWILDARHIYLQFGGAGKVEVFNAALAGPNRQYPVSFVLAQTRTPVTVFAARS

SEQ ID NO: 21206 - protein, 468 aa, Methanosarcina acetivorans C2A
MISRKMNLESLDESKKYRVGAYSARYVPKTKEKGIPKYEFPEEGMSPRAAYQLVHDEQSLDGNPFLNLASFVNTWMEPEADKLVMENISKNIIDIFEYPQTSRVIHHNMVNMLGRLFNGHHTDFVGTSTAGSSEAIMLGLLAHKWSWKKSGRGTDKPNIIFGNDAHVCWDKFARYFDVDTRKVPIDKDRRTITAEAVAERIDENTICVGCVLGTTFTGEIDPVKDINDLLLEYKEEKGWDIPIHIDAASGGFILPFTEPDFEWDFRLERVKSINVSGHKYGLTYPGLGWLIFRNKNALPEDLIFHVNYLGEMEDSYTLNFSGGSAMVAAQYYNFLRFGRAGYTGIMKKILAVSQDLAEKVDRLGRFEMLNKGERLPIIAFRQKEKTGYSLLQLSHKLREKGWIVPAYCLPENAADIEIMRIVVRENLTPDMASIIVEDLEKACQFLENGTEAGAEKPCPSGKDMAHIC

SEQ ID NO: 21207 - protein, 1029 aa, ASPERGILLUS NIDULANS FGSC A4
MTGSECQPRHSASSGTGRDIHTLSWDGDHDPANPFNWSISRKWAVTYLAALISFLTMMNGTIITVAHFEIAELFNIDETAFPHTYWPVTTWAVGGAFSALFLLPLAEDFGTRPVFLVTYFAFVCFLIPQAVAQNFATLVATRFFAGACVAILANTAAGVIGNVWDTEWSRSIPVSLYIFGYMAGSSMGPVIGAAVLQSLSWRWIGYMQLIWFGALFPIYYFFFYESRGDIILAQRDRKMGKNGKDILPGHPAHSKLNLQNLAVSSTRPVILFCTEPVLFVSTLWSAFTVGTIFLFTQSVEQVFIGTYDWTISKTGYVQAAVVIGEGIGFFFSFLSRELYFASASRNTEVPNSLIPEARLYMAVLGGLFGISGGMFTYAWTSYPFIPWIAPAISLAMVGAGSVLVVTGVSDYVVDAYSQYAGSAIGAVATGENIFSAFLPLATMSMYNNLGFQWASTLLAFVSLVLALVPTLMFVWGRELDNYALPTIATYAYSPANHYCTTQQAFQCHCSNFPSLHSCPTTTRHRPTNHLLKMPSLANTLKDPTLFIESSYIDGKWVTSSSSRTFNVYDPATEEFIGTCPESNIDDINSAIRAAATAFPKWRALSGRQRGRILRRWFDLIVENKEDIGKIITAENGKAKGDAEGEALFSAGFFEWFSEEAARIYGDVVPHSNPSSRVQVLKEPVGVCGLITPWNFPMAMGARKVAAALAAGCTVVLKSDGLTPYSSNVLALLAERAGVPGGVFNVVTALENTPALGLALCESDNVKKISFTGSTRVGKLLMKQSSHTLKKLSLELGGNAPFIVFDDADLETAVTSAVACKFKVTGQTCVCANRFYVQEGIYEAFSKRFVEEVKKCQVGHGLDPGVTHGPLTNGIAKTQEHIQDALNKGATVLLGGSRLPSLGKNFHELTILGDVDDSMKVASEETFGPLAALSKFKAEDEVVRRANGVEVGLASYLITSDLGKAHRVSEKLEFGMVAINTGVISDSAAPFGGVKHSGMGREGSKYGIDDYLNIKTIVTGGIHTAYSAHL

SEQ ID NO: 21208 - protein, 237 aa, Streptococcus agalactiae NEM316
MTQFLGEFLGTFILVLLGDGVVAGNVLSKTKEEGTGWTAIVFGWGIACTVAVYVSGLFSPAHLNPAVTLAMASIGAISWGQVIPFIIAQMLGAMVAATILWLHYYPHWKETKDSGLILASFSTGPAIRHTPSNLLGEIIGTAILVITIMAIGPSKVAAGLGPIIVGIVIFAVGFSLGPTTGYAINPARDLGPRLMHAILPIENKGDSDWSYAWIPVVGPIIGGVLGAILYNIALTLI

SEQ ID NO: 21209 - protein, 229 aa, Listeria innocua Clip11262
MKLVLIRHGQSEWNKLNLFTGWHDVDLSEEGVVEAMTAGKRIKEAGLEFDVAFTSVLTRAIKTLNYVLEESDQMWVPVHKSWRLNERHYGALQGLNKQETAEKYGADQVQKWRRSYDTLPPLLEENDERQAKNDRRYQLLDTHAIPSGENLKVTLERVIPYWMDTIAPEIKAGRRVVIAAHGNSLRALVKFLEGISDDEIMELEIPTGVPLVYELNDDLKPVNKYYLDK

SEQ ID NO: 21210 - protein, 229 aa, Arabidopsis thaliana
  misc_feature (72)..(72): Xaa can be any naturally occurring amino acid
  misc_feature (85)..(85): Xaa can be any naturally occurring amino acid
  misc_feature (88)..(88): Xaa can be any naturally occurring amino acid
  misc_feature (162)..(162): Xaa can be any naturally occurring amino acid
  unsure (1)..(229): unsure at all Xaa locations
MQIFVKTLTGKTITLEVESSDTIDNVKAKIQDKEGIPPDQQRLIFAGKQLEDGRTLADYNIQKESTLHLVLXLRGGMQIFVKTLXGKXITLEVESSDTIDNVKAKIQDKEGIPPDQQRLIFAGKQLEDGRTLADYNIQKESTLHLVLRLRGGMQIFVKTLTXKTITLEVESSDTIDNVKAKIQDKEGIPPDQQRLIFAGKQLEDGRTLADYNIQKESTLHLVLRLRGGF

SEQ ID NO: 21211 - protein, 432 aa, Enterococcus faecalis V583
MQRKDVTPNSDKKSLLQKFGIGLAGGLLGGALILGGAYSGIIPTPNGGNNAATTTSTNHGDTKVSNVSYNVSSDVTKAVKKVQNSVVSVINMQSASNNSSADDPFGGLFGGNEGTQDSSGNNGNDLEAASEGSGVIYKKDGKTAYVVTNNHVVDKAQGLEVVLSDGTKVKGELVGTDAYTDLAVIKISSDKVDQVAEFGNSSKITVGEPAIAIGSPLGSDYANSVTQGIISSVNRNITNKNESGETININAIQTDAAINPGNSGGPLINIEGQVIGINSVKIVQSTSQVSVEGMGFAIPSNDVVNIINQLEKDGKVTRPALGITMSDLTGISSQQQEQILKIPTSVKTGVVVRGVEAATPAEKAGLEKYDVITKVDGQDVSSTTDLQSALYKKKVGDKMEVTYYRGSKEMKATIDLTIDKSALTQQNNRSNQ

SEQ ID NO: 21212 - protein, 388 aa, Triticum aestivum
MAAAGGEAAAAALAAAKKRAASRSWILFDAAGEERELDADKYAIMHRVDINARDLRILDPLLSYPSTILGRERAIVLNLEHIKAIVTSEEVLLRDPSDENVIPVVEELRRRLAPSSAAQHDGKDNLSGQHDAEAAEEDESPFEFRALEVTLEAICSFLDARTTELETNAYPALDDLTSKISSHNLDKVRKLKSGMTRLTARVQKVRDELEQLLDDDDDMADLYLSRKLAGASSPVSGSGGPNWFPASPTIGSKISRASRASAATIHGNENDVEELEMLLEAYFMQIDGTLNKLTTLREYIDDTEDYINIQLDNHRNQLIQLELFLSSGTVCLSLYSLVAGVFGMNIPYTWNDGHGYVFKWVVIVSGLFCAFMFVTIVAYARHKGLVGS

SEQ ID NO: 21213 - protein, 226 aa, Brassica oleracea var. capitata
LDACGSDIIELGVPYSDPLADGPVIQAAATRSLEKGTNLDSILDMLDKVLPELSCPVSLFTYYNPILKRGLGKFMSSIRDVGVQGLVVPDVPLEETEFLRKEALNNSIELVLLTTPTTPTERMKRIVDASEGFIYLVSSIGVTGARASVSGKVQSLLKDIKEATDKPVAVGFGISKPEHVKQIAGWGADGVIVGSAMVRLLGDAKSPTEGLKELESLTKSLKSALL

SEQ ID NO: 21214 - protein, 334 aa, Thermococcus kodakarensis KOD1
MKFGILYTPIFLEHRPDGYHPENPARLKRAVEGLKKAGLWKNVIEPEAVQEKELLKVHDEEYVELVKELGRSFNYLDPDTYVSPGTFNAALHAFGAVKKAVELAFEDKGLYLALVRPPGHHAGRKGRAFNAPTLGFCIFNNAAYASKLLEGLTGKALVIDFDAHHGNGTQEILWNDPNAVHIDLHERDIYPVSGYEYEVGGKGAEGTKVNIPMPHYSGDDDYIYAWNEVVLPIVAQFKPKVIVISAGFDGFHGDGLTTLRLSEAFYAYAGTTLSKYPLVVVLEGGYSVGLEKGLPVFMAGYLSGERFEVSVRPSFETLSIMERVKEILGEWWEF

SEQ ID NO: 21215 - protein, 1003 aa, Arabidopsis thaliana
MHHLDHTPSDRLLCPVERIQKDKDGKVTTISGGIHYIIKSSYFISNAEDEKPVHLLSLILRNRKEDKIALLGEAYYVYFCSYCPNYYHKECVESPSVFHSSDHPKHPLQLLWIPDMSLEEERDKRCCSCKRGVDALFYYCSICDFAVHMACAGNPTSPTIDNPKRHKHTLHYFPRKSGLFCDVCALVDDSDYLYVCLLCDFIVHKRCVYLPYVIKVSRHNHRLTFTPNLPYEEPTVTDCGVCHAKINENYGEYSCTKKGCVYAVHSRCAMQSDVCDGKKLEGEPEEVYEDTKMFEEKGDGIIQHQSHPRHQLRLEKIFHDESHHCQACRRPSYDHGGNIGSNVGNVIVTLAVSGACVRVPCDFFPVLDTLCASICEPFDHHSHPHSLFITSGEHESKICSICQSSEPQPLNCLKCDFVLCFYCATLPHKARYKHDEHFLTFSYEEDANDELYGCEICEEDINPKNGLYACNECGVTLHIECLLGRDPNTTPGSFSNSVGTLFSKIRFKGKRTQSFVGFDQRESTKKMSSISTESSSNLSLLENGGGGSDKPTAETSRRVRRTVSASSLIRKRSDLKLISRVRWEFMRRILTNLQEVLLGTKLFILFPAVPLAVVAHRYDCPRAWVFALSLLGLTPLAERISFLTEQIAFHTGPTVGGLMNATCGNATEMIIAILAVGQRKMRIVKLSLLGSILSNLLFVLGTSLFLGGISNLRKHQSFDPRQGDMNSMLLYLALLCQTLPMIMRFTMEAEEYDGSDVVVLSRASSFVMLIAYLAFLIFHLFSSHLSPPPPPLPQREDVHDDDVSDKEEEGAVIGMWSAIFWLIIMTLLVALLSDYLVSTIQDAADSWGLSVGFIGIILLPIVGNAAEHAGAVIFAFRNKLDITLGIALGSATQIALFVVPVTVLVAWTMGIEMDLNFNLLETACFALSILVTSLVLQDGTSNYMKGLVLLLCYVVIAACFFVSNSPSTETNTTLSYNNEKVTRIVFCLSFMCIVVFFDYIFSF

SEQ ID NO: 21216 - protein, 151 aa, Zea mays
MGILDHMSHVCSITETKEALKLRKKRPLQTVNIKVKMDCEGCERRVKSAVKSMRGVTSVTVNAKQSKCTVTGYVEPAKVLERVKATGKNAEMWPYVPYTLTTYPYVGGAYDKKAPAGFVRGAPQAMADPSAPEVKYMSMFSDENVNACTVM

SEQ ID NO: 21217 - protein, 586 aa, Pisum sativum
MCGILAVLGCSDDSQAKRVRILELSRRLKHRGPDWSGLHQHGDNYLAHQRLAIVDPASGDQPLFNEDKSIIVTVNGEIYNHEELRKQLPNHKFFTQCDCDVIAHLYEEHGENFVDMLDGIFSFVLLDTRDNSFIVARDAIGVTSLYIGWGLDGSVWIASELKGLNDECEHFEVFPPGHLYSSKEREFRRWYNPPWFNEAIIPSTPYDPLVLRNAFEKAVIKRLMTDVPFGVLLSGGLDSSLVASVTARYLAGTKAAKQWGAKLPSFCVGLKGAPDLKAGKEVADFLGTVHHEFEFTIQDGIDAIEDVIYHTETYDVTTIRAATPMFLMSRKIKSSGVKWVISGEGSDEIFGGYLYFHKAPNREEFHQETCRKIKALHRYDCLRANKSTYAWGLEARVPFLDKDFIKVAMDIDPEFKMIKHDEGRIEKWILRKAFDDEENPYLPKHILYRQKEQFSDGVGYGWIDGIKDHAAKHVTDRMMFNASHIFPFNTPNTKEAYYYRMIFERFFPQNSARLTVPGGPSVACSTEKAIEWDASWSNNLDPSGRAALGVHVSAYEHQINPVTKGVEPEKIIPKIGVSPLGVAIQT

SEQ ID NO: 21218 - protein, 583 aa, Pisum sativum
MCGILAVLGCSDPSRAKRVRVLELSRRLKHRGPEWSGLHQHGDCYLAQQRLAIVDPASGDQPLFNEDNPSIVTVNGEIYNHEDLRKQLSNHTFRTGSDCDVIAHLYEEYGEDFVDMLDGIFSFVPLDTRDNSYIVARDAIGVTSLYIGWGLDGSVWISSEMKGLNDDCEHFECFPPGHLYSSKDSGFRRWYNPSWYSEAIPSAPYDPLALRHAFEKAVVKRLMTDVPFGVLLSGGLDSSLVASITSRYLATTKAAEQWGSKLHSFCVGLEGSPDLKAGKEVADYLGTVHHEFTFTVQDGIDAIEDVIYHVETYDVTSIRASTPMFLMSRKIKSLGVKWVISGEGSDEIFGGYLYFHKAPNKEEFHEETCRKIKALHQYDCQRANKSTYAWGLEARVPFLDKAFINVAMNIDPENKMIKRDEGRIEKYILRKAFDDEENPYLPKHILYRQKEQFSDGVGYSWIDGLKAHAAKHVTDKMMLNAGNIFPHNTPNTKEAYYYRMIFERFFPQNSARLTVPGGPTVACSTAKAVEWDAAWSNNLDPSGRAALGVHDSAYENHNKVNKTVEFEKIIPLEAAPVELAIQG

SEQ ID NO: 21219 - protein, 331 aa, Chlamydophila pneumoniae AR39
MQFSRYLRYAFDNQYLPEPLYQKFSVFHQNYIDAATKKAAADQAEVLCLQWVKVIIEDLKNPFIFPPYHKKIRAPIDLFRLSIDFFSLVIDDKNSRILNLHRLKEIEEYIARGDNVVLLANHQTECDPQLMYYALGKTHPELMENMIFVAGDRVTSDPLARPFSMGCDLLCIYSKRHIATPPELREEKLLHNQKSMQILKTLLNEGGKFIYVAPAGGRDRKNAEGRLYPSEFSPESIEVFRLLAKASNQTTHFYPFALKTYDILPPPPKIENAIGEQRAIFFAPVFFNFGAELFFDALCSKEELIHCDKHAQRTLRAEKVFSIVKNLYEEL

SEQ ID NO: 21220 - protein, 410 aa, Burkholderia mallei ATCC 23344
MSQYGPLRLHVPEPTGRPGCKTDFSYLRLSPAGKVRKPPIDVAPADTSDLAYGLVRVLDEHGRAVGPWAPDLDPDILRKGIRAMLKTRIFDARMQIAQRQKKISFYMQCLGEEAIAVAHTLALERGDMCFPTYRQQGILMVREYPLVDMMCQLMSNERDPLKGRQLPVMYSTRDAGFFSISGNLATQFIQAVGWAMASAIKGDTRIASAWIGDGATAEADFHTALTFAHVYRAPVILNVVNNQWAISTFQAIAGGEGATFAGRGVGCGIASLRVDGNDFLAVYAASRWAAERARRNLGPTLIEWVTYRAGPHSTSDDPTKYRPGDDWTNFPLGDPLERLKRHMIGIGVWSEQDHEDTKAALEAEVLAAQKEAERYGMLADEHVPNVASIFEDVYKEMPAHLRRQRQQLGV

SEQ ID NO: 21221 - protein, 407 aa, Buchnera aphidicola str. Bp (Baizongia pistaciae)
MKRVVITGLGIISSIGNNKIEVLTSLLETKSGISFSKEMERSGMRSHVWGNIKLDNYQENIDRKIFRFMNDASIYSYLSMKQAIEDAKLTSKMYQNNPRVGVIIGSSSGSPRCQINGVSIIKKTKRLKSVSPYTVIKSMTSSISACLSTLFKIQGVNYSISSACATSAHCIGNAMELIQLGKQDLIFAGGGEELSWELACAFDSMGALSTMYNSQPILSSRVFDYYRDGFVISGGAGILVVEELNYALSRSAHIYAEIVGYGTSSDGYNVVVPSGNGAMRCMNIAMSNIQEPIDYLNVHSTSTKIGDLIELNAIQQVFRKTSIPILSSTKSITGHSLGASGVQEMIYSLLMLKYNFIVPSINIFKLDPKAKNCNILTTMMRKELSIIMSNSFGFGGTNVSLIIKKFV

SEQ ID NO: 21222 - protein, 316 aa, Buchnera aphidicola str. Bp (Baizongia pistaciae)
MNQLECLKKYTDIVVDSGDLVSINKFKLGDVTTNPSLIRQVMSLQKYQYIIYDSIRYAKKKGGSHKFKLENAIDKVSVILGSEILKNISGKISTEIDSRLSFNTNLCIERAKKLISMYEEHDIHRDRVLIKLAATWESVSAAKELKKENIQSNLTLLFSFAQAKICAEAGVFLISPFVGRIYDWYKSKSLIKSAMIDDDPGVNAVRKIYQYYKEYGYHTIIMGASFRNVDQVLALSGCDRLTISPNLLHKLQLSDDLVIRKLIPPKHKKLQPVCMSKSEFCWFHNEDAMAVEKLSEGIRQFGKDQQELENIINNNF

SEQ ID NO: 21223 - protein, 666 aa, Buchnera aphidicola str. Bp (Baizongia pistaciae)
MCLRRKLANAIRALSIDAVQEAQSGHPGMPMGMADIAEVLWREFFKHNPKNPLWNNRDRFILSNGHGSMLLYSILHLTGYKLSIDDLKKFRQLGSNTPGHPEIGSTPGVEMTTGPLGQGLGAAVGMAIAERTLASTFNKPNYDIVDHYTWVFVGDGCLMEGISHEVCSLAGTFGLGKLIVFYDSNGISIDGKVEEWFTDDTENRFKAYNWHVVSNVDGHDYRSISSAIKDAILVKNKPSLIICKTIIGYGSPNKSGLETSHGAPLGENEVLLTKQKLGWTYPPFVIPQDVYDHWNFNLQGVILENEWNKKFQGYYNKYPDLANEYLRRISKNVPDKFVDNFNKFIKELYLCPKNIATRVASQNVLEFLGKSLPELIGGSADLAPSNLTMWSKSKSIKQDISGNYVHYGVREFGMTAISNGIAHYGGFIPYVATFLAFMDYARSAVRMSALMKTQNIFIYSHDSIGLGEDGPTHQPIEQLSALRFIPNVNVWRPCDQLETAIAWKNAIERKDGPTALILSRQILCQIDRSQEQINDIYRGGYIVNTTVRSPKVIIVATGSEVKIALDVSNILFKKGILVRVVSMPSTNVFDQQDNDYKEFIFPRCLVHRVAIEAGISDFWYKYVGLTGCIIGIDTFGESGSSDQLFSKFGFNSDIISEKIISYLKSS

SEQ ID NO: 21224 - protein, 154 aa, Brassica napus
  misc_feature (84)..(84): Xaa can be any naturally occurring amino acid
  unsure (1)..(154): unsure at all Xaa locations
MAMEVAMDLELDDDVFYADISKQINLLITDEDEQNPISLSSPISFQGLVRENYQASATPYMMYQEQNYNQVRESKGTGVFIPRXSQPRRRQHNHPHQKKQGRFGSLTPKQQYPHHVYDNNNNSTTFNNLESITLHPAASTNQRRTYRDAASLFT

SEQ ID NO: 21225 - protein, 198 aa, Arabidopsis thaliana
MSASRFIKCVTVGDGAVGKTCLLISYTSNTFPTDYVPTVFDNFSANVIVDGNTINLGLWDTAGQEDYNRLRPLSYRGADVFLLAFSLVSKASYENVSKKWVPELRHYAPGVPIILVGTKLDLRDDKQFFAEHPGAVPISTAQGEELKKLIGAPAYIECSAKTQQNVKAVFDAAIKVVLQPPKNKKKKKRKSQKGCSIL

SEQ ID NO: 21226 - protein, 133 aa, Brassica napus
EAQRCAKRDAKHYIEFWGQIPSNEPYRAILGDVRDKLYNTRERARQLLSSGVSDVPEDAVFTSVDQATPELEYGRMNIGSRPSKRKPSGGIESLRAIPWIFAWTQTRFHLPVWLGFGSAFKRVIQKDAKNLNM

SEQ ID NO: 21227 - protein, 586 aa, Magnetospirillum magnetotacticum MS-1
MTMLDGDANTGGRPNAPRSKDLKRYLMLMGVVALIVLFGAFIFRQQAGGNRLGTLIRQLGHGAVTAPVLPLPANALAGAPAATGVPALPPVMEAGAAQVGGGGGFSRVVALLRHSVVSVTASSSGRAAAPKTLMPPGPDVLPRFANPTTTSVENIGTGVIVRDDGFIVTNFHVVRGANSVLVSVSDDGGATRYSAEIVKMDEALDLALLKIAPRVPLTSAVLGDSSAVRVADEVIAIGTPFGLDMSVSRGIISAKGKSMVIEGVTHSKLLQTDTAINQGNSGGPLVIADGTVIGINTAIYTPSGAFAGIGFAVPSNQVRLFVEDEVNALPAAAAAAGPAMGAVAFRAPGPGGVGAAGPAIAVGGPSPHTDGRQAMACDNCHQIIGAAAGPIAFAQPMMPVAAPPPAAPPIQANAANPHADNRRNMNCAGCHQIIGAGAGAGPVAFAQPGAGGYQFAQPPGGLAVNVQGARGGIGSRMAGHSLHGAALATLSPQMSLQTGLPVGRGVLITGVSPNTAAASAGLRPGDVLLKIDGRPVALPHEAVAIMGEMSVGGSVRLGVLRDGGVRNMTLIAGSAVGTPPSGNGPW

SEQ ID NO: 21228 - protein, 466 aa, Burkholderia pseudomallei K96243
MSDTKTTTLLVIGGGPGGYVAAIRAGQLGVRTILVERDRLGGTCLNIGCIPSKALIHAAGEFDKVRGFAGDSPLGIRTQAPAIDIARTVAWKDGIVKKLTGGVGALLKKNGVEVVHGDARVVDGKTVDVDTGGGARVRIQCEHLLLAAGSEPVELPAMPFGGNVISSTGALSPGRLPKRLVVVGAGYIGLELGIAYRKLGVEVSVVEARERILPIYDAELTKPVAASLKRLGVRVLLGHKVLGLNARGDAVCVQDDAHAQTELAADQVLVTVGRRPRTQGWGLETLQLDRAGAALKIDDMCRTSMRNVWAIGDLTGEPMLAHRAMAQGEMVAEIVAGKKRHFMPAAIAAICFTDPEVVSVGLAPDEAERTFGACVSASFPFAANGRALTLESADGFVRVVARRDDHLIVGWQAVGAGVSELAAAFSQSLEMGARLEDVGGTIHAHPTLGEAVMEAALRALGHALHI

SEQ ID NO: 21229 - protein, 451 aa, Methylococcus capsulatus str. Bath
MGSAGRQWMERDLAVLWHPCSQMKDHESLPLIPIRRGEGVWLEDFDGRRYLDAISSWWVNLFGHCHPAINAALADQLGRLEHVIFAGFSHEPGIRLAERLVDITPPGLERCFYADNGSAAVEVALKMSFHYWRNRGRPGKTRFVTLENSYHGETLGALAVGDVPLYKETYRPLLMEAVAAPSPDAYGREPGETEAGYAERRFRDMLAILERGADEICAVIVEPLVQCAGGMRMYDPLYLRLLRAACDRLGIHLIADEIAVGFGRTGTLFACEQAGISPDFLCLSKGLTGGYLPLAAVLTRPEIYAAFYDDYGTLKAFLHSHSYTGNPLACRAALATLELFDATDVLGRNRELARCMADATERFQEHPHVAEVRQRGMILAIEMVKDKTTREPYPWQERRGLRVYRRALERGVLLRPLGNVIYFMPPYLITPEQIRLMAEVAWEGLLVAAED

SEQ ID NO: 21230 - protein, 221 aa, Cryptococcus neoformans var. grubii
MSHSSLEYPEMKKLFNRNLKWSENVREKNPSFFPHHFPGQRPEILWIGCSDARVPETTIMGCQPGDIFVHRNIANLYSPQDDSLNAVLMIALFNFNVKHIVVTGHTNCVGCLTALNVSRLPAAPPTTPLQRYVKPLATLARTLYTPDGPPTLDLLVEENVVQQVKNLVESDIIKDNWKRRGADGVVIHGWVYHLEDGIIRDLNVSMGPPGHVPGMQINNLF

SEQ ID NO: 21231 - protein, 382 aa, Guillardia theta
MSKNDFQITRMNDLVCIEFNSNGISRLRKISRKKIITESRTFPKNYFQKLFDLYFEYSYAKEFKKFPINLINEKDKRQIKKFLDDSIQLRDIRQVDPYFESKPTFWIRNNAILLSLEQIRAIVLFNKLFLFDPDNPKVQRAGKIISEKLEKFQEDSVEDRKTPFEFKALEGIFVNICMNLEKDFSYLEPTILENLDDLPTKLTSRMLEELRSFKQRLSQFSIRSQEVQRILQETLENENNLPNHYLSINNNNKKIKLKTTSDYYAIEIISEGFLQVVEHLTHRAELLDNAIDDTEDLVNIRLDTIRNKILFVELSLNIVSLTLSAGGLVAGLMGMNLGIPIFKEENSSTTFFILVSFLIIFSSLTLYLWLLNWCRIKGLYSI

SEQ ID NO: 21232 - protein, 239 aa, Cryptococcus neoformans var. grubii
MPFHAEPLKPSDEIDMDLGHSVAAQKFKEIREVLEGNRYWARKVTSEEPEFMAEQVKGQAPNFLWIGCADSRVPEVTIMARKPGDVFVQRNVANQFKPEDDSSQALLNYAIMNVGVTHVMVVGHTGCGGCIAAFDQPLPTEENPGGTPLVRYLEPIIRLKHSLPEGSDVNDLIKENVKMAVKNVVNSPTIQGAWEQARKGEFREVFVHGWLYDLSTGNIVDLNVTQGPHPFVDDRVPRA

SEQ ID NO: 21233 - protein, 442 aa, Arabidopsis thaliana
MLKIKRVPTVVSNYQKDDGAEDPVGCGRNCLGACCLNGARLPLYACKNLVKSGEKLVISHEAIEPPVAFLESLVLGEWEDRFQRGLFRYDVTACETKVIPGKYGFVAQLNEGRHLKKRPTEFRVDKVLQSFDGSKFNFTKVGQEELLFQFEAGEDAQVQFFPCMPIDPENSPSVVAINVSPIEYGHVLLIPRVLDCLPQRIDHKSLLLAVHMAAEAANPYFRLGYNSLGAFATINHLHFQAYYLAMPFPLEKAPTKKITTTVSGVKISELLSYPVRSLLFEGGSSMQELSDTVSDCCVCLQNNNIPFNILISDCGRQIFLMPQCYAEKQALGEVSPEVLETQVNPAVWEISGHMVLKRKEDYEGASEDNAWRLLAEASLSEERFKEVTALAFEAIGCSNQEEDLEGTIVHQQNSSGNVNQKSNRTHGGPITNGTAAECLVLQ

SEQ ID NO: 21234 - protein, 503 aa, Neurospora crassa
MPSLSFLVRPSVVSSRLASGRVGSLSRHFSVTALNMAPISRETDFLVIGGGSGGIATARAAAGKYGIKSMVVEGKRLGGTCVNVGCVPKKVTFYAALVAETIHQAKDYGFSVEQTAPFDWPTFKQKRDAYVARLNGIYERNLANDKVEYVHGWAKLLSPNSVEVTLDDGTKSVVNAKKILIAVGGNPTIPPHIPGSEYGTNSDGFFDIDTLPKKVALVGAGYIAVEFAGMLNALGVETHLFIRHDTFLRSFDPMIQQVSVKEYERIGVKVHKKSQLTSVQKDAAGKLAINFKEGEGEQSISDVDHLIWAVGRTPAVEGLGLDKAGVKTNEKGYIEVDEYQNTSTENIYAVGDVCGQVELTPVAIAAGRKLAARLFGPEEFRTLKLNYDNVPSVVFAHPEIGSIGLTEPEAVAKYGAENLKIYKSSFTAMYYAMMKPEDKAPTAYKLICAGPEEKVVGLHIIGLGSGEILQGFGVAVNMGATKADFDNCVAIHPTSAEELVTLK

SEQ ID NO: 21235 - protein, 402 aa, ASPERGILLUS NIDULANS FGSC A4
MAHGQEDCASVLEQFVHDVANLPLEINHLMEEIQAKDKIIQECRAIINSRDASIQKFIKLNGSLTPNPKEEQYSKIVLQNLDKSSQLQDEKIQLSEKACILLDRQIKKLDIKIRDLQNDGVLSNDPPIPSLFNNKDQYRDPPKIFFPDSSNDSASYTSPLAASSGNANPTPRLSLSLNRPHSAAALSQTARSSAPATPAATAHFQQRQRESSAGAIDSKRRRLNATLGSLPAASSNLRQSSLGPGTPKAGTPASSRAGSAGPRSAGVTKKALTKKVAPHQQLKKLKSLNGKHTKRSSSTSRVKSHKKSPSGGDDDDDESMLSSAELSESENGDMHIDEEEEDEGNEDTKVYCTCRTVSHGDMVACDNDDCKFEWFHWKCVGLTREPVGKWYCPDCLAAKGGE

SEQ ID NO: 21236 - protein, 141 aa, Cytophaga hutchinsonii
MGTVTDNKINTSQSLILFDGVCHFCNNSVNFVIDRDPEKKFVFAPLQSDYAKERLTQLGAYNASVYTVILIRNNKLYKRSRAALEIARRLNGLWPLCYMFILIPGFIRDVVYNFIAKNRYKWFGKMEACRIPTPEMRERFL

SEQ ID NO: 21237 - protein, 481 aa, Arabidopsis thaliana
MALKALDYDTLNENVKKCQYAVRGELYLRASELQKEGKKIIFTNVGNPHALGQKPLTFPRQVVALCQAPFLLDDPNVGMLFPADAIARAKHYLSLTSGGLGAYSDSRGLPGVRKEVAEFIQRRDGYPSDPELIFLTDGASKGVMQILNCVIRGNGDGILVPVPQYPLYSATISLLGGTLVPYYLDESENWGLDVANLRQSVAQARSQGITVRAMVIINPGNPTGQCLSEANIREILKFCYNEKLVLLGDEVYQQNIYQDERPFISSKKVLMEMGSPFSKEVQLVSFHTVSKGYWGECGQRGGYFEMTNLPPRVVEEIYKVASIALSPNVSAQIFMGLMVNPPKPGDISYDQFARESKGILESLRRRARLMTDGFNSCKNVVRNFTEGAMYSFPQIRLPTGALQAAKQAGKVPDVFYCLKLLEATGISTVPGSGFGQKEGVFHLRTTILPAEDEMPEIMDSFKKFNDEFMTQYDNNFGYSKM

SEQ ID NO: 21238 - protein, 1112 aa, Debaryomyces hansenii CBS767
MSKEYEKHNIQPNFKPIDHLFQERLRQFIDGGKYRDLNLPKFYDFDRVDTNTEYINIKSYKVPDDKNGKTQRPLFKDINWDEVKWQDSNKGDSFGPSWKTFWFKVELSIPSEWLSKKPEAIEFQWDSNNEAMICNDKGLPLQAFTGGNERTLFRIPKRYWKEGVHRFYVEMSCNGMFGNGSDGSPNPNRYFQLSKCDLVLPNLEARRLMWDFWIIGDAAREFPGNSWQKWQANQLCNDIMNTFDPDNVESIWECRKLAKRYLGDKIDSDEVFATDSRIDVFGVGNCHIDTAWEWPFAETKRKIVRSWTTQLRLAEEYPEYIFVASQMQQFKWLKEYHPEILKQIKDKFTTNQFLPIGGSWVENDTNLPNGESLIRQFLLGQRFQYNEFGIYSNIFWLPDTFGYSSQVPQICQQVGINNFLTQKLSWNNINQFPLSTFNWIGIDRSQVLVHMPPANTYTASANFGDIKRSLEQHKNLRDVPTGLLLFGHGDGGGGPTDEMFEKIRRCRGMSDTSGLLPTVHLGNTIEDFYDDILERSNGGKDLPSWTGEIYLEFHRGTYTTQAYVKKLMRINEIKLHDLEWLATLVSITNNNYKYPKSEITALWEDLCLCQFHDVLPGSCIGMVYYEEVWPMLEKVLKNANNLINDALSIIKDDGKFTLSSLNYLNTLPWSRSEILRINQKEHSDLFDAISEDFAVKEGSDLIISVANNLGVTKINYKSEIRYPASVVEEEGVFILSNKKIKATISKNGILTSVIDLEHGREIIDATATKQTDSGESIGGNQFVLYDDEPLNFPAWDTELYSLTKYKLLTENEVSILTNNELESSVLIKTHISDKSSIETVVSIEGLTDFKAVQNSFIKFKSKVDWHETYKFLKVQFPTTVYTSQQANYETQFGLTSRPTHYNTSWDVAKFEVCHHKFMDLSEFNYGVSILNNSKYGGSIRGNLMTLSLLRSAKAPDDKADMGKHEFEYALYPHNGPLGSDTVKLGYNFNHKLCHGVNSTRLPELLSSIKLTDGGSLVLSHLKRSEDDEDVSLHENIPIRNKGQKSLIIRIYESLGGSSSGKLEFDLDVLPVDKIFKTNALEQESEDIPLHEGSVSIRLRGFEIATYKVVLKA

SEQ ID NO: 21239 - protein, 362 aa, Ipomoea alba
MAMPGNYEKAIAEAEAETGTKFGCFLTDAFLWFGGDLAAERGSVPWIALWTAGACSISSHLYTDFVRSLVAATPTGNGNGLEQKLKAIPGMSQVSIGEMPGEILAKDLQAPFPDMIYNMALKLPGANAVVLNSFQKLEPTVTDDLRSKLKKVFNIGPMILRQAAADTPKPPISDDHNCIPWLDSLPPAATPQAVYLSFGSGLTPPPCEIVALAEALEAKRAPFLWSLKPHGVKHLPEGFLERTKEFGKIVAWAPQVQVLSHPGVGAFVTHCGWNSTLEAICSGVCMICRPFYGDQQINSRFVESVWEIGVKVKGGIFTKDETLKALNVVLDSDRGKLLKENVLKLKGEAMEAVKPNGSSTKD

SEQ ID NO: 21240 - protein, 555 aa, Schizosaccharomyces pombe
MFLGLDLSTQQLKGVVIDESLNVHQEVAVDFDRDLSDYNTIKGVYRNGYEVFAPVCMWLDAIDLLFERLKASVDVSKIQAISGAGQQHASVFLLKGSKKALNSLDAKSSLKQQLESLIHPTSPNWQDASTTKECEELESCIGGAKALADLTGSKAHLRFTGPQIKRFRRLHPETYENTERIALVSNFLASVLLQTEAPLDISDVCGMNLWDIQNEKFDIRLLEEVAGNSKGPDLANKLGTVEINGAKHLGPIGKYFVKKYGFSPNCQIIPLTGDNPATILSLPLRPGKDVLLSLGTSTTALMATQNYVCSPEYHMFAHPVTQNHYMVMLCYKNGSLAREQVRNTINEKYNVSDNTSWDRFNESILNPNIKGAGEKKQLGLFYPQREILPAVGPGTWRFAIQGTELYQVDKDEESWDYPDEDASAIVESQNLDIRMRITPLLTGIPQPDRVYVVGGASRNEAIVFKISQVLGCDVYRLKHGGSNACAVGGAIKAAYAMNGKGFTFEEYVNKSWDESKKIELIMNKPSAQTYEEYGKLLPFLKKAEDIAIQQSDIRH

SEQ ID NO: 21241 - protein, 362 aa, Zea mays
MNSMESCVPPGFRFHPTDEELVGYYLRKKVAAQKIDLHVIRDIDLYRIEPWDLQGHCGIGYEEQNEWYFFSYKDRKYPTGTRTNRATMAGFWKATGRDKAVHDKSRIIGMRKTLVFYKGRAPNGHKTDWIMHEYRLETDENAPPQEEGWVVCRAFKKRTAYPARMAWGDPSYAYREISAMGAAAAAFVDPNAASYAQIRRQQSNKSARFKQEAELDGGAAAALLQYSSSHLVELPQLESPSAPANKSQAASASDEVVDAADSGRRPGKKARADEVATDWRALDKFVASQLSPAAECGLEAAAASSTAAASNVGSQLDHVEDDDMAALLFLNSDGRDEAERWTGLLGPAAGDDGDFGLCVFDK

SEQ ID NO: 21242 - protein, 296 aa, Arabidopsis thaliana
MLTLYGQERSPENSTTSTTDASDRRDETPSSEIVVRDIHAMTTTTELTRPQQRGSGGGYLSPSRSIAFSDGTTSSGENFTTVSREFNALVIAGSSMDNNSNGTNQSGGHRDVIRDERNELTRIGENDDVGDHGQVPEEDSNPWAIVPDDYNNRDGSENNIVLASSGGQNRMVTTASVQRVKREEVEAKITAWQTAKVAKINNRFKRQDAVINGWLNEQVHRANSWMKKIERKLEDRRAKAMEKTQNKVAKAQRKAEERRATAEGKRGTEVARVLEVANLMRAVGRPPAKRSFFSLS

SEQ ID NO: 21243 - protein, 243 aa, Glycine max
MGFEETELRLGLPGNGGTEEVLIRKRGFSETETGHEDESATTVDLMLNLSSKEAATTAAAAADPTDKHKTLPKEKTLLPADPAKPPAKTQVVGWPPVRSFRKNMLAVQKSVGEESEKNSSPNASFVKVSMDGAPYLRKVDLKMYKSYRELSDSLGKMFSSFTFGNCESQGMKDFMNESKLNDLLNSSDYVPTYEDKDGDWMLVGDVPWEMFVESCKRLRIMKGKEAIGLGLAPRAMAKCKNRS

SEQ ID NO: 21244 - protein, 410 aa, Burkholderia pseudomallei K96243
MSQYGPLRLHVPEPTGRPGCKTDFSYLRLSPAGKVRKPPIDVAPADTSDLAYGLVRVLDEHGRAVGPWAPDLDPDILRKGIRAMLKTRIFDARMQIAQRQKKISFYMQCLGEEAIAVAHTLALERGDMCFPTYRQQGILMVREYPLVDMMCQLMSNERDPLKGRQLPVMYSTRDAGFFSISGNLATQFIQAVGWAMASAIKGDTRIASAWIGDGATAEADFHTALTFAHVYRAPVILNVVNNQWAISTFQAIAGGEGATFAGRGVGCGIASLRVDGNDFLAVYAASRWAAERARRNLGPTLIEWVTYRAGPHSTSDDPTKYRPGDDWTNFPLGDPLERLKRHMIGIGVWSEQDHEDTKAALEAEVLAAQKEAERYGTLADEHVPNVASIFEDVYKEMPAHLRRQRQQLGV

SEQ ID NO: 21245 - protein, 149 aa, Pseudomonas aeruginosa
FSLYGERVGALSIVTESRDESARVLSQVKRVIRTNYPNPPTHGASVVSSVLNSPELRALWEQELGEMRDRIRDMRLAMVEQLAAHGAKRDFSFVGRQRGMFSYSGLTADQVERLKTEFGIYAVSTGRICVAALNKSNLETITKAIVQVL

SEQ ID NO: 21246 - protein, 227 aa, Arabidopsis thaliana
MGRGKIVIQKIDDSTSRQVTFSKRRKGLIKKAKELAILCDAEVCLIIFSNTDKLYDFASSSVKSTIERFNTAKMEEQELMNPASEVKFWQREAETLRQELHSLQENYRQLTGVELNGLSVKELQNIESQLEMSLRGIRMKREQILTNEIKELTRKRNLVHHENLELSRKVQRIHQENVELYKKAYGTSNTNGLGHHELVDAVYESHAQVRLQLSQPEQSHYKTSSNS

SEQ ID NO: 21247 - protein, 519 aa, Arabidopsis thaliana
MAASFLTMDNSRTRQNMNGSANWSQQSGRTSTSSLEDLEIPKFRSFAPSSISISPSLVSPSTCFSPSLFLDSPAFVSSSANVLASPTTGALITNVTNQKGINEGDKSNNNNFNLFDFSFHTQSSGVSAPTTTTTTTTTTTTTNSSIFQSQEQQKKNQSEQWSQTETRPNNQAVSYNGREQRKGEDGYNWRKYGQKQVKGSENPRSYYKCTFPNCPTKKKVERSLEGQITEIVYKGSHNHPKPQSTRRSSSSSSTFHSAVYNASLDHNRQASSDQPNSNNSFHQSDSFGMQQEDNTTSDSVGDDEFEQGSSIVSRDEEDCGSEPEAKRWKGDNETNGGNGGGSKTVREPRIVVQTTSDIDILDDGYRWRKYGQKVVKGNPNPRSYYKCTTIGCPVRKHVERASHDMRAVITTYEGKHNHDVPAARGSGYATNRAPQDSSSVPIRPAAIAGHSNYTTSSQAPYTLQMLHNNNTNTGPFGYAMNNNNNNSNLQTQQNFVGGGFSRAKEEPNEETSFFDSFMP

SEQ ID NO: 21248 - protein, 421 aa, Clostridium difficile
MSGKDVNVFEMAQSQVKNACDKLGMEPAVYELLKEPMRVIEVSIPVKMDDGSIKTFKGFRSQHNDAVGPTKGGIRFHQNVSRDEVKALSIWMTFKCSVTGIPYGGGKGGIIVDPSTLSQGELERLSRGYIDGIYKLIGEKVDVPAPDVNTNGQIMSWMVDEYNKLTGQSSIGVITGKPVEFGGSLGRTAATGFGVAVTAREAAAKLGIDMKKAKIAVQGIGNVGSYTVLNCEKLGGTVVAMAEWCKSEGSYAIYNENGLDGQAMLDYMKEHGNLLNFPGAKRISLEEFWASDVDIVIPAALENSITKEVAESIKAKLVCEAANGPTTPEADEVFAERGIVLTPDILTNAGGVTVSYFEWVQNLYGYYWSEEEVEQKEEIAMVKAFESIWKIKEEYNVTMREAAYMHSIKKVAEAMKLRGWY

SEQ ID NO: 21249 - protein, 346 aa, Candida albicans SC5314
MVVNNPNNWHWVDKNCLPWSVDYFKDKLINLKVTDGTNNVHISEVSSVEGDVDVSQRKGKVISLFDIKIVLTFKGNTAKDDNVSGSITIPELTYDSEVDGLQFDISIYNETAENSGITDLIKKQLIPQLRTALMKFGPDLIEINSKDIQLSQDKVTSTYTKANQSSTIAATADHPKSESKPVEKKTETHSTSNIARKVVSEKDSSTVPKYNTTTLHLEPSFNTSAEQIYLTLLDEARIGAWTRSAPVIEKFPPKEGSEFKFFGGSVSGKFLKLVPNEQIVELWRLDDWKAGHFAQLDMKLVQSSGETKLVVKFSGIPIGEEERVKNNFEERYIRSIKITFGFGAVL

SEQ ID NO: 21250 - protein, 433 aa, Bacillus clausii KSM-K16
MKQTNMRLGIKEIPRPGEWLLFSLQHLCAMFGATVLVPFLVGMSPATALFSSGLGTLAFILVTKGQVPAYLGSSFAFIVPLTTSQALGGIEGAMVGSFFAGLVYGIVALFIKFAGTGWITKVLPPIVVGPVIMVIGLSLATTAVGNAMYLPNSEEYSLVHIATAGVTLFVAVVATMYFKGFLNLIPILLGLIAGYLFALWQGLIDLEPIRTASWFSVPELIVPFVTYSPTVNWAIVAIMAPVALVTLAEHTGQLMVLSKVAGKNFLKQPGMHRTVMGDGLATMIAAAVGGPPNTTYGENVGVVAITRVFSVFVVGGAAVLAIAFAFVGKVAALISSIPPAVMGGVSILLFGIIASAGIRMLVDNRVDMGEKRNMVIASIILVIGIGGAAVRFTDSFEIAGMSLATVIGLILHGLLPNRSVSYGQKDMFESDAN

SEQ ID NO: 21251 - protein, 421 aa, Mesorhizobium loti MAFF303099
MADLKRTQPLARDAMAYVLAGGRGSRLKELTDRRAKPAVYFGGKTRIIDFALSNALNSGIRRLGVATQYKAHSLIRHLQRGWNFLRPERNESFDILPASQRVSETQWYEGTADAVYQNIDIIEAYGPEYMVILAGDHIYKMDYEMMLRQHVDANADVTVGCLEVPRMEATGFGVMHVDAKDNIIAFVEKPADPPGIPGNPDFALASMGIYVFKTKFLMEQLRRDAAEPGSSRDFGKDIIPYIVQHGKAIAHRFTKSCVRSTAENEAYWRDVGTVDAYWEANIDLTDITPELDLYDRDWPIWTYAELKPPAKFVHDEDGRRGSAVSSLVSGDCIVSGATLKKSLIFTGARINSYSTLEEVVMLPDVHVGRNAKLKRVVIDHGVRIPEGLVVGEDPALDAKRFRVSEKGICLITQDMINKLGL

SEQ ID NO: 21252 - protein, 443 aa, Glycine max
MKLEESVSNSNITAPLLPPEDPSPSPQNGSISGAVFNITTTMIGAGIMSIPATMKVLGIVPGLVVIVLVALITDVTVEFMLRYTSSGKSSTYAGMMAESFGSIGSLAVKICVIITNLGVLIIYFIILGDVLCGNESNGITHLGILQEWFGINWLTSRAFALLFVALFIMLPLVMLRRVDSLRYSSAISILLALVFVVICSSMAVSALLSGKSQTPRIVPDFSQVTVLDLFTTIPVFVTGFGFHVNVHPIRAELIKVEHMGLAARISLIICVAIYFAIGFFGYLLFGDSIMPDVLVNFDQNSHTSTGRLLNAIVRLSYALHLALVFPIMNYSLRANIDELIFSNKNKPPLASDTPRFVSLTLTLLALTYLVAVAIPNIWYFFQFLGSTTIVSTSFIFPAAIVLRDMHGISKTKDQVMAIVVIVLAVGTSGIAIWTNLNGSGDDQ

SEQ ID NO: 21253 - protein, 540 aa, Shewanella sp. ANA-3
MSELTWWRGAVIYQIYPRSLLDTNGDGVGDLRGIITKLDYIASLNVDAIWISPFFKSPMADFGYDISDYREVDPLFGTMQDFDELIEKAHQRGIKVIIDQVLSHTSDQHAWFCESRESRTNPKADWYVWAEPKEDGTAPNNWLAIFGGCAWEWEPRRQQYYLHNFLRSQPDINFHNPDVRQAVLDNVEFWLKKGVDGFRLDAITFCYHDEQLRDNPPKPKDKRQGRGFSEDNPYAYQYHYYNNDRPQTILFIEELRQLINRYPGAVTLGEVSAEDSLAVMAAYTKGEDRLHMAYSFELLTDDYSAAYIRQTVEALEASIGDGWPCWAIGNHDAQRVASRWGRGKQTSDMVKMLNAMVNSLRGSVCSYQGEELGLTEAPIEYHELQDPFGKTFWPMFKGRDGCRTPMPWEQNADFSGFSQVTPWLPIAQAHRALAVDVQEADSQSMLHGYRQFLAWRKGYPALVEGEIEFLDAPEPLLVFVRTSGEQKLLVCFNLQDTEQALSLDALSIQQEITGHGLKTAQRIADTLTFSAYACFYALLN

SEQ ID NO: 21254 - protein, 481 aa, Mesorhizobium loti MAFF303099
MQVLSVTPEIFPLIKTGGLADVTGALPVALAAKGVTMRTLIPGFPAVMEGFKKRKAVYQYPLLQGGKASIHAVQIAGLDLFVLDAPHLFDRPGGPYGNASGADWPDNWRRFAALSQAGADIAGGAISGYLPEIVHAHDWQSAMTLAYMRYGKAVGTPSMMTVHNLAFQGQFGAGIFGELGLPAVAMALDGVEYYGGVGFLKAGLQAAWAITTVSPTYAQEIRSPEFGMGLDGLINMRSSDLYGIVNGIDTAIWDPETDKHLVSNYTATTLKARAPNRAAVEERFGLDRDDSPIVCVISRLTWQKGMDILATVIDGIVATGARLAILGSGDAGLEGALLAAAARHRGRIGVVIGYDEGLSHTMQGGCDAIIIPSRFEPCGLTQLYGLRYGCVPVVARTGGLADTIIDANEAAMAAGVATGLQFAPNNGGAMLHAIRRLVDAYADPAAFETIQRQGMKADVSWDKSAEKYLELYRLLLSKRVA

SEQ ID NO: 21255 - protein, 497 aa, Methanosarcina acetivorans C2A
MCGIAGVFGTPDSNLKVKKMLAALGHRGPDACGIHTAGDLSIGNTLLKITGDMPQPLTGKGALVLNGEIFNFRELAAEIGIKIDSDTELLFSLIETGVKEGSTPIDAVCSALSKVNGDYALAYACGGELVLARDPSGVKPLFYCSGTEGEKPEIAFASEKKALAFISRKAKPFPQGGILGFNTESGKITEKIPEGYLEIKSPEKRIYTEHEALSQLKETLEKAVELRLTPTTGIAFSGGIDSTFLAALAKRIDPGVSLYAVGLPDSHDITQAERAAEAIGMRKNLKVHFLSPEEIEAAVPRVVYATESTDPMTVAIGIPLYIVAKTAKEDGKRVLLTGQGADELFGGYRRHEEFLKKGAEVLDREIYSDLATISKINLERDDMVTMANSVELRVPFLDKEVIKTGLAIRPELKVLKKDGYYEDGYYERKYILRKAAKGLIPPEILWKEKKAMQYGTGVQKVLDRLARDSGFSKKQESHIEKYLMQIASEKGFEFVNN

SEQ ID NO: 21256 - protein, 394 aa, Ipomoea batatas
MVDANHPKVVCVTGAAGFIGSWLVMTLLQRGYHVHATVRDPGNTKKVKHLLELPKADTNLTVWKGVMEEEGSFDEAIAGCEGVFHVATPMDFDSKDPENEVIKPAINGVLNIINSCVKAKTVKRLVFTSSAGTLNVQPQQKPVYDESCWSDLDFIYAKKMTGWMYFASKILAEKEAWKATKEKKIDFISIIPPLVVGPFITPTFPPSLITALSLITGNQAHYSIIKQGQYVHLDDLCEAHIFLYEHPKAEGRFICSSHHTTIHGLAEMIKQNWPEYYIPSEFKGIEKDLPVVYFSSKKLQDMGFQFKYSLEDMYRGAIETLRKKGLLPYSTKEPAAIEEEQETAPLKVQEPTKQEATTVPLKPAAIEQKQETVPLKFEEPTAIEQKQEVVPLKA

SEQ ID NO: 21257 - protein, 337 aa, Thermobifida fusca YX
MNVLLTGGAGYIGTHVAVELLENGHDVVVVDNLRNSHAEAVRRVERITGRSVHFYVGDCADRELMDRVFTEHRIDAAVHCAGLKAVGESVELPLLYYRNNLDALLTVCEAMDAHGVRSLVFSSSATVYGDPDRVPIPEDAPLRATNPYGATKLFAERILSDLVASAPDWRIITLRYFNPVGAHPSGLIGEDPEGVPNNLFPYIAQVAAGRRERVLVYGDDYATPDGTGVRDYLHVMDLARGHVAALERLGDAYGMRTYNLGSGHGVSVLEAIAAFERACGKTIPYEVVARRPGDIAVCYADPSAANRDLGWKTAYTLDEACAHLWRWQTMNPNGFAG

SEQ ID NO: 21258 - protein, 686 aa, Shewanella sp. ANA-3
MIRRSLFLKSHLTPHPIKAHSMIRHSLLFALVLTASSPLYALAQASHSPVSSTASLHLEPLSWWAGMHNPKLQLMLHSDALPTDAAQLKVEITGQDVLFEGIEQTDNPHYLFINLDLRQAKPQTFDIRILAGDKQLLQLPYTLATRAEGSRERQGFNNKDVIYLITPDRFANGNPSNDNQSDMLEHAAPDNSDGRHGGDIEGIRQHLDYLAKLGVTQLWINPLLENNQAQYSYHGYAMTNLYRVDPRFGSNQDYQRLVTEAKQHGLGVIKDVVLNHIGSNHWWLKDLPSSDWLNVPQQPNATDTQTAPAASSTSLSSTNLGFTSHRRTTVQDPYADMQDKRDFVDGWFVDSMPDLNQRNPKLATYLIQNSIWWVEYAGLSGIREDTYSYADKAFLTQWTKALMAEYPHFNIVGEEWTANPITVSYWQKGKINADGYSSDLPSLMDFPLYEKLLESLNEPEGWDTGFIKLYEMLANDVVYATPSQLVLFEGNHDTNRIYSLLKENLPLYQMALTYVLTAKRIPQLFYGTEVLMTSPTEGRHDGVVRSDFPGGFANNKVNGFSGKGLNAKQQQALAFVRTLLNYRKHSTALQTGDLLHFVPQNGIYVQFRCVAKQAAAGNACYQADTDKVMVIYNKNDQAQTLDLSRFSKVLAGNTSANSVLSGDKLKLNQSLVLPHAGVMLLELNHQ

SEQ ID NO: 21259 - protein, 176 aa, Sulfolobus tokodaii
MPLRPGRCYRHFSGPAYTRKEYIPGVPMPKITKFTMGNVNGNYDYELRLVALEKGQIRHNALEAARVLALKQLTNKTGSDQNFALIVLKYPHHVIRENKMMAFAGADRLQDGMRLSFGKPIGTAARIERLGDIIMIAKVKKEHLEIAKKAFEAAASKIPLKTKIDIVPIPKEAVVQ

SEQ ID NO: 21260 - protein, 544 aa, Mesorhizobium loti MAFF303099
MMADDNAGQGADWWRGCVIYQVYPRSFQDTTGDGSGDLRGITTRLGHIASLGVDAVWLSPFFKSPMADMGYDVSDYRDVDPMFGSLEDFDALVTEAHRLGLKVVIDQVLSHSSDKHEWFVQSRASRDNPKADWYVWADTKPDGNAPNNWLSVFGGPAWEWDSTRRQYYMHNFLASQPDLNFHNPEVQDALLDTVRFWLERGVDGFRLDTVNYYVHDRWLRSNPPLASSVAGTNGETNTYLYQEHLFDKTQPENLAFLRRFRGLLDEYPDRAAVGEIGDEGRSLQTLAAYTSGGDKLQMCYTFDLLGPQFSAAHVRGCVEAFEQAVTDGWVCWAFSNHDVVRHVSRWTGPDGDADAVARFSIMLLACLRGSICLYQGEELGLEEAELAYEDLRDPVGIRFWPGMKGRDGCRTPMVWEAGADNAGFSTARPWLPVPASHRARATDVQNGSEQSVLSAYRSTLALRRRHPALVSGSIRFLDAEGDVLAFIREGDGQRLLCVFNFAGEPGNWPLPPDIGVAAVLAGAAVVEEEALSLPALGCFLGRLD

SEQ ID NO: 21261 - protein, 426 aa, Caulobacter crescentus CB15
MTDKATLTIGDKSYELPILKGSTGPDVIDVRKIYGESDHFTFDPGFTSTASCESKITYIDGDAGILLHRGYPIDQLAEKSSFLEVCYLLLNGELPKADEFAKFEHNITYHTMLHAQFDRFFEGFRRDAHPMAVMTGAVGALSAFYSDSINVDDAREREISAHRLIAKMPTIAARAYKYTVGQPFVSPRNDLSYSENFLRMCFAVPAEDWKPNPVLTRAMDRIFILHADHEQNASTSTVRLAGSSGAHPFACIAAGIACLWGPSHGGANQEALEMLETIGSVDNIKDYVQGVKDRKYKLMGFGHRVYKNFDPRAKVMQKTAHEVLAELGHNNDPLLQVAQELEKVALNDPYFVDRKLYPNIDFYSGITLRAMGFPTNMFTVLFALARTVGWISQWKEMFEDPTRKIGRPRQLYTGATHRDYVTLDKR

SEQ ID NO: 21262 - protein, 537 aa, Thermobifida fusca YX
MPKILEFDESARRALERGVNRLADAVKVTLGPKGRNVVIDKKWGAPTITNDGVTVAREVELEDPYENLGAQLVKEVATKTNDAAGDGTTTATVLAQALVNEGLRSVAAGASPILLKRGIDAAAQAVSETLLSRAREIDERGDIAYVATNSAQDKQIGELIAEAFDKVGKDGVITVEESQTFGMDLEFTEGLQFDKGYISPYFVTDPDRQEAVLEDALILIHQGKISNLAELLPLLEKIVQTKKPLLIIAEDVEGDALGALVLNKMRGTLSVAAVKAPGFGERRKAMLQDIAILTGGQVIAEEVGLTLENAELDVLGKARRITVTKDTTTIVDGAGDQSEVNDRINQIRKEIEATDSDWDREKLQERLAKLAGGVCVLRVGAATEVELKERKHRLEDAISATRAAVEEGIIAGGGSALVHAAKTLEGDLGRTGDEATGVAIVRRALVAPARWIANNAGAEGNVVVSRIAELEPGHGYNAATGEYGDLVAQGIIDPVKVTRSAVQNAASIAGMLLTTEALVVEKPEEEENAEGGHGHSH

SEQ ID NO: 21263 - protein, 545 aa, Exiguobacterium sp. 255-15
MAKDILFSEEARRAMLRGVDALADAVKVTIGPKGRNVVLERKFGSPLITNDGVTIAKEIELEDHFENMGAKLVAEVASKTNEIAGDGTTTATVLAQAMIREGLKNVTAGANPMVIRKGIEKAVRRAVEELHAIAKPIEGKEAIAQVAAISAADEEVGQLIAEAMERVGQDGVITIEESRGFTTELDVVEGMQFDRGYASPYMITDSDKMEAVLENPYILITDKKISNIQEILPVLEQVVQQNKPLLIIAEDVEGEALATLVVNKLRGTFNAVAVKAPGFGDRRKAMLEDISIVTGAELITEELGLDLKETQITQLGRASKVVVSKDNTTIVEGNGHSDSITARVGAIRSQIEETTSDFDREKLQERLAKLAGGVAVVKVGAATETELKERKLRIEDALNATRAAVEEGIVAGGGTAFIHVTKAVESILAVTTGDEATGVNIVLRALEAPLRQIAENAGQEGSVIVERLKHEAQGMGYNAATDEYVDMIETGIVDPAKVTRSALQNAASVSAMFLTTEAVIADKPEPAGAPAMPDMGGMGGMGGMM

SEQ ID NO: 21264 - protein, 103 aa, Thermobifida fusca YX
MSTATKIVLKPLEDRVVVQPLEAEQTTASGLVIPDTAKEKPQEGKVLAVGPGRWDDEGSKRIPLDVKEGDIVLYSKYGGTEVKYDGEEYLVLSARDLLAVVEK

SEQ ID NO: 21265 - protein, 94 aa, Exiguobacterium sp. 255-15
MLKPLGDRIVIEVVKKEETTLGGIVLPGSAKEKPQEGKVVAVGTGRVTEQGVRVPLEVNVGDHVIYAQYAGSEVKVDGNEYLILRESDILAVAN

SEQ ID NO: 21266 - protein, 162 aa, Bradyrhizobium sp. BTAi1
MNISATARSLLLSEFVSAFFLAMRYFFQPKPTLNYPFEKGPISPRFRGEHALRRYPNGEERCIACKLCEAVCPAQAITIEAGPRRNDGTRRTVRYDIDMVKCIYCGLCQEACPVDAIVEGPNFEFATETREELYYDKAKLLANGDRWEREISKAIALDAPYR

SEQ ID NO: 21267 - protein, 180 aa, Rhizobium etli bv. phaseoli
EFDAFPTLEQLPLWGFDGSSTMQAEGRSSDCVLKPVAIYPDPARTNGVLVMCEVMMPDGVTPHPSNARATILDDEDAWFGFEQEYFFYQNGRPLGFPEQGYPAPQGPYYTGVGYSNVGDVAREIVEEHLDLCLAAGFNHEGINAEVAKGQWEFQIFGKGSKKAADQIWMARYLLQRLTEK

SEQ ID NO: 21268 - protein, 305 aa, Solibacter usitatus Ellin6076
MAPCWMDRARTLEKVAAWVERAADAGCGIVAFGEALVPGYPFWVELTDGARFNSPRQKEIFAEYAEQAVQPEAGHLDAVCAAAARRKIAVYLGCIERAVSRGGHSLYCSLVFIDANGKIGSVHRKMMPTYEERLVWSTGDGHGLQTHAVGAFHAGGLNCWENWMPLSRTALYAQGEDLHIAVWPGSTRNTRDITRFIAQESRSYVASVSGLMRRTDIGGDSEWRRAMSEAAPEVMADGGSCLAGPDGEWVIAPAGNEETLLTATIDFRRVLEERHNFDAAGHYARPDVTRLTVDRRRQGIAEFVE

SEQ ID NO: 21269 - protein, 267 aa, Bacillus licheniformis ATCC 14580
MFNLKKQPSDKLFVPFITAGDPLPEISIELAKSLQEAGASALELGVPYSDPLADGPVIQRASKRALDNDMNIVKAIRLGGEMKKNGVHIPIILFTYYNPVLQLDTDHFFALLRQNQLDGLLVPDLPFEESVYLQQQCKKHGITYISLVAPTSESRIQKITQQAEGFVYCVSSLGVTGVRNEFEDSVSSFIRSVKGMSSVPVAVGFGISSSKQVEMMNELADGVVVGSALVRKIEELKDELVAPETREQALKAFEAYAKTFSGSYMVK

SEQ ID NO: 21270 - protein, 199 aa, Ceratopteris pteridoides
RNGLLKKAHELSVLCDAEIALIIFSSTGKLFEHSSSRGIKKILERYKRCSGILQDVGGTVIRDVEYWKQEAERLKERLTYMEEIQRNMLGESLGSLQIKDLQNLEAKLDSGLYKIRGAKTQLMVRQVQELQKKEQILLQQNEALRTKLAELSRLQAPVSGLTTATTSQDVQESSSGSGSRQHETSLSAAETTLQLGFAQ

SEQ ID NO: 21271 - protein, 109 aa, Brassica napus
  misc_feature (14)..(14): Xaa can be any naturally occurring amino acid
  misc_feature (28)..(28): Xaa can be any naturally occurring amino acid
  misc_feature (47)..(47): Xaa can be any naturally occurring amino acid
  misc_feature (52)..(52): Xaa can be any naturally occurring amino acid
  misc_feature (69)..(69): Xaa can be any naturally occurring amino acid
  misc_feature (78)..(78): Xaa can be any naturally occurring amino acid
  misc_feature (89)..(89): Xaa can be any naturally occurring amino acid
  unsure (1)..(109): unsure at all Xaa locations
RHKVDMHSGCTYNXHSYVKGNTIEVDNXSWMSTVFYCYGEYLSLHFXHFNFXLAPVYMAFLHYMGDETXTWCYNYSLXVGGYGRKPIWXGTLRCVRYSHWKVRDSHDGL

SEQ ID NO: 21272 - protein, 328 aa, Pisum sativum
MSTSSINGFSLSSLSPAKTSTKRTTLRPFVSASLNTSSSSSSSTFPSLIQDKPVFASSSPIITPVLREEMGKGYDEAIEELQKLLREKTELKATAAEKVEQITAQLGTTSSSDGIPKSEASERIKTGFLHFKKEKYDKNPALYGELAKGQSPPFMVFACSDSRVCPSHVLDFQPGEAFVVRNVANLVPPYDQAKYAGTGAAIEYAVLHLKVSNIVVIGHSACGGIKGLLSFPFDGTYSTDFIEEWVKIGLPAKAKVKAQHGDAPFAELCTHCEKEAVNASLGNLLTYPFVREGLVNKTLALKGGYYDFVKGSFELWGLEFGLSSTFSV

SEQ ID NO: 21273 - protein, 283 aa, Vibrio vulnificus YJ016
MTNKKHTLFGECLAEFIGTGLLIFFGVGCVAALVLAGAQFGQWEISIVWGFGVSIAIYCTAGVSGAHINPAVTIALAAFHGFDKAKVVPYIIAQLLGAFCSAALVYTLYSNLFTDYEIAHNFVRSSQEALATAGIFSTYPHASLSFFGAFAVEFVITAVLMFAILALGDEHNGAPRGAMNPLLIGILIAVIGGSLGPLTGFAMNPARDFGPKLFAYFAGWDYALSGGRDIPYFIVPILAPIAGACFGGWLYPKAIAAYLPKVGSGCTIPNQCETEEEAKEARA

SEQ ID NO: 21274 - protein, 277 aa, Halobacterium sp. NRC-1
MRMAQDTQQRAAVVEEMPEFGLGTWENEDPSACADSVRTALEMGYRHIDTAQIYENEDAVGDGIAAADVDREDVFLATKVWTSELGDGDVAPATEQSLEKLGVDYVDLLYVHWPANQYDATETLAALADLQADGVTERIGVSNFEPRHLDEAEDVLGELPFANQVEFHPLLQQEELREYADGEDIELVAYSPLARGEVFDVPEIQAVAEKHGVSEAQVSLAWVRRKGVTAIPKATGEDHIADNWASLDLELDDEDVAKIDGIDRRERQVDPEFGPWN

SEQ ID NO: 21275 - protein, 494 aa, Pisum sativum
MDPYKHRPSSAFNSPFWTTNSGAPVWNNNSSLTVGSRGPILLEDYHLVEKLAQFDRERIPERVVHARGASAKGFFEVTHDISHLTCADFLRAPGVQTPVIVRFSTVIHERGSPETLRDPRGFAVKFYTREGNYDLVGNNFPVFFVHDGMNFPDMVHALKPNPQTHIQENWRILDFFYNFPESLHMFSFLFDDVGVPQDYRHMDGFGVNTYTLINKAGKSVYVKFHWKPTCGVKCLLEEEAIQVGGSNHSHATKDLYDSIAAGNYPEWKLYIQTIDPAHEDRFEFDPLDVTKTWPEDIIPLQPVGRMVLNKNIDNFFAENEQLAFCPAIMLPGIYYSDDKMLQTRVFSYADSQRHRLGPNYLQLPVNAPKWSHHNNHHEGFMNAIHRDEEVNYFPSRHDTVRHAERVPIPTTHLSARREKCNIPKQNHFKQAGERYRTWAPDRQERFLRRWVEALSDTDPRITHEIRSIWVSYWSQADRSLGQKLASHLNMRPSI

SEQ ID NO: 21276 - protein, 363 aa, Pisum sativum
MDRRFLFALFLFAAVATAVTDDTNNDDFIIRQVVDNEEDHLLNAEHHFTSFKSKFSKSYATKEEHDYRFGVFKSNLIKAKLHQNRDPTAEHGITKFSDLTASEFRRQFLGLKKRLRLPAHAQKAPILPTTNLPEDFDWREKGAVTPVKDQGSCGSCWAFSTTGALEGAHYLATGKLVSLSEQQLVDCDHVCDPEQAGSCDSGCNGGLMNNAFEYLLESGGVVQEKDYAYTGRDGSCKFDKSKVVASVSNFSVVTLDEDQIAANLVKNGPLAVAINAAWMQTYMSGVSCPYVCAKSRLDHGVLLVGFGKGAYAPIRLKEKPYWIIKNSWGQNWGEQGYYKICRGRNVCGVDSMVSTVAAAQSNH

SEQ ID NO: 21277 - protein, 403 aa, Streptococcus agalactiae NEM316
MKIFDKSMKLEHVAYDIRGPVLEEADRMRANGEKILRLNTGNPAAFGFEAPDEVIRDLITNARESEGYSDSKGIFSARKAVMQYYQLQNIHVDMDDIYIVNGVSEGISMSMQALLDNDDEVLVPMPDYPLWTACVSLAGGNAVHYICDEEANWYPDIDDIKSKITSKTKAIVLINPNNPTGAVYPREILQEIVDIARQNDLIIFSDEVYDRLVMDGMEHIPIASIAEDIFTVTLSGLSKSHRICGFRVGWMVLSGPRQHVKGYIEGLNMLANMRLCSNVLAQQVIQTSLGGQQSIDSMLLPGGRIYEQRNYIHKAINEIPGLSAVKPNAGLYLFPKIDTDMYRIDNDEEFVLNFLKQEKVLLTHGRGFNMNTADHFRIVYLPRVDELTELQEKMARFLSQYKR

SEQ ID NO: 21278 - protein, 482 aa, Thermoproteus tenax
MLGKYGVFPPTDPEFEDPPKLDKYDVIVVGGGGGGYHGAFQLSAGGYRVLMVDDKGNLGGNCLYEGCIPSKSVFYMVYLAERLRRLAKRSAGAAEVKAIWEEAVDHKDEVQYLRYLQHIREIKEHGNVDFVKGVARVLDGRRVEVTAVDGSWRKTVEGSRLLLATGSVAVRLPIPGAELAIGSEELFGYRTKRRTLPREVVVIGGGYIGVEVASAMASAGAKVTVVEMLPRIMSGWDSSIVSMIEGALKGRGVEILTNSRVTAIREESGQKVVEFQRPDGSKGTVAGEEVVMAVGRKPYVEGLEALGIVEKGRVVADSSMSTKAPGVYAAGDVLGKYMLYHAAVKESTVAAWNIMMGRPVYEVNFNAIPLTLFTEPEAAMVGISEDEARARGIPYVAVQYPLEDDSYAQIVGVREGWVKLIVERESQRIIGGSVYGEAASMIINEIALAVAVNARVRDLALLAHAHPTIFESIDRAAVRFSL

SEQ ID NO: 21279 - protein, 279 aa, Thermoproteus tenax
MGDGGALAHVAESLNISGAVMVVNGDVFTDADYRAVLDAHKRAGGVATMMLVEVSPESVSKYGIAVLDDSMRLIEFVEKPKEPPAGSRLANAGIYVFEPEVFKLIPRRRGEVKIAKDIIPELLRRGDIYAFIHRGIWHDIGTPADYLKANYAALDKWGSKEVDKPGIDITPPVYIGEGSIVEEGASLGPYVVLGQGAKVGRYARLKNSVLMRAATVEPGAYISGSIIGEETYIGRWARVLESVVADGVYIKDEVYVGRGSAIGPNREVVEDVPDGSMLP

SEQ ID NO: 21280 - protein, 312 aa, Triticum aestivum
  misc_feature (98)..(98): Xaa can be any naturally occurring amino acid
  misc_feature (115)..(115): Xaa can be any naturally occurring amino acid
  misc_feature (123)..(123): Xaa can be any naturally occurring amino acid
  misc_feature (126)..(126): Xaa can be any naturally occurring amino acid
  misc_feature (134)..(134): Xaa can be any naturally occurring amino acid
  misc_feature (144)..(144): Xaa can be any naturally occurring amino acid
  unsure (1)..(312): unsure at all Xaa locations
GRGRRQKGSLTGKTITLEVESSDTIDNVKAKIQDEEGIPPDQQRRILAGKQLEDGRTLAGYNIQKESTLHLVLRLRGSCGGMQILVKTLTGKTITLEXESSDTIDNVKAKIQDKXGIPPDQQXRFXFAGKQLEXARTLADYNIXQKESTLHLVLRLRGGMQIFVKTLTGKTITLEVESSDTIDNVKAKIQDKEGIPPDQQRLIFAGKQLEDGRTLADYNIQKESTLHLVLRLRGGMQIFVKTLTGKTITLEVESSDTIDNVKAKIQDKEGIPPDQQRLIFAGKQLEDGRTLADYNIQKESTLHLVLRLRGGQ

SEQ ID NO: 21281 - protein, 1068 aa, ASPERGILLUS NIDULANS FGSC A4
MSAHDEFEPSSPDFVPVHETVPLNRSTDLDASGAYKLNVNVLNRAIQEIGMGRYQWQLFGVVGFGWACDNLWPIVTSLILLPVTYEFDVSQPPILLLAQNIGLLLGALFWGFGCDIFGRRVAFNMTIGITAVFSLAAAAASSFAAVCILSALWSIGVGGNLPVDSAIFLEFLPGSHQYLLTVLSVNWALAQLLANLVAWPLVGGHTCSSADGCTRADNMGWRYFTAAMGGLALLMSITRYFLFTLLESPKFLMGKGEHYDAVAVVHEVAKRNGKTCNLTTDELHDCSDSGAGYRSGEYHRQGLSARDQLKLFLEPFSMTQIRSLFSTRRRGLATTLMIIIWGLIGIGFPLYNAFLPYLQHERGIEFGDGSTYLTYRNSLIIAVASIPGSLVGGVMVEMPQLGRKGTLTLATIMTGVCLLASTSASTSSALLGWNSAYGFSSSLVYAVLYAYTPEIFESRNRGTGNALVSASNRLGGILAPVVALMTDLQSTLPVYYGQREYNEPEVLITVQFRCCQMPALYLEARPTMAFAYDHDAEFWGALINPDKSPSPLLEQLCLGIAQLMTTFDNLPIADLTPARLAQFYRKVGGNYDVLFLETKPSALSFIYQRLGCFHSIQPSSDPYKPPSIPALQPHGFVRWQTIQLLLDPDEHVSYLQNAVERWDIFSPNGTLFPKTIPREAFPGGPDPEMIQWHETVSQKFEFDYWKKNLMDASPKSDPYNSKCAQKETPTPNKEEEFSQNHHPRASSHRYAVPAEAQTTRRHQRRQSADVPKTSHKSQTNLLHRSAEFVSGYTSPRAPSPPAWPKHASKSRGRERKSYSRPASPEYAHGHSASDASSEDSGTATQEPISPRYGHHRNLSPPHAPHARRHSHEAYSRRPHRELSPDSQRRYAYREAFNFSSNRPYDSDSGRGPRQPRVYIDEVRQSRTPGPSPSYAEPVFRESATVPTSPVYGHAHPLPIHPIHPRFVNVASSGPNPAYMVHQQMPMQVPPELDANVMDDPRRNGYRGSQTPNPSGSGSGVTYRRPRFASVGDFQPPGWSSHAVHGKGRPVPPGVLEAEYGRRSSMYDR

SEQ ID NO: 21282 - protein, 161 aa, Glycine max
IFEQACDLIDYVELAGQKVLVHCFEGESRSVTLVLANIMLSKKYTLSQAWQAFKLVRRRAQPNHGFAKILLELDQKLHGKVSMEWHQRIPVMKVCPICGNNAGLSSSSLKLHLQKSHRKLSSGSVDSAMTMEIQKALTALKISRGGSVSPTQRSSHPLIDQ

SEQ ID NO: 21283 - protein, 256 aa, Guillardia theta
MIVKELIENKSIEQEFDRKIHDILTISEIFVNQNFFNFLNSIKKKKVIFNVFYWTFGGNGVYITGDWDSWNKRIPLCKSGNEFFTIIPLTYGKFQYKFTVDGEWKFAPSTKIQEDKNGNLNNFIDIHDNFGSESIEQSFSDLEIENFNLGESILEKEFKNDPPSIPSHLISFVETKKKKISVNSHRNEFLNLYQNIRVFLNHLIFFDFKCKHNHRIKLPLIKIRIKNKFFTLIINEIKLIFNKICNKAKIILKNLL

SEQ ID NO: 21284 - protein, 193 aa, Ceratopteris pteridoides
RTGLLKKAYELSVLCDAEVAVIVFSSTGRLSEFATPSMPKMLEKYHRAIQRSQGNEHSLQNIEHWQHEAINLRKRIQLLQLRQSHLMGENLTCFQLKDLDILESRLSVTVEKIREEKMRRFHVHAEEMHKQECLLHQENTLLKLKIENVESMKHSAHVIDLLSDDDCMLESPKISQESGLKDSRFSLQLGLKP

SEQ ID NO: 21285 - protein, 658 aa, Xanthomonas campestris pv. vesicatoria str. 85-10
MGSEWGMENGESQQRLPEDVTLAENAFAIPDSRLPIPGTIGAYLQQHESKPLLRFITCGSVDDGKSTLIGRLLYDSKRLFDDQLAALESDSRRHGTQGGGIDYALLMDGLAAEREQGITIDVAYRYFDTDRRKFIVADCPGHEQYTRNMATGASTADVAVVLVDARKGLLTQTRRHSYIVSLLGIRHVVLAVNKMDLVDYDAQVFADIAEGYAALAAQLGIAQVQCIPLSALAGENLSSASTQMPWYGGPHLLQHLDTVQLESLDAGSGLRLPVQWVNRPNAQFRGYAGTIAAGQVRAGDAVVVVPSGRRTQVASVRDANGEVDSARAGQAVTLTLRDEIDISRGDIIAAVDDPPEVADQFAAHLLWMDDAALLPGRPYWLKIGTRTVTVSISEIKHKVDVNTQERLAAKRLELNEVGYCNLALDEPIAFSPYARNRVLGGFILIDRQSNATVAAGTLEFALRRAGNVHWQHLDVDRSARARIKGQAPRVLWFTGLSGAGKSTVANLVDKRLHALGYHTFILDGDNVRHGLNRDLGFTDEDRVENIRRVAEVARLMADAGLIVLVSFISPFRAERQLARERFDQGEFVEVFVDVPLAVAEARDVKGLYRKARAGQIPNFTGIDSPYEAPQNPEIHLHADGENVEALAHHVLEYLGLER

SEQ ID NO: 21286 - protein, 220 aa, Ceratopteris richardii
MGRGKIEMKRIENRTTRQVTFCKRRAGLVKKARELSVLCDADVALIVFSSSGRLFEYAGSRSMREIIQAYVDAHEDSSSLLQLRSEEACVSQDLRAELTELRKEVESLRQEKRRKDGDIHDLKLLSADELDSLEGEVETSLCSIRKRQKQLYREKMNETFRKEEELRKENEKLRKQVEELQCARWEICCAQGFEASATSMCTSHGMTSERSDSFLDLRLN

SEQ ID NO: 21287 - protein, 180 aa, Rhizobium etli bv. phaseoli
EFDAFPTLEQLPLWGFDGSSTMQAEGRSSDCVLKPVAIYPDPARTNGVLVMCEVMMPDGVTPHPSNARATILDDEDAWFGFEQEYFFYQNGRPLGFPEQGYPAPQGPYYTGVGYSNVGDVAREIVEEHLDLCLAAGINHEGINAEVAKGQWEFQIFGKGSKKAADQIWMARYLLQRLTEK

SEQ ID NO: 21288 - protein, 237 aa, Flaveria bidentis
MEFDEHDEQEEEVGIQLTPGSFDAVGNSGRRKSGGGGGGGGYRYKECLKNHAVGIGGQAVDGCGEFMAAGDEGTLDALKCAACNCHRNFHRKEVEGQQRQHQHQQQAALQHQYITATPYYHHHHRPTGYLHMKPPPSSLHQRQLALPSTSRDDLDEISNPSSSGGGGVGGSGSKKRFRTKFTQDQKDRMLAFSEALGWRIQKHDEAAVQQFCNETGVKRHVLKVWMHNNKHTIGKKP

SEQ ID NO: 21289 - protein, 578 aa, Lycopersicon esculentum
MVEHDFHQQTQSLVKLVVLVCLLFLSASISVEARIRHYQWEVKYEYKSPDCFKKPSISINGKTPGPTIVAQQGDTVVVEVKNSLLTENLAIHWHGIRQIGTPWADGTEGVTQCPIVPGDTFIYKFVVDRAGTYLYHAHYGMQRQAGLQGMMRVSLPDGVLEPFSYDHDRSILLTDWYHKSTYEQATGLASLPFSWVGEPQSILIHGRGRFNCSIPTIDPTLCNATNPQCTPYSMTVVPGKTYRLRIGSLTALSALSFEIEGHNMTVVEADGHYVEPFVVKNLFIYSGETYSVLIKADQDPTRNYWASTKVVSRNNTTPNGLGIFNYYPNHPRRYPPTVPPSGPRWDDVAPRMAQSVAIKSHRDFIHAPPLTSDRVIVMLNTQNRVNGYVRWSVNNVSFNMPHTPYLIALKHNLLHAFEQTPPPDNYDQKNYDIFNIAPNVNATTSNSIYRLKFNTTVDIILQNANTMNLNNSETHPWHLHGHDFWVMGYGNGKFNQSIDPKNYNFVNPIMKNTIPVHPYGWTALRFRADNPGVWAFHCHIESHFFMGMGVVFEEGIEKVGKLPTSIMGCGESKRFHRP

SEQ ID NO: 21290 - protein, 531 aa, Oryza sativa
MADQELKQFQEEVEAVKQWWKNPRFANTTRPYTAEQVVSKRGTLKQTYPSNTQAQKLWKTLEGHASKGTTSHTYGALDPVQVTQMAKHLETVYVSGWQCSSTASSTNEPGPDLADYPYNTVPLKVEHLFMAQLFHDRKQHEERTNLSPEQRAKTPVVDYLRPIVADADTGHGGLTAVMKLTKLFVEKGAAGIHIEDQAPGTKKCGHMAGKVLVPIQEHINRLVAIRLQYDIMGVENLVVARTDSEAATLITTNVDERDHAFILGTTNTSLEPLVDILNRAEAEGADGPKLIALEDEWLAKAQPVRYGDAVAAELEKKGKKAEAEQFRKEVLGTSLLKAKAKAKSLGVEIGFDWDACRTREGYYRYQGGTDCAINRAIAFGPYADLLWMETKSPIPAQAKEFAEGVKAARPHQWLAYNLSPSFNWDAAKLSTEQMKSYVWDLGKLGFVWQFITLGGLHSNAYISDLFAAGFAKEGMKAYVELVQRKEREIGCDVLTHQKWSGANFVDACLNTVLKAASTSAMGKGVTETQFK

SEQ ID NO: 21291 - protein, 135 aa, Brassica napus
MKYVVVSGGVVSGLGKGVTASSIGLILKSCGFRVTAIKIDPYLNIDAGTMSPIEHGEVFVLDDGGEVDLDLGNYERFMDIKLTSENNITTGKVYKHVLEKERKGDYLGKTVQVVPHITDAIQEWIERAARIPVDG

SEQ ID NO: 21292 - protein, 324 aa, Frankia sp. EAN1pec
MRAIRLHAFGPAENLVCEDVPDLLPAEGQVRIDVQASGVHLIETRLRRGVGVGPHLPPELPTTLGGEVAGVVGAVGSGVGTGWLGRRVVAQLGAGGGYAEQAVASADSVHVLPEHLDAETAVAVVTNGATAQGVLGVANLTTDDVVLVMSAAGGLGSLFVQAAHHAGVTVVGVAGGDARAARARELGADVAVDYQDADWPALVREALDGRAVSVVLDGVGGVLGRQALELLGPGGRFLMYGWAAGEPTAITTRDLVERELTATWAIGPNATPSGGWRELAARALEEAAAGRLVPLMTRFLLERAADAHSALEAREAEGKVVLTI

SEQ ID NO: 21293 - protein, 421 aa, Pseudomonas syringae pv. phaseolicola 1448A
MTESVLDYMTRLGRAAREASRVIGRASTAQKNRALQATAAALDEARAELSAANALDLANGQANGLEPAMLERLALTPARIDSMIVGLRQVAGLADPVGAIRDMSYRPSGIQVGKMRVPLGVVGIIYESRPNVTIDAASLCLKSGNATILRGGSEAIHSNRAIAACIERGLAEARLPAAVVQVVETTDRAAVGALITMPEYVDVIVPRGGKGLIERVSRDARVPVIKHLDGICHVYVSAHADLAKAQKIAFNAKTYRYGICGAMETLLVDQTIAADFLPAMAAQFREKGVELRGCERTRDLIDVIPATEDDWHTEYLAAILSIRVVSGLDEAIEHINHYGSHHSDAIVSDHQSQIRRFMAEVDSSSVMVNAPTSFADGFEYGLGAEIGISTDKLHARGPVGLEGLTCEKYIVIGDGQLRGQA

SEQ ID NO: 21294 - protein, 315 aa, Schizosaccharomyces pombe
RARRIDGYKSVVNSYYDLATDLYEYGWSQSFHFSRFYKGEAFAQSIARHEHYLAYRMGIKPGSRVLDVGCGVGGPAREITEFTGCNLVGLNNNDYQISRCNNYAVKRNLDKKQVFVKGDFMHMPFEDNTFDYVYAIEATVHAPSLEGVYGEIFRVLKPGGVFGVYEWVMSDDYDSSIPKHREIAYNIEVGDGIPQMVRKCDAVEAIKKVGFNLLEEDDLTDHDNPDLPWYYPLTGDITKCQNIWDVFTVFRTSRLGKLVTRYSVQFLEKIGVAAKGTSKVGDTLAIAQKGLIEGGETHLFTPMFLMIAKKPETDA

SEQ ID NO: 21295 - protein, 303 aa, Guillardia theta
MDNYKRIEILGQGAYGKVYKAQDLRNGNLVALKKALSSSDEEGIPPTTLREISILKSVSECEFIVKLLDVVNTKSKNGKISIYIVFQYLDSDLKSYMISNYGKGRGMDENSAKKFCFQLLIGMYHCHKLGIIHRDLKPQNILIEKGEKLKIADFGLSRNFSIPVGKYTHEVVTLWYRAPEILLGARTYSSPVDIWSIGCIFAEMLTGNPLFCGESEIEQLLSIFKTIGTPTSQTWPEVLNFKDWHEFPIWPQINLKYSFENISEETLEFIQVFLRLNPNKRISILGAITNTYFEHFFKDYNLY

SEQ ID NO: 21296 - protein, 295 aa, Frankia sp. EAN1pec
MSTRTHITLNNGVEMPALGLGVFQTPPEETRSAVETALSAGYRHIDTAAAYGNERQVGEAVLKSGVDRTDVFLETKIWISDYGYDQTLHGFEKSARKLGVDQIDLLILHQALPSEFDRTLEAYRALEALLADGKVRAIGVSNFMVEHLTALLERASVVPAVNQIEVHPYFTQREVQAIDTKHGILTQAWSPIGGITFYRAGSHGSTLRDPAIGEIAQAHGRTPAQVMLRWHLQQGRSAIPKSTRPERIAENFDVFDFELTDKQLAVIDGLDTGRRGGPEPSDITLATFSKAIPEA

SEQ ID NO: 21297 - protein, 509 aa, Arabidopsis thaliana
MSGSVSGCGSGGCSIVWFRRDLRVEDNPALAAAVRAGPVIALFVWAPEEEGHYHPGRVSRWWLKNSLAQLDSSLRSLGTCLITKRSTDSVASLLDVVKSTGASQIFFNHLYDPLSLVRDHRAKDVLTAQGIAVRSFNADLLYEPWEVTDELGRPFSMFAAFWERCLSMPYDPESPLLPPKKIISGDVSKCVADPLVFEDDSEKGSNALLARAWSPGWSNGDKALTTFINGPLLEYSKNRRKADSATTSFLSPHLHFGEVSVRKVFHLVRIKQVAWANEGNEAGEESVNLFLKSIGLREYSRYISFNHPYSHERPLLGHLKFFPWAVDENYFKAWRQGRTGYPLVDAGMRELWATGWLHDRIRVVVSSFFVKVLQLPWRWGMKYFWDTLLDADLESDALGWQYITGTLPDSREFDRIDNPQFEGYKFDPNGEYVRRWLPELSRLPTDWIHHPWNAPESVLQAAGIELGSNYPLPIVGLDEAKARLHEALSQMWQLEAASRAAIENGSEEG

SEQ ID NO: 21298 - protein, 260 aa, Exiguobacterium sp. 255-15
MMRLEQAIRTVNARGEKAFIPYVMGGDGGIDRLPDILAFLERSGATAIEVGVPFSDPVADGPVIQEAGLRALADNISLKDVLEAIRIARQSTGVPIVVMTYLNPIFRFGIDTFLSTCREVGVDGLIIPDLPLEQSDQFFAGRNKQDIALVQLVSLTSPMERIEKLAAHSEGFLYAVTVNGTTGGQTNFGDSLEQHLAKVAQLSPVPVMAGFGISTPEHVRQLSTSVAGVIVGSKIVELLQQGDEATIEQLMAARLPDVTV

SEQ ID NO: 21299 - protein, 356 aa, Vitis vinifera
MALLSDLINLNLSETTEKVIVEYIWVGGSGMDLRSKARTLSGPVSDPAKLPKWNYDGSSTGQAPGEDSEVILYPQAIFKDPFRRGNNILVMCDTYTPAGEPIPTNKRCNAAKIFSHPDVAAEVPWYGIEQEYTLLQKEVKWPIGWPVGGFPGPQGPYYCGIGADKAWGRDIVDAHYKACLYAGINISGINGEVMPGQWEYQVGPSVGISAGDELWVSRYILERITEIAGVVLSFDPKPIQGDWNGAGAHTNYSTKSMRNDGGFEVIKKAIEKLGLRHKEHIAAYGEGNERRLTGRHETADINTFLWGVANRGASIRVGRDTEKAGKGYFEDRRPASNMDPYVVTSMIAETTILWKP

SEQ ID NO: 21300 - protein, 574 aa, Legionella pneumophila subsp. pneumophila str. Philadelphia 1
MLDFSLNRDPQTGELYIETSLCGKPLLTTPQLNKGTAFTQEERKDFGLLGKLPHRVETLDEQVKRAYLQYSSYTTRLQQHIYLNNLHDKNQIVFYKLLSRHLGEMLPIIYTPIVGAAAKRFSHEYRQPRGLYIAHSDKNQLEEIINNRSNPDIDLVVVTDGEGVLGIGDQGIGGMDIPVAKLMVYSLCGGIDPTRTLPIFLDVGTNNQELLNDPMYLGCRHPRIKSSEYDDFIKTFVNEIHKQFPNAFLHWEDFGRGNARRILDQFQDELCTFNDDIQGTGAVTLAAILAACDVTGLPLHEHRIVVFGAGSAGTGISDQIVDAMVKSGLSLTDAYDRFWLIDKQGLLLATDQELTDAQKPYARNPIDIQSWEINNKQHPSFTDTIRHVKPTILIGCSAQTGAFSQDIVETMSTSCERPIIFPLSNPDEKCEAQPSDILAWSKGRALIATGTAFAPIEYQNRMVQIAQCNNALVFPGIGLGVLAVSASRLTKDMILAAAQTLSKFAPSKKDSFLPLLPSLDNAQIVAKEIAIAVAQCAIDSGYAQKNQDKELPRLIDELFWEPRYLPFRKKGWSE

SEQ ID NO: 21301 - protein, 356 aa, Vitis vinifera
MALLSDLINLNLSDVTEKIIAEYIWIGGSGMDLRSKARTLSGPVSDPHKLPKWNYDGSSTGQAPGEDSEVILYPQAIFKDPFRRGNNILVMCDTYTPAGEPIPTNKRHNAAKIFSHPEVLAEETWYGIEQEYTLLQNSVKWPIGWPVGGYPGPQGPYYCGIGADKAFGRDIVDSHYKACLYAGINISGINGEVMPGQWEFQVGPAVGISAGDELWVARYILERITEIAGVVVSFDPKPIQGDWNGAGAHTNYSTKSMRNDGGYEIIKKAIEKLGLRHKEHIAAYGEGNERRLTGRHETADINTFLWGVANRGASIRVGRDTEKEGKGYFEDRRPASNMDPYVVTSMIAESTILWKP

SEQ ID NO: 21302 - protein, 1435 aa, Arabidopsis thaliana
MGVVAEVWRSSVRLLTNSPQLNGGSHKSALWKWRFFSAQPKRTVMWTWVCGFMLFSLGVISLFTGHVVSHLEWYSQQLSKRSLLDMSRREPIDVWKSKYSKFFYGCSERGRNFLPAVQEQSSNGYLLIAASGGLNQQRTGITDAVVVARILNATLVVPELDHHSYWKDDSDFSDIFDVNWFISSLAKDVTIVKRVPDRVMRAMEKPPYTTRVPRKSTLEYYLDQVLPILTRRHVLQLTKFDYRLANDLDEDMQKLRCRVNYHALRFTKRIQSVGMKVVKRMRKMAKRFIAVHLRFEPDMLAFSGCDFGGGEKERAELAEIRKRWDTLPDLDPLEERKRGKCPLTPHEVGLMLRALGFTNDTYIYVASGEIYGGEKTLKPLRELFPNFYTKEMLANDELKPLLPYSSRLAAIDYIVSDESDVFITNNNGNMAKILAGRRRYMGHKRTIRPNAKKLSALFMDREKMEWQTFAKKVKSCQRGFMGDPDEFKPGRGEFHEYPQSCICQRPFSYDKTSTDDEEEDMSEENHNSTSPGHCEKLHLGFNQNTLQTSRPTKRNHQHTKRLTFQHVGIAALYSRCLVYDWNMGKIFSWLVVLLSLISLVPVPSESAVLSVDLGSEWVKVAVVNLKRGQSPISVAINEMSKRKSPALVAFQSGDRLLGEEAAGITARYPNKVYSQLRDMVGKPFKHVKDFIDSVYLPFDIVEDSRGAVGIKIDDGSTVYSVEELLAMILGYASNLAEFHAKIPVKDMVVSVPPYFGQAERRGLIQASQLAGVNVLSLVNEHSGAALQYGIDKDFANGSRHVIFYDMGSSSTYAALVYYSAYSEKEYGKTVSVNQFQVKDVRWDLGLGGQSMEMRLVEHFADEFNKQLGNGVDVRKFPKAMAKLKKQVKRTKEILSANTAAPISVESLHDDRDFRSTITREKFEELCKDLWERSLTPLKDVLKHSGLKIDDISAVELIGGATRVPKLQSTIQEFIGKQQLDKHLDADEAIVLGSALHAANLSDGIKLKRRLGIVDGSPYGFLVELEGPNVKKDESTKQQLVPRMKKLPSKMFRSFVLDKDFDVSLAYESEGILPPGTTSPVFAQYSVSGLADASEKYSSRNLSAPIKANLHFSLSRSGILSLDRGDAVIEITEWVDVPKKNVTIDSNTTTSTGNATDENSQENKEDLQTDAENSTASNTTAEEPAVASLGTEKKLKKRTFRIPLKVVVEKTVGPGAPFSKESLAEAKIKLEALDKKDRERRRTAELKNNLESYIYATKEKVQDWLYMDGEDANATEFEKRLDSLKAIGSPISFRSEELTARPVAIEYARKYLTELKEIIKEWETNKTWLPKEKIDEVSKEAEKVKSWLDKNVAEQEKETKYQTCHRTSLWSKPVFTSTEVYAKVFTLQDKVTKVNKIPKPKPKIEKVTKTENTTKEEEQSKSSDEAAKEEESHDEL

SEQ ID NO: 21303 - protein, 541 aa, Yarrowia lipolytica
MSEQQRFNNEVEEIKKWWSSPRWKHTKRVYSPEDIASRRGTIKVPQASSQQADKLFKLLQEHEKNHTASFTYASLDPVQVTQMAKYLDSIYVSGWQCSSTASTSNESSPDLGGYPMDTVPNKVEHLWFAQLFHERKQNEERLSLPESEPIQAPRARVDYLRPIIADAETGHGGLTAVVKLTKMFIERGAAGIHIEDQAPGTKKCGHMAGKVLVPIQEHINRLIAIRASADIFALNLLAIARTDSEAATLITSSIDYRDHYFIAGATNKDAGHLVDVMVAAEARGQAGAPLQAVEDEWNRKAGVKLFHEAFADEVNDGSYSNKAELIAEFNKKVTPLSNTPDIEDRYLAARLLGKDIYFNWEAARVREGYYRYQGGTQCAVNRGYSYAPYADLIWMESKLPDYAQAKEFAEGVKNAVPHQWLAYNLSPSFNWTTAMSPEDQETYISRLAKLGYVWQFITLAGLHTNALISDKSCKAYSERGMKAYGGEIQQPEIDQGCEVVKHQKWSGAEYIDGILRMVTGGITSTAAMGAGVTEDQFKSKL

SEQ ID NO: 21304 - protein, 599 aa, Kineococcus radiotolerans SRS30216
MRSSCEPPLVQPATTGNLTDCVVETARQEPRRVSVSRKGADGQWRDTTAEEFLAEVTAIAKGLLAAGIAPGDRIGIMGRTSYEWTLFDVAGWFAGAVTVPVYETSSPEQIEWILADSGCVACVVETTENAGRVATVRERLPRLRDVWTLESGAVEELRTAGRDIADAEVERSRTLAGPDDPMTIIYTSGTTGRPKGCLLTHGNFLDLARNADAAIPEVLRRPGAATLLFIPLAHVFARFIQALCLVSRIRMGHTADAKDLLGDLAGFRPTFILAVPRVFQKVYNGAEQRAASGGKVKARIFEQAARTADAWSRSLDTGGPSLPLKLRHRLFDRLVYSKLRALMGGRVEYAVSGGAPMGEHLAHFFRGTGLVVLEGYGLTETAAPLTVTRPSRLRIGTVGPPLPGTDITIAEDGEVLARGVGVFREYLGRPRETEEAFLDGWFRTGDLGSLDEDGNLRITGRKKEIIVTANGKNVVPANLEDRLRAHPLISQAVVVGDGRHFVGCLLTLDEEALPSWGANHGKAGLDLPTARTDADVLAELQRAVDKANASVSRAESIRRFRVLTEDFTVENGYLTPSMKVKRSEVLTDLADEVEALYTS

SEQ ID NO: 21305 - protein, 373 aa, Zea mays
  misc_feature (161)..(161): Xaa can be any naturally occurring amino acid
  misc_feature (177)..(177): Xaa can be any naturally occurring amino acid
  misc_feature (191)..(191): Xaa can be any naturally occurring amino acid
  unsure (1)..(373): unsure at all Xaa locations
MCGILAVLGCSDWSQAKRARILACSRRLKHRGPDWSGLYQHEGNFLAQQRLAVVSPLSGDQPLFNEDRTVVVVANGEIYNHKNVRKQFTGTHNFSTGSDCEVIIPLYEKYGENFVDMLDGVFAFVLYDTRDRTYVAARDAIGVNPLYIGWGSDGSVWIASXEMKALNEDCVRFEIFXPPGHLYSSAGGGFXRWYTPHWFQEQVPRTPYQPLVLREAFEKAVIKRLMTDVPFGVLLSGGLDSSLVASVTKRHLVETEAAEKFGTELHSFVVGLEGSPDLKAAREVADYLGTIHHEFHFTVQDGIDAIEEVIYHDETYDVTTIRASTPMFLMARKIKSLGVKMVLSGEGSDELLGGYLYFHFAPNKEEFHRETCR

SEQ ID NO: 21306 - protein, 334 aa, Xanthomonas campestris pv. vesicatoria str. 85-10
MSIEQLAETAQAMVAPGKGIIAIDESTSTIAKRFASVGIENIEENRRAYRELLLTTPKLSDYISGAILFDETIRQKTKDGVPFAEYMTAHGIIPGIKVDKGAQPLAGMPGELVTEGLDGLRTRLEEYYTLGARFAKWRAVINIGEDIPSGTCIEANSHALARYAALCQEQGLVPMVEPEVIMDGSHDIETCYEVTEATLRSLFGALYEQNVVLEGTILKASMVISGKSCEEQASIEEVAESTVMCLKSTVPAILPGIVFLSGGQTDEQSTAHLNEMHQLGNLPWPLSFSYGRAMQQAALKLWAKDMTGNFAKAQQVIYERAKENGLAALGKWKG

SEQ ID NO: 21307 - protein, 442 aa, Arabidopsis thaliana
MLKIKRVPTVVSNYQKDDGAEDPVGCGRNCLGACCLNGARLPLYACKNLVKSGEKLVISHEAIEPPVAFLESLVLGEWEDRFQRGLFRYDVTACETKVIPGKYGFVAQLNEGRHLKKRPTEFRVDKVLQSFDGSKFNFTKVGQEELLFQFEAGEDAQVQFFPCMPIDPENSPSVVAINVSPIEYGHVLLIPRVLDCLPQRIDHKSLLLAVHMAAEAANPYFRLGYNSLGAFATINHLHFQAYYLAMPFPLEKAPTKKITTTVSGVKISELLSYPVRSLLFEGGSSMQELSDTVSDCCVCLQNNNIPFNILISDCGRQIFLMPQCYAEKQALGEVSPEVLETQVNPAVWEISGHMVLKRKEDYEGASEDNAWRLLAEASLSEERFKEVTALAFEAISCSNQEEDLEGTIVHQQNSSGNVNQKSNRTHGGPITNGTAAECLVLQ

SEQ ID NO: 21308 - protein, 488 aa, Xanthomonas campestris pv. vesicatoria str. 85-10
MKERQRRTKILATLGPATDAPGVLDTLFKAGVNVVRLNFSHGDPSGQAKRAAEVRAAAARVGAEVGILADLPGPKIRIERFAEGKIKLTMGDRFDLVADANAPAGDQTQVGVSYLGLPQDVTAGDVLLLDDGLMQLQVTDVQGERIVTKVLNDGVLSDRKGLNKQGGGLSLGALTERDKELIGIVAKIGVDFIAVSFCRNAQDMHDARQIAQQHGCDAQLVSKIERTEAIENLVEIVEASDVVMVARGDLGVEIGDAELPGLQKKIIRESLAQNKVVITATQMLQSMVESPIPTRAEVLDVANAVIDGTDAVMLSAETAAGAYPVRAVEAMARICLGAEHQFEFDTDFEAAQRNLQRADQAIAMATMFLSEHIGLGGVVALTESGGTPRFLSRFRSNMPIYAFTRHDGARRQMAMMRGVFPISFDSRGLTPREAARAAIRLLVENERMGPGDRVVFTSGEHMETHGATNTLRLLEVGEDGRATGLGEL

SEQ ID NO: 21309 - protein, 339 aa, Vibrio vulnificus YJ016
MNVLVTGGMGYIGSHTCVQMMAAGMEPIIVDNLCNAKVDVLSRIEALTGKQPTFYQGDIRDEAFLDSVFAQHDIQAVIHFAGLKAVGESVAKPLEYYDNNVNGSLVLARCMRKAGVKSIVFSSSATVYGDPQVVPITEDSPTGATTNPYGRSKYMVEQCLSDLFHAENDGSITLLRYFNPVGAHPSGSMGEDPQGIPNNLMPFIAQVAVGRREKLSVFGNDYPTPDGTGVRDYIHVMDLADGHIAALKSVGKTSGLHIYNLGTGKGSSVLEMVEAFAAACGKPVPYELCPRRPGDIAECWASTEKAERELGWKATRTVAEMTTDTWNWQSNNPNGYSPA

SEQ ID NO: 21310 - protein, 359 aa, Legionella pneumophila subsp. pneumophila str. Philadelphia 1
MLRSKKLFQGIAKHIGDTMQDDEEPIKDKEFKEEEWSEPDDESLLSEEDVEPDIEKMEEELDELPEFTDDETFPSFQRGKNIAKALDATQLYLGEIGFSPLLTAEEEIHYATLALKGDMEARKKMIESNLRLVVKIARRYLNRGLPLLDLIEEGNLGLMKSVEKFDPKRGFRFSTYATWWIRQTIERAIMNQTRTIRLPIHVVKELNVYLRAARQLTQKLDHEPSPEEIAEMVDKPLEDVQKLLGLNDKVASVDTPIGFDETKSLLDTIADENSLNPAELLTNENLRQHIESLLDKLTENQQQVIARRFGLRGFEKATLEDVGKEIDLTRERVRQIQVEALKTLRTLLERVGLTQEDLF

SEQ ID NO: 21311 - protein, 542 aa, Yarrowia lipolytica
MIYTANSSPSTNLQWLSTLNTDDIPTKNYRKSSIIGTIGPNTNSAEMISKLRQAGLNIVRMNFSHGSYEYHQSVIENARESEQRFRGRPLAIALDTKGPEIRTGVTKDDKDWDVKAGHVMLFSTNPKYKDQCDDKIMYIDYTNIVKQIDIGKIIFVDDGVLSFKVLEKIDGETLKVETLNNGKISSRKGVNLPGTDVDLPALSEKDKADLKFGVEHGVDMIFASFVRTANDVQAIRDVLGEKGKGIQVISKIENQQGVNNFDEILKETDGVMVARGDLGIEIPAPQVFIAQKQLIAKCNLAGKPVICATQMLDSMTYNPRPTRAEVSDVGNAVLDGADCVMLSGETAKGTYPIESVKMMHETCLVAEKAIAYAPLFNEMRTLTVRPTETVETIAISAVSASFEQQARAIIVLSTSGTSARLCSKYRPNCPILMVTRNAQAARFSHLYRGVYPFIYHKARASNPAEWQHDVEERLKWGMDEAVALGILNKGDVVVAIQGWTGGLATPTLSEFSSVSKLFNTNLLDYKTYSMVIKSVNGGVLYK

SEQ ID NO: 21312 - protein, 441 aa, Yersinia pseudotuberculosis IP 32953
MSEINPNPLFRQINPPARLLMGPGPINADPRVLRAMSSQLIGQYDPAMTDYMNQVMALYRGVFRTENRWTMLIDGTSRAGIEAVLLSAIRPGDKVLIPVFGRFGYLLCEIARRCRAEVHIIEVPWGEVFSPDRIEDAIKHIRPRLLLTVQGDTSTTMLQPLAELGDICRRHQVLFYTDATASLGGNPLETDAWGLDAVSAGLQKCLGGPSGSSPITLSPQFAEQIRRRKCIEQGIRTSDHADGDEEMIYSNYFDLGMIMDYWGPERLNHHTEATSMLFAARECARVILEEGLDHGIARHALHGSALLAGIQGMGLSVFGDIKHRMNNVLGVVIPKGIPGEQVRQLLLNDFGIEIGTSFGPLNGKIWRIGTMGYNARKDCVMQTLVALEAVLNRLGFTTVQGAGLQAAWDVYQVDSAHQVDSTHQADSAQRNSDHAQLNGAN

SEQ ID NO: 21313 - protein, 652 aa, Mycobacterium tuberculosis
MVESGTGIPLPASCWSRTRSRRCMPKDSSPHWIWHSSAARAALYVRGKRRPDGQGRRSCALRNRGRTPATGPGPGQSPSPVGARQPALPSRRPLNPARSRTEVVMSDARVPRIPAALSAPSLNRGVGFTHAQRRRLGLTGRLPSAVLTLDQQAERVWHQLQSLATELGRNLLLEQLHYRHEVLYFKVLADHLPELMPVVYTPTVGEAIQRFSDEYRGQRGLFLSIDEPDEIEEAFNTLGLGPEDVDLIVCTDAEAILGIGDWGVGGIQIAVGKLALYTAGGGVDPRRCLAVSLDVGTDNEQLLADPFYLGNRHARRRGREYDEFVSRYIETAQRLFPRAILHFEDFGPANARKILDTYGTDYCVFNDDMQGTGAVVLAAVYSGLKVTGIPLRDQTIVVFGAGTAGMGIADQIRDAMVADGATLEQAVSQIWPIDRPGLLFDDMDDLRDFQVPYAKNRHQLGVAVGDRVGLSDAIKIASPTILLGCSTVYGAFTKEVVEAMTASCKHPMIFPLSNPTSRMEAIPADVLAWSNGRALLATGSPVAPVEFDETTYVIGQANNVLAFPGIGLGVIVAGARLITRRMLHAAAKAIAHQANPTNPGDSLLPDVQNLRAISTTVAEAVYRAAVQDGVASRTHDDVRQAIVDTMWLPAYD

SEQ ID NO: 21314 - protein, 479 aa, Schizosaccharomyces pombe
MSDLRFLDLVKPFAPFLPEIAAPERKVPFKQKMLWTGVTLLIFLVMSQVPLYGIVSSDSSDPLLWLRMILAANRGTLMELGISPIVTSSMLVQLLVGSQLIEVNMELKSDREMYQLVQKFLAIIIAFGQATAYVLTGMYGRPQDLGAGICLLLILQLAAASLIVLLLDELLQKGYGLGSGISLFIATINCENIFWKAFSPTTYHIANGVQFEGAVINFVYVMFTWDNKAAALYQAFFRSGLTSSQIQLPNLWNFFATLLVFGVVIYLQDFRVEIPIRSQKFRGYRSTFPVKLLYTSNTPIMLQSALTSNLFFASRLLFNRFSSNFLVRFLGVWEQTATSGLSYYLSPPASFQDALIDPIHTLVYVFFTMFACALFSKLWIEVSGASPRDVAKQLKSQQLVMAGHREGSMYKELKRIIPTAAWLSGAVVGALAVASDLLGALGSGTAVLLCTTTIYGYYEQLQKEIKGDQYGLPVTPMMQ

SEQ ID NO: 21315 - protein, 311 aa, Micromonospora echinospora
MESAAVPPTRPSLVLTGHQEGVIGAVFHPDDHLVATSGEDGTVRLWDATTGEQVGRTLTGHTDTVWLVVFDPEGRLLASASEDRTARIWDVSTGEQVGEPLTGHTAGVYGVAFHPDGGLLATGSADHTVRLWKVPGGEPVGEPLTESTDEIDGVAFHPDGHLVASTGDAVRLYDTATGRPVGTPLVGHTKGAVSVAFSPDGRLLASGSDDLTVRIWDHAAGGAAVEPLVGHTDAVDGVVFHPNGRLLVSAAEDCTVRVWDVATGRQVGEVETGHTAPVWNIAFDRSGERIVTASQDGTARILPFPAYPAAG

SEQ ID NO: 21316 - protein, 301 aa, Bordetella parapertussis 12822
MQHTKVLITGGGGFLGAWVAKRLLARGLPVRIMDIADDRRVVRGLLGDAADRLEWVVGDVSQAADVEAALSGCQQVVHLAGLLTPSCQLDPVKGAQVNLLGTLHVFEAAKRQGLRHVVYTSSVSVFGPDNGLQPEPSTHYGAFKLATEGCARTYWEYDGISSVGLRPGVVYGPGREVGLSAGPTLACRAAVRGEPYTVGYQGDTCLVYADDVAAAYEQALIARAPGAQVFNVSGRPTPMADILDAIRRHCPDARLGAEGPVLPFTADIPDEALYRAFPALPRTPLDVGIGQTLAHYRPAQA

SEQ ID NO: 21317 - protein, 165 aa, Brassica napus
HNKEDFVGCGFGFGVVEPSHREVMIPSPSYISPSSYSGSAGVTDPVFSASLAAADPFYTLSSSGEMGRSMSEKEGAAAFSESQWQELERQRNIYEYIMASLPVPPELLTPFPKHPSHTYHQDVAMAKGGSLKLGITSNASNNAADMEPWRCKRTDGKKWRCSRSA

SEQ ID NO: 21318 - protein, 449 aa, Pseudomonas syringae pv. phaseolicola 1448A
MTLSASQPVPGTLDVQAFINAQPLSGYQWRVVALCFLIVFLDGLDTAAMGFIAPALSQDWGIDRASLGPVMSAALIGMVFGALGSGPLADRFGRKVVLVFAVFLFGLFSLASAYSSNIDQLLVLRLLTGLGLGAAMPNATTLLSEYTPERLKSLLVTSMFCGFNLGMACGGFVSAKLIPSMGWHSLLMLGGILPLILAVVLMVWLPESARFLVVRNRGAERIRKVLAPIAPNALAGITDFSVPEQKTVSSRNVLKVIFSGTYSAGTLLLWLTYFMGLVIVYLLTSWLPTLMRDSGASMEQSAFIGALFQFGGVLSAVGVGWAMDRYNPHKVIGLAYALAGVFAWLVGQSLGNVALLATLVLLAGMCINGAQSAMPSLAARFYPTQGRATGVSWMLGIGRFGAILGAWAGATLLGLGWSFEQVLTALVVPAALAAIAVLIKGWVSHSDAT

SEQ ID NO: 21319 - protein, 970 aa, Zea mays
MASTKAPGPGEKHHSIDAQLRQLVPGKVSEDDKLIEYDALLVDRFLNILQDLHGPSLREFVQECYEVSADYEGKGDTTKLGELGAKLTGLAPADAILVASSILHMLNLANLAEEVQIAHRRRNSKLKKGGFADEGSATTESDIEETLKRLVSEVGKSPEEVFEALKNQTVDLVFTAHPTQSARRSLLQKNARIRNCLTQLNAKDITDDDKQELDEALQREIQAAFRTDEIRRAQPTPQDEMRYGMSYIHETVWKGVPKFLRRVDTALKNIGINERLPYNVSLIRFSSWMGGDRDGNPRVTPEVTRDVCLLARMMAANLYIDQIEELMFELSMWRCNDELRVRAEELHSSSGSKVTKYYIEFWKQIPPNEPYRVILGHVRDKLYNTRERARHLLASGVSEISAESSFTSIEEFLEPLELCYKSLCDCGDKAIADGSLLDLLRQVFTFGLSLVKLDIRQESERHTDVIDAITTHLGIGSYREWPEDKRQEWLLSELRGKRPLLPPDLPQTDEIADVIGAFHVLAELPPDSFGPYIISMATAPSDVLAVELLQRECGVRQPLPVVPLFERLADLQSAPASVERLFSVDWYMDRIKGKQQVMVGYSDSGKDAGRLSAAWQLYRAQEEMAQVAKRYGVKLTLFHGRGGTVGRGGGPTHLAILSQPPDTINGSIRVTVQGEVIEFCFGEEHLCFQTLQRFTAATLEHGMHPPVSPKPEWRKLMDEMAVVATEEYRSVVVKEPRFVEYFRSATPETEYGRMNIGSRPAKRRPGGGITTLRAIPWIFSWTQTRFHLPVWLGVGAAFKFAIDKDVRNFQVLKEMYNEWPFFRVTLDLLEMVFAKGDPGIAGLYDELLVAEELKPFGKQLRDKYVETQQLLLQIAGHKDILEGDPFLKQGLVLRNPYITTLNVFQAYTLKRIRDPNFKVTPQPPLSKEFADENKPAGLVKLNPASEYPPGLEDTLILTMKGIAAGMQNTG

SEQ ID NO: 21320 - protein, 198 aa, Shigella boydii
LRLVVKIARRYGNRGLALLDLIEEGNLGLIRAVEKFDPERGFRFSTYATWWIRQTIERAIMNQTRTIRLPIHIVKELNVYLRTARELSHKLDHEPSAEEIAEQLDKPVDDVSRMLRLNERITSVDTPLGGDSEKALLDILADEKENGPEDTTQDDDMKQSIVKWLFELNAKQREVLARRFGLLGYEAATLEDVGREIG

SEQ ID NO: 21321 - protein, 63 aa, Pleurochrysis carterae
MRGILVDWLVEVHLKFKLMIETLYLTVNLIDRYLEKEKITRNKLQLVGVTAMFLASKYEEIYP

SEQ ID NO: 21322 - protein, 967 aa, Arabidopsis thaliana
HASAHASDFLRKKIMGFCFSKFGKSQTHEIPISSSSDSSPPHHYQPLPKPTVSQGQTSNPTSNPQPKPKPAPPPPPSTSSGSQIGPILNRPMIDLSALYDLHKELGRGQFGITYKCTDKSNGREYACKSISKRKLIRRKDIEDVRREVMILQHLTGQPNIVEFRGAYEDKDNLHLVMELCSGGELFDRIIKKGSYSEKEAANIFRQIVNVVHVCHFMGVVHRDLKPENFLLVSNEEDSPIKATDFGLSVFIEEGKVYRDIVGSAYYVAPEVLHRNYGKEIDVWSAGVMLYILLSGVPPFWGETEKTIFEAILEGKLDLETSPWPTISESAKDLIRKMLIRDPKKRITAAEALEHPWMTDTKISDKPINSAVLVRMKQFRAMNKLKKLALKVIAENLSEEEIKGLKQTFKNMDTDESGTITFDELRNGLHRLGSKLTESEIKQLMEAADVDKSGTIDYIEFVTATMHRHRLEKEENLIEAFKYFDKDRSGFITRDELKHSMTEYGMGDDATIDEVINDVDTDNRSQTKILKLTSDDDALNLAAAEFLVNHRQISSASSGIPNLVACSPTEIIIPRVNNAGLRIEEIVDAAKGKIRLDSWISSRINGVSRARVQSSIRLGLVTVNGRVVDKVLTSKFDSSKKFQFCNQVSISLTLFQVSHNVKSGDEVNCTISELQPLKAEAEDIPLDIVYEDKHVLVVNKPAHMVVHPAPGNPTGTLVNGILHHCSLPCVDYSNSEEDDDSDEETFSDDEEMTTSPSSYAASVRPGIVHRLDKGTTGLLVVAKDEHSHAHLAEQFKLHTIERVYVSLTTGVPSPPQGRIEIPIGRDSSNRIRMAAIPGGVRGGRARHAASRYKVIETFAGGGSALVEWRLETGRTHQIRAHAKYMGVPLLGDEVYGGTKSMALSLLQKRVSRSDQEEIIELISRMDRPCLHAIVLGFTHPCTGEIVKFSCPPPSDLAEIVGLLRRSGL

SEQ ID NO: 21323 - protein, 192 aa, Escherichia albertii
VKIARRYGNRGLALLDLIEEGNLGLIRAVEKFDPERGFRFSTYATWWIRQTIERAIMNQTRTIRLPIHIVKELNVYLRTARELSHKLDHEPSAEEIAEQLDKPVDDVSRMLRLNERITSVDTPLGGDSEKALLDILADEKENGPEDTTQDDDMKQSIVKWLFELNAKQREVLARRFGLLGYEAATLEDVGRE

SEQ ID NO: 21324 - protein, 159 aa, Guillardia theta
MKINETNKESMIFKPKNISQKNLKNQNLKKTTDFNFGVVHIFASFNDTFIHVTDLSGSETLVRRTGGMEVKADRDESSPYAAMMAAQKVAEKCRELGINALHIKLRGKGGNSNKSPGPGAQSAIRALARSGIKIGRIEDVTPIPSDSTRRKGGRRGRRL

SEQ ID NO: 21325 - protein, 182 aa, Shigella boydii
IARRYGNRGLALLDLIEEGNLGLIRAVEKFDPERGFRFSTYATWWIRQTIERAIMNQTRTIRLPIHIVKELNVYLRTARELSHKLDHEPSAEEIAEQLDKPVDDVSRMLRLNERITSVDTPLGGDSEKALLDILADEKENGPEDTTQDDDMKQSIVKWLFELNAKQREVLARRFGLLGYEAA

SEQ ID NO: 21326 - protein, 102 aa, Crypthecodinium cohnii
MATGIAKRFTPLLDRVLVQRLKPEAKTASGLFLPESAAKAPNYATVLAVGPGGRTRDGDILPMNVKVGDKVVVPEYGGMTLKFEDEEFQVFRDADIMGILNE

SEQ ID NO: 21327 - protein, 556 aa, Emericella nidulans
MLEDPSYAEIVRWGDDGDSFVVLECEKFTKTILPKHFKHSNFASFVRQLNKYDFHKVRQNNEENGQSPYGQNAWEFKHPEFRANSKESLDNIRRKAPAPRKQAQAHDDSVPTQQIDLLNQQIVAQQQQIQHISDRYAQMSVDHQLMLQEVLRVQKTVVNHENVIHQLVNYLVSIDARQKRDNKAGSFQAQVGASPSQVTPMDDGVSTPLQQASKLLSDMNAEVQFNLVPVESMGEPPKTGVVSTPTMETAPRRMEPVVYPVGATNGIDPMYGEHVNNVPYTVPPKQDMDDRRQFPDNRKKSNHVDPGWMRSPRILLVEDDATCRQIGGKFLYSFSCEIDTALDGLEAVNKVQDGSKYDLILMDIIMPNLDGVSACHLIRQFDRTPIIAMTSNIRSDDIQALLPAWYAASVICSRMDDVLPKPFTRKSLLEMLEKHLVHLKTVPQGMEGHQATTPVTIAGQSSAAQSVTIKEDTSSPSQSPAAAMTAWQSPNQFQPMAAVPANLQQVQGQYVPANPATTAYAMDQEWYAISSTAYGSDGRCWARSKCDRSHVGTSLN

SEQ ID NO: 21328 - protein, 1011 aa, Thermosynechococcus elongatus BP-1
MTSVLDVTNRDRLIESESLAARTLQERLRLVEEVLVDVLAAESGQELVDLLRRLGALSSPEGHVLHAPEGELLKVIESLELNEAIRAARAFNLYFQIINIVEQHYEQQYNRERAAQEGLRRRSVMSEPISGVSGEGFPLPHTAANATDVRSGPSERLEHSLYEAIPATQQYGSFAWLFPRLQMLNVPPRHIQKLLDQLDIKLVFTAHPTEIVRQTIRDKQRRVARLLEQLDVLEGASPHLTDWNAQTLRAQLMEEIRLWWRTDELHQFKPEVLDEVEYTLHYFKEVIFAVIPKLYRRLEQSLHETFPALQPPRHRFCRFGSWVGGDRDGNPYVKPEVTWQTACYQRNLVLEEYIKSVERLINLLSLSLHWCDVLPDLLDSLEQDQRQLPSIYEQYAVRYRQEPYRLKLAYVLKRLQNTRDRNRALQTYCIRRNEAEELNNGQFYRHGEEFLAELLLIQRNLKETGLACRELDDLICQVEVFGFNLAALDIRQESTCHAEALNEITAYLGILPCPYTELSEAERTRWLLSELSTRRPLIPGELPFSDRTNEIIETFRMVRQLQQEFGTDLCNTYIISMSHEVSDLLEVLLFAKEAGLFDPATGASTLQAIPLFETVEDLKHAPAVLTQLFSLPFCRSYLGSNSTPFLQEVMLGYSDSNKDSGFLSSNWEIYKAQQQLQKIAESFGFQLRIFHGRGGSVGRGGGPAYAAILAQPAQTIKGRIKITEQGEVLASKYSLPELALFNLETVATAVIQASLLRSSIDEIEPWHEIMEELATRSRQCYRHLIYEQPEFIEFFNEVTPIQEISQLQISSRPTRRGGKKTLESLRAIPWVFSWTQTRFLLPAWYGVGTALKEFLEEKPAEHLSLLRYFYYKWPFFRMVISKVEMTLAKVDLEIARYYVQELSQPQNREAFCRLYDQIAQEYRLTTELVLTITGHERLLDGDPALQRSVQLRNRTIVPLGFLQVSLLKRLRQHNSQTTSGAILRSRYGRGELLRGALLTINGIAAGMRNTG

SEQ ID NO: 21329 - protein, 189 aa, Escherichia albertii
ARRYGNRGLALLDLIEEGNLGLIRAVEKFDPERGFRFSTYATWWIRQTIERAIMNQTRTIRLPIHIVKELNVYLRTARELSHKLDHEPSAEEIAEQLDKPVDDVSRMLRLNERITSVDTPLGGDSEKALLDILADEKENGPEDTTQDDDMKQSIVKWLFELNAKQREVLARRFGLLGYEAATLEDVGRE

SEQ ID NO: 21330 - protein, 193 aa, Escherichia coli
ESNLRLVVKIARRYGNRGLALLDLIEEGNLVLIRAVEKFDPERGFRFSTYATWWIRQTIERAIMNQTRTIRLPIHIVKELNVYLRTARELSHKLDHEPSAEEIAEQLDKPVDDVSRMLRLNERITSVDTPLGGDSEKALLDILADEKENGPEDTTQDDDMKQSIVKWLFELNAKQREVLARRFGLLGYEAATL

SEQ ID NO: 21331 - protein, 337 aa, Exiguobacterium sp. 255-15
MEKIEFKELVELGLTEQDAIQMFETMVRARKIDERMWKLNRAGKIPFLVSCQGQEAAQVGAAFALEKGTDYILPYYRDLGVVLHFGQTSRDIMLSAFAKAEDPNSGGRQMPGHYGSRALNIVTGSSPVTTQVPHAVGIALAAKMRREPLVAYVSFGEGSSNQGDFHEGANFAGIHKLPVILFCENNKYAISTPLSKQLSAKHVADRAIGYGMPGVTIDGIDPLAVYKAVKEARERGLRGDGPTLIEVEVERLVPHSSDDDDKSYRSAEELAELKTRDGVKLFREKLIQMGVLTEETAQELETKLEQEVDEATAYAEAAAYDAPENALRYVYDEGETK

SEQ ID NO: 21332 - protein, 289 aa, Arabidopsis thaliana
MAARNLEKMASIDAKLRLLAPGKVSEDDKLIEYDALLLDRFLDILQDLHGEDVREFVQECYEVAADYDGNRNTEKLEELGNMLTSLDPGDSIVVTKSFSNMLSLANLAEEVQIAYRRRIKKLKKGDFADEASATTESDIEETLKRLLQLNKTPEEVFDALKNQTVDLVLTAHPTQSVRRSLLQKFGRIRDCLTQLYAKDITPDDKQELDEALQREIQAAFRTDEIRRTPPTPQDEMRAGMSYFHETTLGKEVPKVLKDVVRTPALKEHRINSLGLHSLWGCGTRGTPKF

SEQ ID NO: 21333 - protein, 473 aa, Exiguobacterium sp. 255-15
MAREFDVVVLGGGPGGYVAAIRAAQAGKTVAIVEQGKLGGTCLHRGCIPSKAFLKSAAVYQTVKHAATYGVDVPESFLRFEQVKQRKQDIIDGLESGIQHLMKKGKIEVFHGRGSILGPSIFSPMPGTISVEPEEGDGELILPRQLIVATGSRPRPLNGLAFDSEYVLSSDEALDMNALPKSIVIIGGGVIGIEWASMLTDFDVEVTVVEFSDRILPTEDQAVSREVARQLKKRGVKIMTSAAAQSDSFQLTESGVTIDVDRNGDKTTLAADKLLVAIGRMANVEGIGLENTNIIVENGFIQVDDEFRTKDNHIFAIGDVIGRLQLAHVASAEGAKAVETIVNGSTTPLNYAFVPRCIYSVPEAASVGLTEAEAKAAGLDVKTGMFSFNGLGKARIEGEAAGFIKLVSDAKTDDLVGVHIVGPKATELISEGGLALVLNATAWEVGQLVHPHPALSEAFGEAALAVDGLAVHA

SEQ ID NO: 21334 - protein, 456 aa, Triticum aestivum
  misc_feature (28)..(28): Xaa can be any naturally occurring amino acid
  misc_feature (149)..(149): Xaa can be any naturally occurring amino acid
  unsure (1)..(456): unsure at all Xaa locations
PKPAAAARASRSPHHRPPLPLQGPPPSXQAAEECLGVHDIVFANRPQLPTGKILSYDWSTMGTASYGDYWRHIRRIGVTELLSVHRVQQYADVHTRMARSMARRLYRSAAGGRARVELKSRLFEMLMNVMTSMICARTYYGTYRWRGDXEVTDEVQWFRTMVEETMTLIGASTVWDYIPTLVRWLDIGGFGRRLWRLRESRTKFVQGLIEDERKKMEDGTTTGRTMIAALLSLQHKDPEDCPDQLIRACTSSALEAGSSTSADTVEWAMSLMLNNPKVMVKVRDEIDSYIGKPIRLIEASDLLKLQYFRCIIMETLRLHPPTPLLVPHESSIDCTVSGFYIPKGTMLLVNTSAIHRDPKIWDKPTNFIPERFEGEKCEGNMAMPFGMGRRRCPAENLGMQMVGLALGTMIQCFEWERVGEELVDMTDGFGLTAPRAVPLEAFYKPRQSMVTLLSEI

SEQ ID NO: 21335 - protein, 381 aa, Oryza sativa (japonica cultivar-group)
MARHRHRLAAAAALLLLLLSSAAALSSSAAEGEEDPLIEQVVGGGEEEDAQLDAEAHFASFERRFGRTYRDAGERAYRMSVFAANLRRARRHQRLDPTATHGVTKFSDLTPGEFRDRFLGLRRPSLEGLVGGEPHEAPILPTDGLPDDFDWREHGAVGPVKDQGSCGSCWSFSTSGALEGAHFLATGKLEVLSEQQMVDCDHECDASESRACDSGCNGGLMTTAFSYLMKSGGLQSEKDYPYAGRENTCKFDKSKIVAQVKNFSVISVNEDQIAANLVKHGPLAIAINAAYMQTYIGGVSCPFICGRHLDHGVLLVGYGSAGYAPIRFKEKPYWIIKNSWGENWGEKGYYKICRGPHDKNKCGVDSMVSSVTAIHTSKKEE

SEQ ID NO: 21336 - protein, 333 aa, Xanthomonas campestris pv. vesicatoria str. 85-10
MAIKVGINGFGRIGRNVLRSAAQNFANDIEIVAINDLLEPDYLAYMLQYDSVHGRFKADVSVDGNTLIVNGKKIRLTQERDPANLKWDAVGADVVIESTGLFLTKETAQKHIDAGAKKVILSAPSKDDTPMFVYGVNDKTYKGEAIISNASCTTNCLAPLAKVINDKWGIKRGLMTTVHAATATQKTVDSPSNKDWRGGRGILENIIPSSTGAAKAVGVVIPELNKKLTGMSFRVPTSDVSVVDLTVELEKPATYAEICAEVKAQSEGALKGVLGYTEDKVVATDFRGETCTSVFDADAGIALDSTFVKLVSWYDNEWGYSNKCLEMVRVVAK

SEQ ID NO: 21337 - protein, 374 aa, Exiguobacterium sp. 255-15
MVETNVEARFSIFETMAMEDYEQVVFCHDKVSGLKAIIAIHDTTLGPALGGLRMWNYASDEEALIDALRLAKGMTYKNAAAGLNLGGGKAVIIGDAKTQKSEALFRAFGRYVQSLNGRYITAEDVNTTVADMDYIHMETDFVTGVSPAFGSSGNPSPVTAYGVYRGMKAAAKEVYGTDSLGGKTVAIQGVGNVAFNLCRHLHEEGAKLIVTDINQDALRRAEEAFGALVVGPDEIYSVDADIFAPCALGATLNDETIPQLKVKIIAGAANNQLKEDRHGDMLQERGILYTPDFVINAGGVINVADELDGYNRERAMKKVELVYDAVAKVIEIAKRDHLPTYRAAEKMAEERIATMGSARSQFLRRDKNILGSRG

SEQ ID NO: 21338 - protein, 546 aa, Burkholderia sp. 383
MAAKEIIFSDVARAKLTEGVNILANAVKVTLGPKGRNVVLERSFGAPVVTKDGVSVAKEIELADKLQNIGAQLVKEVASRTSDAAGDGTTTATVLAQAIVREGQKYVAAGLNPLDLKRGIDKAVAAAVDELKKISRPTTTSKEIAQVATISANGEESIGQRIAEAIDRVGKEGVITVEDGKSLADELDVVEGLQFDRGYLSPYFINNPDKQIAEIESPYILLHDKKISNIRDLLPVLEQVAKSGRPLLIIAEDVEGEALATLVVNNIRGILKTVAVKAPGFGDRRKALLEDIAILTGGQVIAEETGLTLEKATLAELGQAKRIEVGKENTTVIDGAGDAKNIEARVKQIRVQIDEATSDYDREKLQERVAKLAGGVAVIKVGGATEIEVKEKKDRVDDALHATRAAVEEGIVPGGGVALIRVRQAIRELQGVNADQNAGIKIVLRALEEPLRQIVTNAGEEASVVVAKVAEGSGNFGYNAQTGVYGDLVESGVLDPTKVTRTALQNAASVAGLLLTTDATVFEAPKDAAPTAAPGGPGAGGPGFDF

SEQ ID NO: 21339 - protein, 54 aa, Brassica napus
MGTATFIDILLAILLPPLGVFLRYGCGVEFWICLVLTLLGYLPGIIYALFVLTK

SEQ ID NO: 21340 - protein, 368 aa, Arabidopsis thaliana
MDPIKHISLPVLVLFLLLSVSAGQPGTPDQRHDPYAYSGSLSPAMAVVVVVVIAALFFMGFFTVYIRHCTGAVDGSVTPAGGARRRVTNATVARGLDVETIETFPTFVYSEVKTQKIGKGALECAICLNEFEDDETLRLLPKCDHVFHPHCIGAWLQGHVTCPVCRTNLAEQTPEPEVVVETDLEAQQQSAVPVPVVELPRVKFPRSHTTGHSVVLPGESTDRFTLRVPEELRKKIMANWKLNRSNSVFVLPRGGSSRSGKQVDRSRAKSDRWLFRKTPSFLWRNRDDGSIRLGGTGSVRGNSVTSPSGDSVRADRWAFLRNPSFLWRNTTPVPSPRVEVNNKDGEGTSSVQHIGTVGSTSGSLRLPV

SEQ ID NO: 21341 - protein, 243 aa, Triticum aestivum
FGTRESERLWLTGCGWRGEERTDMSGGAAAGAAAAVSRFIKCVAVGDGAVGKTCMLICYTCNKFPTDYIPTVFDNFSANVSVDGSIVNLGLWDTAGQEDYSRLRPLSYRGADVFILSFSLTSRASYENVHKKWMPELRRYAPGIPVLLVGTKLDLREDRAYLADHAADSIITTEQGEELRRQIGAVAYIECSSKTQRNIKAVFDTAIKAVLQPQRHKEVARKEIRTRSSRSVRRYFCGSVCLA

SEQ ID NO: 21342 - protein, 329 aa, Bacteroides thetaiotaomicron VPI-5482
MDKIIGLGNALIDVLATLKDDTLLDELELPKGSMQLIDDAKLQQINTKFSQMKTHLATGGSAGNAILGLACLGAGTGFIGKVGNDHYGDFFRKNLQKNNIEDNLLTSEQLPSGVASTFISQDGERTFGTYLGAAASLKAEDLTLEMFKGYAYLFIEGYLVQDHEMILHAIELAKEAGLQICLDMASYNIVENDLEFFSLLINKYVDIVFANEEEAKAFTGEEPEEALRVIAKKCSIAIVKVGANGSYIRKGTEEIKVSAIPVEKVLDTTGAGDYFAAGFLYGLTCGYSLEKCAKIGSILSGNVIQVIGTTISPERWDEIKLNINKVLAE

SEQ ID NO: 21343 - protein, 482 aa, Schizosaccharomyces pombe
MTTRRLTRQHLLANTLGNNDENHPSNHIARAKSSLHSSENSLVNGKKATVSSTNVPKKRHALDDVSNFHNKEGVPLASKNTNVRHTTASVSTRRALEEKSIIPATDDEPASKKRRQPSVFNSSVPSLPQHLSTKSHSVSTHGVDAFHKDQATIPKKLKKDVDERVVSKDIPKLHRDSVESPESQDWDDLDAEDWADPLMVSEYVVDIFEYLNELEIETMPSPTYMDRQKELAWKMRGILTDWLIEVHSRFRLLPETLFLAVNIIDRFLSLRVCSLNKLQLVGIAALFIASKYEEVMCPSVQNFVYMADGGYDEEEILQAERYILRVLEFNLAYPNPMNFLRRISKADFYDIQTRTVAKYLVEIGLLDHKLLPYPPSQQCAAAMYLAREMLGRGPWNRNLVHYSGYEEYQLISVVKKMINYLQKPVQHEAFFKKYASKKFMKASLFVRDWIKKNSIPLGDDADEDYTFHKQKRIQHDMKDEEW

SEQ ID NO: 21344 - protein, 766 aa, Triticum aestivum
MASHIVGYPRMGPKRELKFALESFWDGKSSAEDLEKVAADLRASIWKQMSEAGIKYIPSNTFSYYDQVLDTTAMLGAVPDRYSWTGGEIGHSTYFSMARGNATVPAMEMTKWFDTNYHFIVPELSPATKFSYASHKAVSEYKEAKALGVDTVPVLVGPVSYLLLSKAAKGVEKSFSLLSLLDSILPIYKEVVAELKAAGASWIQFDEPTLVKDLAVHELAAFSSAYAELESALSGLNVLIETYFADVPAESYKTLTSLSGVTAYGFDLVRGTKTLELIKSAGIPSGKYLFAGVVDGRNIWADDLAASLSTLQSLEAVVGKDKLVVSTSCSLMHTAVDLVNETKLDSEIKSWLAFAAQKVVEVNALGKALAGLKDEAYFAANAAAQASRRSSPRVNNEEVQKAAAALKGSDHRRATPVSARLDAQQKKLNLPILPTTTIGSFPQTMDLRRVRREYKAKKISEEEYVSAIKEEISKVVKIQEELDIDVLVHGEPERNDMVEYFGEQLSGFAFTANGWVQSYGSRCVKPPIIYGDVSRPNPMTVFWSKMAQDMTPRPMKGMLTGPVTILNWSFVRNDQPRFETCYQIALAIKKEVEDLEAGGIQVIQIDEAALREGLPLRKSEHAFYLDWAVHSFRITNCGVQDTTQIHTHMCYSNFNDIIHSIINMDADVITIENSRSDEKLLSVFREGVTYGAGIGPGVYDIHSPRIPSTEEIADRVNKMLAVLDTNILWVNPDCGLKTRKYTEVKPALTNMVAAAKLIRTQLASTK

SEQ ID NO: 21345 - protein, 237 aa, Arabidopsis thaliana
MSQETAIASFKKFQQSWIEQLRNHLNHLRSAQNHHRNSATGDEERLREAVDRVMEHFREYHRAKWAATDKDVIEVMASPWASALERSLQWVGGWRPTTLFHLVYTESSILFESRIVDILRGFRTGDLSDLSPSQFRTVSELQCETVKEENAITEELSEWQDDASDLVMGTSSDPDQRIRRLAEIVHRTDDLRLRTITRVVEVLSPLQQAEFLVAAAELRTGVAGWGTSHDRRRSSEV

SEQ ID NO: 21346 - protein, 321 aa, Bacteroides thetaiotaomicron VPI-5482
MIIAFICIVLIFNTMETISIHRPKIVVIGSCNTDMVVKANRLPVPGETILGGTFYMNPGGKGANQAIAAARLGAEVTFISKIGYDLFGLQALEIYRSEKINTEYIFTDQKSPSGVALISVDSFGENSIIVAPGASRSLSIEDINKAEEKIKEADIILMQLEIPIDTVEYAATIACKYGKKVILNPAPASSLSNSFLMNVHTILPNRIEAEMLSGIKVMNIESAHRAAQAIGEKGIENVVITLGKDGAYVKEKDEYTMIPAKEVETIDTTGAGDVFCGAFSVCLSEGHSLAKSVKFANAAAAIAVTRIGAQSAIPYKREVVL

SEQ ID NO: 21347 - protein, 162 aa, Frankia sp. EAN1pec
MRTPMQWTGGPNGGFSTAGPDRLVGPVVEGDFGPANVNVAAQQDDPGSLLSWFTAMIRAYRRCPEFAWGTCTVLDCADLPSVFAHRTDLNGQTVVAVHNLGREPAGIRLALAGVERGDRLVRLAGADGAGGDLVAGDGGAVELDLDGYGFRWLRVRRGGTDG

SEQ ID NO: 21348 - protein, 311 aa, Bacteroides thetaiotaomicron VPI-5482
MKVVVIGSSNIDMVAQVNHLPAPGETVGDASFMQSLGGKGANQAVAAARLGGSVTFITSLGNDMYAEILKKHFKKEGITTDYIIDDVNQPTGTALIFVADSGENCIAVAPGANYSLLPGSIIHFSKVIDEADIIVMQAEIPYETIKRIALLAKQKGKKVLFNPAPACLIDEELMKAIDILVVNELEAAFISGIEYTGNNLEEIALSLLQAGARNAVITLGSQGVYMKNDKEIIQLPGYKVNAIDTIAAGDTFCGALAVICAQREIDRDALSFANAAAAIAVTRSGAQPSIPTLDEVKHFMLEKELALSFNF

SEQ ID NO: 21349 - protein, 474 aa, Picrophilus torridus DSM 9790
MNMYSDVVEIAKRRGFFWPSFSIYGGFSGLYDYGPLGVLLKDNIINKWKKAYLDEGAIFIDTPNITPGEVFDASGHLSRFSDIAAECDSCKSKFKIENVLAFNKIEIIPKSVDEALSISEKNNLKCPVCGNIIKKIYNYNLMFRLENSNFYLRPETAQGIFVNFKLLSNYYRGKLPMAVAQLGKGFRNEISPRQSLIRLREFSQGEVEVFFDPENEYWKDLFDYDEITLKPNTGVEYKTSIKNAFENRIIDNIAMAYFILKTQKILNDIGFKNDNIRFRQHDPDERAHYASDSWDAEARIDDDWVEIVGIANRTNYDLKNHDAKSSERMSLKINNRDVIPNVIEPSYGIDRITLALMVQSYHKNEKGYNVLSFKPEMAPYHFAVLPLIKKENFIKKSMEIYNMIMSIDSYVYYDETGSIGKRYSRQDEIGTPFCITIDYETLENDSVTVRFRDTGNQERIDKKDLLDYLSGKLK

SEQ ID NO: 21350 - protein, 593 aa, Schizosaccharomyces pombe
MVKRHKNTIGVWRLGKTLGTGSTSCVRLAKHAKTGDLAAIKIIPIRYASIGMEILMMRLLRHPNILRLYDVWTDHQHMYLALEYVPDGELFHYIRKHGPLSEREAAHYLSQILDAVAHCHRFRFRHRDLKLENILIKVNEQQIKIADFGMATVEPNDSCLENYCGSLHYLAPEIVSHKPYRGAPADVWSCGVILYSLLSNKLPFGGQNTDVIYNKIRHGAYDLPSSISSAAQDLLHRMLDVNPSTRITIPEFFSHPFLMGCTSLSSMDSTTPPTPSLSIDEIDPLVVDCMCVLWKKSSSKKVVRRLQQRDDNDEKYVYKVLSEILRDDMLKKQRFDENKYLSLYDLIHDNNLFTKASISTTSLVKSNVSTNSRKSSNFEDELARRVSSPLSALNQMSQSPIPIRVSSDKDYDSYACHEVVSNPSTLDDDYNYMFVCPPEEYTYSTDNVRTDSLDLQSLPTPTLEQLESVPFNRYGYVRIFPSTTLSSTASGYYTPDSLSTPEPSIDGLTNLDDVQVGGFVQGSGNQNRRPISFPVISNMQPNITNVRSASAPLCSSPVPSRRYSQYATNIRYTPRKVSSGSVLRKISSFFRKD

SEQ ID NO: 21351 - protein, 385 aa, Brassica juncea
MASSSPQHSHIIEVNIAKPDEQRTALGASKACGEAPCGFSDLNNASGDAHERNASMRKLCIAVVLCLLFMTVEVFGGIKANSLAILTDAAHLLSDVAAFAISLFSLWAAGWEATPRQTYGFFRIEILGALVSIQLIWLLTGILVYEAIIRLLTETTEVNGFLMFLVAAFGLLVNIIMAVLLGHDHGHGHGHDHHNHGGVTVTTRHHHDHGHTHGEDKHHHAHGDVTEKLLDKSKPDKEKRKRNINVQGAYLHVLGDSIQSVGVMIGGAVIWCNPEWKIVDLICTLVFSVIVLGTTINMIRSILEVLMESTPREIDATKLEEGLVEMEEVVAVHELHIWAITVGKVLLACHVNIRPEADADMVLNKVIDYIRREYNISHVTIQIER

SEQ ID NO: 21352 - protein, 805 aa, Candida albicans SC5314
MSHLVSSSLGTTTTATPTSRSPHTNHSTPYNQNSITSNRSSPVPKNSVNSRIIPQTMNPPIDMKSNNILNPEKDTDTSRGDHSESKASSISSASGTTTTNNNNVSNNNSTGKTQIVFIHKLYDMLHDESISHLIWWSPSLDSFYVTPGEEFSRVLSQYFKHTNIASFIRQLNMYGFHKVNEPFLNQDDQQQQQQLQSNRWEFRHSTNQFRKGDTESLKNIKRRSSKTLNAQKEVVNIKSLPPTSHPMEYNTGYSYQNEDSAHYFVHHHSITTMQSPADMRPRSPSTPIPMQPLAQQQQQQQQQQQQQQQQLPSQPVPNGPPVFSGPIPPGAVNQSPQEYLTRPSILNNVQGSFENATNFKFVELTNQINLLRNDFFTMNNRYEILQNELKYQTADSMAVLEILEKLSNDNRIATDIRDLKNVVSQRMQRLNNQFIPQQSNFAPHIPGQQQQQQHGNSVSSNYHLESTNVSRNPSTTNLNVAPQPYPLNPHYTIYANNRASGSSEINNGVFRAREDSNNSKRNLSVYDPLQPVPSRNSSRILIEESTPTHPPTNFNPQQSQSQSQVQLGPAMPPQGFRNRAESTYSPLSHSSNKSQILNKAPTPVNHSPLVQQQQKEAKQELNDSSVAPPSQSSLPVTRPLSRQQQQQQQTLHHPSTTSSRTNSLPNPVAEHPAPQSSYFMQRNSFNTIYEHQKSLRVPSPKRVRYATPPRSIPEQPISSTAPTTMITSTSKTTSTSGAAISRSENHSVVSLTGGALPSVSELDKSIRTGSSVSLPPIKSIKDNDNKNDNGNSDDNGNDHKKRKLE

SEQ ID NO: 21353 - protein, 248 aa, Oryza sativa (japonica cultivar-group)
MEDETISIDEMLVRGEEEGNLFASEFWTEKRNGNGCKKMDQLLAACTGVEEVVVALIGLFFSDWAFGPLGQTNWILALIMLVGSQEDGSNDITVKFDLSRVFSAKAGIHSREILPSSRSFLRRFANRLRRWPLPHAPRRTPSLKTLAHRASLFTSPANAPAPAKEHGCYERGYAARRASAAGTMRAGVGWLTPWLDERPKGYLFKQLLPPAGEFHKWVDWELPCNLTIVILGIRLNAKPNLTLQTWPH

SEQ ID NO: 21354 - protein, 192 aa, Glycine max
MFRNGSSILARSARAIKVTQTARALSILAAPKALPARSTFALGNAGSIRTLKTLDFGGSKEDVVERTDYPKEKLAQIFAKDTMAVIGYGVQGRAQSLNMKDNGLNVIVGVREDGESWKLAQQDGWVPGKNLFPIAKAAEKGSVIMYLLSDAAQKSSWNEVKPYVTKGKTLYFSHGFSVVYKERTGVVPPKDV

SEQ ID NO: 21355 - protein, 487 aa, Allium cepa
MSIESITDASKSDHYVLVPFMAQGHMIPMLDIAQLLANRGARVSFITTPVNATRIKPLLDDRKSNNEFINVVELTFPCKEFGLPEGCENIDLITSVDHYKPFFHAAISLVEPFKLYIREATPTVTCIISDYSSFFTAEVGQSLNIPRIIFHGPSCLYIHGTHSIRIHNSFDGVAEFDSIAVPDLPKKIEMNKLQAWGWFSDPGWEDFRAKAAEAEASSFGVVMNTCYELESEIIDRYERLIKKRVWPIGPLCLYGNHIGLKGDRGKKSSVDEAQLLNWLDSKEAKSVLYVSFGSLVQTKTSQLIEIGLGLENSKVPFIWVIKEIERTVEFEKWISTERFEERTKGRGIVITGWAPQVVILSHGSVGGFVTHCGWNSVLEAVSAGVPMLTWPHFVDQFFNEKLIVEVIETGVAVGVNKPYHYLLEDEVAVKSEVMSKAVLQLMDKGEEGEERRRRAKQYGDKGRKAMDEGGSSWMNLSLFMDFMSRSV

SEQ ID NO: 21356 - protein, 364 aa, Rubrivivax gelatinosus PM1
MEIQVKETLIRNLWYVAGTSDEFAPGQLVGQTIVGLPLVLWRPEAGGEVVAFDGRCCHKRMPLAAGKLLADGTLECAYHGLCFDSAGKCVKIPSQPGRAIPSRAKLRPYPIVEQDGMVWIWMGDDANPALRPPRIPELASPEWEAIRVQNAEVPTNYLLLIENLLDISHFYPLHDGNIGDIANSEIPVEFSHEGVQGNRSVTSVRKAESYRHPPYLEDFFGYELVDRHHSHSMISPAAIRVDLRCAPPGRLETEDERGYILTHLITPIDERHHRWRVIAACRAGHRWPADPSVSTVARVAEKFPGVIAQDLWALTEQQKMLDLADTHYLGEMHLRADTGILKAREIVRDMVAAEAQPASQAVAA

SEQ ID NO: 21357 - protein, 487 aa, Allium cepa
MSIKSKTEASKADHYVLVPLMAQGHMIPMLDIARLLANRGAWVSFITTPVNATRIKPLLDDRKSNNEFINVVELTFPCKEFGLPLGCENVDLITSVDQYKPFFHAAISLFEPLKLYIREATPTVTCIISDYSCFFTAEVGQSLNIPRIIFHGPSCLFIHGTHSIRIHNSFDGVAEFDSIAVPDLPKKIEMNKQQAWGCFSDPGWEDFQAKAAEAEASSFGVVMNTCYELESEIINRYEKLIKKRVWPIGPLCLYGNHTGLKGDRGKKSSVDEAQLLNWLDSKEAKSVLYISFGSLVRTKTSQLIEIGLGLENSKVPFIWVIKEIERTVEFEKWISTERFEEKTKGRGFVITGWAPQVVILSHGSVGGFVTHCGWNSVLEAVSAGVPMLTWPHFADQFFNEKLIVEVIETGVAVGVNKPYFYLLEDEVAVKSEVISKAVLQLMDKGEEGEERRRRAKQYGDKGRKAMDDGGSSWMNLRLFMDFMSPKV

SEQ ID NO: 21358 - protein, 479 aa, Allium cepa
MNSNHHPLHVIIFPFLAQGHIIPTIDLCKLFASHGVKVTVLTTKGNLSRFHSPLTRANELSTFLHPIQISLIPFPSVSGLPENCENMATVPPHLKSLFFDAVAMLQQPFRAFLKETNPDCVVAGLFLAWIHNVASELNIPSLDFHGSNFSSKCMSHTVEHHNLLDNSTAETVLLPNLPHKIEMRRALIPDFRKVAPSVFQLLIKQKEAEKLSYGLIINSFYELEPGYVDYFRNVVGRKAWHVGPLLLNDKNVNTFDRGSKSAIDEASCLSWLGKKSAGSVLYVCFGSASFFTTRQLREIAVGLEGSGHAFIWVVRDDGDEQWMPEGCEERIEGRGLIIKGWAPQMMILNHEAVGGYLTHCGWNSSLEGICVGLPFVTWPLFAEQPYNERLIVDVLKVGVAVGVKEYSFDPEERTVIEAGSIETAVKKLMGDDEEAEERRRRAKELAAMARKAVEEGGSSYELMSDLIRELEGLRDRRNK

SEQ ID NO: 21359 - protein, 216 aa, Guillardia theta
MEKVSRSKLENALKSILNSSKIQKRKFNESIELQIGIKNYDPKKEKRLSGTITLPFVPKENIKIAILGDSTHIEQAKRFKIDAYDVDDLKRFNKQKKPIKKFAKQYNSFLASESIIRSIPRILGPGLNKAGKFPGLLSNSDDLLEKIKQMKSTIKIEIKKVLCIGLLIGNCDMKINEIVENLSITINFLISLLKKNWQNVKSLFVKSTMGKPVRIY

SEQ ID NO: 21360 - protein, 475 aa, Shewanella sp. ANA-3
MSNEIKTQVVVLGAGPAGYSAAFRAADLGLETVIVERFSTLGGVCLNVGCIPSKALLHVAKVIEEAKAVAAHGVVFGEPTIDLDKLRSFKQKVISQLTGGLGGMSKMRKVNVVNGFGKFTGPNSLEVTAEDGTVTVVKFDQAIIAAGSRPIKLPFIPHEDPRIWDSTDALELKEVPGKLLVMGGGIIGLEMGTVYSSLGSEIDVVEMFDQVIPAADKDVVRVFTKQIKKKFNLILETKVTAVEAREDGIYVSMEGKSAPTEPVRYDAVLVAIGRTPNGKLIDAEKAGVKIDERGFINVDKQLRTNVPHIYAIGDIVGQPMLAHKGVHEGHVAAEVIAGMKHYFDPKVIPSIAYTDPEVAWVGLTEKEAKEQGIAYETATFPWAASGRAIASDCSEGMTKLIFDKDTHRVIGGAIVGVNGGELLGEIGLAIEMGCDAEDLALTIHAHPTLHESVGLAAEIYEGSITDLPNPKAKKK

SEQ ID NO: 21361 - protein, 771 aa, Hordeum vulgare subsp. vulgare
MVAAAILPELATQLVVPVAAAVGIAFAVLQWVLVSKVKVAPEPRAEGGSASAVGAKDGATEYLIEEEEGLNDHNVVLKCAEIQTAISEGQTSFLFTEYKYAGGFMTIFAVLIFVFLGSIEGFSTKSQPCHYSVGKTCKPALANAAFSTIAFVLGAVTSLVSGFLGMKIATYANARTTLEARKGVGKAFITAFRSGAVMGFLLAASGLFVLYVAINLFGLYYGDDWEGLFEAITGYGLGGSSMALFGRVGGGIYTKAADVGADLVGKVERNIPEDDPRNPAVIADNVGDNVGDIAGMGSDLFGSYAESSCAALVVASISSFGINHEFTPMMYPLLISSVGIIACLITTLFATDFFEVKEVDQIEPALKRQLIISTAVMTIGIALVSWLGLPYTFTIFNFGAQKTVHSWQLFLCVAVGLWAGLVIGFITEYYTSNAYSPVQDVADSCRTGAATNVIFGLALGYKSVIIPIFAIAFSIFLSFSLAAMYGVAVAALGMLSTIATGLAIDAYGPISDNAGGIAEMAGMSHRIRERTDALDAAGNTTAAIGKGFAIGSAALVSLALFGAFVSRAGITTVDVLTPNVFIGLLVGAMLPYWFSAMTMKSVGSAALKMVEEVRRQFNTIPGLMEGTAKPDYATCVKISTDASIKEMIPPGALVMLTPLIVGTLFGVETLSGVLAGALVSGVQIAISASNTGGAWDNAKKYIEAGASEHAKSLGPKGSDCHKAAVIGDTIGDPLKDTSGPSLNILIKLMAVESLVFAPFFATYGGILFKIL

SEQ ID NO: 21362 - protein, 201 aa, Shigella flexneri
RMIESNLRLVVKIARRYGNRGLALLDLIEEGSLGLIRAVEKFDPERGFRFSTYATWWIRQTIERAIMNQTRTIRLPIHIVKELNVYLRTARELSHKLDHEPSAEEIAEQLDKPVDDVSRMLRLNERITSVDTPLGGDSEKALLDILADEKENGPEDTTQDDDMKQSIVKWLFELNAKQREVLARRFGLLGYEAATLEDVGR

SEQ ID NO: 21363 - protein, 253 aa, Triticum aestivum
MVPRLERGGGGGFQLPNSEQENSLFLRALISVVSGDTAAPALHPEPSNPPFAAAAAAPVPACGRCGADGCPGCEFAAAAAAATTGSSSEGEECSAASFVRNGGVGKRRAGGGGSKFRGVRQRPWGKWAAEIRDPHRAVRKWLGTFDTAAEAARAYDVAALEFRGHRAKLNFPASSSAASASASASASSWAAAQPHPQRQQRPESPREKCGSNASSPAHVPEQGRPVAREQEIWDGLHEIMMMDDGSFWSNPKP

SEQ ID NO: 21364 - protein, 315 aa, Triticum aestivum
  misc_feature (81)..(81): Xaa can be any naturally occurring amino acid
  unsure (1)..(315): unsure at all Xaa locations
HYRTSLYKKAGWYRSGIPGISSTHARREQIREKMYEEELRCDGEITNSFKELETLYIESYEQIARKKVWTIGPMCLCHRNXNTTAARGNKAPMDEAQCLQWLDSRKPGSVIFVSFGSLACTTPQQIVELGLGLEASKKPFIWVIKAGPKFPEVEEWLADGFEERVKDRGMIIRGWAPQVMILWHQAIGGFVTHCGWNSTIEGICAGVPMITWPHFAEQFLNEKLVVDVLKLGVEWVGVQGVTQWGSEQQEVMVTRDAVETAVNTLMGEGEATEELRMRAEDCAIKARRAFDEEGSSYNNVRLLIQEMGNKTNACG

SEQ ID NO: 21365 - protein, 374 aa, Triticum monococcum
MDGSKGPVVVTGASGFVGSWLVMKLLQAGYTVRATVRDPANVEKNKPLLELPGAKERLSIWKADLSDQGSFDDAIAGCTGVFHVATPNGLRLPRPRGKYQYPGTLKQSITTEILLLNEVIKPTVEGMLSIMRACKEAGTVKRIVFTSSAGSVNIEERQRPAYDQDNWSDIDFCRRVKMTGWMYFVSKALAEKAAMEYASENGLDFISIIPTLVVGPFLSAGMPPSLVTALALITGNEAHYSILKQVQLVHLDDLCDAMTFLFEHPEANGRYICSSHDATIHGLATMLRDRFPEYSIPHKFPGVDDDLQPIHFSSKKLLDHGFSFRYTAEDMFDAAIRTCREKGLIPLGDAPPPAAAGKLGALAAGEGQAIGAET

SEQ ID NO: 21366 - protein, 212 aa, Thermoanaerobacter tengcongensis MB4
MEITYRDIQFIRSFHEELYEDLKPLRKFAEENYIPIAKPEVAAFLSFMVRLKKPLNILEIGTAIGYSTIIMARAYQNSKIVTIERDINLAEIAKKNFKRAKIEGRIDLICGEAEEVLDNLTNEYDFIFVDAAKGQYLEFYKKIREFVPQDGIVLWDNILYKGYVVGEEHVKHKRRTIVYRMREFIEVLKKDKNFYTVILPLGDGLALSIREE

SEQ ID NO: 21367 - protein, 247 aa, Glycine max
  misc_feature (30)..(30): Xaa can be any naturally occurring amino acid
  misc_feature (240)..(240): Xaa can be any naturally occurring amino acid
  unsure (1)..(247): unsure at all Xaa locations
MAAYKLVLIRHGESAWNLENRFSGWYDADXSAGHEEAKRGGQALRDAGYEFDICFTSVQKRAIRTLWTVLDAIDQMWLPVVRTWRLNERHYGGLTGLNKAETAAKHGEAQVKIWRRSYDVPPPPMEPDHPFYSNISKDRRYADLTEDQLPSCESLKDTIARALPFWNEEIVPQIKEGKRVLIAAHGNSLRGIVKHLEGLSEEAIMELNLPTGIPIVYELDKNLKPIKPMQFLGDEETVRXAMGAVAA

SEQ ID NO: 21368 - protein, 509 aa, Solanum tuberosum
MSIVTCEKAAASLSSSSNMNNDTNGAFCYTPQHQLVTPQYQNPPQQIKKKRNQPGNPDPEAEVIALSPKTLVAANRFFCEICNKGFQRDQNLQLHRRGHNLPWKLKKRENKEVVRKKVYICPESSCVHHDPSRALGDLTGIKKHFSRKHGEKKWKCEKCSKRYAVQSDCKAHFKTCGTREYKCECGTIFSRRDSFITHRAFCETLAMESARSVINGRNPTIFSPQLNLQFQQPHFFNSHEQIQATTFPMKKEQQSSDFRHIEIPPWLITTNSQPFQLGAINHGPSPRSNFSSSSIFPATTRLDQQYTQSGHKDLNLHHPNPNLRGPTLGYDSTGESGAVSPVHISATRLLQKAAQFGATISNKASAVTATAAYTGTVKIPHNTHVSVTSTDSATKQTHQKLSSREDLTSITGPANISGIMTSFSNGFDGSTMFEDAILFGGFNNLNSKKEDEEEDQQLYFNGSMNEEDHILTKDFLGLKPLSHTDDIFNIAALVNTEPHHFKNHKTWQS

SEQ ID NO: 21369 - protein, 150 aa, Glycine max
MSMASSSGNSSISTKSQSSGSEGDLQVVVDERKKKRKQSNRESARRSRMRKRKHLDELTKQVSQLAKGNGEILGTIDITTQHYLNVEAENSILRAQMGELSQRLQSLNDIVHDIIINTTTTYERDCYLTSAQNFTTTTYTLCLNQPVFQW

SEQ ID NO: 21370 - protein, 272 aa, Legionella pneumophila subsp. pneumophila str. Philadelphia 1
MNRIDKTLEKLKANRKKMLSPYITAGDPYPELTVSLMHQLVKSGADVLELGIPFSDPMAEGPVIQRAMERALAHSIHCDDVLNMVRQFRKTDTETPVILMGYLNPIEQYGYDLFAQQAVEAGVDGTILVDLPPEEADGVSRVWQKHGLYSIYLCSPTTSAERMNYINQHANGYLYYVSLKGVTGSDALKLPELKAQYLQRKAQSKLPLMVGFGIKTPEMAAQVAEFADGVIVGAALINEIIEAYEAKKDPLQASGALLSSMRQAIDNIGSMV

SEQ ID NO: 21371 - protein, 194 aa, Arabidopsis thaliana
MNISQNPSPNFTYFSDENFINPFMDNNDFSNLMFFDIDEGGNNGLIEEEISSPTSIVSSETFTGESGGSGSATTLSKKESTNRGSKESDQTKETGHRVAFRTRSKIDVMDDGFKWRKYGKKSVKNNINKRNYYKCSSEGCSVKKRVERDGDDAAYVITTYEGVHNHESLSNVYYNEMVLSYDHDNWNQHSLLRS

SEQ ID NO: 21372 - protein, 442 aa, Arabidopsis thaliana
MVTRETKLTSEREVESSMAQARHNGGGGGENHPFTSLGRQSSIYSLTLDEFQHALCENGKNFGSMNMDEFLVSIWNAEENNNNQQQAAAAAGSHSVPANHNGFNNNNNNGGEGGVGVFSGGSRGNEDANNKRGIANESSLPRQGSLTLPAPLCRKTVDEVWSEIHRGGGSGNGGDSNGRSSSSNGQNNAQNGGETAARQPTFGEMTLEDFLVKAGVVREHPTNPKPNPNPNQNQNPSSVIPAAAQQQLYGVFQGTGDPSFPGQAMGVGDPSGYAKRTGGGGYQQAPPVQAGVCYGGGVGFGAGGQQMGMVGPLSPVSSDGLGHGQVDNIGGQYGVDMGGLRGRKRVVDGPVEKVVERRQRRMIKNRESAARSRARKQAYTVELEAELNQLKEENAQLKHALAELERKRKQQYFESLKSRAQPKLPKSNGRLRTLMRNPSCPL

SEQ ID NO: 21373 - protein, 368 aa, Brassica oleracea
MDRLKLSLSVFALLFIVVSASSDGNEGDDLVIKQVVDGGAEPNVLSSEDHFSLFKKKFGKVYASREEHDYRFSVFKSNLRRARRHQKLDPSARHGVTQFSDLTRSEFKRKHLGVKGGFKLPKDANKAPILPTENLPEEFDWRERGAVTPVKNQGSCGSCWSFSATGALEGANFLATGKLVSLSEQQLVDCDHECDPEEAGSCDSGCNGGLMNSAFEYTLKTGGLMREEDYPYTGKDGATCKLDKSKIVASVSNFSVISIDEEQIAANLVKNGPLAVAINAAYMQTYIGGVSCPYICMRRLNHGVLLVGYGSAGYAPARFKEKPYWIIKNSWGETWGEDGFYKICRGRNVCGVDSLVSTVTATVSPAAH

SEQ ID NO: 21374 - protein, 482 aa, Glycyrrhiza echinata
MDLEREGTEKPLKLYFIHYLAAGHMIPLCDIATLFASRGHHVTIITTPSNAQTLRRSIPFNDYHQLCLHTVPFPSQEVGLPDGVESLSSVTDLDNLAKVFQATTLLRTPIEHFVEENPPDCIVADFIYQWVDELANKLNIPRLAFNGFSLFAICAIESVKAHSLYASGSFVIPGLPHPIAMNAAPPKQMSDFLESMLETELKSHGLIVNNFAELDGEEYIEHYEKTTGHRAWHLGPVSLIRRTSQEKAERGEKSVVSVHECLSWLDSKRDDSVLYICFGSLCHFSDKQLYEIACGVEASGHEFIWVVPEKKGKEDESEEEKEKWMPKGFEERKKGLIMRGWAPQVLILSHRAVGAFVTHCGWNSTVEAVSAGVPMITWPVHGEQFYNEKLVTQVRGIGVEVGAEEWSAIGFGEREKVVCRESIEKAVRRLMDGGDEAEKIRRRAREFRDKATRAVQEGGSSHNNLTALIDDLRRLRDRKVLD

SEQ ID NO: 21375 - protein, 334 aa, Bacteroides thetaiotaomicron VPI-5482
MYIVNSYTLAIIFCFITMICWGSWGNTQKLASKNWRYELYYWDYTIGILLFALLLVFTLGSFGDSGRGFLEDIQQVEAAYIASALIGGAIFNASNILLSASVSIAGMAVAFPLGVGLALVLGVFINYFSSPKGDPFWLFTGVVLIVIAIICNGIAAGKNQKAGTNNSKKGIILAAIAGILMSFFYRFVAAAMDLNNFESPTTGMATPYTAFFIFAIGIFLSNFLFNTLVMKRPFVGLPVTYKEYFAGKASTHMVGILGGCIWGLGTALSYIAAGKAGAAISYALGQGAPMIAALWGVFIWKEFTGSSKATNRLLGVMFILFILGLTFIVISGGS

SEQ ID NO: 21376 - protein, 1981 aa, Shewanella sp. MR-4
MHAHPTQQDSTAVPNDQRQSSKAMPKIAIVGLAVQYPDADTPEQFWQNLLDKKDSRSQIDAAKLNANPADYQGVQGQADRFYCDKGGYIRNFRFDPQGYQLPPTAFDGLDESFLWALDCSKKALLDAGVDLTAPLLERTGIVMGTLSFPTASSNQLFLPIYHQAVEKALKTKLNQPEFALAPFANGSIAGTQQAANGAIAHTASKLLSDALGLGGAQLSLDAACASSVYALKLACDYLTTGKADMMLAGAVSGADPFFINMGFSIFHAYPDHGISAPFDSNSKGLFAGEGAGVLVLKRLEDAERDGDNIYAMVSGIGLSNDGKGQFVLSPNSKGQVQAFERAYATANTHPSNIEVIECHATGTPLGDKVELTSMERFFEDKLGGTMAPLIGSAKSNLGHLLTAAGMPGIMKMIFAMRSGQLPASINLKAPISSPKGLFSGNNIPTQLQAWPDKTGNDRRHAGVSVFGFGGCNAHLLLESYQPTIHSAEKQANKPVYQQQALTVIGMASHFGPLASINALDKALIAQTDTFIPLPPNRWKGLDKHPDILNQFGLNRAPKGAYIEQFDFDFLRFKVPPNEDDRLISQQLLLIKVADEAIRDAKLTAGSKVAVLVAMETELELHQFRGRVNLHTQLADSLKKQGVHLSNDEYLALEAIAMDSVLDAAKLNQYTSFIGNIMASRIASLWDFNGPAFTISAAEQSVARCIDVAQNLLSQEALDGVVIAAVDLSGSVEQVILKNAQIAVDLDANSANPQWKVGEGAGAIVLTNQQASNSQQTSNSSQKGYGQIRAQAFGTHHQLPKLLDSLITETAIANPSVPAAIHMVEQCIAPEEQLPAEQLLAQLNLMGTPCNRVANTLGHNFAAAGMASLLNTLLSLKNGSAASNKNTDKHALVSTQSQGVSSLLLLSQTATQSAQLEQRLEQDLTLSEQKHLIKPVTLGGRDIYQHIVDTPLPALAAIQGKMRQLQPVAPQATQTVPRVQAALDFTAENATPFATPIAVESGMSSNAPHQYSAAPLAQDRASQDSAALLQNQQLLQNQQLAREAHLAFLQSREQGLKLADALLKAQLSQTTQMGSVAPHVATSANVAPIAAQQAVSVPELKPDHANVAPYTPPIPAAKPCIWNYQDLVEYAEGDIAKVFGADYAIIDSYARRVRLPTSDYLLVSRVTKLNAQMNRYQPSTMTTEYDIPVDAPFLVDGQIPWAVAVESGQCDLMLISYLGIDFENKGERVYRLLDCTLTFLGDLPRGGDTLRYDISINHFARNGDTLLFFFSYECFVGDKLILKMDGGCAGFFTDKELADGKGVIRTEAEIKLREQAQIALANEYARNGNKPRFTPLLNCAQTAFSYGQIHRLLSADIGGCFGGEHAAHQAKFGLQPSLCFASEKFLMIEQVSKLEVHGGAWGLGLIEGHKQLAPDHWYFPCHFKGDQVMAGSLMAEGCGQLLQFFMLHIGMHLGVTNGRFQPLENASQKVRCRGQVLPQSGTLTYRMEVIEIGMSPRPYAKANIDILLNGKVVVDFQNLGVMIKEEADCTRYSQSDYSQGSSSQSSSSQSNGAQAANIAILAEQAPLMAQIPDVSAPLNKGVVPLKHVSAPIAPAGSKYANRVPDTLPFTPYHLFEFATGDIENCFGSDFSIYRGLIPPRTPCGDLQLTTRVVAIEGKRGELKKPSSCIAEYEVPSNAWYYAKNSHPSVMPYSVLMEISLQPNGFISGYMGTTLGFPGQELFFRNLDGNGKLLREVDLRGKTIVNDSRLLSTVIAGSNIIQNFSFELSCDGEPFYRGNAVFGYFKADALKNQLGIDNGKITQAWHIERDIKADSQINLLDKNGRSFVAQQGKPHYRLAGGQLNFIDKAEIVKTGGKKGLGYLYAERTIDPSDWFFQFHFHQDPVMPGSLGVEAIIELLQTYAIDQDLGAGFNNPKFGQILSEIKWKYRGQINPLNKQMSLDVHITSIEDKDGKRIIKGDANLSKDGLRIYEVTDIAICIEEA

SEQ ID NO: 21377 - protein, 460 aa, Zea mays
FGSRETEYMRLQRHKMGVEDFELLTIIGRGAFGEVRLCREKVSKNVYAMKKLKKSEMLRRGQVEHVKAERNLLAEVDSAYIVKLYYSFQDEEFLYLIMEYLPGGDMMTLLMRKDTLTEDEARFYIAETVLAIESIHKHNYVHRDIKPDNLLLDHSGHLKLSDFGLCKPLDSSNFPNLNEPDYMSGKVTTPLPDTTRLSNPSAPRRTQQEQLSHWQKNRRMLAYSTVGTPDYIAPEVLLKKGYGTECDWWSLGAIMYEMLVGYPPFYSEDPMSTCRKIVNWRSHLKFPEEAKLPPEAKALISKLLCNVEHRLGTKGAHEIKAHPWFGGVQWEKLYQMKAAFIPEVNGELDTQNFENFEEIGTQIQSSSKSGPWRKMLPSKDANFVGYTYKNFEIVNDDEVAGIAELKKKSSKPKRPTIKTMFERMDEEEPVQGSFLSMLPPEGQPSSHSSVPQEKYQPRRK

SEQ ID NO: 21378 - protein, 79 aa, Musa acuminata
MSCCGGNCGCGSSCQCGSGCGGCKMYPDLLTERDTTAQTMVMGVVPQKGNFEELDMAAEGSENGCKCGSNCTCDPCNCK

SEQ ID NO: 21379 - protein, 267 aa, Streptococcus thermophilus
MKRNFDSVKRLVIKIGTSSLVLPSGKINLEKIDQLAFVISSLHNKGIEVVLVSSGAMGFGLNVLDLEKRPAEVGKQQAVSSVGQVAMMSLYSQVFSHYQTKVSQLLLTRDVVEYSESLANAINAFESLFELGVVPIVNENDAVSVDEMDHATKFGDNDRLSAIVAKVVGADLLIMLSDIDGLFDKNPNVYEDATLRSYVPEITEEILASAGGAGSKFGTGGMMSKIKSAQMVFENQSQMVLMNGENPRDILRVLEGAKIGTLFKQED

SEQ ID NO: 21380 - protein, 360 aa, Ralstonia solanacearum
MDRAATFELEMTRLIRAPRERVFDAFTDQAALATWHCPRGMSVLEASADPRVGGRYRVVMGGRDGSRHIAVGEYQKLDRADFLAYTWAWESGSMPPDLKTLIEVTLTDHDGGTRLHMRHSGFPDTQTRDGHMAGWQSVFNRLSDYLDPEGSAGTVTVYGDPRSSYCRTVRMALAEKGVRYTLQPVPPHSPELLAHNPFGRVPAFSDGPIEFYETRAILSYIDEAFDGPSLLPQWGATAHARGEQWISLINCHAYDAMVRRYILQYIFPKGENGQPDRKVIDAALPEIAAQLDALEQAYQERDYLVGSTVSMADLFLAPILAYLGMFPEGAALLEARPNLRRGQAAMRARPSFAATQPQLS

SEQ ID NO: 21381 - protein, 416 aa, Streptococcus thermophilus [sequence omitted]

SEQ ID NO: 21382 - protein, 209 aa, Candida albicans SC5314
MSEELAQKTEELSLDSKTVFDSKEEFNAKHPLNSRWTLWYTKPQTNKSENWHDLLKPVITFSSVEEFWGIYNSIPPANQLPLKSDYHLFKEGIRPEWEDEANSKGGKWQFSFNKKSEVNPIINDLWLRGLLAVIGETIEDEENEVNGIVLNIRKQAYRVGIWTKDCDESKLKTVGERLKKVLQLNDEQKVEFMSHDASNTRGAEPQIVL

SEQ ID NO: 21383 - protein, 274 aa, Glycine max
  misc_feature (268)..(268): Xaa can be any naturally occurring amino acid
  unsure (1)..(274): unsure at all Xaa locations
LLGAVHGMVEALFRRYTEQGMDEDSAYKNTVESITGIISKTISKKGMLEVYNSLTEEGKKQFIEAYSAAYYPCMDILYECYEDVSSGSEIRSVVLAGRRFYEKEGLPAFPMGKIDQTRMWKVGERVRSTRPQGDLGPLHPFTAGVYVALMMAQIEVLRKKGHSYSEIINESLIESVDSLNPFMHARGVAFMVDNCYTTARLGSRKWAPRFDYILTQQAFVTVDKKAPINQDLISNFMSDPVHGAIEVCAQLRPTVDISVTADADFVRXELRQSS

SEQ ID NO: 21384 - protein, 378 aa, Triticum aestivum
  misc_feature (131)..(131): Xaa can be any naturally occurring amino acid
  unsure (1)..(378): unsure at all Xaa locations
MDHRLVAPLLVLLGLLLSPAPAAAAAGDEEPLIRQVVGAADPLDNDLELDSQFLGFVQRFGKTYRDAEEHAHRLSVFKANLRRARRHQMLDPSAEHGVTKFSDLTPAEFRRTFLGLKTTRRSFLREMAGSXAHDAPVLPTDGLPEDFDWRDHGAVGPVKNQGSCGSCWSFSASGALEGANYLATGKMEVLSEQQLVDCDHECDPAEPDSCDAGCNGGLMTSAFSYLLKSGGLEREKDYPYTGKDGTCKFEKSKIAASVQNFSVVAVDEEQIAANLVKYGPLAIGINAAYMQTYIGGVSCPYICGRHLDHGVLLVGYGASGFAPSRFKEKPYWIIKNSWGENWGDKGYYKICRGSNVRNKCGVDSMVSTVSATHASKEE

SEQ ID NO: 21385 - protein, 593 aa, Frankia sp. EAN1pec
MTGRPAQNRGSAGGRAHALRTLLGHAGDGRRLLVGGYALILVDAVAQSLTPAVFRVVLDRIQQDPHRFLHDGWQGPVVAAVAVSATFLVAAYFAHTWCRRGATRWANNLRRALYEHVQRLSMDFFHRSRVGDVAAAINQDIERLEVTVWQGLSVWWALAVLLISVGLVAWVDAWMALISLALLAVAVGWTLLVLPRLRRHSRDIRDELGRTSGTLAEMLGVNTLLKAFNAEDDALRQVRGGTDRVRAGSEALARLQHRYADPLGFHLSFVAPFLLLFVGAWRAASGTLSIGDVVAVWGFWLRGSSSLTVVMTSLPEVLAGLAASERAAKLFEERPAVSDLPRAPALVVARGGIVFERVSFAYPGRRSHLVLDGFDLTIAPGRSVALVGSSGAGKSTVAQLLLRLFDPAAGRVTIDGQDLRAVTQASVRAAVGVVFQESVLISGSLARNLRLAQPTATDQDIEAALRAANAWEFVRAWEEGIHTELGERGAMLSGGQRQRLAIARVMLKDPPIVVLDEATSALDAGSERLVLDALDRLLSGRTSLIIAHRIATVRHCDQIVVMERGRVADAGTHSSLLQSSATYRSYCREQSVA

SEQ ID NO: 21386 - protein, 242 aa, Anabaena variabilis ATCC 29413
MESHKEKILVVDDEASIRRILETRLSMIGYDVVTAGDGEEALETFRKSDPDLVVLDVMMPKLDGYGVCQELRKESDVPIIMLTALGDVADRITGLELGADDYVVKPFSPKELEARIRSVLRRVDKTGASGIPSSGVIHVGNIKIDTNKRQVYKGDERIRLTGMEFSLLELLVSRSGEAFSRSEILQEVWGYTPERHVDTRVVDVHISRLRAKLEDDPSNPELILTARGTGYLFQRIIEPGEE

SEQ ID NO: 21387 - protein, 398 aa, Rubrivivax gelatinosus PM1
MFQHVEAYPGDPILSLNEDFQKDPRAGKVNLSIGIYFDDAGRIPVLGSVQRAEAELLARGGTKSYLPIEGAANLRNAVQALLFGAGHEAVTGRRIATIQSVGSSGGLKVGADFLVRYFPGSAVWVSDPTWDNHRAMFEGAGLTVNTYPYYDPATGGLKFDAMLAALRGLPPRSIVLLHACCHNPTGVDLSAAQWEALIPVLRERQLLPYLDLAYQGFGDGIEADAHAVRALASAGLSFFVANSFSKSMSLYGERVGALSVVCPDAAQADNVLGQLRATVRRNYSSPPIHGGQLAALVLGEPALRAQWEGELAAMRDRILAMRRALHAALTARLPGRDFGYFLSQRGMFSYTGLSAAQVDLLRERHAVYLVRSGRMCVAGLNTGNVQTVAEAMAAVLGG

SEQ ID NO: 21388 - protein, 441 aa, Guillardia theta
MREIVHVQVGQCGNQIGAKFWEVISHEHGVDTNGTYFGNKDNQIEKIDVYYNEVSGNRFVPRAVLVDLEPGTMDSVRASNYGRLFRPDNFVFGQSGAGNNWAKGHYTEGAELIESAMDIIRKESEQCECLQGFQIAHSLGGGTGSGMGTLLISKIREEYPDRMMCTYSVVPSPKVSDTVVEPYNCTLSIHQLVENADEVFCIDNEALYDICFRTLKLVTPSYGDLNHLVSAVMSGITCSLRFPGQLNADLRKLAVNLVPFPRLHFFMVGFAPLGSRGSQQYRSMTVNDLTQQMFDSKNMMAACDPKNGRYLTAAAYFRGKISTKEVDDQMIEIQNKQSEHFVEWIPHNIKSSVCDIPPKGMKMSAAFIGNSTSIQELFKRVGEQFQAMFRRKAFLHWYTGEGMDEMEFTEAESNMQDLVSEYQQYQDAKMDNDAFEDQDLY

SEQ ID NO: 21389 - protein, 338 aa, Haemophilus influenzae
MAILVTGGAGYIGSHTVVELLNVGKEVVVLDNLCNSSPKSLERVKQITGKEAKFYEGDILDRALLQKIFAENEINSVIHFAGLKAVGESVQKPTEYYMNNVAGTLVLIQEMKKAGVWNFVFSSSATVYGDPKIIPITEDCEVGGTTNPYGTSKYMVEQILRDTAKAEPKFSMTILRYFNPVGAHESGLIGEDPNGIPNNLLPYISQVAIGKLAQLSVFGSDYDTHDGTGVRDYIHVVDLAVGHLKALQRHENDAGLHIYNLGTGHGYSVLDMVKAFEKANNITIPYKLVERRSGDIATCYSDPSLAAKELGWVAERGLEKMMQDTWNWQKNNSKGYRD

SEQ ID NO: 21390 - protein, 163 aa, Rubrivivax gelatinosus PM1
MITTTIYDFEARSIDGRTVSLADYRGKVLLIVNTASACGFTPQFAGLQSLWQAYGERGLAVLGFPSNEFGGQDPGSNDEIASFCQLNYGVSFPMMAKVEVNGAGAHPLYRWLTGEVKGLLGTRAIKWNFTKFLVGRDGRVLGRYAPTDKPESLTRDIEAALAA

SEQ ID NO: 21391 - protein, 335 aa, Arabidopsis thaliana
MMMDEFMDLRPVKYTEHKTVIRKYTKKSSMERKTSVRDSARLVRVSMTDRDATDSSSDEEEFLFPRRRVKRLINEIRVEPSSSSTGDVSASPTKDRKRINVDSTVQKPSVSGQNQKKYRGVRQRPWGKWAAEIRDPEQRRRIWLGTFATAEEAAIVYDNAAIKLRGPDALTNFTVQPEPEPVQEQEQEPESNMSVSISESMDDSQHLSSPTSVLNYQTYVSEEPIDSLIKPVKQEFLEPEQEPISWHLGEGNTNTNDDSFPLDITFLDNYFNESLPDISIFDQPMSPIQPTENDFFNDLMLFDSNAEEYYSSEIKEIGSSFNDLDDSLISDLLLV

SEQ ID NO: 21392 - protein, 269 aa, Buchnera aphidicola (Schlechtendalia chinensis)
MNRYQTLQKKLVPFKKGCFIPFIILGDPSIEMSLKIIDVLIENGADGLELGFPFSDPLSDGKTIQKAHLRAFSSKMNIYLCFEMLQKIRKKYNTIPIGLLLYANLIFKFGINNFYLKCFNVGIDSVLIADLPVEESNDFRKCAIANNISSVFVCPHDAKKNVIKKISLYSTGYIYLLSRSGVTGTDKKIIVPSLNLIKNLKKITEKLLIQGFGISNSKQIQKIILSGISGVICGSVIIKLIENHFQNEKKMLKNIKRLSRSLKQSTIIF

SEQ ID NO: 21393 - protein, 666 aa, Xanthomonas campestris pv. vesicatoria str. 85-10
MTQPTRRQLANAIRFLAADAVEAAKSGHPGMPMGMADIAEVLWNDFYRHNPNNPQWFNRDRFVLSNGHGSMLQYALLHLSGYDLPIEQLKQFRQLHSKTAGHPERSETPGVETTTGPLGQGFANAVGFALAEKLLAQRYNRPELEIVDHRTWVFMGDGCLMEGISHEAASLAGTWGLGKLVAFWDNNQISIDGNTAGWFSDDTPARFEAYGWHVIRDVDGHDADKIKAAIEAALENTDKPTLICCRTKIGFGAPTKAGKESSHGAPLGKDELEGARKALEWPYGPFEIPEEIYAGWRAGGTGTLRQAEWEQLFDKYAKQYASEADELTRRSHGELPADFIAKADAYIAKAQEEGQTIASRKASQLAIEAFAPLLPELIGGSADLAHSNLTLWKASKSVATDDPDANYVYYGVREFGMTAIANGLALHGGFIPFDATFLVFSDYARNGVRMSALNPAHAIHVYTHDSIGLGEDGPTHQPVEHLASLRYIPNNDVWRPGDAVESAVSWKAAITRKDGPSCLIFSRQNLQHQPRSAEQIKLIERGGYVLADAQGGTPDVILIATGSEVGLAVEAKQTLDAAGLKTRVVSMPSTDVFDRQDAAYRDSVLPNAVRKRVAVEAGVTGFWRKYVGLDGDVVGMDTFGASAPADQLYAYFKITAEHVVAAAKAL

SEQ ID NO: 21394 - protein, 139 aa, Zea mays
  misc_feature (65)..(65): Xaa can be any naturally occurring amino acid
  misc_feature (104)..(104): Xaa can be any naturally occurring amino acid
  unsure (1)..(139): unsure at all Xaa locations
RTTGADFFFLKPGMPGSNPGTGMEMGITPIGTSGMGRELVGGSNIIGVDLRVREDLAVLNGAQKXLGIVIPIGEAEAYVLSAMCGMDRQLGTGRALLIILQVWXSCFIVVCGDELLQKSCGLGSDMLMMVATTVCENMI

SEQ ID NO: 21395 - protein, 499 aa, Brassica oleracea
MGKVAVGATVVCAAAVCAATVYVVRRRMKSCGKWGRVIEILKVFEEDCATPIGKLRQVADAMTVEMHAGLASEGGSKLKMLISYVDNLPSGDEQGFFYALDLGGTNFRVMRVLLGGKQDRVVKQEFEEVSIPPPLMTGASDELFNFIAEALAKFVATEGEDFHLPAGRQRELGFTFSFPVKQTSLCSGTLISWTKGFSIEDALGQDVVGELIKAMERVGLDMNVTALVNDTVGTLAGGRYYNSDVVAAVILGTGTNAAYVERANAIPKWQGLLPKSGEMVINMEWGNFRSSHLPLTEYDHLLDFDSLNPGEQILEKIISGMYLGEILRRVLLKMAEEAAFFGDSIPPKLKVPFIIRTPTMSAMHSDTSPDLKVVGSKLKDILEVPTTLKMRKVVISLCNIIATRGARLSAAGIYGILKKLGRDAPKDGETTQKSVIAMDGGLFEHYTQFSECMESSLKELLGDEASESVEVIHSNDGSGVGAALLAASHSQYLEDSETS

SEQ ID NO: 21396 - protein, 149 aa, Triticum aestivum
DAVDRLKTGFNKFKTEVYDKKPELFEPLKAGQSPKYMVFACSDSRVCPSVTLGLQPGEAFTVRNIAAMVPAYDKTKYTGIGSAIEYAVCALKVQVLVVIGHSCCGGIRALLSLQDGAPDTFHFVEDWVRIGFPAKIKVKKEHASVPFDD

SEQ ID NO: 21397 - protein, 561 aa, Vibrio vulnificus YJ016
MIQPNELSKPQLALPTPSDMILKWAKERPHEVYLKQIINRQFVEFTYSEVADKALRLVTALKELGAEPGDRIALISKNCAEWFICDLAMMLGDYVSVPIFPTAGADTIEYCITHSESKILIAGKLDDAAATQKVIDDLVDVKSIALPYDSAPHCQYQFTTLILQSEPSSDRPQHYDDKLMSLVYTSGTSGLPKGAMLTYGAFSWSVQQLINHIGIQPNDRLFSYLPLAHITERVYIFGSSIMGGVPTAFPESLDTFIEDVKMQRPTLFISVPRLWTLFQQRIQDKLPQKRLNFLLKIPFVSGLIKKKLADGLGLDQARVLGCGSAPVSPALLAWYHSVGLNITEAWGMTESFAYSTLNYPFRADKIGSVGNAGPGIELKIAADDEIMVRGKGLFSGYYKNDIATQEAFDKEGWLHTGDIGRLDAEGYLTIQGRKKDTFKTAKGKFVSPVPIENKLFEYSRVEMMCLIGLGLPAPILLVVPHNFPNFDRDRYERTTKRVIAKMNAELESHEQIKGVLMIKDPWSIDNGILTPTLKIKRHVLEQKYHEVGQNWPKDKLVVWEE

SEQ ID NO: 21398 - protein, 499 aa, Brassica oleracea
MGKVAVGATVVCAAAVCAASVYIVRRRMQSSGKWARVIEILRVLEEDCATPIGKLRQVADAMTVEMHAGLASEGGSKLKMLISYVDNLPSGEEHGFFYALDLGGTNFRVMRVLLGGKQGRVVKQEAKEVSIPPHLMTSGSDELFNFIAEALANFVATEGEDFHLPEGRQRELGFTFSFPVKQTSLSSGTLIKWTKGFSIEDTVGQDVVGALVKAMERVGLDMNVTALVNDTVGTLAGGRYYNPDVVAAVILGTGTNAAYVERAHAIPKWHGLLPKSGEMVINMEWGNFRSSHLPLTEYDHLLDFDSLNPGEQILEKIISGMYLGEILRRVLLKMADEAAFFGDSVPPKLRIPFIIRTPNMSAMHSDTSPDLKVVGSKLKDILEVPTTSLKMRKVVVSLCDIIACRGARLSAAGIYGILKKLGRDAPKDGETQKSVIAMDGGLFEHYTQFSECMESSLKELLGDEASDSVEVIHSNDGSGVGAALLAASHSQYLDDSQTS

SEQ ID NO: 21399 - protein, 73 aa, Neosartorya udagawae
QITTKELGTVMRSLGQNPSESELQDMINEVDADNNGTIDFPEFLTMMARKMKDTDSEEEIREAFKVFDRDNNG

SEQ ID NO: 21400 - protein, 532 aa, Arabidopsis lyrata subsp. petraea
KTTLVELGRTLALEECALWMPTRTGLELQLSYTLRHQHPVEYTVPIQLPVINQVFGTSRAVKISPNSPVARLRPVSGKYMLGEVVAVRVPLLHLSNFQINDWPELSTKRYALMVLMLPSDSARQWHVHELELVEVVADQVAVALSHAAILEESMRARNLLMEQNVALDLARREAETAIRARNDFLAVMNHEMRTPMHAIIALSSLLQETELTPEQRLMVETILKSSNLLATLMNDVLDLSRLEDGSLQLELGTFNLHTLFREVLNLIKPIAVVKKLPITLNLAPDLPEFVVGDEKRLMQIILNIVGNAVKFSKQGSISVTALVTKSDTRDADFFVVPTGSHFYLRVKVKDSGAGINPQDIPKLFTKFAQTQSLATRSSGGSGLGLAISKRFVNLMEGNIWIESDGLGKGCTAIFDVKLGISERSNESKQSGIPKVPAIPRHSSFTGLKVLVMDENGVSRMVTKGLLVHLGCEVTTVSSNEECLRVVSHEHKVVFMDVCLPGVENYQIALRIHEKFTKQRHQRPLLVALTGNT

SEQ ID NO: 21401 - protein, 362 aa, Brassica rapa subsp. pekinensis
MNTTSTHFVPPRRFEIYETTLNQVSMWEESFKNNGGIFTPNSIIIPTDAKLDSLSEDTSHGTPHKFDQEASTSRHPDKTQRRLAQNREAARKSRLRKKAYVQQLETSRLKLIHLEQELDRARQQGFYEGNRVDTNALGFSDKMSSGIVAFEMEYGHWVEEQNRQISELRTVLQGQVSDVELRLLVDNAMKHYFQLFRMKSAAAKIDVFYIMSGMWKTSAERFFMWIGGFRPSELLKVLLPHFDPLMDQQVLDVCNLRQSCQQAEDAVSQGMEKLQHTLADSVAAGNLGEGSYIPQITCAMERLEALVSFVNQADHLRHETLQQMHRILTTRQAARGLLALGEYFQRLRALSSSWATRQREPT

SEQ ID NO: 21402 - protein, 266 aa, Synechococcus elongatus PCC 6301
MTAISDCFAALRSQGRCALIPFLTAGDPDLETTRQALLALDREGADLIELGVPYSDPLADGPVIQAAATRALQAGTRLDDVLALLKDVRSQIKAPIVLFTYCNPILNRGFEAFLDQIAAAGANGLVVPDLPLEESQRLSEVAAERGIDLILLIAPTSSADRIAAISKQARGFIYLVSVTGVTGMRQGMQSRVADLLQEIRQGTDKPIGVGFGISGAEQARQVRDWGADGVIVGSAFVNRLQEQGVEGVATLCRELRQAIDRQPVLS

SEQ ID NO: 21403 - protein, 419 aa, Yersinia pseudotuberculosis IP 32953
MNLLEHMGKAAKQASWQLAMLSTAKKNQALAVIANLLESESQTILQANERDMAAARESGMSEALLDRLLLTPARLAAIANDVRQVCRLNDPVGRVIDGSLLDSGLKLERRRVPLGVIGVIYEARPNVTIDVASLCLKTGNAVILRGGKETHHTNQATVNVIQRALEQCGLPAAAVQAIESPDRQLVNELLRLDRYVDMLIPRGGASLHKLCREQSTIPVITGGIGVCHTFVDENADFEKALLVIENAKIQRPSACNSLETLLVHQAVAKTFLPLLSARMHAFGVTLHASPLAMPYLADGKAKVVAVEAADYDDEWLSLDLNVDIVTDIDAAIDHIREHGTSHSDAILTRSLSHAEYFVRAVDSSAVYVNASTRFTDGGQFGLGAEVAVSTQKLHARGPMGLDALTTYKWIGYGDDLVRS

SEQ ID NO: 21404 - protein, 706 aa, Neurospora crassa
MAHDNREPREVKNHLLFEVATEVAHRVGGIYSVLKSKAPVTTAEYGDRYTLIGPLNHQSAAVEVEELEPSNPELKATIQAMRDRGIGILYGRWLIEGAPRVLLFDTKTAYGYMNEWKTDLWNVASIPSPDNDEETNEAIVFGYLVAWFLGEFVCHEKRKAVIAHFHEWLAGVALPLTKKRQIDVTTIFTTHATLLGPYLCAGSVDFYNNLQWFDVDAEAGKRGIYHRYCIERAAAHSCDVFTTVSHITAYESEHLLKRKPDGVLPNGLNVTKFSAMHEFQNLHQQNKEKIHDFVRGHFYGHYDFEPENTLYFFTAGRYEFRNKGVDMFIESLARLNHRLKTAGSKTTVVAFIIMPAQTTSLTVEALKGQAVIKSLRDTVDVIERGIGRRIFERSVKWHEGDPLPEEKELITSQDRVLLRRRLFAMKRHTLPPIVTHNMLNDHEDPILNQIRRVQLFNHPSDRVKIVFHPEFLSSANPVLPLDYDDFVRGTHLGVFASYYEPWGYTPAECTVMGVPSITTNLSGFGCYMEELIENSSDYGIYIVDRRSKGVDDSVNQLTQYMFEFTQKSRRQRINQRNRTERLSDLLDWKRMGMEYVKARQLALRRAYPTSFNGEEEEDFIPGVEQKISRPFSVPGSPRDRTGMMTPGDFASLQESHEGLSTEDYVAWKLPEEEDPEEYPFPLTLKQRTGPGSPLDSIQGLQLNGTR

SEQ ID NO: 21405 - protein, 324 aa, Oryza sativa
MTMPFAVSDPSASVEEMVAAAAADDECVCVWLEEQYEKVEKIGEGTYGVVYKGKHRHTNETIALKKIRLEQEDEGVPSTAIREISLLKEMQHRNIVRLQDVVHKEKCIYLVFEYLDLDLKKHMDSSPDFKNHRIVKSFLYQILRGIAYCHSHRVLHRDLKPQNLLIDRRTNSLKLADFGLARAFGIPVRTFTHEVVTLWYRAPEILLGARHYSTPVDMWSVGCIFAEMVNQKPLFPGDSEIDELFKIFSIMGTPNEETWPGVASLPDYISTFPKWPSVDLATVVPTLDSSGLDLLSKMLRLDPSKRINARAALEHEYFKDLEVA

SEQ ID NO: 21406 - protein, 476 aa, Pseudomonas syringae pv. phaseolicola 1448A
MYPDVQLYIDGQWRASRDGRSIPVIDPATGQSLGSVAHAGITDLDEALAAAERGFATWRATSAYDRYKLMQKAANLIRERADNIARILTQEQGKPLAEARMETLSAADVIDWLAEEGRRSYGRIVPSRGVAIEQKVVKEPVGPVAAFTPWNFPINQVVRKLSSALAAGCSIIVKAPEETPASPAELIRAFADAGVPAGVIGLVYGDPAEISGYLIPHPVIRKVTFTGSTPVGKQLAALAGKHMKRATMELGGHAPALVFDDADIDLAARVLATAKFRNAGQVCVSPTRILVQRKVLDAFTERFVGLTREIKVGNGLEAGTTMGPVANERRIPALVDLIEDAVRGGATLSAGGKAVEGAGYFFEPTVLSGLTPQMRIMNEEPFGPVALLVPFDTVEEAIAESNRVPFGLASYAFTTSMKTAQALSTYIEAGMLSINHQGIGLPEVPFGGIKDSGYGSEGGTEAIEAYLNTKLVTQYN

SEQ ID NO: 21407 - protein, 956 aa, Vanilla planifolia
MASSIDAQLRLLAPAKVSEDDKLVEYVRLLLDRFLDILQDLHGEVVRETVQELYELSAEYESKHDPKKLDELGNLLISLDPGNSIVIASSFSHMLNLANLAEEVQIAHRRRIKLKKGDFVDENSATTESDIEETLKRLVHDLKKSPEEVFDALKNQTVDLVLTAHPTQSVRRSLLQKHARIRNCLAQLYAKDITPDDKQELDEALKGGSAAFRTDEIRRTPPTPQDEMRAGMSYFHETIWKGVPKFLRRVDTALKNIGINERVPYNAPLIQFSSWMGGDRDGNPRVTPEVTRDVCLLARMMAANLYFSQIEDLMFELSMWRCSDELRIRADELHRSSKRDAKHFIEFWKQVPPNEPYRVVLADVRDKLYNTRERSRHLLSSGISDVPEESSMTNVEQLLEPLELCYRSLCSCGDRPIADGSLLDFMRQVSTFGLALVKLDIRQESDRHTDVIDAITTHLGIGSYREWSEDRQEWLLSELASGKGDLQIGSDLPATCSVDVIDTFLVIAELPPDNFGAYIISMATAPSDVLAVELLQRECHVRQPLRVVPLFEKLADLEAAPAALARLFSIEWYRNRIDGKQEVMIGYSDSGKDAGRLSAAWQLYKGQEDLIKVAKKYGVKLTMFHGRGGTVGRGGGPTHLAILSQPPDTIHGSLRVTVQGEVIEQSFGEEHLCFRTLQRFTAATLEHGMHPPISPKPEWRTLLDEMAVVATEEYRSIVFQEPRFVEYGRLATPELEYGRMNIGSRPSKRKPSGGIESLRAIPWIFAWTQTRFHLPVWLGFGTAFKHVSPKDIKNLRILQEMYNEWPFFRVTIDLVEMVFAKGNPGIASLYGKLLVSSELWSFGERLRANYQETKDLLLQVAGHKVFLKESLSEAEVGLRDSYITTLNVCQAYTLKRIRDPNFHVKVRPHISKEISDASKPAAELVKLNPTSEYAPGLEDTLILTMKGIAAGMQNTG

SEQ ID NO: 21408 - protein, 150 aa, Schizosaccharomyces pombe
MTTRNLTDEQIAEFREAFSLFDRDQDGNITSNELGVVMRSLGQSPTAAELQDMINEVDADGNGTIDFTEFLTMMARKMKDTDNEEEVREAFKVFDKDGNGYITVEELTHVLTSLGERLSQEEVADMIREADTDGDGVINYEEFSRVISSK

SEQ ID NO: 21409 - protein, 161 aa, Brassica napus
  misc_feature (2)..(2): Xaa can be any naturally occurring amino acid
  unsure (1)..(161): unsure at all Xaa locations
FXIGNMQTYLQSLTIRLEEMRVKRRDSEQWMHHRMLPPELRERVRRYDQYKWLETRGVDEENIVSNLPKDLRRDIKRHLCLALVRRVPLFENMDERLLDAICMRLKPCLYTEKSFLVREGDPVNEMLFIIRGRLESVTTDGGRSGFYNRSLLKEGDFHFYG

SEQ ID NO: 21410 - protein, 198 aa, Shigella boydii
RRMIESNLRLVVKIARRYGNRGLALLDLIEEGNLGLIRAVEKFDPERGFRFSTYATWWIRQTIERAIMNQTRTIRLPIHIVKELNVYLRTARELSHKLDHEPSAEEIAEQLDKPVDDVSRMLRLNERITSVDTPLGGDSEKALLDILADEKENGPEDTTQDDDMKQSIVKWLFELNAKQREVLARRFGLLGYEAATLE

SEQ ID NO: 21411 - protein, 541 aa, uncultured bacterium
MAAKQITYEMEAREAIRRGIRQLSHAVKVTLGPRGRNVILEKSFGAPTVTKDGVTVAKEVELEDTNENMGAQMVKEVASKTSKDAGDGTTTATIYAEAIFDEGLKNLAAGANAMDLKRGIDAAVDAVVDALRQMAVPVKNKEQIAQVGTCAANQDREIGNNIAQAMEKVGKDGVITVEEGKSIETTVDLVEGMQFDKGYISPHFVNKPESMEVVLDNPYVLVHEKKLASVKDLLPLLEQVAKAGKPLLVIAEDVEGEVLATLVLNKLRGIIQGCAVKAPGFGDRRKAMLEDVGTLTGGSAVFEDLGISLEKMNLSELGKAKRVIVDKETCTLIEGAGRTQDVKGRIEAIKNEIELTTSDYDREKLEERLAKLSGGVAQINVGAATEVEMKEKKARVEDALHACRAAVEEGILPGGGVAVLRCGEALDAAYKRSRGDQKTGVNLIRRALRSPIKQIAENAGLDGSIVCQKVIEGQGSFGYNALTEEYGDLVKMGVIVPLKVERIALQNAASVAGLLLTTDAIVSEIKEKDDDKKMPGGMPGM

SEQ ID NO: 21412 - protein, 427 aa, Pyrococcus furiosus DSM 3638
MGPDIKVKIDEKVEPKRAILFGLQHVLAMFGATVTVPLVVGTTVGLSTREIATMIQAVLLAMGIATILQTTIGSRYPIVQGSSFAFIPGLISIGKSLGMAATQGALIVGGIIEALVGGLGIVGKIKKLFTPVVTGVTIMLIGFSLAHVSVKYFFNYFADPSGASIPRATIVALITFGTTVYVALKSRGTLRAMPVIVGAFVGYLVSIPLGLADFQLVKELPVVSVPKIFPWGTPVFDVGAIITLLFAFMVSIIESVGDYHAISAIAEAPITNKHINRGIMSEGIACSIAGVLGACGTTSYSENIGLVALTKVASRYVVQVGGIILIVISLFPKFAGLLAAMPAPVLGGLTLALYGMISVTGLRLIKEKVELNDRNTIIIATALIAGLGAPQLPPEFLEHFPQIIASILESGMAVGAITAIVLEQVLR

SEQ ID NO: 21413 - protein, 285 aa, Pisum sativum
MAKDVEVQEQGEYSAKDYQDPPPAPLIDLDELTKWSFYRALIAEFVATLLFLYVTILTIIGYSHQTDANAGGTDCDGVGILGIAWAFGGMIFILVYCTAGISGGHINPAVTFGLFVGRKVSLLRAVFYMAAQCAGAVCGTGLAKGFQKSFFDRYGGGANFIHDGYNKGTALGAEIIGTFVLVYTVFSATDPKRNARDSHVPVLAPLPIGFAVFMVHLATIPITGTGINPARSFGSAVILNQGKIWDDQWVFWVGPIIGATVAAIYHQYILRGSAIKALGSFRSNA

SEQ ID NO: 21414 - protein, 395 aa, Lactobacillus plantarum WCFS1
MVESKRNSAKLLWVIGTAWLFDALDVALLSFVMPVIKESWQLTAGQLGAVSAITTLGMMIGALVCGYLADKLGRKPVLIGTLLLFSLGNLLLTITPNVEWFLVVRLLTGIGLGGELPVAATMIADHYTGTQRSRMLVLVDSFWAFGWIAASLLAFLVMPHIGWRMTVLITALMGLYALLLRRRLPAEQEANRPQKVDFRQALRQVWSAKYRRATICLSILWFVIMFAYYGMFLWLPSVLVLRGFSLVHGFGYTMLMSLAQLPGYYLAAWLIGVVKRKAVLATYLIGTVVSAAAFGTANNPTMILISGAWLSFFTLGAWGIMIAFTPGQFAPAVRGIGMGVAQSIGRIGATIGPFLVGALMAIGFGIPAIFMVFVAVLLLGVGVLLFGLPNQETDD

SEQ ID NO: 21415 - protein, 98 aa, uncultured bacterium
MSKVGIRPLGEKVLIKRLEADEQTSGGIVLPDSAKEKPKQGTVLKAGDGKLLDSGERQALQVKKGDKVLFTSYAGTEIKVEGEEMLIMDESDVLAVLE

SEQ ID NO: 21416 - protein, 494 aa, Arabidopsis thaliana; identical to SEQ ID NO: 1051

SEQ ID NO: 21417 - protein, 607 aa, Xanthomonas oryzae pv. oryzae KACC10331
MAVIEIKVPDIGDYSDVPVIEVLVAVGDSVAKDQGLVTLESDKATLEVPSSAAGVVKELKVKVGDILSEGALVLLLETEGEAAAPAKAETKAAPAAVAPAAAPGSKPPVTPSHRAPAEPAPSKPALASDKPADIACKMVVLGAGPGGYTAAFRAADLGLDTVLIERYASLGGVCLNVGCIPSKALLHAAAVIDEVAHAGDFGVDFGQPKITLGTLREYKEKVVGKLTGGLASMAKQRKVRTVTGVATFVSPNELEIVGDDGKTQLLRFEHCIIAAGSQAVKLPNFPWDDKRVMDSTDALELHDIPKTLLVVGGGIIGLEMATVYSALGSKVTVVEFMDQLMPGADKDLVKPLADRLKKQGVDVHLKTKATDVTAGKKGITVSFEAAVEGDKPGLQATAYDRVLVAVGRSPNGKKIGADKAGVTVTERGFIPVDRQMRTNVPHIFAIGDIVGNPMLAHKATHEGKLAAEVAAGEKKEWVARVIPSVAYTNPEIAWVGVTETEAKAKGLKVGVAKFPWAASGRAIGIGRTEGFTKLIFDEETHRVIGGAIVGVHAGDLLAEIGLAIEMGAEAEDIGHTIHAHPTLSESVGMAAEVYDGTITDLYIPKKK

SEQ ID NO: 21418 - protein, 191 aa, Shigella boydii
LVVKIARRYGNRGLALLDLIEEGNLGLIRAVEKFDPERGFRFSTYATWWIRQTIERAIMNQTRTIRLPIHIVKELNVYLRTARELSHKLDHEPSAEEIAEQLDKPVDDVSRMLRLNERITSVDTPLGGDSEKALLDILADEKENGPEDTTQDDDMKQSIVKWLFELNAKQREVLARRFGLLGYEAATLEDV

SEQ ID NO: 21419 - protein, 889 aa, Shewanella sp. ANA-3
MAGNVADNVTDMYASLRSNVSMLGQILGDTMRTHLGDSFLEKVEQIRKLAKDSRRGDEAAREQMLELLTALPDEELVPFAKAFNQFLNLANLSEQFHTISRNCDELVCVPDPVEQLLGRMLNSRIDQTKMLDCLKTLDIDLVLTAHPTEISRRTLIQKYAAIVDCLAEQENNQLSDRERRQINLRLRQLIAQIWHTNEIRRERPTPVDEARWGLSTIEESLWHAVPDFLRQLNDQVQDRTGQQLPIDIAPVRFSSWMGGDRDGNPFVTAKVTQEVLDRNRHAAARLFLKDIVLLVGELSMEEANSELMAYTNNSCEPYRFVLRSLRQKLRDTIDYLNARIEGHNPEVDKSTLIWQESDLKAPLEMLYKSLCDCGMRLIANGLLLDILRRLACFGIHMLRLDIRQDAGRHCDVLAELTRYLGMGDFNHWDETEKQAFLLRELSNRRPLIPSNWQPSADVAEVLNTCRLIAKHPAKALGSYVISMASKPSDVLTVLLLLKETGCTHPMRVVPLFETLSDLNNAAECITALLDIDWYRGYTKGMQEVMIGYSDSAKDAGVMAAAWAQYRAQEQLVAVCKQAGVKLTLFHGRGGSIGRGGGPAHKAILSQPPGSVDGRIRVTEQGEMIRFKFGLPKLAVQSLALYTSAVLEATLLPPPEPKQEWRNCMERIAEESVSAYRGIVREEPDFVPYFRAATPEVELGKLPLGSRPAKRRVDGGIESLRAIPWIFAWSQNRLMLPAWLGAGEALQAACQRGEMGLLQDMEREWPFFSTRISMLEMVYAKAEPNLARYYETCLVPTNLHHLGETLRQRLDLGIKVVLELTKSDTLMAHTPWNRESVKLRNPYIDPLNFLQTELLARTRKETTEAPASEHVQLALMLTIAGVAAGMRNTG

SEQ ID NO: 21420 - protein, 411 aa, Oryza sativa
MNALAATSRNFRQAARLLGLDSKLQKSLLIPLREIKVECTIPKDDGTLATFVGFRVQHDNSRGPMKGGIRYHPEVDPDEVNALAQLMTWKTAVAAVPYGGAKGGIGCTPGELSRSELERLTRVFTQKIHDLIGINTDVPAPDMGTNAQTMAWILDEYSKFHGHSPAVVTGKPIDLGGSLGRDAATGRGVMYATEALLTEYSESISGSTFVIQGLGNVGSWAAKLIHQKGGKIVAVGDVTGAIRNKSGIDIPALLKHRSEGGSLEDFYGAEVMDAAELLVHECDVLVPCALGGVLNRENAAEVKARFIIEGANHPTDTEADEILAKKGVIVLPDIYANSGGVVVSYFEWVQNIQGFMWDEEKVNRELQKYMKNAFQNIKDMCKSQNCNLRMGAFTLGVNRVAKATLLRGWEA

SEQ ID NO: 21421 - protein, 439 aa, Xanthomonas axonopodis pv. citri str. 306
MSSTVPPLSFARILALNAGFFGVQYSFGLQQSNMSPIYNYLGADHANLPYLWLAGPITGLVLQPFVGAWSDRSVTRWGRRMPYMVLGALVCSLCLLAMPFSTALWMAVCLLWVLDAANNVAMEPYRALVSDVLTPPQRPLGYLTQSAFTGLAQTLAYLTPPLLVGMGMNQDAANAHHIPYVTIAAFVIGAGFSAGSILLTARSVREPAIAPAEIARIRQSGAGLGATVREIGSALREMPPTMRQLAPVMLFQWYAIFCYWQYIVLSLSTTLFGTTDPTSHGFREAGLVNGQIGGFYNFVAFLAAFAMVPVVRRFGPKYTHAACLVAAGIGMWLLPGIENRWLMLLPMIGIGLAWASMMGNPYLMLADSIPPERTGVYMGLFNLFIVLPMLIQIVTLPLYYEHVLHGDPRNVVRLAGALMLAAAAAMLCVRLRKPKAVAA

SEQ ID NO: 21422 - protein, 204 aa, Shigella boydii
RMIESNLRLVVKIARRYGNRGLALLDLIEEGNLGLIRAVEKFDPERGFRFSTYATWWIRQTIERAIMNQTRTIRLPIHIVKELNVYLRTARELSHKLDHEPSAEEIAEQLDKPVDDVSRMLRLNERITSVDTPLGGDSEKALLDILADEKENGPEDTTQDNDMKQSIVKWLFELNAKQREVLARRFGLLGYEAATLEDVGREIG

SEQ ID NO: 21423 - protein, 644 aa, Xanthomonas axonopodis pv. citri str. 306
MSTCPIDSPALRAAFAAPLDPQHAEVLLSRYDQHASRLLDALHALYGQRADYASWLAQWLGEVGDIARQRPQALQTLDSTRHAGWFGQQHMLGYSAYADRFAGTLQGVAERVPYLQELGVRYLHLLPFLRARAGDNDGGFAVSDYGQVEPSLGSNDDLVALTSRLREAGISLCADFVLNHTADDHAWAQAARAGDARYLDYYHHFADRTLPDRYEATLGQVFPHTAPGNFTWVDDTAQWMWTTFYPYQWDLNWSNPAVFGDMALAMLRLANLGVETFRLDSTAYLWKRIGTDCMNQPEAHTLLVALRAVTDIVAPAVVMKAEAIVPMTQLPPYFGSGVDEGHECHLAYHSTLMAAGWSALALQRGDILHNVIAHSPPLPRHCAWLSYVRCHDDIGWNVLQHEACGNAAQPPFSLRDVARFYANAVPGSYARGESFQSSGDGVHGTNGMAAALAGIQAAQEAGDAAALAVAVDRLVLLYAIALAMPGVPLIYMGDELAMVNDPGYRHDPHRQHEGRWLHRPAMDWQLAAQRHDANSLSGTVYRRLRGLIRQRAALGALAADQALASIALNDPRVFVLTRGDSFIALHNFSDQPLDVELAAIGIDGWTLLAIDDAIGGAAARGDGSIVLPPYGVRWLQRGTEHAPE

SEQ ID NO: 21424 - protein, 227 aa, Haemophilus influenzae R2866
MELVFIRHGFSEWNAKNLFTGWRDVNLTERGVEEAKAAGKKLLDKGYEFDIAFTSVLTRAIKTCNIVLEESHQLWIPQVKNWRLNERHYGALQGLDKKATAEQYGDEQVHIWRRSYDISPPDLDPQDPNSAHNDRRYANIPSDVVPNAENLKLTLERALPFWEDQIAPAMLSGKRVLVVAHGNSLRALAKHIIGISDSEIMDFEIPTGQPLVLKLDDKLNYVEHYYL

SEQ ID NO: 21425 - protein, 423 aa, Xanthomonas axonopodis pv. citri str. 306
MSTAPQKPLAIRERLSEVRYEIRGELARRARELEAQGRKLIKLNIGNPGAFGFRAPEHLQRAIADDMGRTDPYTHQQGLPEAREAIATAYARRQHPDAHPDRIFVGNGVSELIDLSLRALLNPGDEVLVPSPDYPLWSAATILNDGRPVYYRCAPENGFQPDPVEIETLVSSRTRAIVLINPNNPSGASYSRELLERIVAIATKHNLLLMVDEIYDQVLYDDAAFVPVAPLAGAHPCITFSGLSKVHRACGWRVGWALLSGDQARINDLRNAMDLLGALRLCANVPGQYAIDAAVNGPDTISALCAPGGRLYETRRAVIEACAASEHLSLVAPAGALYAFPAVVGAAARNFDDHAFALDLMNEEGVLVVPGSSFNVPYRHHFRVTLMPEAGVMRDVFARIDRALARRAEAVTKVVPLKPRSVA

SEQ ID NO: 21426 - protein, 372 aa, Thermoanaerobacter tengcongensis MB4
MRIVVKVGTSTLTHENGKLNLEIMEKLVRQIANLSNKGEEVILVTSGAIGAGMGKLNLTEKPKNLPQKQALAAIGQGLLIEIYEKFFNEYGKITAQLLLTREDFSDRKRYLNMSYTLSNLLKWGVIPVINENDTVAVEEIKIGDNDTLAALVASLVEADLLIILTDIDGLFDKDPRIYKDAKVIEVVEEFSDDLFKIAGGAGTKRGTGGMYTKIQAAKICYNSGVKMVIANGKIDNVLNRIAAGEKIGTTFLPMKNPISSRKIWIAFNAKVNGFLFVDEGAAKALVKHGKSLLPSGIVKTEGQYDVGDCVAVVDHQGREIARGLVNYSSEEVEKIKGCKTHDIESILGYKYYDEVIHRDNLVVLERGEKYGG

SEQ ID NO: 21427 - protein, 116 aa, Helicosporidium sp. ex Simulium jonesii
YAAMMRRQITMPAHLMDDGQHGASNPGRNLFADFSAVAEARQVYQAEDYCCIIEHLNKRWRVASRCVEGEAAQAQEYLLGLPDRFRKLAERSKAKKKKTPPTNVVFSWLFDRAIQI

SEQ ID NO: 21428 - protein, 260 aa, Streptomyces coelicolor A3(2)
MSEDIVCRRLVGRTAVVTGAGSGIGLAATRRLASEGAHVVCGDVDETRGRAAAEETGGIFVQADVTDPEQVEALFAAAYDTYGSVDVAFNNAGISPPDDDSILETGLEAWQRVQEVNLTSVYLCCKAAIPYMRRQGRGSIINTASFVARMGAATSQISYTASKGGVLAMSRELGVQFAREGIRVNALCPGPVDTPLLRELFAKDPERAARRLVHIPVGRFAEAEEIAAAVAFLASDDSSFVNATDFLVDGGISGAYVTPL

SEQ ID NO: 21429 - protein, 414 aa, Thermoanaerobacter tengcongensis MB4 [sequence omitted]

SEQ ID NO: 21430 - protein, 154 aa, Brassica napus
MEINDKRWSLAGKTALVTGGTRGIGRAVVEELARFGATVHTCSRSQEELKSCLDDWKSNGLVVTGSVCDASDRDQREKLIQEVSSAFSGKLNILVNNVGTNLRKPTVEYSSEDYAKIMSTNLESAFHFSQLAHPLLKASGVGSIVFISSVAGLV

SEQ ID NO: 21431 - protein, 805 aa, Citrus unshiu
MAERALTRVHSLRERLDETLSAHRNEILALLSRIEGKGKGILQNHQLIAEFESISEENRKHLTEGAFGEVLRATQEAIVLPPWVALAVRPRPGVWEYIRVNVHALVVEELLVAEYLHFKEELVDGGSNGNFVLELDFEPFNASFPRPTLSKSIGNGVEFLNRHLSAKLFHDKESMHPLLEFLRVHCHKGKNMMLNDRIQNLNSLQHVLRKAEEYLTTVAPETPFSELALRFQEIGLERGWGDTAERALEMIQLLLDLLEAPDPCTLETFLGRIPMVFNVVILTPHGYFAQDDVLGYPDTGGQVIYILDQVRALEDEMLLRIKQQGLDITPQILIITRLLPDAVGTTCGQRLEKVYGTKYSDILRVPFRTEKGVVRKWISRFEVWPYLETYTEDVAVEIAKELQGKPDLIIGNYSDGNIVASLLAHKLGVTQCTIAHALEKTKYPDSDIYWKNLDDKYHFSCQFTADLIAMNHTDFIITSTFQEIAGSKDTVGQYESHTAFTLPGLYRVVHGIDVFDPKFNIVSPGADMSIYFPYTEEKRRLKSFHPEIEELLYSDVENKEHLCVLKDRNKPILFTMARLDRVKNLTGLVEWYGKNAKLRELVNLVVVGGDRRKESKDLEEQAEMKKMYSLIDQYKLNGQFRWISSQMNRVRNGELYRYICDTKGAFVQPALYEAFGLTVVEAMTCGLPTFATCKGGPAEIIVNGKSGYHIDPYHGEQAAEILVDFFEKCKADPSYWDKISLGGLKRIEEKYTWKIYSQRLLTLTGVYGFWKHVSNLDRLESRRYLEMFYALKYRKLAESVPLAVE

SEQ ID NO: 21432 - protein, 511 aa, Cryptococcus neoformans var. neoformans JEC21
MSGKSKFTPLTIVIKLGTSSIVSPTYPFVPHLRLLSSIVETVVKLRTQGHRVVLVSSGAIGVGLRRMDLKERGKGLHQKQALAAVGQGRLIALWDNLFSQLDQPIAQILLTRMDISDRTRYLNAQNTFSELLQMGVIPIVNENDTVSVSEIKFGDNDTLSAISSAICHADYLFLLTDVDCLYTDNPRTNPDAKPVRVVRDIEKVKQQVSTSTLGTSLGTGGMSTKLIAAELATAAGTTTVVMHSINVTDIFKVIENGPSPCREVAETPELFEGPLCTRFLRRESALKDRKWWIAHGLHAAGTVVIDEGACRAIRRKESGGRLLPAGVVRVVGPFASHQAVRLVVRRRRHDDIAALSSVDESTPGSPTPDLSQVPQPATFASPALRHLTIGTTNPITVMSDANNTEPDTPQLQPSMSLSSSIASLDPLSRSVPPSPAITALAERLGTTSLTSIGRGVAEGESDEWEEVEVAKGLAQYNSVEIDRMKGRKSSEIEKLIGYVESEHVVDSITFL

SEQ ID NO: 21433 - protein, 244 aa, Frankia sp. EAN1pec
MTGSRTLLLLRHGESAWNAADRFAGWVDVPLSARGRVQAGRCGDLLRDTGLLPDVVHTSLLRRAVSTADLALDAADRHWIPVRRSWRLNERHYGALQGRNRMQVRAEYGADLLRFWRRSFHGTPPPIDPGSVFGQDDDARYRELGVHVPRTESIADVLDRLRPYYESEIANDLDAGRTVLVVAHGNVLRALIRHLGAQAGDPADDDLSEVRLPTGALLRYDLTDVGLPVRPGGVLLSASGATQK

SEQ ID NO: 21434 - protein, 309 aa, Yarrowia lipolytica CLIB122
MTSLDFTMNNGKTIPAIGLGTWKSTTEEVAGAVECALTEGGYRHIDTAFNYRNEDAVGLGIKRAMEKGVKREDIFVTTKIWVTYHDRVEENLDLSLERLGLDYVDMLLIHWPVPLNPNGNDPVYPLREDGSRDIDESGSQPKTWKQMEAVLKTGKTKSIGVSNFSIPYLEELLKEAEVVPAVNQVELHPLLPQLELMEFCKKHNIVMTAFSPFGSVGGPLLKNELVLKLADKYKTTPGGILTSYHIGNGTVVIPKSVTNSRIIENGKSAVTLNQEDLKSLNDLHKTEGIHRTSKPKWGVDLGFPDFDFC

SEQ ID NO: 21435 - protein, 958 aa, Vanilla planifolia
MLASIDAQLRLLAPAKVSEDDKLLEYVSLLLDRFLDILQDLHGEVLRETVQELYELSSEYESKHDPKKFGMNLGILLITLDPGNSIVIASSFSHMLNLANLAEEVQIAFRRRIKLKKGDFADEASATTESDFEETLKRLVGKLKKTPQEIFDALKSQTVDLVLTAHPTQSVRRSLLQKHGRIRNCLTQLYAKDITPDDKQELDEALHREIQAAFRTDEIRRIPPTPQDEMRAGMSYFHETIWKGVPQFLRRVDTALKNLGINERLPYNAPLIQFSPWMGGDRDGNPRVTPEVTRDVCLLARMMAANLYFSQIEDLMFELSMWPCSDELRLRADELNVSSKKDAKHYIEFWKKVPPNEPYRVILGDVRDKLYHTRERARQILSHGVSDIPEATFTNVEQFLEPLELCYRSLCACAHRPIADGSLLDFLRQVSTFGLSLVKLDIRQESERHTDVMDAITRHIEIGSYREWSEEQRQQWLLSELAEKRPLFGPDLPRTEEIADVLDTFQVIAELPSDGFGAYIISMATSSSDVLAVELLQREFRVPKPLRVVPLFEKLADLEAAPAAVSRLFSIDWYRDRINGKQEVMIGYSDSGKDAGRTFCCLAVYKTQEELVQVAKQFGVKLTMFHGRGGTVGRGGGPTHLAILSQPPDTINGSLRVTVQGEVIEQCFGEERLCFRTLQRYTAATLEHGMNPYFSKPEWRSLLDEMAVIATNEYRWIVFQEPRFVEYFRLATPELEYGRMNIGSRPSKRKPSGGIESLRAIPWIFAWTQTRFHLPVWLGFGAAFKHVISKDNKNLHTLREMYNGWPFFRVTIDLIEMVFTKGNPGIASLYDKLLVSSELLPFGAQLRENYGETKRLLLLVAGHKDLLEGDPYLKDQRLRLRDPYITTLNVCQAYTLKRIREPGYHVTARPHLLKETDESIKSAAELVKLNPTSEYGPGLEDTLIITMKGIAAGLQNTG

SEQ ID NO: 21436 - protein, 332 aa, Glycine max
MAKDPVRVLVTGAAGQIGYALVPMIARGVMLGPDQPVILHMLDIPPAAESLNGVKMELVDAAFPLLKGVVATTDVVEACTGVNIAVMVGGFPRKEGMERKDVMTKNVSIYKSQASALEKHAAANCKVLVVANPANTNALILKEFAPSIPEKNISCLTRLDHNRALGQISERLTVQVSDVKNVIIWGNHSSTQYPDVNHATVATSAGEKPVRELIADDAWLNGEFITTVQQRGAAIIKARKLSSALSAASAACDHIRDWVLGTPQGTWVSMGVYSDGSYNVPAGLIYSFPVTCANGEWAIVQGLSIDEFSRKKLDLTAKELFEEKALAYSCLN

SEQ ID NO: 21437 - protein, 428 aa, Shigella flexneri 2a str. 301
MKIATIKTGLASLAMLPGLVMAAPAVADKADNAFMMICTALVLFMTIPGIALFYGGLIRGKNVLSMLTQVTVTFALVCILWVVYGYSLAFGEGNNFFGNINWLMLKNIELTAVMGSIYQYIHVAFQGSFACITVGLIVGALAERIRFSAVLIFVVVWLTLSYIPIAHMVWGGGLLASHGALDFAGGTVVHINAAIAGLVGAYLIGKRVGFGKEAFKPHNLPMVFTGTAILYIGWFGFNAGSVGTANEIAALAFVNTVVATAAAILGWIFGEWALRGKPSLLGACSGAIAGLVGVTPACGYIGVGGALIIGVVAGLAGLWGVTMLKRLLRVDDPCDVFGVHGVCGIVGCIMTGIFAASSLGGVGFAEGVTMGHQLLVQLESIAITIVWSGVVAFIGYKLADLTVGLRVPEEQEREGLDVNSHGENAYNA

SEQ ID NO: 21438 - protein, 398 aa, Ralstonia solanacearum
MSLFSAVELAPRDPILGLNEAFNADARSTKVNLGVGVYFTDEGKIPVLRAVQEAEKARLAMAAPRGYLPIEGIAAYDQAVQKLLFGADSPLLAEGRVVTAQALGGTGALKIGADFLKRLYPDAKVAISDPSWENHRALFEAAGFPVVNYPYYDAPTHGLNFAAMLEALNGYAPNTIVVLHACCHNPTGVDLTTEQWKQVVEVIKAKQLIPFLDMAYQGFADGIAQDGLAVSLFAESGLQFFVSSSFSKSFSLYGERVGALSIVTTSKDEAARVMSQVKRVIRTNYSNPPTHGGTVVASVLTSPELRAMWEQELGEMRDRIKSMRHALVDKLAAKGVKTDFSFVKAQRGMFSYSGLSAAQVDRLRNEHGIYAVSTGRICVAALNSHNIDAVVNAIAEVL

SEQ ID NO: 21439 - protein, 333 aa, Oryza sativa (japonica cultivar-group)
MADASSRTDTSTVLDTDDKNQMVDGQSGAIVPSNSSDRSDRSDKPMDQKVLRRLAQNREAARKSRLRKKAYVQQLESSKLKLASLEQEINKARQQGIYISSSGDQTHAMSGNGAMTFDLEYARWLEEQNKQINELRTAVNAHASDSDLRLIVDGIMAHYDEIFRLKGVAAKADVFHILSGMWKTPAERCFLWLGGFRSSELLKLLVNQLEPLTEQQLLGLSNLQQSSQQAEDALSQGMEALQQSLADTLAGSLGPSGSSGNVANYMGQMAMAMGKLGTLENFLRQADNLRQQTLHQMQRILTIRQAARALLAIHDYFSRLRALSSLWLARPRE

SEQ ID NO: 21440 - protein, 473 aa, Oryza sativa (japonica cultivar-group)
MMEGGRLGGAAASASAAAAADARGGMSGFAAPQHAIHTNLNNVQPTQVTDFGALAQSAGFRIEDLANLSTNGLFNLKSNAHTIINDPLQFENYVKSISPSNITTTATVTVVDPQTLVPQKGAQLNLVTIRTGNVENWGESTIADTSPRTDTSTDPDTDERNQMFEQGQLAAPTASDSSDRSKDKLDHKTLRRLAQNREAARKSRLRKKAYIQNLESSRLKLTQIEQELQRARQQGIFISTSSDQSHSASGNGALAFDMEYARWLEEHNKHINELRAAVNAHAGDNDLKSTVDSIMAHYNEIFKLKGVAAKADVFHVLSGMWKTPAERCFMWLGGFRSSELLKLLAGQLEPLTEQQLAGIANLQQSSQQAEDALSQGMEALQQSLAETLASGSLGPAGSSGNVANYMGQMAMAMGKLGTLENFLRQADNLRLQTLQQMQRILTTRQSARALLAISDYFSRLRALSSLWLARPRE

SEQ ID NO: 21441 - protein, 546 aa, Cryptococcus neoformans var. neoformans JEC21
MPVFSTLINSTESYQRRFDQMARAVLVYWVLKYVLLDGFRHIKARGLCGTANEIRNKIKSLVVRIMLAFPSNRAKLNSELAKTRAELKEKLAPSQYPDGVRLTTVRTLPETGRGREWLESEWENLKKLEKADVDNGRVSGAVYHGGDELNAVINEAMAKFVVTNPLHPDVFPGVRKMESEIVSMCLNLFNGPNGAGTTTSGGTESILMSVKTHRDWARVTKGITRPEMVIPSSAHAAFWKASEYFNIKLHVIPVNQKTRKAEVAAMKRAINPNTIMIVGSAPNFPDGAIDPIPELGALAKRRNVGLHVDCCLGSFIMPFLEKAGFSEGIDPFDFRVPGVTSISCDTHKYAFCPKGTSVIMYRSSELRRFQYYVITDWAGGVYASPSMAGSRPGSVLAGAWAVLNHIGADGYTSSCRQIISAARYLTSSLRTLFPDDLYVLGDPKGPVVAFNSKTINIYAVGDVMSKKGWHLSALGGDGGLHMAFTRLSAKSVDKLIEDLGDALKEVKASPQGAGGDMVALYGLGQTSAGPHVVGKLAETFLDTLYE

SEQ ID NO: 21442 - protein, 270 aa, Pisum sativum
MGDNSGCNETNEIVVNVNKDVSNITQEDSTAHATASLLQKLVAEVVGTYFLIFAGCAAVAVNKNNDNVVTLPGISIVWGLAVMVLVYSLGHISGAHFNPAVTIAFATTRRFPLKQVPAYIAAQVFGSTLASGTLRLLFSGKHDQFVGTLAAGSNLQAFVMEFIITFYLMFIISGVATDNRAIGELAGIAVGSTVLLNVMFAGPITGASMNPARSIGPAFVHNEYRGIWIYMISPIVGAVSGAWVYNVIRYTDKPVREITKSGSFLKGAKP

SEQ ID NO: 21443 - protein, 423 aa, Candida albicans SC5314
MTKQFTIVIKLGTSSLVDEVTREPRIANMSLIVETMVRLRRQGHKIVIVSSGAIACGMKQVGLEEKPANLSAVQALASIGQVRLIRTFDDLFRQLEQPIAQILLTRNDIMDFTQYKNAQNTLNELMDMGIIPIVNENDTLSVSEIKFGDNDSLSAITAGIIHADYLFLMTDVECLYTDNPRTNPDAQPILVVDKIDDLHVKTDTESGAGSKVGTGGMTTKLIAADLATNAGVTTIITLSSQPYYIIDIVAHIQAHADTLSVENQRLALQKDIQQGKIPLHTRFLSKPQDTLIKSDRRFWLLHGLKTKGALVIDQGCFQALTRRNRAGLLPVGILHVVGNFHQSECVSIKVVPDKNGAIDDAVEVGHCRVNYSAPEITLIKGHKSSEIEAILGYADSEYVAHRDNLAFPPVMPPSTDSLISDSL

SEQ ID NO: 21444 - protein, 598 aa, Erwinia carotovora subsp. atroseptica SCRI1043
MQTFNADLAIIGAGGAGLRAAIAAAEANPQLKIALISKVYPMRSHTVAAEGGSAAVTQEHDSFDYHFNDTVSGGDWLCEQDVVEHFVKHCPEEMIQMEQWGCPWSRKPDGSVNVRRFGGMKIERTWFAADKTGFHMLHTLFQTSLKYPQIQRFDEHFVLDVLVDDGQARGIVAINMMEGSLIQIRANAVVLATGGAGRVYRYNTNGGIVTGDGMGMAFRHGVPLRDMEFVQYHPTGLPGSGILMTEGCRGEGGIMVNKDGYRYLQDYGMGPETPLGEPKNKYMELGPRDKVSQAFWHEWRAGRTVSTPLGDVVYLDLRHLGEKKLKERLPFICELAKAYVGVDPVKEPIPIRPTAHYTMGGIETDQNCETRIKGLFAVGECSSVGLHGANRLGSNSLAELVVFGRVAGEQAVQRAQATAPANGTALDAQTRDIEQRLHDLMNQEGTESWAKIRDEMGMSMEEGCGIYRTTDLMQKTVDKMAELKERFKRVKITDRSSVFNTDLLYTVELGHSLDVAECMAHSAINRKESRGAHQRLDDGCTERDDVNFLKHTLAFYNPEGAPRLEYSDVKITKLPPAKRVYGAEGDVQEAGKKEQANG

SEQ ID NO: 21445 - protein, 126 aa, Schizosaccharomyces pombe
MSAAEKKPASKAPAGKAPRDTMKSADKKRGKNRKETYSSYIYKVLKQVHPDTGISNQAMRILNSFVNDIFERIATEASKLAAYNKKSTISSREIQTAVRLILPGELAKHAVTEGTKSVTKYSSSAQ

SEQ ID NO: 21446 - protein, 250 aa, Pisum sativum
MPIRNIAIGTPQEATHPDTLKAGLAEFISTFIFVFAGSGSGIAYNKLTDNGAATPAGLISASIAHAFALFVAVSVGANISGGHVNPAVTFGAFVGGNITLLRGIVYIIAQLLGSIVASALLVFVTASSVPAFALSAGVGVGPALVLEIVMTFGLVYTVYATAVDPKKGNIGIIAPIAIGFIVGANILVGGAFTGASMNPAVSFGPAVVSWSWANHWIYWAGPLIGGGLAGLIYEVLFINSTHEQLPTTDY

SEQ ID NO: 21447 - protein, 502 aa, Delphinium grandiflorum
MSISLFLAGAAILFFVTHLLLSPTRTRKLPPGPKGWPVVGALPMLGNMPHVALANLSRRYGPIVYLKLGSRGMVVASTPDSARAFLKTQDLNFSNRPTDAGATHIAYNSQDMVFADYGPRWKLLRKLSSLHMLGGKAIEDWAVVRRDEVGYMVKAIYESSCAGEAVHVPDMLVFAMANMLGQVILSRRVFVTKGVESNEFKEMVIELMTSAGLFNVGDFIPSIAWMDLQGIVRGMKRLHNKFDALLDKILREHTATRSERKGKPDLVDVLMDNRDNKSEQERLTDTNIKALLLNLFSAGTDTSSSTIEWALTEMIKNPSIFRRAHAEMDQVIGRNRRLEESDIPKLPYLQAVCKETFRKHPSTPLNLPRVAIEPCEVEGYHIPKGTRLSVNIWAIGRDPNVWENPLEFNPDRFLTGKMAKIDPRGNNSELIPFGAGRRICAGTRMGIVLVEYILGTLVHAFEWKLRDGEMLNMEETFGIALQKAVPLAAVVTPRLPPSAYVV

SEQ ID NO: 21448 - protein, 443 aa, Botryotinia fuckeliana
GWKRAYPSSVMARKLFNLIKEREANGKPIHTMGAIDPVQMTQQAANQEVLYISGWAYSSVLTTTNEVSPDFGDYPYNTVPNQVQRLAKAQSMHDRKQWDARRKLSKEERAKTPYTDYLRPIIADGDTGHGGLSAVLKLAKLFAENGAAAVHFEDQMHGGKKCGHLAGKVLVPVGEHINRLVAARFQWDVMGSENLVIARTDSESGKLLSSAIDVRDHEFIKGVAEDGIESLAETLQAMELAGATGADIDIFEAEWVKKTELMTCDEAVVKQLKEQGVSESSINGYLEATKKDRDMSITKRKDLATKYSKTPIIFNIDIPRTREGFYHYKAGMEAATKRAIQYAPYADLLWVETGDPNVENAAKFSGEIRAKYPGKGLVYNLSPSFNWMGHGFTDETLKSFIWDIAKHGFVLQLISLAGLHSTATITSELSKAFKDEGTLASNR

SEQ ID NO: 21449 - protein, 403 aa, Pseudomonas putida KT2440
MQFSKSNKLANVCYDIRGPVLKHAKRLEEEGHRILKLNIGNPAPFGFEAPDEILQDVIRNLPTAQGYSDSKGLFSARKAVMQYCQQKDIEGVTIEDIYLGNGVSELIVMSMQALLNNGDEVLIPAPDYPLWTAAVSLAGGKPVHYLCDEQADWFPDLEDIKAKITPNTKALVIINPNNPTGAVYSKELLLGMLELARQHNLVVFSDEIYDKILYDEAVHISTASLAPDLLCLTFNGLSKSYRVAGFRSGWLIISGPKHHAHSYIEGIDMLANMRLCANVPAQHAIQTALGGYQSINDLVLPPGRLLEQRNRTYELLNDIPGVSCVKPMGALYAFPRIDPKVCPILNDEKFALDLLLSEKLLIVQGTAFNWPWPDHFRVVTLPRVDDLEAAIGRIGNFLKGYSQ

SEQ ID NO: 21450 - protein, 131 aa, Pseudomonas putida KT2440
MKKIEKTLDEWRSMLDPEQYQVCRLKGTERPFSGKYNSERRDGIYHCICCGLPLFDAQTKFDAGCGWPSFYAPIEDSAMIEIRDTSHGMIRTEVTCARCDAHLGHVFPDGPPPTGLRYCINSVCIDLRPRD

SEQ ID NO: 21451 - protein, 437 aa, Lycopersicon esculentum
MTSICKLSNPCFSSTSYGSRSSSTPKFVVHLRTSTFNHTLSGSKLSLVINPSIRASLCVKCSQADGNGSSVKKTTLHHLYETQGQSPWYDNLCRPVTDLIPLIDSGVRGVTSNPAIFQKAISTSNAYNDQFRELVQAGKDIDSVYWELVVKDIQDACKLFETIYDKTDGGDGSVSVEVSPRLADDTEGTVEAAKWLHKKVERSNVYIKIPATAPCIPSIKEVISLGISVNVTLIFSLSRYEAVIDAYLDGLEASGLSDLSRVTSVASFFVSRVDTLIDKLLEKIGTPEALDLRGKAANAQAALAYDLYQKKFSGPRWEALVKKGCQKQRLLWASTSVKNPAYPDTLYVDPLIGPDTVSTMPDQALQAFIDHGSVARTIDANLSEAEGIYSALEKLGIDWGFVGSQLELEGVDSFKKSFDSLLDSLQEKANTLKLVSL

SEQ ID NO: 21452 - protein, 162 aa, Pseudomonas putida KT2440
MAATMLNIPCVTLGGEHKTLGDFPGKVLLVVNTASQCGFTPQYKGLEQLWQAYRDRGLVVLGFPCNQFGKQEPGDAREIAQFCERNFGVSFPLFRKVEVNGPGAHPLFVELKQRAPGILGSQKIKWNFTKFLVDPASGQVKRYAPTTKPQALEADIERLLSR

SEQ ID NO: 21453 - protein, 665 aa, Chlamydophila pneumoniae CWL029
MINKELDIGILGKIAGAIKQISIESIQKASSGHPGLPLGCAELAAYLYGYVLRQNPRDPHWINRDRFVLSAGHGSALLYSCLHLAGFDVSLEDLQEFRQLHSRTPGHPEYGETVGVEATTGPLGQGLGNAVGMALSMKMLESRFNRPGHEIFNGKIYCLAGDGCFMEGVSHEVCSFAGSLNLNNLVVIYDYNNVVLDGYLNEISVEDTKKRFEAYGWDVYEIDGYDFTHIHETFSSIKRGQERPVLVIAHTIIGHGSPKEGTNKAHGSPLGVEGTHETKQFWHLPEEKFFVPPAVKNFFAHKIQEDRKAQEQWLDEVRVWSKQFPELHEEFVALTSHKLPKNLESLVQSVEMPDSIAGRAASNKLIQVLVQHIPYLIGGSADLSSSDGTWIANEKVIHTYDFSGRNIKYGVREFGMATIMNGLAYSQVFRPFGGTFLVFSDYMRNAIRLAALSKLPVIYQFTHDSIFVGEDGPTHQPVEQLMSLRAIPGLYVIRPADANEVRGAWIAGLKHTGPTVIVLSRQALPTLPAAHRPFKDGIGRGAYIVLKESGEKPDYTLFATGSEVSLALSVAKELEHLDKQVRVVSFPCWELFEAQDVDYKQSIVGGDLGIRVSIEAGSALGWYKYIGSEGLAIAMDRFGYSGASDDVSEECGFTTEQILQRILSQ

SEQ ID NO: 21454 - protein, 182 aa, Triticum aestivum
  misc_feature (5)..(5): Xaa can be any naturally occurring amino acid
  misc_feature (7)..(7): Xaa can be any naturally occurring amino acid
  misc_feature (11)..(11): Xaa can be any naturally occurring amino acid
  misc_feature (13)..(13): Xaa can be any naturally occurring amino acid
  misc_feature (23)..(23): Xaa can be any naturally occurring amino acid
  misc_feature (25)..(25): Xaa can be any naturally occurring amino acid
  misc_feature (28)..(28): Xaa can be any naturally occurring amino acid
  misc_feature (30)..(30): Xaa can be any naturally occurring amino acid
  misc_feature (38)..(38): Xaa can be any naturally occurring amino acid
  misc_feature (42)..(43): Xaa can be any naturally occurring amino acid
  misc_feature (46)..(46): Xaa can be any naturally occurring amino acid
  misc_feature (50)..(51): Xaa can be any naturally occurring amino acid
  misc_feature (53)..(53): Xaa can be any naturally occurring amino acid
  misc_feature (59)..(59): Xaa can be any naturally occurring amino acid
  misc_feature (62)..(62): Xaa can be any naturally occurring amino acid
  misc_feature (75)..(75): Xaa can be any naturally occurring amino acid
  misc_feature (79)..(80): Xaa can be any naturally occurring amino acid
  misc_feature (84)..(84): Xaa can be any naturally occurring amino acid
  misc_feature (102)..(103): Xaa can be any naturally occurring amino acid
  misc_feature (108)..(108): Xaa can be any naturally occurring amino acid
  misc_feature (110)..(110): Xaa can be any naturally occurring amino acid
  misc_feature (117)..(117): Xaa can be any naturally occurring amino acid
  misc_feature (119)..(119): Xaa can be any naturally occurring amino acid
  misc_feature (126)..(128): Xaa can be any naturally occurring amino acid
  misc_feature (140)..(140): Xaa can be any naturally occurring amino acid
  misc_feature (143)..(144): Xaa can be any naturally occurring amino acid
  misc_feature (159)..(159): Xaa can be any naturally occurring amino acid
  misc_feature (164)..(164): Xaa can be any naturally occurring amino acid
  misc_feature (166)..(166): Xaa can be any naturally occurring amino acid
  misc_feature (168)..(168): Xaa can be any naturally occurring amino acid
  misc_feature (173)..(175): Xaa can be any naturally occurring amino acid
  unsure (1)..(182): unsure at all Xaa locations
PGLQXVXSLLXEXGVTVGGTNHXHXTKXLXDSIAAGNXPEWXXYIXTIDXXHXDRFDFXPLXVNKTWPEDVVPLXPVGXXVLNXNIDNFFSENEQLGFCPGXXVPGVXYXGDKLLQXKXFSYSGTXXXPPGGPTTCWWPXANXXKCSHHNNHYDRVKKXMHRDXEXDXFPPKXXXPQSKEAP

SEQ ID NO: 21455 - protein, 204 aa, Shigella dysenteriae
RMIESNLRLVVKIARRYGNRGLALLDLIEEGNLGLIRAVEKFDPERGFRFSTYATWWIRQTIERAIMNQTRTIRLPIHIVKELNVYLRTARELSHKLDHEPSAEEIAEQLDKPVDDFSRMLRLNERITSVDTPLGGDSEKALLDILADEKENGPEDTTQDDDMKQSIVKWLFELNAKQREVLARRFGLLGYEAATLEDVGREIG

SEQ ID NO: 21456 - protein, 554 aa, Shewanella sp. ANA-3
MCSIFSILDIQSDAKELRQVALEMSKLMRHRGPDWSGIYASDKAILAHERLAIVDIEHGAQPLLTEDGSLILAVNGEIYNHKELKAQLGDKYSYQTNSDCEVILALYQEYGTEFLDKLNGIFAFVLYDKAKDAYLIGRDHMGIIPLYTGRDAAGNFYVASEMKALMPVCKTVAEFQPGQYLYSSIGEPVQYYTRDWQSFDAVKDNGASQEELRDALEAAVKRQLMSDVPYGVLLSGGLDSSVISAITQTFAKRRIEDDDQSGAWWPQLHSFAVGLKGAPDLAAAKKVADAIGTIHHEINFTFQEGLDAIKEVIYHLETYDVTTIRAATPMYLMARKIKAMGIKMVLSGEGADELFGGYLYFHKAPNAQAFHEELVRKLDKLHLFDCLRANKAMAAWGLEARVPFLDKEFMDVAMRINPEAKMSKDGRIEKHILRQAFEHKLPKEVAWRQKEQFSDGVGYSWIDGLKAHAAEQVDDLQLANAKFRFPYNTPETKEAYFYRCFFEEHYPLPSAAETVPGGKSVACSTPEALAWDESLRGIIDPSGRAVRSVHAASY

SEQ ID NO: 21457 - protein, 204 aa, Shigella boydii
RMIESNLRLMVKIARRYGNRGLALLDLIEEGNLGLIRAVEKFDPERGFRFSTYATWWIRQTIERAIMNQTRTIRLPIHIVKELNVYLRTARELSHKLDHEPSAEEIAEQLDKPVDDVSRMLRLNERITSVDTPLGGDSEKALLDILADEKENGPEDTTQDDDMKQSIVKWLFELNAKQREVLARRFGLLGYEAATLEDVGREIG

SEQ ID NO: 21458 - protein, 298 aa, Zea mays
  misc_feature (204)..(204): Xaa can be any naturally occurring amino acid
  unsure (1)..(298): unsure at all Xaa locations
MAAAAGGGAVRALSQKEQDIQMMLAADVHLGTKNCDFQMERYAFKRRTDGIYIINLGKTWEKLQLAARVIVAIENPQDIIVQSARPYGQRAVLKFAQYTGAHAIAGRHTPGTFTNQLQTSFSEPRLLILTDPRTDHQPIKESALGNIPTIAFCDTDSPMRYVDIGIPANNKGRNSIGCLFWLLARMVLQMRGTILPGHKWEVMXDLFFYRDPEEAKEQEEEAAVAPEFAAITDYQGADQWGGDQWTSDWGAAPAPVPTGDGWDQAGAPAPVVDGTVPLVVAPTGWDQAAPPPTAQGWE

SEQ ID NO: 21459 - protein, 203 aa, Shigella dysenteriae
RRMIESNLRLVVKIARRYGNRGLALLDLIEEGNLGLIRAVEKFDPERGFRFSTYATWWIRQTIERAIMNQTRTIRLPIHIVKELNVYLRTARELSHKLDHEPSAEEIAEQLDKPVDDVSRMLRLNERITSVDTPLGGDSEKALLDILADEKENGPEDTTQDDDMKQSIVKWLFELNAKQREVLARRFGLLGYEAATLEDVGRE

SEQ ID NO: 21460 - protein, 332 aa, Streptomyces coelicolor A3(2)
MATRAVARRKSAAGETSGSATSVRANGGELADRDLVGMYLDEIARTPLLDAAKEVELSQTIEAGVFARQVLEGYEETGADATREELQALIDESERAKDVFIRSNLRLVVAVARRYPRSGLPLLDLIQEGNAGLVRAVEKFDYRKGFKFSTYATWWIRQAITRSIADQSRTIRLPVHLVEELGRIRRVQREFNREHGREPEPAEIAAELGSTPERVTDVLDWARDPVSLNMSVDDEGETQFGDLLEDTSAVSPEQSVLTLLRSEELDDLIGRLDPRTASIIKMRYGIDDGRERTLTEVGKEHGLTRERIRQIEKHALLELKKLARDTGFEAAA

SEQ ID NO: 21461 - protein, 429 aa, Xanthomonas campestris pv. vesicatoria str. 85-10
MSDLDQVTLNAGDKSVVLPVLKPTLGNDCVDISKLTKETGLFTYDSGFTATASCKSAITYIDGDNGVLLYRGYPIEQLAEKSSFLEVSYLLMNGELPTADEFKKFDHEVTHHTMMHESLKNFLGGFRHDAHPMAMLAGSVASLSAFYHDTLDLNDPEQRRQAAIRLIAKVPTLAAAAYRYSIGWPIRYPRNNLNYVDRFLHMMFEVPSEPLEINPVVAKALDLLFILHADHEQNASTSTVRLVGSTGANPYASVAAGITALWGPAHGGANEAVLKMLEEIGTADNVESAVAKAKDKNSSFRLMGFGHRVYKNFDPRAKIIREMTHKVLGELGVNDPLLEVALKLEEAALKDDYFVQRKLYPNVDFYSGIIYKALNIPVEMFTVMFAIARTAGWVSHWLEQQVDPEMKIGRPRQIYTGYDKRDYTDSAKR

SEQ ID NO: 21462 - protein, 395 aa, Candida parapsilosis
MTTIAIFTKNVLLAIAFALFAQGAAIPDPAKRDDNPGFVALDFEVTRKPLDVNATSELSKRSSPSSPLYFEGPSYGIRVSVGSNKQEQQVVLDTGSSDFWVVDSSASCQKGNCKQYGTFDPHSSTSFKSLGSSFSIGYGDKSSSIGTWGQDTIYLGGTSITNQRFADVTSTSVNQGILGVGRVETESANPPYDNVPITLKKQGKIKTNAYSLYLNSPGAATGTIIFGGVDNAKYSGKLIEEPLVLDRYLAVNLKSLNYNGDNSNAGFGVVVDSGTTISYLPDSIVNDLANKVGAYLEPVGLGNELYFIDCNANPQGSASFTFDNGAKITVPLSEFVLQSTANACVWGLQSSDRQNVPPILGDNFLRHAYVVFNLDKETVSLAQVKYTSASSVSAI

SEQ ID NO: 21463 - protein, 279 aa, Rhodospirillum rubrum
MTQPPRSFTAACIQVNAGREVYPNVEAASALVREARERGADMVFMPENVAMMEWGRRNIQAKAMPEEDHVALTAFRDLARDLHIWLHCGTLAVAVGDGMVANRTYVVDSDGAIRGRYDKIHMFDVNLADGESYKESSTFQAGSRAVALDIPFGRLGLSICYDLRFPHLFRALAKAGCHYLTIPAAFTRTTGEAHWHVLQRTRAIETGCYVISPAQTGTHAEGRQTYGHALIIDPWGRVLADAGEAPGIILAKIDPEKVVEARAMVPSLSHDRVFALDTL

SEQ ID NO: 21464 - protein, 426 aa, Yersinia pestis KIM
MSKSENLYAQAQQLIPGGVNSPVRAFTGVGGIPLFIERADGAYLFDVDGKAYIDYVGSWGPMILGHNHPAIRQAVIEAVERGLSFGAPTEMEVKMAQLVTDLVPTMDMVRMVNSGTEATMSAIRLARGYTGRDKIIKFEGCYHGHADCLLVKAGSGALTLGQPNSPGVPTDFAKHTLTCTYNDLASVRQAFEQYPQEVACIIVEPVAGNMNCIPPLPEFLPGLRALCDEFGALLIIDEVMTGFRVALAGAQDYYHVIPDLTCLGKIIGGGMPVGAFGGRREVMNALAPTGPVYQAGTLSGNPIAMAAGFACLTEISQVGVYETLTELTDSLATGLRHAAKEENIPLVVNHVGGMFGLFFTNADTVTCYQDVMNCDVERFKRFFHLMLEEGVYLAPSAFEAGFMSLAHSNEDIQKTVNAARRCFAKL

SEQ ID NO: 21465 - protein, 398 aa, Arabidopsis thaliana
MEAAAEAVSAAREQSLILKGKRTKRQRPQSPIPFSIIPPMSSHEPDAEEESTSLVSKEKSLNDEINNNNIKNNNNTLINGVTSSSSASSSSNNNATLKATADEEDQDMANCLILLAQGHSLPHLQPQPHPQQQTRQLMMSYQDSGNNNNNAYRSSSRRFLETSSSNGTTTNGGGGRAGYYVYQCKTCDRTFPSFQALGGHRASHKKPKAAMGLHSNHDHKKSNYDDAVSLHLNNVLTTTPNNNSNHRSLVVYGKGSNNKVHECGICGAEFTSGQALGGHMRRHRGAVVAAAAASTATVSVAAIPATANTALSLSPMSFDQMSEGPIQAPVKRARSAVVSLDLDLNLPAPEDENRVNGLSFASKQEHEQEHEQTQQKKQREEQKSLVLSSAPTLVDCHY

SEQ ID NO: 21466 - protein, 549 aa, Ipomoea batatas
MAASSGTIDAPTASSSFSFSTASSFMSSFTDLLASDAYSGGSVSRGLGDRIAERTGSGVPKFKSLPPPSLPLSSPAVSPSSYFAFPPGLSPSELLDSPVLLSSSNILPSPTTGTFPAQTFNWKNDSNASQEDVKQEEKGYPDFSFQTNSASMTLNYEDSKRKDELNSLQSLPPVTTSTQMSSQNNGGSYSEYNNQCCPPSQTLREQRRSDDGYNWRKYGQKQVKGSENPRSYYKCTHPNCPTKKKVERALDGQITEIVYKGAHNHPKPQSTRRSSSSTASSASTLAAQSYNAPASDVPDQSYWSNGNGQMDSVATPENSSISVGDDEFEQSSQKRESGGDEFDEDEPDAKRWKVENESEGVSAQGSRTVREPRVVVQTTSDIDILDDGYRWRKYGQKVVKGNPNPRSYYKCTSQGCPVRKHVERASHDIRSVITTYEGKHNHDVPAARGSGSHGLNRGANPNNNAAMAMAIRPSTMSLQSNYPIPIPSTRPMQQGEGQAPYEMLQGSGGFGYSGFGNPMNAYANQIQDNAFSRAKEEPRDDLFLDTLLA

SEQ ID NO: 21467 - protein, 452 aa, Propionibacterium acnes KPA171202
MTEPDQQLHRSLRNRHIQLIALGGAIGTGLFYGAADSIAAAGPAVIVSYLIGGVVIYLIMRALGEMSVHNPTSGAFSEYAHQWWGDLPGFISGWNYWFNYIFVSMAELSVVGIYINYWFPVVPRWVSAAVLLAIVTTVNLLHVRAYGEVEFWFAIIKVVAIIAMIVLGLWIIFFGTGSTPATGIGNLWRNGGFLPHGVTGMLAGIIVVMFSFGGTELIGITAGEAEDPQRSIPRAINRVVGRILLFYVGALIVMVAIVPWTKIDGNASPFVQIFDLVGIPGAAAILNLVVLTAAISAYNSGLYANGRMLHALAHQGDAPAFLGKVNKAGSPWAGVLLSSAVTAIAVVVVGLLPEQAFVYIMSIAMIAAIINWATIIITQMLFRRRLDPESRSELRFTMPGAPVTNWIVLAFLVLMVVVMTTMPPYRIAVAIGPIWLAVLGLGWRVSRRRQTL

SEQ ID NO: 21468 - protein, 466 aa, Legionella pneumophila subsp. pneumophila str. Philadelphia 1
MSKIRINNMITRIKLFIASLLVFFIPVADAAQDLTNMPSLAPVLKNAMPAIVNVAVQGYLPNNMASGNADDDDGENSKQPSRIPEKGRKFESIGSGVIIDPKNGIIITNDHVIRNANLITVTLQDGRRLKARLIGGDSETDLAVLKIDAKNLKSLVIGDSDKLEVGDYVVAIGNPFGLNSFGNSQSATFGIVSALKRSDLNIEGVENFIQTDAAINPGNSGGALVNAKGELIGINTAIISPYGGNVGIGFAIPINMAKDVAQQIIKFGSIHRGLMGIFVQHLTPELAQSMGYAEDFQGALVSQVNQNSPAQLAGLKSGDVIVQINDTKITQATQVKTTISLLRAGSTAKIKILRDNKPLTLDVEVTDIKKHEQKLQSNNPFLYGLALRNFEQESPPHGNVVGVQVVGASETSAGWRAGLRPGDIIISANKTPVKDIKSLQAVAHEKGKQLLVQVLRGAGALYLLII

SEQ ID NO: 21469 - protein, 188 aa, Arabidopsis thaliana
MANNDEITTSSHASPAVNHESISRAKQRIKDGLATRRSWRVMFDLHSTGLPHGVSDVFSRIKTNLAYFRSNYAIVILNVIFFSLIWHPTSLIVFTGLVFLWIFLYFLRDVPLKVFRFQIDDRAVLIGLSVITIVLLLLTNATFNIVAALMAGAVLVLIHAVIRKTDDLFLDEEAATTETSGLTSHPSS

SEQ ID NO: 21470 - protein, 164 aa, Arabidopsis thaliana
MVARSEEVEIVEDTAAKCLMLLSRVGECGGGGEKRVFRCKTCLKEFSSFQALGGHRASHKKLINSSDPSLLGSLSNKKTKTATSHPCPICGVEFPMGQALGGHMRRHRSEKASPGTLVTRSFLPETTTVTTLKKSSSGKRVACLDLDSMESLVNWKLELGRTIS

SEQ ID NO: 21471 - protein, 374 aa, Oryza sativa
MATPRTLVPILPPVAALLLLLVAASSIPILAAAQPADACGGAPDQAAADGACHDVPRALRLKLIAIPTILVSSVVGVCLPLLSRSVPALRPDGGLFAVVKAFASGVILATGYMHVLPDAFNNLTSPCLPRKPWSEFPFAAFVAMLAAVSTLMADSLMLTYYNRSKPRPSSGGDVAAVADHGESPDQGHRHGHGHGHGHGMAVAKPDDVEATQVQLRRNRVVVQVLEIGIVVHSVVIGLGMGASQNVCTIRPLVAAMCFHQMFEGMGLGGCILQAEYGRRMRSVLVFFFSTTTPFGIALGLALTRVYRDNSPTALIVVGLLNAASAGLLHYMALVELLAADFMGPKLQGNVRLQLAAFLAVLLGAGGMSVMAKWA

SEQ ID NO: 21472 - protein, 124 aa, Zea mays
  misc_feature (42)..(42): Xaa can be any naturally occurring amino acid
  misc_feature (64)..(64): Xaa can be any naturally occurring amino acid
  unsure (1)..(124): unsure at all Xaa locations
MQDSVQGLRWEELQARKITHKALDRLTVDAQMRDKDSLRCQXVYMPCLCCYNDVNKYLPGPHHXSSSKEKLRSMMEDYNGNLTRLLDREAFERFILKLTGNSLRLIRAKILITLVAATWLTIAS

SEQ ID NO: 21473 - protein, 338 aa, Brassica rapa subsp. pekinensis
MGRSPSSDDSGLKKGPWTPEEDEKLVNYVQKHGHSSWRALPKLAGLNRCGKSCRLRWTNYLRPDIKRGKFSPDEEQTILNLHAVLGNKWSTIANHLPGRTDNEIKNFWNTHLKKKLIQMGIDPMTHLPRTDIFSSLSQLMSLSSNLRGFVDMQQQFPNGQDQTILKLQTEMAKLQLFQYLLQPPTMSNNIRNPNDFDILSLLNSIASFKEITSNNLDLGSNLQDFNSLPSLKTLNSNIGPSSVLPQIPEDNHFKFCRIERENLPVSPIWLSDPTNSNQHMLPSLDPSSAVSDDMIRNQYVIEHVNSNLTSSSQESGASASAAWPDHLLDDSIFSDMIP

SEQ ID NO: 21474 - protein, 605 aa, Brassica rapa subsp. pekinensis
MALTLTVLILACLLSLVSPDAQGDALFALRMSLRALPNQLSDWNQNQVNPCTWSQVICDDKNFVTSLTLSDMNFSGTLSSRIGILGTLKTLTLKGNGIAGGIPEEFGNLTSLTSLDLEDNELSGFIPSTLGNLKKLQFLTLSRNNLNGTIPVSLTGLPNLINLLLDSNRLSGQIPQTLFEIPKYNFTGNNLNCGVGQPHPCVSEVARSGDSSKPKTGIIAGVVAGVTVILFGILVFLFCRDRHKGYKRDVFVDVAGEVDRRIAFGQLKRFAWRELQLATDNFSEKNVLGQGGFGKVYKGVLPDNTKVAVKRLTDFESPGGDAAFQREVEMISVAVHKNLLRLIGFCTTQTERLLVYPFMQNLSLAHRLREIKAGDPVLDWETRKRIALGAARGFEYLHEHCNPKIIHRDVKAANVLLDEDFEAVVGDFGLAKLVDVRRTNVTTQVRGTMGHIAPEYLSTGKSSERTDVFGYGIMLLELVTGQRAIDFSRLEEEDDVLLLDHVKKLEREKRLGAIVDKNLDGDYVKEEVEMMIQVALLCTQGSPEDRPVMSEVVRMLEGEGLAERWEEWQNVEVTRRHEFERMQRRFDWGEDSMNNQDAIELSGGR

SEQ ID NO: 21475 - protein, 765 aa, Cryptococcus neoformans var. neoformans JEC21
MQPPTTPTSNRRSHFPSSRQSFSAGSAAKPRRYQSRQNSFLRLFIGALAITASKTWVIDNHGGEGGGAGWLVLAYWASRVFVEGKQVWDGRRRKAFRLDATSNGIGVKDYILSSFNYVLQSLAFFMSLGSLGPFKTSIIGMTGSLLATAQPTTIRSFGPLLPLILASGYAFAQQLLLKDFQAVIVILVFALTTSVIQGRFLEPKTAGSRETIDGRHSLYRTILSALVATVSVIALYFMGFIPIPVPVSSTASQRFGSFVAAFLVSNIPLSFGQNSPSSAGLRLKTWRDKATFLTCIPILQFFALHPIPTTVDVVILLPISVFSIWAESIFKAQPELAPSTIISTPTSSRIFYFLLLNLAYMGVQMGYGVFTNSLGLISDAIHMLFDCLGLGVGLWASVAAMWKPDGRYTFGYSRVETLSGFANGCFLILISVFIIFEAIQRVVGHQFVGNEVHKQGVSQNDAHKYEDHHLDLHSHDHHHKPSASSKVSPRPASKLQKRKSSGQLKDSGPSATTPQKTNNGHNHDEHCSHDGEKHSHSHNHHKLTHESSTHNDAHAHEDDYDHAHAHGHGHDHDRGHDHAHSHNMRGVFLHVLADTLGSVGVIISTILIRFTGWTGFDPIASLFIAALIMASVIPLVVDSGRILCLDVGEEKESEIRSALTELSSVDGLASYAAPRFWPRCEGELVGSIHIQLAPSPSSFDPTRLSTPPSSSRPRKGDAIYANSEKVVGRVEKVLKKRIKGLTELVVQVEGSEERSFCTCMTGGDQ

SEQ ID NO: 21476 - protein, 463 aa, Yersinia pseudotuberculosis IP 32953
MELPVKNKLKRGLTTRHIRFIALGSAIGTGLFYGSADAIRMAGPSVLLAYLIGGVVAFVIMRALGEMSVNNPQASSFSRYAQDYLGPMAGYITGWTYCFEILIVAIADVTAFGIYMGLWFPDVAHWVWVLSVVLIIGAVNMMSVKVFGELEFWFSFFKVATIIIMILAGIGIIVWGIGNGGQPTGIHNLWTNGGFFSNGFVGMILSLQLVMFAYGGIEIIGITAGEAEDPKKSIPKAINSVPWRILVFYVGTLFVIMSIYPWNQVGTNGSPFVLTFQHMGITIAAGILNFVVITASVSAINSDVFGVGRMLNGMAEQGHAPKAFTAISKRGVPWVTVLVMMCAMLIAVYLNYIMPENVFLVIASLATFATVWVWIMILFSQIAFRRSLSKDQVKALDFPLRGGTFTSVLAIIFLVFIIGLIGWFPTTRISLYVGLVWIVLLLVGYYFKVKYQKKQATLIKNAD

SEQ ID NO: 21477 - protein, 703 aa, Cryptococcus neoformans var. neoformans JEC21
MQPPTTPTSNRRSHFPSSRQSFSAGSAAKPRRYQSRQNSFLRLFIGALAITASKTWVIDNHGGEGGGAGWLVLAYWASRVFVEGKQVWDGRRRKAFRLDATSNGIGVKDYILSSFNYVLQSLAFFMSLGSLGPFKTSIIGMTGSLLATAQPTTIRSFGPLLPLILASGYAFAQQLLLKDFQAVIVILVFALTTSVIQGRFLEPKTAGSRETIDGRHSLYRTILSALVATVSVIALYFMGFIPIPVPVSSTASQRFGSFVAAFLVSNIPLSFGQNSPSSAGLRLKTWRDKATFLTCIPILQFFALHPIPTTVDVVILLPISVFSIWAESIFKAQPELAPSTIISTPTSSRIFYFLLLNLAYMGVQMGYGVFTNSLGLISDAIHMLFDCLGLGVGLWASVAAMWKPDGRYTFGYSRVETLSGFANGCFLILISVFIIFEAIQRVVGHQFVGNEVHKQGVSQNDAHKYEDHHLDLHSHDHHHKPSASSKVSPRPASKLQKRKSSGQLKDSGPSATTPQKTNNGHNHDEHCSHDGEKHSHSHNHHKLTHESSTHNDAHAHEDDYDHAHAHGHGHDHDRGHDHAHSHNMRGVFLHVLADTLGSVGVIISTILIRFTGWTGFDPIASLFIAALIMASVIPLVVDSGRILCLDVGEEKESEIRSALTEVSPFAMGCDIKGRGGTKLTICPKAVVRGRPSELCCPSLLASM

SEQ ID NO: 21478 - protein, 609 aa, Yersinia pseudotuberculosis IP 32953
MLSGWHLPVSPFVRLADDALHITLWLQGDSLPAQVFLRCEPDNEEWLLTMEGHESHDRWRYSVSLPLYEGQPTRRYCFKLLWDDHQQWFGPLGFSVIPPAQLAQFAVDVPDSGPDWVADQVFYQIFPDRFASSQADHGVQEGSYIHHAAGCPVSRREWQQPLDDVHAASTFYGGDLAGISQKIPYFQQLGVTALYLNPIFTAPSVHKYDTEDYYQVDPYLGGERDFLQLRAATREVGIKLVLDGVFNHTGDSHRWFDRYQQGENGACHHEDSPYRGWFTFLPDGRALDWKGNASLPKLNFANEEVAERIYRSDDSVVRYWLRPPYSIDGWRLDVVHMLGEDGGAKGNLHHLHGIYQAAKEENPQAYILGEHFGDARNWLHAGVEDAAMNYMGFALPVRSFLAELDVACHPIKLDAADCAYWMDEYRAGLPHSQQLRLFNQLDSHDTARFLTLLKGDKTRMQMALIWLFSWIGVPCLFYGDEIGLDGGNDPFCRKPFPWDEAQWDHDLLSLCQRMAALRHKSIALRRGGCQVIHASGDSLVFIRSYQTERVMVAIQRSDDADIFLPASPLLNVAEWQRLEGGGDLAVSETGVNMGLEGKSVTLWCGVGEC

SEQ ID NO: 21479 - protein, 212 aa, Bacteroides thetaiotaomicron VPI-5482
MQETESIDEYILQHIDAESDYLKALYRDTHVKLLRPRMASGHLQGRMLKMFVEMIRPRHILEIGTYSGYSALCLAEGLSEGGMLHTFEINDEQEDFTRPWLENSPFADKIRFYIGDALELVPHLGVTFDLAFIDGDKRKYIDYYEMVLKHLSTGGYIIADNTLWDGHVLEQPRSADTQTIGIKAFNDALVTDDRVEKVILPLRDGLTIIRKK

SEQ ID NO: 21480 - protein, 426 aa, Rickettsia conorii str. Malish 7
MDSRLRGNDIEKMSYYDIIFSKHIDKIKSEGRYREFKALKRQADNFPFAEHANKQIVMWCINDYLGMSKHAKVMHASIDALLKYGVGSGGTRNIGGNNIAILELEKELANLHKKQAALVFTSGFVANDTTLASLAKIMPDIVFFSDELNHASIIAGITSSRAEKYIYRHLDVKHLEELLQSVDINRPKIVVFESAYSMDGFFSPIKDIINLAKKYNALTFIDEVHTVGLYGKQGGGIAELLNCSDQIDIIQGTLAKAYGTIGGYITSNHNLVDAIRLTAPGFIFTTSLPPVISTAATHSIRHLKESNEERIKHQEVVTKLKNSFERFNIPYLKNESHIVPIIIGDPIKTAKASNMLLNEYGIYVQHINFPTVPRGTERLRIIPTPAHTDKMINDLSVALVQIFAELDIELSSAKELNEEVRLNLIA

SEQ ID NO: 21481 - protein, 133 aa, Ralstonia solanacearum
MSYSSKVLDHYENPRNVGAFEKGDDTVGTGMVGAPACGDVMKLQIKVNEQGVIEDAKFKTYGCGSAIASSSLVTEWVKGKTLDQALEIRNTQIAEELALPPVKIHCSILAEDAIKAAVADYKEKHGTAEQKAA

SEQ ID NO: 21482 - protein, 485 aa, Bacteroides thetaiotaomicron VPI-5482
MLLKQTKIVASISDRRCDVDFIKQLFEAGMNVVRMNTAHASREGFEALIANVRSVSNRIAILMDTKGPEVRTTANAEPIPYQIGDKVKIVGNPDQETTRECIAVSYPNFVNDLNIGGLVLIDDGDLELEVIDKTADYLLCEVKNDATLGSRKSVNVPGVRINLPSLTEKDRNNILYAIEKDIDFIAHSFVRNRQDVLDIREILDAHNSDIRIIAKIENQEGVDNIDEILEVADGVMVARGDLGIEVPQERIPGIQRVLIRKCILAKKPVIVATQMLHTMINNPRPTRAEVTDIANAIYYRTDALMLSGETAYGKYPVDAVKTMTKIAAQAEKDKLEENDIRIPLNENSNDVTAFLAKQAVKATSKLKIRAIITDSYSGRTARNLAAFRGKFPVLAICYKEKTMRHLALSYGVEAIYMPELANGQEYYFAALRRLLKEGRLQPTDMVGYLSSGKAGTQTSFLEINVVEDALKHAGETVLPNNNRYL

SEQ ID NO: 21483 - protein, 600 aa, Mycobacterium avium subsp. paratuberculosis K-10
MREYSVPARFSVGENENIATMVFEHERDDPNFVIYQRQVDGEWTDVTCAEAAAQIRSAALGLISLGVQAGDRVSIFSATRYEWAILDLAILAVGAVTVPIYETSSAEQVRWVLQDSEAVLAFAETDEHAAMVTELTAELPALRRVLHIDGSGPKALDVLAEAGAGVEPAELTARLDGLRAQDPATLIYTSGTTGRPKGCQLTHSNLLYETRGAKESLPTLLDEGQRLLIFLPLAHVLARSLTLSAFANKVTVGFTSDIKNLLPMFAVFKPTVVVSVPRVFEKVYNTAEQNAANDGKGRIFAMAVQTAVDWSEAADRGRRGPLLRAKHALFDRLVYHKLRAALGGDCHASVSGGAPLGSRLGHFFRGVGLTIHEGYGLTETSSAITVNQVGNVKIGTVGTLLPGNSMRIAEDGELLVRGGVVFTGYWRNEQATADAFTDGWFKTGDLGVLDEDGFLKITGRKKELIVTAGGKNVAPAVLEDRLRAHPLISQAMVVGDNKPFIGALITIDPEAFDGWKQRNHKGAGASVADLTTDPDLVAEVDAAIKDANQAVSHAESIRKFRILPVDFTEDTGELTPTMKVKRNVVAEKFASDLEAIYAKD

SEQ ID NO: 21484 - protein, 434 aa, Cryptococcus neoformans var. neoformans JEC21
MPQYNTIWATYVSLGVQALIPIAIGSFKSLKTPEDTRRRLRESKKGQISEEYDDEDEEPAGETLTWKESAMFPIMGSVMLLGLWAVLKYFGKKWITIILGVYFGLAGMLAVQSTFSSIIGYLLRVFGISMTTYHVRISAGFRQIFHLPTTLPTMCLIPVSIVLPLLYVYFDRHYILSNILALAFSIETLALLKLDSFFTAFLMLGLLLVYDIFWVFATPVMVTVAKGIDAPIKILAPKTSPFASPTDFAMLGLGDIIVPGLVIALCLRYDLHRYAAFYKGQNVTPRSKFGKPYFWCGVVSYVLGLGVTIGVMHHFQRAQPALLYLSPACTLGPVLLAFSRGEIKNLWTYDESPEEENKQVLDDTIEAASEAAIRARAEAKAAAEETVSKGEDTVDEAQDAGEQKEQMDDDSWMNNTGVIAPEGKPRKKKGGKKK

SEQ ID NO: 21485 - protein, 468 aa, Bacillus clausii KSM-K16
MVVGDFAQEVDTLVVGSGPGGYVAAIRAAQLGQKVTIVEKGSLGGVCLNVGCIPSKALIQAGHRAHLAKSSEDIGIRAENVAIDFEKVQEWKGSVVKKLTGGVEGLLKGNKVEIIRGEAYFSGEDTVKIMDEKSSSTYKFKHCIIATGSSPIEIPNFKYTDRVINSTGALALKEVPKKLVVIGGGYIGIELTGAYSNLGSEVVVLEGTKQILPGFEKQMAKLVERKLKKNGVTFHTEAMAKGVEETDNGVKVTAEIKGEEKVIEADYVLVTVGRKPNTEEIGLEGIGVEMDDRGYIKVDKQGRTSVKNIFAIGDIVPGPALAHKASYEAKVAAEAISGEPSEVDYLAIPAVCFSEPELATVGYNEAQAKEAGYDVKVAKFPFAANGRALSLNDADGFMKLVTRKEDGLVIGGQIAGPNASDMIAEIGLAIEAGMTAEDIALTIHAHPTLGEITMEAAEVALGTPIHTL

SEQ ID NO: 21486 - protein, 224 aa, Oryza sativa (indica cultivar-group)
LSLFCLVGCCVAGGEQKKARQRRRRKVKPEAAAALAGESGGDEQAKKRRLSDEQARFLEMSFKKERKLETPRKVQLAAELGLDAKQVAVWFQNRRARHKSKLMEEEFAKLRSAHDAVVLQNCHLETELLKLKERLADVEEEKAKLAAVAAATTGGGGGGGGGSSSPTSSSFSTVTYHPVLAGQFGVEAAAEEADLTYMSEYAYNSYMLELAAAGYCGGVYDQFS

SEQ ID NO: 21487 - protein, 440 aa, Bacillus cereus G9241
MKQHPIKIASLGMQHMLAMYAGAIIVPLIVGGGLGLNQKELTYLVSIDLLMCGVATILQALSNRFFGIGLPVVLGCTFTAVGPMIAIGKQYGVSSIYGAIIAAGLFVVIFAKLFGKLVKLFPPVVTGSVVTVIGVTLVPAAINDMAGGVGSKDFGSLENLALAFGVLLFIIIMYRFFDGFIRSISILLGLLFGTIVAAFMGKVSLQAVGEADWFHGIQPFYFGTPTFELTPIITMILVACVGIVEATGVYFALSDICNKKIGEKELTKGYRAEGLAMVLGGIFNAFPYTTYSQNVGLVQLTGVRNRVIIYTCGGMLIVLGFIPKIAAITTIIPKSVLGGAMLAMFGMVMAYGIKMLSSVDFGRQENLLIVACSVGIGLGVTVVPTLFSQLPESIRILTDNGIVLGSASAVLLNIVFNMVPQRKVKVKDEPVPIQSAVREA

SEQ ID NO: 21488 - protein, 400 aa, Streptomyces coelicolor A3(2)
MKDVYLVDAVRTPFGKYNGGLSGVRPDDLAAHAIRELLGRTPGLDPSRIDDVYFGNANGAGEENRNVARMAALLAGLPTTVPGVTVNRLCASGLEAVIQAARAIAVGDASVALAGGVESMTRAPYVLPKPDRPFPAGHTEMYSTTLGWRMVNPAMDPQWTIPLGESAELIADKHGITREQQDEYALASHRKAARAQADGLFDAELAPVPVPRRKGDPVDFAADECVRPDASLEAMAKLKPSFRKTDGTVTAGNASPLNDGAAALLLVDEEGLKATGREPLARVSATGVSATDPQYFGLAPVEAVNRALARAGRDFADLDVLELNEAFAAQVLGCVAEWPEFDPAVLNPQGGAIALGHPLGASGARLAGTVAHQLARRGSGTGIATLCIGVGQGLALVLDR

SEQ ID NO: 21489 - protein, 361 aa, Bacillus clausii KSM-K16
MSTKTIEQVEEQFETFQILNEEGEIVNESAMPDLSDEQLQELMRRMVYTRIWDQRAVSLNRQGRLGFYAPMGGQEASMLGSQFALEKDDWILPGYRDIPQIVFHGLPLYQAFLWSRGHFHGGQFPDGLNIAVPQIIIGAQIVQTAGVALGLKRKKKDNIVITYTGDGGSSQGDFYEGMNFAGAYNVPAVFVVQNNRFAISVPVEKQSAAKTIAQKAVAAGIEGIQVDGMDVLAVYKATSDARKRALAGEGPTLIETLTYRYGAHSTSGDDPTRYRTSEEEDEWGKKDPLIRFRKFLESKNLWSEEKENEVVEQAKEEIKAAVKEADKTPKQKVTDLLGFMFENPPVNIREQLEEYTAKESK

SEQ ID NO: 21490 - protein, 333 aa, Xanthomonas oryzae pv. oryzae KACC10331
MSNDTQPKIAIIGYGSQGRAHALNLRDSGFDVTVGLRPGGPTESKAQADGFTVVAPSEAVKSADLVAILTPDMVQKKLYEDVIAPNMKQGACLLFAHGLNVHFDMITPRADLDVVLVAPKGPGALVRREYEIGRGVPCIYAVYQDTSGKAEQFALTYAGGLGGARANIIKTTFKEETETDLFGEQAVLCGGASSLVQAGFEVLVEAGYQPEIAYYEVLHELKLIVDLFYEGGITRMLEFVSETAQYGDYVSGPRVIDASTKARMKDVLTDIQNGTFTKNWVAEYEAGLPNYTKFKQADLEHPIEEVGKKLRAKMVWLNGEQQAAAAPANQQAA

SEQ ID NO: 21491 - protein, 647 aa, Prosthecochloris aestuarii DSM 271
MKVYLRFLRYLAPSKSRISLVVIVSMITSLLSVVSIYSILPLLNTLFTSSSTVSQETQITAPVPPPTDQAPEKSVSKIKAKPFNQNIFNIDEAKESIKIFFEKLFYAESKQGMLLKVCLFLIFAFALKNLFIYINKQLIYSIETKTTKRLRDDVFENIIEMQLDYFNKQRVGSLMHHVNHEVQMVNNTISTSLVSFLQAPFSVIVFLVVLLSLNWQLTLFALADVGLIFIIIRTVGVRLKKLAKGFEREMGNMNSILQEKFNGIKVIKASAFEDVEFARFKSFTTDFRRRMIKINRLRNIISPLNETLLIAAIAMVLWFGGIQVFEGRMEGNELLLFAFTLYSVMGPMKSFSEAYTQIQRGMVAAESLFSVLGTEPDIQNGSRPINGFSHSIRFEDVCFKYNKSNSAPYVLDHVSFEVRKGEMVALVGQSGSGKSTVVDLLLRFYDVHSGKITIDGVDIRQLDYKQLRRMIGVVSQEVILFNDSIEQNIGYGVHGQAPHENIVKAAKLANAHAFIEEKPLKYKTQIGDRGIQLSGGQRQRLAIARAMVKNPELLIFDEATSALDNESEKIVQKAIDHALENRTAIVVAHRLSTVKNADRIIVMERGHIAESGSHDELMSNNGLYKMYHDIQFSGTAKEKKESSSHKR

SEQ ID NO: 21492 - protein, 205 aa, Shigella flexneri
RRMIESNLRLVVKIARRYGNRGLALLDLIEEGNLGLIRAVEKFDPERGFRFSTYATWWIRQTIERAIMNQTRTIRLPIHIVKELNVYLRTARELSHKLDHEPSAEEIAEQLDKPVDDVSRMLRLNERITSVDTPLGGDSEKALLDILADEKENGPEDTTQDDDMKQSIVKWLFELNAKQREVLARRFGLLGYEAATLEDVGREIG

SEQ ID NO: 21493 - protein, 216 aa, Dehalococcoides sp. CBDB1
MRIFLDTANIEEIKKGLKLGVVSGVTTNPTLVAKEGISDYKSVVQQICALLPEGDVSAEITAEDPAEMLKQAREIAKWAPNVVVKIPATTEGLEIISKLSKEGVRFNMTLCFSVNQALLGALAGAAFVSPFVGRLDDAGHDGMMLINDIVNIYKEYGFETRVIAASIRHPLHCTQAAQTGASIATVPYKVLMQMMNHPLTDSGVARFMADWKSVQK

SEQ ID NO: 21494 - protein, 516 aa, Mesorhizobium loti MAFF303099
MNIAPNSYSRTRKRLLAAAASVAVAGVIGVGALTSGTSPVLADAVRVEAPQVQGFADVVERVSPAVVSVKVKAKIQPTADDGSDDQDGFDNLPNNPQLRRFFKEFRGFGDQGGQNDEGHRRFGHRDRSNDQPRPVAQGSGFFISEDGYLVTNNHVVEEGTAFTVVTNDGKELDAKLVGTDPRTDLAVLKVEGGGKFTYVDFADDSKVRVGDWVVAVGNPFGLGGTVTAGIVSARGRDIGAGPYDDFLQIDASVNRGNSGGPTFNLNGQVVGINTAIFSPSGGSVGIAFDIPASTAKQVVEDLMKSGAVQRGWLGVEIQPVTSDIAESLGLKSNNGALVSSAQDDGPGKKAGITAGDVITQVEGKDVASPKELARLIGAYSPGKSVDVTVWRDGKSQTIKVDLGKLPASDKQASNDQQQQPAAPAKPDTLADLGLTVTKSENGKGLVVTDVDPESAAADRGIQPGDIITAVNSNEVNGTDDVTKAMTDAVKSGRKAVLMQITRDNNNRFVALPVAKG

SEQ ID NO: 21495 - protein, 577 aa, Lithospermum erythrorhizon
MESSNLKDVTGGVEDAYGEHRAIEEQLVTPWTVSVASGYSLLRDPHHNKGLAFTERERDSHYLRGLLPPAVVTQELQEKKLMENIREYQLPIHKYMAMMGLEERNERLFYKLLIDNVEELLPVVYTPTVGEACQKYGSIFRRPQGLYISLKEKGKILEVLKNWPERAIQVIVVTDGERILGLGDLGCQGMGIPVGKLALYTALGGVRPSACLPITIDVGTNNQQLLDDEFYIGLKQRRATGEEYYELLEEFMSAVKHCYGEKVLVQFEDFANHNAFELLSKYRNTHLVFNDDIQGTASVVLSGLIASLKPLGGTLGDHTFLFLGAGEAGTGIAELIALEISKQTKAPVEETRKKIWLVDSKGLVVSSRKEKLQHFKQPWAHEKEPIGNLLDAVKDIKPTVLIGTSGVGRQFTKEVVEAMASFNEKPLIMALSNPTSQAECTAEEAYTWSEGRAIFSSGSPFDPVEYNGKVFVPGQANNCYIFPGLGFGLLISGAIRVHDDMLLAASEALANQVTDEHYAKGLIYPPFSDIRKISANIAAKVAAKAYELGVATRLPRPENLVEYAERCMYSPIYRTYR

SEQ ID NO: 21496 - protein, 193 aa, Shigella flexneri
IESNLRLVVKIARRYGNRGLALLDLIEEGNLGLIRAVEKFDPERGFRFSTYATWWIRQTIERAIMNQTRTIRLPIHIVKELNVYLRTARELSHKLDHEPSAEEIAEQLDKPVDDVSRMLRLNERITSVDTPLGGDSEKALLDILADEKENGPEDTTQDDDMKQSIVKWLFELNAKQREVLARRFGLLGYEAAT

SEQ ID NO: 21497 - protein, 319 aa, Thermus thermophilus HB8
MRAIRVHEVGGPEVLRLEELPVPEPGPGEVLVRLLAIGVNFIDTYKRKGLYPVPAPFTLGEEGAGVVEKVGEGVVGVRPGDRVAFANVQGAYAEYLVVPAERLVPVPEGLDPKLAAAALLQGMTVHYLLKSTYPVAPGDQVLVHAGAGGVGQLLIQWAKRLGATVYATASTEEKRGLCLQAGADYALPYEGFAEAVKALSGGGVDVVYDGVGKDTFLGSLAALRPRGMLVLFGQSSGPVPPQDPQILNRMGSLFLTRPTLHHYTASRKELLFRAGEVFRGVLEGWLKVRIGAEFPLENAREAHEALEGRRTTGKVLLLP

SEQ ID NO: 21498 - protein, 329 aa, Glycine max
GVTVLYLGQPEPHLLNICSKTKSLWKIFCLGPLLRALQKRKKCHHWTSQVICVDGGLTVNGFEPSIINRGARWSLNGTTALVTGGTRGIGHAIVSDLAAFGAAVHTCSRTQTELNKCLQEWQSLGFQVTGSVCDVSSPSQREKLIEEVTSILNGKLNIYVNNVGTNFRKPTIEYTAEEYSQLMTVNLDSSFHLCQLAYPLLKASENGSIVFISSVAGVVSLGTGAVYAASKAAINQLTKNLACEWAKDNIRSNCVVPWATRTPLVEHVRDQKFVDDIMSRTPIKRIAEPEEVSSLVTFLCLPAASYITGQVICVDGGLTVNGFQPSMRI

SEQ ID NO: 21499 - protein, 422 aa, Schizosaccharomyces pombe
MVLIVGFNLRTSIASFSPICRSLFLFPKYRSRIIRPVVLLEKPFDKHFYATDSNPLITGFPETSKNCPPSVAATKNRLLMNCTEFDDHGNVRVISGDFKKMDLCKQNGLLPRDLRKLNTSINSIVPVILVREGSILINLLHIRALIKANSVLLFDVYGSQHSHSQSQFIYELEGRLKQKSSDFGWLPYEMRALETILVSVVNTLDSELHVLHNLVSDLLADFELDINQERLRTLLIFSKRLSGFLKKATLIRDVLDELLEQDQDLAGMYLTERLKTGKPRDLDKHDEVELLLETYCKQVDEIVQQTDNLVGNIRSTEEICNIMLDANRNSLMLLGLKLSAMTLGLGFGAVVASLYGMNLQNGLENHPYAFYITTGSIFAFAAFLSSLGILKIRRLKRIQMALYHRCNLPISLDPRSLRPPYL

SEQ ID NO: 21500 - protein, 961 aa, Oryza sativa (japonica cultivar-group)
MAALVRPAVLPVCAMTGGGGNDKRSPPQQRSWWGGNKQRLPHQPRRQPGGNGGRGGGGGALDQVLGVLRRDGEFLQAAAGAPLRDIFWLRFLEKKKQQRRRKQPKPKPKPPEQQQQQEEAAAAIQAPSFPPPSYQPGLSCLDLMTADFEALKLYIGYSKHAIEQQFLKGKRQPQHQQTPKPKLQQQQQQQKKKQQQQEQQNQTLQPPAFPPPSYPPGLSCMELMMADIEALKLYINYYVAILTTPLPQHYDPEILSRYFTSRPHILAFRTIQIIFAFVSAAVKMQISKRTNLITDATYSCNSTGSKGFNASQYMVGQLLKETFLDLGPTFVKVGQSLSTRPDITGSEISEALAELHEKVPPFPRKDAMKIIEGEFELPVSHIFSYISDEPVAAASFGQVYQGRTVDGALVAIKVQRPNLLPSVLRDIYILRLGLSFVRKVAKRKSNIALYADELGKGLVGELDYNIEAANATKFLEYHSRYSFMLVPKVLKQLTRRRVLTMEWVSGENPTDLLSLSKGISSEIAESSEKQKIEATARLLDLVNKGVEASLVQLLETGLLHADPHPGNLRYTPEGRVGFLDFGLLCMMEKKHQHAMLASIVHIVNGDWASLVYDLTAMDVVPPRTNLRRVTMDLEDALGEVTFEDGIPDIKFSRVLGKIWSVAFKYHFRMPPYYTLVLRSLASLEGLAIAADGTFKTFQAAYPYVVRKLLSDNSVATRRLLHQAIFNKRKEFQWNKITVFLKLASARGNFRYNTGVLPERKGLDVAKLVEISDASSSLHLNRATPERALHTANLCLRLLLSKESIVIRRLVMTANAKSLARDLISKDASIYRVLLSRVLADVIFQWMVKATGFKRAGQLEPHPRVTAGKNDEDLGLSKEAPALVTFQTAVRDRRLKVIFSKFVRDIREDPILMVRVSWNMFAISVVSAAIGVHRFIVVLSEEFLSTLPPPVPPPRLVQIQSI

SEQ ID NO: 21501 - protein, 481 aa, Yersinia pestis KIM
MKKTTLVLSALALSIGFAMGPVSSVVAAETAASSSQQLPSLAPMLEKVMPSVVSINVEGSAPVSSAGARGMPPQFQQFFGDNSPFCQDGSPFQGSPMCQGDLGGLGQGMPSKREFRSLGSGVIIDAGKGYVVTNNHVVDNANKISVKLSDGRSFDAKVIGKDPRTDIALLQLKDAKNLTAIKIANSDQLRVGDYTVAIGNPYGLGETVTSGIVSALGRSGLNVENYENFIQTDAAINRGNSGGALINLNGELIGINTAILAPDGGNIGIGFAIPSNMVKNLTSQMVEFGQVKRGELGIMGTELNSELAKAMKVDAQKGAFISQVVPKSAAAKAGIKAGDIIVSMNGKAINSFAGFRAEIGTLPVGSKMTLGLLRDGKPINVDVVLEQSSHSQVESGNLYTGIEGAELSNSDVSGKKGVKVDSVKPGTAAARIGLKKGDIIMGINQQPVQNLGELRKILDAKPPVLALNIQRGDTSLYLLMQ

SEQ ID NO: 21502 - protein, 933 aa, Yersinia pestis KIM
MTKYSLRARMMILILAPTLLLGLLLSTSFMVNRYNELQNQIVSAGTNIIEPLAVASEYGMSFRNRDTVRQLINLLHRRHSNIVRSISVFDVDNKLFVTSNYNYNSSQLRLPPGEPVPDSLMLSYRGDSLILRMPIVSESNLSSEQASGQGESDQILGYIAIDLDLQSVRLKQYKEIFISTLLLLFCMCVAILFAYRLMRDVTGPIRNMVNTVDRIRRGQLDSRVEGHMLGELDILKNGINSMAMSLAAYHEEMQQNIDQATSDLRETLEQMEIQNVELGLAKKRAQEASRIKSEFLANMSHELRTPLNGVIGFTRQTLKTSLTPTQTDYLQTIQRSANNLLCIINDVLDFSKLEADKLILEHIPFSLRETLDEVIILLAHTAHEKGLELTLHINNDVPDQVLGDAMRLQQIVTNLLGNAIKFTEEGNIDILVVVKAIASQQVTLMVEIHDTGIGISESQQAQLFQAFRQADASTSRRHGGTGLGLVITERLVKEMGGNISFQSQMSCGSIFRFHLTLELNESIPYRQPDMAHLEGKQLAYIERNSTAARATINILNTTPLQVTHRQSLAQLPEQHYDFLLVGVPIPFRNNMAIHQDKLLTALKIADHVILALPSQSQVEAEQLKQIGAKDCLLKPISSIRLIPLLLAEDTHSKVPSEEQPRKQPKLPFRVMAVDDNPANLKLIGTLLEEQIEETVLCDSGAMAITYAREHTLDIILMDIQMPEIDGIRASEIIHQIPHHQETPIIAVTAHAVKGQQEQLLRLGMADYLAKPIDEARLLQVLSRYQSDNPPLSTASTASTASTASTASTAESLPLPVPKGAGVIDWAQAVRQAANKEDLARDLLTMLLEFMPQITARVQAILAGADDGDILNLVHKFHGSCACSGVPRLRQLCMTIELQLRQQVNLQDLEPEWLELLDEIENVSEAAKTYLRTE

SEQ ID NO: 21503 - protein, 457 aa, Silicibacter pomeroyi DSS-3
MLKNDQLDQWDRENFFHPSTHLAQHARGDSANRVIKTASGVFIEDRDGNKLLDAFAGLYCVNVGYGRQEIADAIADQARELAYYHSYVGHGTEASITLAKMILDRAPANMSKVYFGLGGSDANETNVKLIWYYNNILGRPEKKKIISRWRGYHGSGLVTGSLTGLELFHKKFDLPVNQVIHTEAPYYFRRADPDQSEAQFVAHCAAELEALIEREGADTIAAFIGEPVLGTGGIVPPPAGYWEAIQAVLRKHDILLIADEVVTGFGRLGTMFGSDHYGIEADIITIAKGLTSAYAPLSGSIISDKVWKVLEQGTDENGPIGHGWTYSAHPIGAAAGVANLKLIDRLNLVQNAGETGAYLNATMTEALAGHPNVGEVRGAGMLCAVEFVKDKDSRLFFDAADKIGPQISAKLLEQDKVIARAMPQGDILGFAPPFCLSRAEADQVVDATLRAVRTVLG

SEQ ID NO: 21504 - protein, 347 aa, Triticum aestivum
VVSTQSPDNPDWFQGTADAVRQYLWLFEEHNVMEYLILAGDHLYRMDYEKFIQAHRETDADITVAALPMDEERATAFGLMKIDEEGRIIEFAEKPKGEQLKAMMVDTTILGLDDARAKEMPYIASMGIYVISKHVMLQLLREQFPGANDFGSEVIPGATSTGMRVQAYLYDGYWEDIGTIEAFYNANLGITKKPIPDFSFYDRSAPIYTQPRHLPPSKVLDADVTDSVIGEGCVIKNCKIHHSVVGLRSCISEGAIIEDTLLMGADYYETEADKKLLAEKGGIPIGIGKNSHIKRAIIDKNARIGDNVMIINVDNVQEAARETDGYFIKSGIVTVIKDALLPSGTVI

SEQ ID NO: 21505 - protein, 311 aa, Bacillus coagulans
MDMLSAYSAVNQGHRHPKIIEALKNQADKVTLTSRAFHNELLGPWTKRMAKLTKKDKVLPMNTGVEAVETAIKAARRWAYQVKGVTENQAEIIAADGNFHGRTLNAISLSNDPDATKNYGPFVPGINKVSYGDINAIEKAITENTAAIILEPIQGEAGIIIPPEGYLKKVRELCSERNILFIADEVQTGFARTGKMFACEWENVEPDIYVMGKALGGGVFPISAIAANNEIMDVFTPGSHGSTFGGNPLACAVSMAAIDVIEEENLVNKSLESGKYFADKLRAINFEGIKEVRARGLFIGMEFHQPVRAIC

SEQ ID NO: 21506 - protein, 491 aa, Silicibacter pomeroyi DSS-3
MTETALSARADIADKALVRSFSYINGKWCAAANGETFAVTDPADGTELGHAASLSAEESSAAVDAAQAAFPAWAGRLPQERAALLRRWYELLLEHKEDLARIMVLEQGKPLSEARGEIDYGAAFVEFYAEEAKRPNIEGVTSHLPDAEVELWREPVGVAALITPWNFPSAMLTRKAAAALAAGCTVVAHPSRETPFSALALAELAERAGVPPGVFNVVTGTAATVVEPWTRDTRVRALSFTGSTEIGKLLYRQSADTVKRLVMELGGHAPVIVFKDCDLDKAVSETIKAKFATSGQDCLGANRILVERPVYADFCARFTLAAQALTLGPGMADCDLGPLMNEQAVQKQEDHVADALARGARLACGGRRHPRGPLFYEPTVLVDVPPDALIMSQETFGPVAAIAPFDTEEEAVARANDSEYGLVAYVHSNDPRRIYRLSRALQYGMVAVNRTKVTGAPIPFGGTKQSGLGREGARLGMEAFTEVKYICRDWA

SEQ ID NO: 21507 - protein, 218 aa, Acidosasa purpurea
GMDVSEWDPSKDKYISVKYDKTTVMEAKALNKEALQAEVGLPVDGKIPVVAFIGRLEEQKGPDVMAAAIPQLMEENVQIILLGTGKKKFERMLKSAEEKYPGKVRAVVKFNAPLAHQIMAGADLLAVTSRFEPCGLIQLQGMRYGTPCVCASTGGLVDTIIEGKTGFHLGRLSVDCNVVEPGDVQKVATTLKRAIRLVGTPAYQEMVKNCMAQDLSWK

SEQ ID NO: 21508 - protein, 241 aa, Nostoc punctiforme PCC 73102
MSGHKGKILVVDDEASIRRILETRLSMIGYDVVTASDGEEALSTFRVSTPDLIVLDVMMPKLDGYGVCQELRKESDVPIIMLTALGNVADRITGLELGADDYMTKPFSPKELEARIACILRRCFHKTSVNTTPNSTIIRVGNLKIDTNKRQVYKNEQRIRLTGVEFSLLELLVNNSGKVFSRLEMLQLLWGCVPGLHLDTRVVDVHISRLRTKVEDDPNLPELIITARGSGYFFPRIIESQ

SEQ ID NO: 21509 - protein, 218 aa, Arundinaria gigantea
GMDVSEWDPSKDKYISVKYDKTTAMEAKALNKEALQAEVGLPVDGKIPLVAFIGRLEEQKGPDVMAAAIPQLMEENVQIILLGTGKKKFERMLKSAEEKYPGKVRAVVKFNAPLAHQIMAGADLLAVTSRFEPCGLIQLQGMRYGTPCVCTSTGGLVDTIIEGKTGFHLGRLSVDCNVVEPGDVQKVATTLKRAIKLVGTPAYQEMVRNCMAQDLSWK

SEQ ID NO: 21510 - protein, 218 aa, Chimonocalamus fimbriatus
GMDVSEWDPSKDKYISVKYDKTTAMEAKALNKEALQAEVGLPVDGKIPLVAFVGRLEEQKGPDVMAAAIPQLMEENVQIILLGTGKKKFERMLKSAEEKYPGKVRAVVKFNAPLAHQIMAGADLLAVTSRFEPCGLIQLQGMRYGTPCVCASTGGLVDTIIEGKTGFHLGRLSVDCNVVEPGDVEKVATTLKRAIKLVGTPACQEMVRNCMAQDLSWK

SEQ ID NO: 21511 - protein, 545 aa, Yersinia pestis KIM
MTTNYIFVTGGVVSSLGKGIAAASLAAILEARGLNVTIMKLDPYINVDPGTMSPTQHGEVFVTEDGAETDLDLGHYERFIRTKMTRRNNFTTGRIYSEVLRKERRGDYLGATIQVIPHITNAIKERIIEGGEGHDVVLVEIGGTVGDIESLPFLEAIRQMAVDVGREHTLYMHLTLVPYLAAAGEVKTKPTQHSVKELLSIGIQPDVLICRSDRAVPANERAKIALFCNVPEKAVISLKDVDSIYKIPGLLKSQGLDDYICKRFSLTCPEANLAEWEQVLYEESNPGGEVTIGMIGKYVELPDAYKSVIEALKHGGLKNRLTVNIKLIDSQDVETRGEEMLKELDAILIPGGFGYRGVEGKVLAARYAREHNIPYLGICLGMQVALMEFARNVAGMENANSTEFVPDCKYPVVALITEWRDEDGNVEIRTEESDLGGTMRVGGQQCHLTEGSLVRQMYGEPTIVERHRHRYEVNNMLLKQIEAAGLRVAGRSADNKLVEIIELPDHPWFVACQFHPEFTSTPRDGHPLFAGFVKAAGDYQKRQVK

SEQ ID NO: 21512 - protein, 218 aa, Bacteroides thetaiotaomicron VPI-5482
MKFFIDTANLEQIQEAYDLGVLDGVTTNPSLMAKEGIKGTENQREHYIKICKIVNADVSAEVIATDYEGMIREGEELAALNPHIVVKVPCIADGIKAIKYFTEKGIRTNCTLVFSVGQALLAAKAGATYVSPFVGRLDDICEDGVGLVGDIVRMYRTYDYKTQVLAASIRNTKHIIECVEVGADVATCPLSAIKGLLNHPLTDSGLKKFLEDYKKVNG

SEQ ID NO: 21513 - protein, 126 aa, Acetabularia acetabulum
YSFLPPLTDEQISKQVDYILANSWTACLEFAASDQAYAGNDNCIRMRPVASTYQDNRYWTMWKLPMFGCTDGSQVLSEIQACTNAFPDAYIRFVCFDAYRQVQISGFLVHRPPSATDYRLPADRQV

SEQ ID NO: 21514 - protein, 218 aa, Chimonocalamus pallens
GMDVSEWDPSKDKYISVKYDKTTAMEAKALNKEALQAEVGLPVDGKIPLVAFVGRLEEQKGPDVMAAAIPQLMEENVQIILLGTGKKKFERMLKSAEEKYPGKVRAVVKFNAPLAHQIMAGADLLAVTSRFEPCGLIQLQGMRYGTPCVCASTGGLVDTIIEGKTGFHLGRLSVDCNVVEPGDVEKVATTLKRAIKLVGTPAYQEMVRNCMAQDLSWK

SEQ ID NO: 21515 - protein, 248 aa, Bacteroides thetaiotaomicron VPI-5482
MKKIVLLRHGESAWNKENRFTGWTDVDLTEKGVAEAEKAGVTLREYGFNFDKAYTSYLKRAVKTLNCVLDKMNLDWIPVEKSWRLNEKHYGDLQGLNKAETAEKYGEEQVLIWRRSYDIAPNPLSESDLRNPRFDYRYHEVSDAELPRTESLKDTIDRIMPYWESDIFPALKDAHTLLVVAHGNSLRGIIKHLKHISDEDIIKLNLPTAVPYVFEFDENLNVANDYFLGNPEEIRKLMEAVANQGKKK

SEQ ID NO: 21516 - protein, 218 aa, Gaoligongshania megalothyrsa
GMDVGEWDPSKDKYISVKYDKTTAMEAKALNKEALQAEVGLPVDGKIPLVAFIGRLEEQKGPDVMAAAIPRLMEENVQIILLGTGKKKFERMLKSAEEKYPGKVRAVVKFNAPLAHQIMAGADLLAVTSRFEPCGLIQLQGMRYGTPCVCASTGGLVDTIIEGKTGFHLGRLSVDCNVVEPGDVQKVATTLKRAIKLVGTPAYQEMVRNCMAQDLSWK

SEQ ID NO: 21517 - protein, 1289 aa, Coptis japonica
MAEENGLDGDLNNHQATASTSNSPVQGANGTSETKGAQEKSEKSKEEEKIGQSVPYYKLLSFADSKDVLLMVIGTIAAVANGASMPVMTLLLGDLINAFGQNANNTDTLRVVSKVALKFVYLSIGAGVASFFQVACWMVTGERQAARIRSLYLKTILRQDVAFFDKETNTGEVVGRMSGDTVLIQDAIGEKVGKFIQLFSTFIGGFLIAFVKGWLLTLVMLTSIPPLVFCGALMTITISKMASRGQVAYSQAGIVVEQTIGSIRTVASFTGEKHAVTQYEKYLNKAYLAGIHEGLASGVGLGSVLLVIFCSYSLAVWFGGKMIIEKGYNGGNVINIIVAVLTGSMSLGQASPCLGAFAAGQAAAYKMLETIKRKPEIDSYDTSGHKSDDIRGDIELRDVSFTYPARPDEQIFNGFSLFIPSGTTSALVGQSGSGKSTVISLIERFYDPQAGEVLIDGVNLKDFQLRWIRGKIGLVSQEPVLFASSIRDNIAYGKDGATVEEIKAATERANASKFIDKLPQGLDTLVGEHGTQLSGGQKQRIAIARAILKDPRILLLDEATSALDAESEHIVQEALDRIMVNRTTVIVAHRLSTVRNADTIAVIHRGKIVEKGSHLDLLLNPDGAYCQLIRLQEIGRSEVDKAENVESGLNSSQQHSIGRSISRGSSGVGNSSRHSFSVSFGLPTGHIYETTAGLESTSPAPIGQTQEVPLRRLATLNKPEIPVLLLGVISAMVNGVIFPIFGVLLSSVIKTFYEPEDKLRKDTRFWAFMFIILGVASFVAAPATAYFFAVAGCRLIQRIRSMCFRTVAHMEIDWFDEPEHASGAIGAKLSADASTVRGLVGDALALLVQNAATAVCGLVIAFVANWTLALIILVLIPLIGVNGYVQMKFMKGFSADAKMMYEEASQVANDAVGSIRTVASFCAEEKVMQLYKKKCEGPMKTGIRQGLISGIGFGISFFLLFNVYATSFYAGARLVDAGKTTFSDVFRVFFALTMAALGISQSSSLAPDSSKAKSSTASIFGILDRKSKIDSSDESGMTVENVKGEIELRHISFKYPTRPDIQIFRDLSLAIHSGKTVALVGESGSGKSTVISLLQRFYDPDSGHITLDGIEIQKFQLRWLRLQMGLVSQEPVLFNETIRANIAYGKEGDATETEILAAAELANAHKFISGLQQGYDTVVGERGIQLSGGQKQRVAIARAMVKAPKILLLDEATSALDAESERVVQDALDKVMVNRTTVWVAHRLSTIKNADVIAVVKNGVIAEKGKHNDLINVKDGVYASLVALHTSAS

SEQ ID NO: 21518 - protein, 259 aa, Arabidopsis thaliana
MAPVKRRVFKTNNEMAVELAKYTADLSSKFCKEREVFTVVLYGGDLIAWLWKLLEAPYIDSIEWSKWHIFWVDERVCAWDHADSNYKLAYDGFLSKVPIPAENIYAINNGLGAEGNAELAAERYEECLKQKVNQNIIRTYKSSGFPQFDLQLLGMGPDGHMASLFPGHAQINEKVKWVTSITDSPKPPSKRITFTLPVINCASYNVMAVCDKEQADSAAAALNHTKDLPAGRLTADVEVVWFLDQAAASKLPHGWCSIL

SEQ ID NO: 21519 - protein, 435 aa, Rickettsia conorii str. Malish 7
MTNENNNDSEFAELKIRGKIFKLPILKASIGEDVIDISRVSAEADCFTYDPGFMSTASCQSTITYIDGDKGILRHRGYDIKDLAEKSDFLEVAYLLIYGELPSGEQYNNFTKQVAHHSLVNERLHYLFQTFCSSSHPMAIMLAAVGSLSAFYPDLLNFKEADYELTAIRMIAKIPTIAAMSYKYSIGQPFIYPDNSLDFTENFLHMMFATPCTKYTVNPIIKNALNKIFILHADHEQNASTSTVRIAGSSGANPFACISTGIASLWGPAHGGANEAVINMIKEIGSSEYIPKYIAKAKDKNDPFRLMGFGHRVYKNYDPRAAVLKETCKEVLKELGQLDNNPFLQIAIELEAIALKDEYFIERKLYPNVDFYSGIIYKAMGIPSQMFTVLFAIARTVGWMAQWKEMHEDPEQKISRPRQLYTGYVHREYKGIRER

SEQ ID NO: 21520 - protein, 285 aa, Yarrowia lipolytica CLIB122
MAEGDYNAVREAIADILDNDDYDDGSIGPVLVRLAWHASGTYDKATGTGGSNGATMRYMKEAKDEANNGLENARQFLEPIKAKFPWITYADLWTLAGVVAIEEMDGPKVPWKPGRQDYVDETNVPPNGRLPDGAQGQDHLRDIFYRMGFNDQEIVALCGAHNMGRCHMDRSGFEGAWVPNPIRFANTYFKLLMNEEWKLTTLKNGVKQYFNEDEELMMLPADYSLMQDPEFHKWVEIYAADKEKFFEDFSKVFAKLIELGVRRGPDGKAKTNFIDRNNNDPNPRL

SEQ ID NO: 21521 - protein, 471 aa, Bacillus megaterium
TIKEMPQPKTFGELKNLPLLNTDKPVQALMKIADELGEIFKFEAPGRVTRYLSSQRLIKEACDESRFDKNLSQALKFVRDFAGDGLFTSWTHEKNWKKAHNILLPSFSQQAMKGYHAMMVDIAVQLVQKWERLNADEHIEVPEDMTRLTLDTIGLCGFNYRFNSFYRDQPHPFITSMVRALDEAMNKLQRANPDDPAYDENKRQFQEDIKVMNDLVDKIIADRKASGEQSDDLLTHMLNGKDPETGEPLDDENIRYQIITFLIAGHETTSGLLSFALYFLVKNPHVLQKAAEEAARVLVDPVPSYKQVKQLKYVGMVLNEALRLWPTAPAFSLYAKEDTVLGGEYPLEKGDELMVLIPQLHRDKTIWGDDVEEFRPERFENPSAIPQHAFKPFGNGQRACIGQQFALHEATLVLGMMLKHFDFEDHTNYELDIKETLTLKPEGFVVKAKSKKIPLGGIPSPSTEQSAKKVR

SEQ ID NO: 21522 - protein, 471 aa, Bacillus megaterium
TIKEMPQPKTFGELKNLPLLNTDKPVQALMKIADELGEIFKFEAPGRVTRYLSSQRLIKEACDESRFDKNLSQALKFVRDFAGDGLFTSWTHEKNWKKAHNILLPSFSQQAMKGYHAMMVDIAVQLVQKWERLNADEHIEVPEDMTRLTLDTIGLCGFNYRFNSFYRDQPHPFITSMVRALDEAMNKLQRANPDDPAYDENKRQFQEDIKVMNDLVDKIIADRKASGEQSDDLLTHMLNGKDPETGEPLDDENIRYQIITFLIAGHEATSGLLSFALYFLVKNPHVLQKAAEEAARVLVDPVPSYKQVKQLKYVGMVLNEALRLWPTAPAFSLYAKEDTVLGGEYPLEKGDELMVLIPQLHRDKTIWGDDVEEFRPERFENPSAIPQHAFKPFGNGQRACIGQQFALHEATLVLGMMLKHFDFEDHTNYELDIKETLTLKPEGFVVKAKSKKIPLGGIPSPSTEQSAKKVR

SEQ ID NO: 21523 - protein, 102 aa, Oryza sativa
  misc_feature (16)..(16): Xaa can be any naturally occurring amino acid
  misc_feature (62)..(62): Xaa can be any naturally occurring amino acid
  unsure (1)..(102): unsure at all Xaa locations
MKRSCCGGYCGCGSCXHCGGGCCGCTMFLDVEATATTKTYVLAGPCNKASSGGMEMAVESAXNGGCRCNTCKSGTSCRGLCCCSCNWNLSTLSPGCMRIYRM

SEQ ID NO: 21524 - protein, 71 aa, Triticum aestivum
MASRSCTFLEILLAIILPPLGVFLHYGCCSMEFCICLLLTILGYIPGIIYAVYMLVALGSEERDRDYNTLA

SEQ ID NO: 21525 - protein, 310 aa, Yarrowia lipolytica CLIB122
MNDAVMAKYTKDKKVGEGTFAVVYVGKQVKTDRKIAIKQIKEGEFKDGVDMSAIREIKFLQEIRHANVIELIDVFTAGPRLSMVLEFLPTDLEGLIKDTKILFRLGDVKAWMLMATRGLHHCHRLQILHRDLKPNNLLISPTGELKIADFGLARQMPNPKDKMTPTVVTRWYRAPELLFGARYYTPAVDVWSLGLIFAELMLRLPYCPGEDDIDQIDKTFRAFGTPTEEEWPGLTSLPAYPKTVNKYPHPSVQELKMRFSAATENGLELFQAMTELNPADRVSCEEALTADYFTEFPRPTKLAELPGRTE

SEQ ID NO: 21526 - protein, 719 aa, Oryza sativa
MTGIDLNTVEEDEEEAAEEVAANGSSPAPARAGAVCLELWHACAGPVAPLPRKGGVVVYLPQGHLEHLGDAPAAAAAAAAVPPHVFCRVVDVTLLADAATDEVYAQLSLVPEKEEVARRADDGEGEDGDGMKQRFARMPHMFCKTLTASDTSTHGGFSVPRRAAEDCFPPLDYSQQRPSQELVAKDLHSTEWRFRHIYRGQPRRHLLTTGWSAFVNKKKLVSGDAVLFLRGDDGELRLGVRRAAQLKNGSAFPALYNQCSNLGTLANVAHAVATESVFNIYYNPRLSQSEFIVPYWKFMKSLSQPFSVGLRFKMRYESEDATERRYTGIITGSGDTDPMWHGSKWKCLLVRWDDDAEFRRPNRVSPWEIELTSSVSGSHLSTPHSKRLKPCLPHVNPEYMVPRGGGCPDFAESAQFHKVLQGQELLGFKSHGGTAAATSQPCEARHLQYIDERSCSSDASNSILGVPRLGDRAPLGNPGFSYHCSGFGESHRLQKVLQGQELFRPYRGTLVDASMGSNGFHQQDSPRAPGVVNKWQAQLHGRAAFHGPPALALPSQSSSPPSVLMFQQANSKMPRLEFGHGQLDKHENDRRVRFGPSEGIERREQRIPLQPYPTSGEVIDGQVTVEKSHSPGRHGKDGPDNKAVGTNSCKIFGISLTEKVPAREELDDGDANYSLQSLKQVPKSLGNSCATMVAEYQGDGGTDDSDIFILDVGVGALIM

SEQ ID NO: 21527 - protein, 164 aa, Tripsacum dactyloides
MEGGESAKGTVLVTGASGFVGSWLVMKLLQAGYTVRATVRDPANVGKTKPLMDLPGATERLSIWKADLAEEGSFDDAIRGCTGVFHVATPMDYQSKDPENEVIKPTVEGMISIMRACKEAGTVRRIVFTSSAGTVNLEERQRPVYDEDSWTDVDFCRRVKMTGW

SEQ ID NO: 21528 - protein, 461 aa, Candida glabrata CBS138
MSKAVITGAAAATAAVAAITFNQAVNEQGKRKQTALSITRDHQACSWTRIKEGLWDDAVSFKDALLLRGIYNDNTAKYIERGRDDLAQQISDSVKSSPPPQLQRSVKGRNVFSSMDEDRRNERDDSQDNKSIFNWGYNDIEKAKAVAIGEFDAANKKYNDILDKWKHSKTSFFSAGDAALKEQVENCKKMLEEKRQALKKASEDFNQYTKQSFNEISNNIDKQDVLNGIQNKKQDLWSWLKDDTSKDGKPDVDKLAAASVVGWGERAQEFAEEELEERRRSMQIGPSEAQRRLDELKKYKENGWFTYRKGDETEEEMAKRVIKGLEGWGETAAQLAREEYEDLKWQAAKTKEEAAALVDDASQKLAEAKSDVDKTASKWWQFGKEKKDEVHEKSLANYEAAKRDYENSKKALQKWTDKQRGNFWDMANDSVSSIQGQVDKAHEVVTDKLDDAKSYTKEKKN

SEQ ID NO: 21529 - protein, 544 aa, Dehalococcoides sp. CBDB1
MSKFIFVTGGVVSSVGKGITVASLGNILKSRGLSVSVQKLDPYLNVDPGTMSPYQHGEVFVTQDGAETDLDLGSYERFIDIELTADSTVTSGQVYSEVINKERRGDYLGGTIQVVPHVTQEIKARIQRLADRSKADVVIVEVGGTVGDIEGQPFLEAIRQMRNDTGRDNVLYIHVTLLPYIQSTQELKTKPTQHSVNELRRIGIQPDIIVCRADYPISEGIRDKISLFCDVERKAVIFMPTVSTIYEVPLKLESEGVGDLLVSRLHLNASPSDLSVWRGLVEKIKEPTPTVRIALVGKYVELKDAYYSVRESLCHAAIHNGRDIQIDWVHAEDIEKNGPEEYLKHVQGIIIPGGFGIRGIEGMISAVKYARENGIPYLGLCLGMQVMVIEFARYVLGSDKAHSTEFEPDSPYPVIDLLPEQRGVDSKGGTMRLGNYPCVIQPGTMAGQAYGNNLINERHRHRFEFNNDYRDTLSKAGMLFSGLSPDGKLVEICEVTGHPFMMGSQFHPEFLSRPNRPHPLFREFINAAKKVIRDGEQPSLPLSP

SEQ ID NO: 21530 - protein, 334 aa, Ralstonia solanacearum
MKPGILVTRAIFPEVLARLRETFDVADNQADAVHPPEALAERLQGRVGLLANAADAINADLIARVPTLRAVANMAVGYNNLDLPAMTRAGILATNTPDILTETTADFGWALLMAAARRVPESERWLRAGHWKRWTYDMFLGAEVHGSTLGILGMGRIGQALARRASGFSMRVIYHNRSRLSPEIERDTRATYVGKDELLAQADHLVLVLPYSSESHHAIGAAELARMKPTATLVNLARGGIVDDAALARALAEKRLFAAGLDVYEGEPAVHPALLEAEPVSLTPHIASATHGTRLGMANLAADNLIAALGFGPRAGQPPNLLNPEALSVRRASA

SEQ ID NO: 21531 - protein, 164 aa, Tripsacum dactyloides
MEGGESAEGTVLVTGASGFVGSWLVMKLLQAGYTVRATVRDPANVGRTKPLMDLPGATERLSIWKADLAEEGSFDDAIRGCTGVFHVATPMDFQSKDPENEVIKPTVEGMISIMRACKEAGTVRRIVFTSSAGTVNLEERQRPVYDEDSWTDVDFCRRVKMTGW

SEQ ID NO: 21532 - protein, 396 aa, Streptomyces coelicolor A3(2)
MKAVTWQGKRDVRVEEVPDPKIQEPTDAVIRVTSSGLCGSDLHLYEVLTPFMTPGDILGHEPMGIVEEVGPEVTNLKPGDRVVVPFQIACGHCYMCDTGLPTQCETTQVTGEGMGAPLFGYTRLYGAIPGGQAEYLRVPQAQFGPIKVPEGPADDRFVYLSDVLPTAWQAVEYAAVPQGGSLAVLGLGPIGDMACRIARLKGIDKVFGVDLVPERLERARERGVETFDLRSFDNEKELVSAIQDRTGGRGPDAVIDAVGTEAHGGAVAKLVQQTAAVLPRAIGGPLAERFSIDRLAALYTAIDLVRRGGTISLSGVYGGMADPMPMLTMFDKQIQLRMGQANVRRWSDEIVPYLTDDDPLGVDGFATHRMPLADAPHAYEMFQKKQDGAVKVLMQP

SEQ ID NO: 21533 - protein, 661 aa, Bacillus cereus ATCC 14579
MEQLKHHVTDNQRKHALTTNQGVKIAEDEFSLKMGLRGPTLMEDFHFREKMTHFDHERIPERIVHARGVGVHGYFQLYESLEAYTKADFLTNPSKKTPVFVRFSTVQGSKGSNDTVRDVRGFATKFYTDEGNYDLVGNNMPVFFIQDAIKFPDFVHAVKPEPHNDIPQGASAHDTFWDFVAHNPESTHMVMWQMSDRAIPRSLRMMEGFGVHTFRLINTAGKAHFVKFHWKPTLGVHSLVWDEAQRIAGKNPDFHRQDLYEAIEKGDYPEWELGLQLIPEEDEHKFDFDILDPTKLWPEEEVPVKLVGKMTLNKNVDNFFAETEQVAFHPGHVVPGIDFSNDPLLQGRLFSYTDTQLSRLGGPNFHQIPINQPVCPFHNNQRDGMHQMQIHRGQTSYHPNGLNNNQPATVQAEQGGYEHYQEKIDGHKIRGRSKSFLNFYSQAKLFYNSMSPIEKQHIKEAFCFEVGKCKSDMVKANVIALLNHVDRQLAQEVANIVGAPLPKENHEVNSDAKSPALSMSNTIFKSDSKNVAILLNGDPSVSLLSEWIQAFAQHRMNYSIIDNKIYHFNDSIKVTDTYTTTDSSLFDAVLVFSSESVIHPPVLEFTETTFKHFKPIAHVLSNPHALDNSKIKLDGAGVYNLTNTSIESFIEGIAQGRFWNR

SEQ ID NO: 21534 - protein, 643 aa, Mycobacterium avium subsp. paratuberculosis K-10
MCGLLAFVAARAGAVGADDAIARASHLMRHRGPDEPGTWAGADGSVVFGFNRLSIIDIAHSHQPLRWGPPETPDRYELVFNGEIYNYLELRDELAARHGAVFATDGDGEAIVAGFHHWGTDVLTRLRGMFAFALWDTVTRELFCARDPFGIKPLFVATGTGGTAVASEKKCLLELAELIGFDTAIDERAVQHYTVLQYVPEPETLHRGVRRLESGCYARIRPGAAPDVTRYFVPRFAAVPITRDTEQARYDEITAVLEDSVAKHMRADVTVGAFLSGGIDSTAIAALAIRHNPRLITFTTGFEREGFSEIDVAVASAEAIGARHIAKVVHPDEFVAALPEIVWYLDEPVADPALVPLFFVAREARKHVKVVLSGEGADELFGGYTIYREPLSLRPFDYLPRPVRRSMGKVSRPLPDGMRGKSLLHRGSLTLEERYYGNARSFSDTQLRDVLPGFRAEWTHTDVTAALYAQSIGWDPVARMQHIDLFTWLRGDILVKADKMTMANSLELRVPFLDPEVFAVASRLPVEAKITRTTTKYALRRALEPIVPAHVLHRPKLGFPVPIRHWLRAGELQDWAYSMVASSQAGHLVDLGAVRRMLDEHRNGVSDHSRRLWTVLIFMLWHAIFVEHSVVPQISEPVYPVQL

SEQ ID NO: 21535 - protein, 338 aa, Pyrococcus furiosus DSM 3638
MELPILPTSVIGSYPKPRWLLRMYKLRELGKIPEEDFKEAVRDASISVLREHERAGIDIPWDGEMGRSEMTEYFTSKIKGFKFYGPVRVWGNAYFNKAAAVDKLEYEEPLVLDEFLWVKENTTREIVKIPITGPYTIAEWSFNEYYPDKESFVMDLAEIINKELKVLEKHGAKFVQLDEPAMLNHPSEVPLAVDAINRAVKGIKMKVGLHVCYSNYNLLADYFDEIKVTQFALEFANRNFRDMDFLKKLSNKELGFGVVDVHNPRVESVEEIRQAIKKVFTYLEPEWVYINPDCGLKLLDRKIAYQKLVNMVQAVRGVRKELEKEGKTTIEFRTLKDI

SEQ ID NO: 21536 - protein, 374 aa, Bacillus clausii KSM-K16
MKMNDLIHIRRAFHQIPELGFNEFKTQKLLLDTISNMEQTRLQIKTWKTAVFVRVEGRQDYTIAYRADMDGLPITEETGYSFASKHEGAMHACGHDFHMTIALGLLDHFASHEPECHLLFIFQPAEEGPGGAKPIIEADVLGAWQPDEIYALHIDPNLPVGSIATKPGLLFANTSELFIDFQGKGGHAAYPHTANDMVVACAHFVTQVQTVVARNIDPLDSAVVTLGVIAGGTKQNVIAATARLEGTIRTLSMASMEVVKSRLEAIAAGIEASFACKIAIDYGSNYCEVYNDPELAEAFAAFSKTRKGITFVEAEEAMTGEDFGYFLKQYPGVMFWLGVDSPYGLHDSRLQPSEEAIGIAIEHMVAFLSAKKPR

SEQ ID NO: 21537 - protein, 207 aa, Pseudomonas putida KT2440
MLKIWGRKNSSNVRKALWIAHELGLDFESIDAGGAFGVVNEPHYRARNPNGLVPMLEDGDLTLWESNTIVRYLCAEYGTEQGWYLADPRQRALADKWMDWTTSSFATPFRPLFWGLLRTPEDQRDWVAINAAHKQCAQLLAIADETLASQPYLSGDQIGMGDIPLGSFIYAWFELPIERPDMYHLQAWYERLKQRPAYQAAVMTALT

SEQ ID NO: 21538 - protein, 533 aa, Schizosaccharomyces pombe
MSSAKRRLYSLIQNATEPYAFEPDLAVNLDIADLINQTGGNLPREAAFAIVRKVNDRNPTVAYLALNLLDICVKNCGYAFRLQIASKEFLNELVRRFPERPPSRLNKIQVMILSLIEEWRKTICRVDRYKEDLGFIRDMHRLLSYKGYTFPEIDKENLAVLSQKSVLKTAEELEKEDREAMSAKLQELIRRGTPADLAEANKLMKVMAGYDTEQKQKYKEHVLVDLEKVKRKAALFGEMLNEVSESDKLASGDLYDELAYSLKAAQRKVDKILEEMSPEDDSYVTVSDLKSLIASLLTQYDHLLEGDFSSARTVAADNNSLLQATTESAKSNSKTSANASNTQSAMDLLIDLDIGSDAQSPSLPASSSQMPTSSFNMESLSQSLLGTVEAPAEVGAISLTESFNSPVSNSSPNVPINNFTSTCAFENSHLNFQITPKSKTRDQVVLLATYTNLSPYDTVENLQSFIAVPKKYNLVLQPQSGTNLSPLQKDGIYQEMIVTKLLDVTELPVRFKLTYKVNGRSQEYTGQSSIRLL

SEQ ID NO: 21539 - protein, 215 aa, Euglena gracilis
MGRRPAKCYRYCKNKAYPKSRYCRGVPEAKIRIYDCGMRKLNADTFPLTYHLISMEREQIGSEALEAARINANKYMIKNAGKEAYHIRVRVHPFHVCRINKMLSCAGADRLQQGMRGAFGKPNGLAARVRIGQPLMSIRVKPQHEAVVVAALKRASYKFAGRQVIAKSTMWGFTEIRSENYVKWKEEGKFRVDGVSTKILRNRGRLHRAKRVRAA

SEQ ID NO: 21540 - protein, 603 aa, Photobacterium profundum SS9
MQAQPSSNETINIKSAQPNEKVKKLSILFELVKFVRPYKGRVAAALVALIFTASLTLSIGHGIRILVDEGFIQQSIHDLGSAIQFILAITVLISIGTFFRFYLVSSVGERVSADIRLAVFNHVITLHPSFFETNGSGDIMSRITTDTTLLQSIIGSSFSMAMRSALMCVGAIIMLFATNIKLALIVLASVPFILVPILVYGRRVRALSRKSQDSMADVGSYAGEAIEHIKTVQSYSHEAQERESFSNEVEKAFEIGRQRVKQRAILISGVIVIVFSAIAGMLWVGGSDVINGTMSAGDLGAFVFYAIIVASSLATISEVLGELQRAAGATERLIEILQVESHIVAPSQNIISPQALSAEVAFDDVTFHYPSRPDQAAAEHLTLKAEEGKVLALVGPSGAGKTTLFELLQRFYDPQLGKVTLGGVDIRLFDPHELRKQMALVPQQPALFSHDVFHNIRYGNPQATDEQVIEAAKKAHAHEFIMNLPEGYNSFLGERGVRLSGGQRQRIAIARAILKDPNILLLDEATSALDSESEHHVQQALKELMRGRTTLIIAHRLSTIQHADQIAVLDQGRLVDVGDHQSLLKSCDLYQRLVELQFKRMSS

SEQ ID NO: 21541 - protein, 423 aa, Xanthomonas oryzae pv. oryzae KACC10331
MSTAPQKPLAIRERLSEVRYEIRGELARRARELEAQGRKLIKLNIGNPGAFGFRAPEHLQRAIADDMGRTDPYTHQQGLLEAREAVAKAYARRQHPDAHPDRIFIGNGVSELIDLSLRALLNPGDEVLVPSPDYPLWSAATILNDGRPVYYRCAPENGFQPDPVEIETLVSSRTRAIVLINPNNPSGASYSRALLERIVAIATKHNLLLLVDEIYDQVLYDGAAFVPVAPLAGAHPCITFSGLSKVHRACGWRVGWALLSGDQARINDLRNAMDLLGALRLCANVPGQYAIDAAVNGPDTISALCAPGGRLYETRRAVIEACAASEHLSLVAPAGALYAFPAVVGAAARNFDDHAFALDLMNKEGVLVVPGSSFNVPYRHHFRVTLMPEASVMRDVFARIDRALARRAEAVTKVVPLKSRSVA

SEQ ID NO: 21542 - protein, 202 aa, Escherichia coli
MIESNLRLVVKIARRYGNRGLALLDLIEEGNLGLIRAVEKFDPERGFRFSTYATWWIRQTIERAIMNQTRTIRLPIHIVKELNVYLRTARELSHKLDHEPSAEEIAEQLDKPVDDVSRMLRLNERITSVDTPLGGDSEKALLDILADEKENGPEDTTQDDDMKQSIVKWLFELNAKQREVLARRFGLLGYEAATLEDVGREI

SEQ ID NO: 21543 - protein, 561 aa, uncultured bacterium
MLRDRARRWGDRVYVRYRRGNDDFAVTWQEFARQTFQIARHLLEQGVRRADRIGMISENRVEMFMFELAAMSIGAVTVPVFAGYLPQQVAYILDRARPRFVVVSGRHQLEKIERDRHPWIEKFYCMDLDAACRSWGALDFAALIADGGVAEERLWEQVDAVEPDDLCVIMYTSGTTGAPKGVRLCHRHLISQQKAMSVMWDVSEKDVYMNYLPWHHSFGGLFERFMTLYNGCELCLDDSRGKDIDRLIENWKVFDPSIFFSVPRVHDLLLSRCRERPEVAEIVFGGRLRFVFTAGAALPAHVEATYRERGVPVLEGWGLTETAPCVTATTKDSAWQSGYVGVPLPGCTVRIDSEQEILVKGPNVMEGYLDDEEATAHVISEDGWFRTGDLGEFTKDGLRILGRKDGTFKLTTGEKVHPLRIETLLVNESPYVNQAVVLGSGKDYIGALIYPDFSNLRPWAADHNVALDDLLGDPAMHDLCVSELKRINSLIEVKYERIRRAVLADRSPSLDNGELTPSGKLVRKTVLSNFKDKIDALFAPRPTAEVIQVEQESQRTVSSEA

SEQ ID NO: 21544 - protein, 219 aa, Solanum melongena
MGRRPARCYRQIKNKPYPKSRFCRGVPDPKIRIYDVGMKRKGVDEFPFCVHLVSWEKENVSSEALEAARIACNKYMTKSAGKDAFHLRVRVHPFHVLRINKMLSCAGADRLQTGMRGAFGKPQGVCARVAIGQVLLSVRCKDGNSNHAQEALRRAKFKFPGRQKIIVSRKWGFTKFSRTDYLKYKSENRIVPDGVNAKLLGNHGPLAARQPGRAFLSSS

SEQ ID NO: 21545 - protein, 193 aa, Escherichia coli
LRLVVKIARRYGNRGLALLDLIEEGNLGLIRAVEKFDPERGFRFSTYATWWIRQTIERAIMNQTRTIRLPIHIVKELNVYLRTARELSHKLDHEPSAEESAEQLDKPVDDVSRMLRLNERITSVDTPLGGDSEKALLDILADEKENGPEDTTQDDDMKQSIVKWLFELNAKQREVLARRFGLLGYEAATLEDV

SEQ ID NO: 21546 - protein, 535 aa, Crocosphaera watsonii WH 8501
MTKFVFVTGGVVSSIGKGIVAASLGRLLKSRNYSVSILKLDPYINVDPGTMSPYQHGEVFVTDDGAETDLDLGHYERFTDTPMSRLNSVTTGSIYQAVLNKERRGAYMGGTVQVIPHITNEIKERIHRVAKNTTPDIVITEIGGTVGDIESLPFLEAIRQFRKDVGRNNVLYMHVTLIPWIPAAREMKTKPTQHSVKELRSIGIQPDVLVCRCDRPLKEGMKEKLSEFCDVPVESVITAQDASSIYEVPLVVEKEGLAQQTLELLRLEPRKPDLSQWQTLIQRMQSPKRQIEVALVGKYVQLSDAYLSVVESLVHGGIATDSEVKLRWVDAEDIENYGAEKYLNDVGGIIVPGGFGIRGVDGKVKAIEYARKEKIPFLGLCLGMQCAVIEWGRNVARLNNVNSAEFEPETANPVINLLPEQQDVVDLGGTMRLGLYPCRISPDTLAASLYGQEVIYERHRHRYEFNNAYRNQLLETGYKVSGTSPDGRLVEIIELSDHPFFIATQFHPEFRSRPNCAHPLFLGFVKAAIEQTKSS

SEQ ID NO: 21547 - protein, 149 aa, Streptococcus mitis
QPNWINRDRFILSAGHGSMLLYALLHLSGFEDVSMDEIKSFRQWGSKTPGHPEFGHTAGIDATTGPLGQGISTATGFAQAERFLAAKYNREGYNIFDHYTYVICGDGDLMEGVSSEAASYAGLQKLDKLVVLYDSNDINLDGETKDSFT

SEQ ID NO: 21548 - protein, 194 aa, Escherichia coli
IESNLRLVVKIARRYGNRGLALLDLIEEGNLGLIRAVEKFDPERGFRFSTYATWWIRQTIERAIMNQTRTIRLPIHIVKELNVYLRTARELSHKLDHEPSAEEIAEQLDKPVDDVSRMLRLNERITSVDTPLGGDSEKALLDILADEKENGPEDTTQDDDMKQSIVKWLFELNAKQREVLARRFGLLGYEAATL

SEQ ID NO: 21549 - protein, 223 aa, Novosphingobium aromaticivorans DSM 12444
MRPAPLPANTDQRARIGIPGKRTYIRPMSIAEMIASSPTAAVISNPRLPDNPIIACNDAFVELTGYAREEIIGRNCRFLRGSGTEDDKARILRDGIWRKQPVMVEIVNYKKDGTRFRNAVMVAPIFDADGEVEYFLGSQVEIAEDQGQANDARRNGAAERVERLSRRQKEILVLMAAGKLNKQIAYELGLSERTVKMHRSAVLKGLDVKTSADAIRVAIEAGF

SEQ ID NO: 21550 - protein, 218 aa, Ampelocalamus patellaris
GMDVSEWDPNKDKYISVKYDKTTAIEAKALNKEALQAEVGLPVDGKIPLVAFIGRLEEQKGPDVMAAAIPQLMEENVQIILLGTGKKKFERMLKSAEEKYPGKVRAVVKFNAPLAHQIMAGADLLAVTSRFEPCGLIQLQGMRYGTPCVCASTGGLVDTIIEGKTGFHLGRLSVDCNVVEPGDVQKVATTLKRAIKLVGTPAYQEMVRNCMARDLSWK

SEQ ID NO: 21551 - protein, 218 aa, Ampelocalamus scandens
GMDVSEWDPNKDKYISVKYDKTTAIEAKALNKEALQAEVGLPVDGKIPLVAFIGRLEEQKGPDVMAAAIPQLMEENVQIILLGTGKKKFERMLKSAEEKYPGKVRAEVKFNAPLAHQIMAGADLLAVTSRFEPCGLIQPQGMRYGTPCVCASTGGLVDTIIEGKTGFHLGRLSVDCNVVEPGDVQKVATTLKRAIKLVGTPAYQEMVRNCMAQDLSWK

SEQ ID NO: 21552 - protein, 218 aa, Triticum aestivum
MRRLWRWYQQSLSSYPVRTQVVSSGILWALGDIGAQAVTHKSASSHHHHAKNPEDKDKEFKIDWKRVGITSSFGFAFVGPVGHYWYEYLDRMVRRRYLPGSFKFVASKVAADGLLFGPLDLGLFFSYVGLASGRSLEQVKDDVKRDIIPALVLGGAIWPAVQIANFRFIPVRYQLLYVNLFCLLDSCFLSWIEQQGDAAWKQWFTSFQKKIEDQKSNA

SEQ ID NO: 21553 - protein, 218 aa, Drepanostachyum hookerianum
GMDVSEWDPSKDKYISVKYDKTTAMEAKALNKEALQAEVGLPVDGKIPLVAFIGRLEEQKGPDVMAAAIPQLMEENVQIILLGTGKKKFERMLKSAEEKYPGKVRAVVKFNAPLAHQIMAGADLLAVTSRFEPCGLIQLQGMRYGTPCVCASTGGLVDTIIEGKTGFHLGRLSVDCNVVEPGDVQKVATTLKRAIKLVDTPAYQEMVRNCMVQDLSWK

SEQ ID NO: 21554 - protein, 234 aa, Yersinia pestis KIM
MPWFAVISHIGVRVICWGVNSVPAHQLDDHNQETRSDDENIVWHPHAITRQDREQQHGHQGVVLWFTGLSGSGKSTLAGALEQALFARGVSTYLLDGDNVRHGLCRDLGFSDADRRENIRRVGEVAKLMVDAGLVVLTAFISPHRAERKMVQDMLASGQFIEVFVDTPLAICEARDPKGLYKKARAGELKNFTGIDSVYESPASPDIHLQGEQLVTNLIEQLLDVLRGRAIIKS

SEQ ID NO: 21555 - protein, 175 aa, Triticum aestivum
MAPAVMASSATSVAPFQGLKSTAGLPVSRRSNGASLGSVSNGGRIRRMQVWPIEGIKKFETLSYLPPLSTEALLKQVDYLIRSKWVPCLEFSKVGFIFREHNASPGYYDGRYWTMWKLPMFGCTDATQVINEVEEVKKEYPDAYVRIIGFDNMRQVQCVSFIAFKPPGCEESGKA

SEQ ID NO: 21556 - protein, 338 aa, Neurospora crassa
MVVKVGINGFGRIGRIVFRNAIEHDDIHIVAVNDPFIEPKYAAYMLRYDTTHGNFKGTIEVDGADLVVNGKKVKFYTDADPAAIPWSETGADYIVESTGVFTTTEKASAHLKGGAKKVIISAPSADAPMYVMGVNNETYDGSADVISNASCTTNCLAPLAKVIHDNFTIVEGLMTTVHSYTATQKTVDGPSAKDWRGGRTAAQNIIPSSTGAAKAVGKVIPDLNGKLTGMAMRVPTANVSVVDLTARIEKGATYDEIKEVIKKASEGPLAGILAYTEDEVVSSDMNGNPASSIFDAKAGISLNKNFVKLVSWYDNEWGYSRRVLDLISYISKVDAKKA

SEQ ID NO: 21557 - protein, 394 aa, Legionella pneumophila subsp. pneumophila str. Philadelphia 1
MTDVYVVDVLRTPVGKAPRGVFKNTLPDDLLAHTIKCLIHRHQNIDWQEIADVVIGCAMPEAEQGMNVARIASLLADLPQSVPAMTINRFCSSGIQSIVTAADTIRNQEAHLALGGGVESMSMVPMGGNKYTANPSIFNDEHVAIAYGMGITAENVAKRWEITREQQDEFAIESHKKAIAAQERLDFNAEISPIEISIRYPDLKTSKVEIKKKLINKDEGPRADTSYEAISKLKPVFALNGTVTAGNSSQTSDGAGVALLASEKALKQYDLKPLGRLMSYAVAGVPPEIMGIGPVKAIPMALKRAGITLDQLDWIELNEAFAAQALAVIKDLDLPREKVNPLGGAIALGHPLGATGTIRTATLLHGLRRTKGRYGMVTMCIGTGMGAAAIFESL

SEQ ID NO: 21558 - protein, 163 aa, Acetabularia acetabulum
WFQGTADAVRQQIRYVEEDKGDEVLILSGDQLYRMDYVPMIQMHRETGADATIAVIPIPTEETYGLGLAVSMTMAGSKGLSKTQDRGRACPGEDVGRLAEKRGVKDTNRQFLGNMGIYLFKKDSLLELLNAPPKATDFGKEIFPRCVDTHKVMTYVFEDYWED

SEQ ID NO: 21559 - protein, 576 aa, Schizosaccharomyces pombe
MQPQEVDLMENSTMRNGARVLPPEAISKRHIGPYIIRETLGEGSFGKVKLATHYKTQQKVALKFISRQLLKKSDMHMRVEREISYLKLLRHPHIIKLYDVITTPTDIVMVIEYAGGELFDYIVEKKRMTEDEGRRFFQQIICAIEYCHRHKIVHRDLKPENLLLDDNLNVKIADFGLSNIMTDGNFLKTSCGSPNYAAPEVINGKLYAGPEVDVWSCGIVLYVMLVGRLPFDDEFIPNLFKKVNSCVYVMPDFLSPGAQSLIRRMIVADPMQRITIQEIRRDPWFNVNLPDYLRPMEEVQGSYADSRIVSKLGEAMGFSEDYIVEALRSDENNEVKEAYNLLHENQVIQEKSHLSKSKRVDSFLSVSPPAFSEYTSELQKKSKQELIDPTLEGPRWTVSDPPTYAKQTIDSNICVLVPTAEKNKLEMRTLADAASAVDTSQSTRKKSRRNKWHFGVRCRGDAPEILLAVYRALQRAGAQFTVPKPVNGKYRSDMYTIKSRWEIPHCKREGKNTYAYIELQLYEVMPGCFMLDVKSNGYKDIYSHPERTADHGMDDLKSSFPFLDLCAMLVCKLFSA

SEQ ID NO: 21560 - protein, 215 aa, Acetabularia acetabulum
TGGAGFIGSIVVEQLVKQGEQVVVFDNLSLGHRESFIRDAAFVHADLNDRAAIDQALETHQPEAVMHFAAYSLVGESMKFPFQYIGENVTNFLNLLQSMIAHDVKKIILSSTANLFDDPERMPIVESERIVPGSPYGESKFICERMLYWLDQIHDLNYAALRYFNAAGASKERGEDHTPSLHLIPIVLQVALGQRERVSMFGGDYDTADGTCVRD

SEQ ID NO: 21561 - protein, 175 aa, Triticum aestivum
MAPAVMASSATSVAPFQGLKSTAGLPVSRRSNGASLGSVSNGGRIRCMQVWPIEGIKKFETLSYLPPLSTEALLKQVDYLIRSKWVPCLEFSKVGFIFREHNASPGYYDGRYWTMWKLPMFGCTDATQVINEVEEVKKEYPDAYVRIIGFDNMRQVQCVSFIAFKPPGCEESGKA

SEQ ID NO: 21562 - protein, 469 aa, Streptococcus pyogenes MGAS8232
MVSVMWFRRDLRIDDQKALAHVIASQSPTLCVFQFNKEQLNLLHSRNQSSFITSVLAFRKLLKCEGIDLYLMYGDLMTCFEQLLTQLKDWTDVYFNYDESGYGRLRDQKAAQFFKKNGIAVHTYQDHYLHGSQEIINQSGQPYKVFTPYYRIWQNYPKETPIKVELSQGRWLNLETPDDVLRTVESFKDEKYQDVATFDEASKQLNRFIQDQLAAYHANRDFPAQLGTSRLSPFLRIGAIGIRTVYHAVRQAPNSLGQATFLKELAWRDFYNMVYVAYPDQKTQPIQKAFSQIEWVNNPDWFQLWKEGKTGYPIVDAAMLQLQKTGWMHNRLRMIVASFLTKDLLCDWRLGEQYFQQQLIDYDAASNIGGWQWAASTGTDAVPYFRIFNPVTQGKRFDPKGEFIKAYLPQLEHVPEKYLHEPWKMPKNLQESVSCIIGTDYPQPIVDHAKQREQAIAKYEWAKEKAKIE

SEQ ID NO: 21563 - protein, 218 aa, Thamnocalamus tessellatus
GMDVSEWDPSKDKYISVKYDKTTAMEAKALNKEALQAEVGLPVDGKIPLVAFIGRLEVQKGPDVMAAAIPQLMEENVQIILLGTGKKKFERMLKSAEEKYPGKVRAVVKFNAPLAHQIMAGADLLAVTSRFEPCGLIQLQGMRYGTPCVCASTGGLVDTIIEGKTGFHLGRLSVDCNVVEPGDVQKVATTLKRAIKLVGTPAYREMVRNCMAQDLSWK

SEQ ID NO: 21564 - protein, 164 aa, Tripsacum dactyloides
MEGGESAKGTVLVTGASGFVGSWLVMKLLQAGYTVRATVRDPANVGKTKPLMDLPGATERLSIWKADLAEEGSFDDAIRGCTGVFHVATPMDFQSKDPENEVIKPTVEGMISIMRACKEAGTVRRIVFTSSAGTVNLEERQRPVYDEDSWTDVDFCRRVKMTGW

SEQ ID NO: 21565 - protein, 173 aa, Triticum aestivum
MAPAVMASSATTVAPFQGLKSTAGLPVSRRSSEPRPRHNGGRIRCMQVWPIEGIKKFETLSYLPPLSTEALLKQVDYLIRSKWVPCLEFSKVGFVFREHNSSPGYYDGRYWTMWKLPMFGCTDATQVLNEVEEVKKEYPDAYVRVNGFDNLRQVQCVSFIAFRPPGCEESGKA

SEQ ID NO: 21566 - protein, 361 aa, Bacteroides fragilis YCH46
MKKKFTIFVMLLAGIIYTGHAQDVQWIYQQKQEKKNMKNLSEIYFAGGCFWGTDHFLKQIRGVKSTQVGYANGNIANPTYQQVCTGKTNFAETVKVEYNPQEVPLKLLIDLFFKTIDPTSLNRQGNDKGSQYRTGIYYTDEADLPTIRTAIDELAKEYSKPIVIEVKPLSNFYKAEEYHQDYLDKNPGGYCHINPALFELAKKANAQAEQSQTNYKKTDDATLRSKLTPEQYAVTQKNATEPAFHNEYWDEKRDGIYVDITTGEPLFISTDKFDSGCGWPSFTKPIEKEVIKEKMDTSHGMIRTEVRSKTGDAHLGHVFTDGPKEKGGLRYCINSASLRFIPKEKMKEEGYGEYLKLLPQK

SEQ ID NO: 21567 - protein, 345 aa, Oryza sativa (japonica cultivar-group)
MEASLPFHHHHPAASSTAAHHAARLTPPPPPRDPRATARWVPPAAAPVRSRSPANLGLPPHPPRRLRLRLAPPRITAAVTGGPRRPRRRAPPPLECAGGSSSSLRRPREEEEEEEEEERSSTAHAGVSLVGENKVLQMSSIVPKASNIFWHDCAVGQADRQKLLKQKGCVVWITGLSGSGKSTLACTLDRELHTRGKLSYVLDGDNLRHGLNKDLGFKAEDRAENIRRVGEVAKLFADAGLVCIASFISPYRRDRESCRALLSDGSFIEVFLNMPLELCESRDPKGLYKLARAGKIKGFTGIDDPYESPLNSEIEIKEVDGVCPSPSDMAGQVVTYLEEKGFLHD

SEQ ID NO: 21568 - protein, 345 aa, Botryotinia fuckeliana
GTTMHWHGIRQLNNAQYDGVPGKKGSYSIPYHKLTLSTGITQCPIAPGGTLTYKFHADNYGSSWYHSHFILQYGDGLFGPLVINGPATANYDVDLGMLFLNDWNHVPVQSLWDKAKTGAPPTLLTGLMNGTNTYNGAGKKFQTTFTPGLKYRIRVVNTAVDGHFQFSIDGHSFQVIAMDFVPIVPYNATSILVSIAQRYDIIVTANAAVGNYWIRAGWQTACSGNTNAANITGILRYTGSSSTADPTTTSTVTASTSCLDEPLASLVPFVPINPIASSIMKTTLTTGGGQWLFNGSSLLLNWTDPTLLTVLNSGNIWPTEYNVIPIESTTAKKGWAVLAISGPNG

SEQ ID NO: 21569 - protein, 391 aa, Oryza sativa
  misc_feature (212)..(212): Xaa can be any naturally occurring amino acid
  misc_feature (229)..(229): Xaa can be any naturally occurring amino acid
  misc_feature (336)..(337): Xaa can be any naturally occurring amino acid
  misc_feature (346)..(346): Xaa can be any naturally occurring amino acid
  misc_feature (373)..(373): Xaa can be any naturally occurring amino acid
  unsure (1)..(391): unsure at all Xaa locations
MSTTKVKRRVGKYELGRTIGEGTFAKVKFARDTETGDPVAIKILDKEKVLKHKMVEQIKREISTMKLIKHPNVVRIYEVMGSKTNIYIVLEYVTGGELFDTIVNHGRMREDEARRYFQQLINAVDYCHSRGVYHRDLKPENLLLDSYGNLKVSDFGLSALSQQIKDGGLLHTTCGTPNYVAPEVLEDQGYDGAMADLWSCGVILFVLLAGYXNAEFTFPPWTSFPAKRXVTIPEILEDEWFKKGYKRPEFDEKYDTTLDDVDAVFNDSEEHHVTEKKEEPEALNAFELISMSAGLNLGNLFDSEQEFKRETRFTSKCPPKEIVRKIEEAAKPLGLXXQKKNYKLRXEKVKAGRKGNLNVATEILQVAPSLHMXEVRKAKGDTLEFHKDHAN

SEQ ID NO: 21570 - protein, 272 aa, Pseudomonas syringae pv. syringae B728a
MSGFEQLFAGKLPKLIMFDLDGTLVDSVPDLAVAVDTMLAELGRPIAGLESVRAWVGNGAPVLVRRALANNLDHSGVDDALAEQGLEIFMRAYAQKHEFTVVYPGVRETLKWLQKMGVEMALITNKPERFVAPLLDEMKLGRFFRWIVGGDTMPQKKPDPAALFFVMKMAGAPASQSLFVGDSRSDVQAAKAAGVACVALSYGYNHGRPIAEENPAMVIDDLRKLIPGCLDMDAEILLPDIKRPSSRESIVVVTRKLWMKVIKALARWRWRA

SEQ ID NO: 21571 - protein, 218 aa, Bacteroides fragilis NCTC 9343
MKFFIDTANLDQIREAHDLGVLDGVTTNPSLMAKEGIKGVENQRRHYVEICNIVQGDVSAEVIATDYEGMVREGKELAALNPHIVVKVPCIADGIKAIKHFSGQGIRTNCTLVFSTGQALLAAKAGATYVSPFVGRLDDICEDGVGLVADIVRMYRFYNYPTQVLAASIRSSKHIMECVEAGADVATCPLSAIKGLLNHPLTDAGLKKFLEDYKKVNE

SEQ ID NO: 21572 - protein, 181 aa, Pyrococcus furiosus DSM 3638
MALRPAKIDRYVDKPAYTRREYIRGAPGPKITIFDMGNPAGDFEFEVSLHTAEPVQIRQNALEAARQQVNRYLQKNVGRSNYHFKIRVYPFQVLRENPMATGRKADRYGNGMRRPFGKPIGLAARLKKDQKILSIRVNRQHLKFAIEGARRAAMKFPCKCYYRIYDKEGNDVTTKILSQSL

SEQ ID NO: 21573 - protein, 461 aa, Streptococcus dysgalactiae subsp. dysgalactiae
NVVLEKAFGSPLITNDGVTIAKEIELEDHFENMGAKLVSEVASKTNDIAGDGTTTATVLTQAIVREGLKNVTAGANPIGIRRGIETATATAVEALKAIAQPVSGKEAIAQVAAVSSRSEKVGEYISEAMERVGNDGVITIEESRGMETELEVVEGMQFDRGYLSQYMVTDNEKMVADLENPFILITDKKVSNIQDILPLLEEVLKTNRPLLIIADDVDGEALPTLVLNKIRGTFNVVAVKAPGFGDRRKAMLEDIAILTGGTVITEDLGLELKDATMPALGQAAKVTVDKDSTVIVEGAGSSEAIANRVGLIKSQLETTTSDFDREKLQERLAKLAGGVAVIKVGAATETALKEMKLRIEDALNATRAAVEEGIVAGGGTALITAIEKVAALELDGDDATGRNIVLRALEEPVRQIAFNAGYEGSVVIDKLKNSPVGTGFNAATGEWVDMIAAGIIDPVKV

SEQ ID NO: 21574 - protein, 286 aa, Arabidopsis thaliana
MAMISYSTIVVALLASFMICSVSANFQRDVEITWGDGRGQITNNGDLLTLSLDKASGSGFQSKNEYLFGKIDMQIELVAGNSAGTVTAYYLKSPGSTWDEIDFEFLGNLSGDPYTLHTNVFTQGKGDREQQFKLWFDPTSDFHTYSILWNPQRIIFSVDGTPIREFKNMESQGTLFPKNQPMRMYSSLWNAEEWATRGGLVKTDWSKAPFTASYRGFNEEACVVINGQSSCPNVSGQGSTGSWLSQELDSTGQEQMRWVQNNYMIYNYCTDAKRFPQGLPRECLAA

SEQ ID NO: 21575 - protein, 196 aa, Escherichia coli
RMIESNLRLVVKIARRYGNRGLALLDLIEEGNLGLIRAVEKFDPERGFRFSTYATWWIRQTIERAIMNQTRTIRLPIHIVKELNVYLRTARELSHKLDHEPSAEEIAEQLDKPVDDVSRMLRLNERITSVDTPLGGDSEKALLDILADEKENGPEDTTQDDDMKQSIVKWLFELNAKQREVLARRFGLLGYEAATL

SEQ ID NO: 21576 - protein, 98 aa, Dehalococcoides sp. CBDB1
MAIRFEPLHNMVLIQPQEKQDMSKGGIIIPDAAQEKSQEGLIVAVGPGRLDKDGKRETMSIKVGEKVLFPKFGGVELKSGGVEYIIMPESQIMAKIVG

SEQ ID NO: 21577 - protein, 537 aa, Dehalococcoides sp. CBDB1
MAKQIIFGEKVRVSLKKGVDTLANTVRVTLGPKGHPVALERKWGAPTVIDDGVTIARDIELPDAFENMGAQLVKEAATRTSDAAGDGTTTSIVLAQAIINEAFKNIAAGAEPINLKRGIEKAVAALKAQLRKNSTPVKGKQQIVQVATITGKDPEIGNLIADVMDKVGKDGVITIEESRGLRYETSYVEGMQFDRGYISAYFVTDPGRMESVMEDATILMTDRKIETVAELLPALEKILQISKNLVIVAENVEAEALATLVVNKLRGNLNILAVKAPGYGDRQKAMLEDMAILTGGHVISKEAGRKLDSVTEADLGHARRIVSNKDKTTIIDGEGSAEAIKDRIKQIKAQIEETESAFDREKLQERQAALVGGVAVIAVGAATETEMKERKARVEDALAATRAAIEEGILPGGGTGLLNALPCLDALKLEGDEATGVNIVRKALIEPVRWIATNAGKDGNVIVDKVKNSPVGHGYNAENDVFGDMAEMGIIDPTMVVRSALENAASIANMVLITDSLVADIQEKAPAAPGPEAAGMY

SEQ ID NO: 21578 - protein, 473 aa, Streptococcus dysgalactiae subsp. equisimilis
VTLGPKGRNVVLEKAFGSPLITNDGVTIAKEIELEDHFENMGAKLVSEVASKTNDIAGDGTTTATVLTQAIVREGLKNVTAGANPIGIRRGIETATATAVEALKAIAQPVSGKEAIAQVAAVSSRSEKVGEYISEAMERVGNDGVITIEESRGMETELEVVEGMQFDRGYLSQYMVTDNEKMVADLENPFILITDKKVSNIQDILPLLEEVLKTNRPLLIIADDVDGEALPTLVLNKIRGTFNVVAVKAPGFGDRRKAMLEDIAILTGGTVITEDLGLELKDATMPALGQAAKVTVDKDSTVIVEGAGSSEAIANRVGLIKSQLETTTSDFDREKLQERLAKLAGGVAVIKVGAATETALKEMKLRIEDALNATRAAVEEGIVAGGGTALITVIEKVAALELDGDDATGRNIVLRALEEPVRQIAFNAGYEGSVVIDKLKNSPVGTGFNAATGEWVDMIAAGIIDPVKVTRSA

SEQ ID NO: 21579 - protein, 332 aa, Frankia sp. EAN1pec
MTTDRTAGISGQVWRRLYELMTLMKAADDRLSRGIASGELQCVYWPPRGQEAIAAAMGVCLRSDDQLVTTYRGLHDLIGKGVPLVEIYGEMLGRQVGSGRGKGGTMHIARPDSGVMLSTGIVGSGPPVAVGMAMAARRKGLDRVTAVSFGDGATNTGSFHEAANMAALWDLPLVLVCQNNQYGEMTPTEHTMKIAQVADRAGGYGMPGVRVDGNDPLAVLAVLTQAVERARSGGGPTLVECVTFRFRGHYFGDPMAYIPAERMAAAVEADPIPRFRSRLLETGVCDEHELDEIEAAAVAAVEEALTAVLAAPVAALDELDRDVYADPRNCPA

SEQ ID NO: 21580 - protein, 200 aa, Escherichia coli
MIESNLRLVVKIARRYGNRGLALLDLIEEGNLGLIRAVEKFDPERGFRFSTYATWWIRQTIERAIMNQTRTIRLPIHIVKELNVYLRTARELSHKLDHEPSAEEIAEQLDKPVDDVSRMLRLNERITSVDTPLGGDSEKALLDILADEKENGPEDTTQDDDMKQSIVKWLFELNAKQREVLARRFGLLGYEAATLEDVGR

SEQ ID NO: 21581 - protein, 819 aa, Pisum sativum
MAACALFNGVGGGNTTPDETNNNSTSNSSNISTEDFHNMPQQQPHHSERKLLRKRMASEMELQLHNNNNNNDYHRFSRRTNNTSSLNCSLPATTQKGVTTTTTTTLASSGNNNNNNNNNNNYHYHNNNNNSIINNNNNNVALSRDNVAIQNFPTVTVTTNYSTMLLPSSCSSNLNNSSTSAANYTHYQQPLVEEQNTLPEICGFSGLPLFPSQNNQTNRTNNNSSNNRNNTNTVVDVVSSSPSMEETSATTNWIDGILKDLIHTSNSVSIPQLINNVREIIYPCNPNLALVLEHRLRLLTEPNTCVPERKRNSTEQSGVNVNGNVLAASNVNNSSVKLMNRVDDVVPTSLHFSDSSTLLNQNQNQNMFPNWGATQINNNNNPSVSLVTLPSQPLSTQQDQQHQLQQHPEDLAPATTTTTTSAELALARKKKEEIKEQKKKDEEGLHLLTLLLQCAEAVSAENLEQANKMLLEISQLSTPFGTSAQRVAAYFSEAISARLVSSCLGIYATLPVSSHTPHNQKVASAFQVFNGISPFVKFSHFTANQAIQEAFEREERVHIIDLDIMQGLQWPGLFHILASRPGGPPYVRLTGLGTSMETLEATGKRLSDFANKLGLPFEFFPVAEKVGNIDVEKLNVSKSEAVAVHWLQHSLYDVTGSDTNTLWLLQRLAPKVVTVVEQDLSNAGSFLGRFVEAIHYYSALFDSLGSSYGEESEERHVVEQQLLSREIRNVLAVGGPSRSGEIKFHNWREKLQQCGFRGVSLAGNAATQASLLLGMFPSEGYTLVEDNGILKLGWKDLCLLTASAWRPPYHTNTIIPHHN

SEQ ID NO: 21582 - protein, 353 aa, Thermus thermophilus HB8
MLLLTPGPTPIPERVQKALLRPMRGHLDPEVLRVNRAIQERLAALFDPGEGALVAALAGSGSLGMEAGLANLDRGPVLVLVNGAFSQRVAEMAALHGLDPEVLDFPPGEPVDPEAVARALKRRRYRMVALVHGETSTGVLNPAEAIGALAKEAGALFFLDAVTTLGMLPFSMRAMGVDYAFTGSQKCLSAPPGLAPIAASLEARKAFTGKRGWYLDLARVAEHWERGGYHHTTPVLLHYALLEALDLVLEEGVAARERRAREVYAWVLEELKARGFRPYPKASPLPTVLVVRPPEGVDADRLVRALYAEGVAVAGGIGPTRGQVLRLGLMGEGARREAYQAFLKALDRALALA

SEQ ID NO: 21583 - protein, 204 aa, Escherichia coli
MIESNLRLVVKIARRYGNRGLALLDLIEEGNLGLIRAVEKFDPERGFRFSTYATWWIRQTIERAIMNQTRTIRLPIHIVKELNVYLRTARELSHKLDHEPSAEEIAEQLDKPVDDVSRMLRLNERITSVDTPLGGDSEKALLDILADEKENGPEDTTQDDDMKQSIVKWLFELNAKQREVLARRFGLLGYEAATLEDVGREIGL

SEQ ID NO: 21584 - protein, 149 aa, Glycine max
  misc_feature (40)..(40): Xaa can be any naturally occurring amino acid
  misc_feature (46)..(46): Xaa can be any naturally occurring amino acid
  misc_feature (52)..(52): Xaa can be any naturally occurring amino acid
  misc_feature (60)..(60): Xaa can be any naturally occurring amino acid
  unsure (1)..(149): unsure at all Xaa locations
SGSEGDRDIMEQRKRKRMLSNRESARRSRKRKKEHVDFFXDEKGEXKKENIXMNTKIGIXTQLNLNGEAENAMLRAQMEELSKRLNSLSEMISLMNSTTTTNNCLMFDEAQETTTQLFNDCGFMDAWNYGIPLNQQIMAYADNDMLMMY

SEQ ID NO: 21585 - protein, 413 aa, Corynebacterium glutamicum ATCC 13032
MRSSYPQWGNTASNQNPYPGAGFGSEQNTQQGNEQQAPAWTSWDNQPLSTDVKPAKEKRKVGIGTALALMLVGSIATGSVVGVAATQLGSDSSTPVNALEQPSVQRTTNAEPGSAEQVAAAVLPSVVSIQAITRTSASEGSGSIISSDGYVMTNNHVVAGIEQSGVLEVSFSDGTTAQADFIAGDPSTDIAVIKIRDVSNLPVMSFGDSDALGVGQSVMAVGSPLGLSSTVTTGIVSAVNRPVRASGDGGESSLIDAIQTDAAINPGNSGGPLVDMDGNLIGMNSVIASISSTSDSAGSIGLGFSIPSNFAKRVADQLISTGQVTQPMIGVQVGTDNSVTGAVIASVQDGGPAADAGLQPGDIVTKLNDRVIDSPDSLIAAVRSHDFGETVTLTITQPDTSQSREVEVTLTSE

SEQ ID NO: 21586 - protein, 429 aa, Xanthomonas campestris pv. vesicatoria str. 85-10
MNHSRSHALFAQAQTLLPGGVNSPVRAFKSVGGEPFFVARADGPYLFDVDDNRYIDYVGSWGPMIAGHNHPAVREAVERAIGNGLSFGAPCAAEVTMAQTITRLVPSCEMVRMVNSGTEATLSAVRLARGATGRNRIIKFEGCYHGHGDSFLVKAGSGMLTLGVPTSPGVPAGLSELTATLSFNDFEGATALFDEIGAEVAAVIIEPVVGNANCIPPQAGYLQHLRTLCTRHGALLIFDEVMTGFRVALGGAQAHYGVTPDLTTFGKIIGGGMPVGAYGGRRDLMEQVAPAGPIYQAGTLSGNPVAMAAGLAMLELVQEPGFHTRLSEATSMLCEGLEDAARAAGIAVTTNQVGGMFGLFFTDDIVESYAQATACDITSFNRFFHAMLQRGVYLAPSAYEAGFMSSAHDQAVIEATLAAAREAFADVAR

SEQ ID NO: 21587 - protein, 200 aa, Escherichia coli
IESNLRLVVKIARRYGNRGLALLDLIEEGNLGLIRAVEKFDPERGFRFSTYATWWIRQTIERAIMNQTRTIRLPIHIVKELNVYLRTARELSHKLDHEPSAEEIAEQLDKPVDDVSRMLRLNERITSVDTPLGGDSEKALLDILADEKENGPEDTTQDDDMKQSIVKWLFELNAKQREVLARRFGLLGYEAATLEDVGRE

SEQ ID NO: 21588 - protein, 218 aa, Fargesia nitida
GMDVSEWDPSKDKYISVKYDKTTAMEAKALNKEALQAEVGLPVDGKIPLVAFIGRLEEQKGPDVMAAAIPQLMEENVQIILLGTGKKKFERMLKSAEEKYPGKVRAVVKFNAQLAHQIMAGADLLAVTSRFEPCGLIQLQGMRYGTPCVCASTGGLVDTIIEGKTGFHLGRLSVDCDVVEPGDVQKVATTLKRAIKLVGTPAYQEMVRNCMAQDLSWK

SEQ ID NO: 21589 - protein, 301 aa, Arabidopsis thaliana
  misc_feature (269)..(269): Xaa can be any naturally occurring amino acid
  unsure (1)..(301): unsure at all Xaa locations
MDPYKYRPSSAYNAPFYTTNGGAPVSNNISSLTIGERGPVLLEDYHLIEKVANFTRERIPERVVHARGISAKGFFEVTHDISNLTCADFLRAPGVQTPVIVRFSTVVHERASPETMRDIRGFAVKFYTREGNFDLVGNNTPVFFIRDGIQFPDVVHALKPNPKTNIQEYWRILDYMSHLPESLLTWCWMFDDVGIPQDYRHMEGFGVHTYTLIAKSGKVLFVKFHWKPTCGIKNLTDEEAKVVGGANHSHATKDLHDAIASGNYPEWEXFFIQTMDPQARSWSHQVGQSQTYPHLQDPWSG

SEQ ID NO: 21590 - protein, 332 aa, Yersinia pestis KIM
MSQSTLKVNELHEDADFDENSTETEIFDEKALVDDEPTESELADDELLAQGVTQRVLDATQLYLGEIGYSPLLTAEEEVYFARRALRGDVSSRRRMIESNLRLVVKIARRYSNRGLALLDLIEEGNLGLIRAVEKFDPERGFRFSTYATWWIRQTIERAIMNQTRTIRLPIHIVKELNVYLRTARELSHKLDHEPSAEEIAEQLDKPVDDVSRMLRLNERITSVDTPLGGDSEKALLDILSDENENGPEDTTQDDDMKQSIVKWLFELNAKQREVLARRFGLLGYEAATLEDVGREIGLTRERVRQIQVEGLRRLREILQTQGLSIEALFRE

SEQ ID NO: 21591 - protein, 115 aa, Acetabularia acetabulum
AFDLFDTDGSGSIDAKELKVAMRALGFEPKKEEIKKMIADIDKDGSGTIDFEEFLSMMTAKMGERDSREEIMKAFRLFDDDETGKISFKNLKRVAKELGQNMTDEELQEMIDEAD

SEQ ID NO: 21592 - protein, 218 aa, Arundinaria alpina
GMDVSEWDPSKDKYISVKYDKTTAMEAKALNKEALQAEVGLPVDGKIPLVAFIGRLEEQKGPDVMAAAIPQLMEENVQIILLGTGKKKFERMLKSAEEKYPDKVRAVVKFNAPLAHQIMAGADLLAVTSRFEPCGLIQLQGMRYGTPCVCASTGGLVDTIIEGKTGFHLGRLSVDCNVVEPGDVQKVATTLKRAIKLVGTPAYQEMVRNCMTQDLSWK

SEQ ID NO: 21593 - protein, 240 aa, Thermoanaerobacter tengcongensis MB4
MKEEENLELIKLAKNNDKASLEKLILENSGLIWSIVKKFANRGYELEDLYQIGCIGFVKAVQKFDESYNVKFSTYAVPIIMGEIKRFLRDDGLIKVSRSLKELSSKAFYMKEVLSNELNREPTINEIAERLNVTPEEIAMAFESAATAESLYDSISHEEEDRQLIEMVGDKEDSVDLEEKLTLHMIIDKLKPREKQVIFLRYFKDMTQTEVANILGISQVQVSRIEKKVLEKIRKELEKV

SEQ ID NO: 21594 - protein, 75 aa, Acetabularia acetabulum
EAELQDMINEVDADGNGDIDFGEFLTMMARKMKDTDSEDEIKEAFKVFDKDGNGFISAAELRHVMTYLGESSATS

SEQ ID NO: 21595 - protein, 382 aa, Yersinia pestis KIM
MCDKKPLKESSMSHENLKGAQMAEGIPETMRAVVAYGPRDYRFERVPVPTIDAKEILVKVEGCGICAGDTKAFEGAPSFWGDDKQPAYIKAPMIPGHEFIGHVVGLGADVEGFELGDRVTSEQIVPCWGCRFCNHGQYWMCEKHDLYGFQSNVNGAMAEYLKFTKEAINYHVPDHLPLEKAILIEPYACAFHAVQRAKIKLGDVVVLAGSGTLGLGMIGAIKKSGAAKLIVLDLSDDRLALAKKFGADLVLNPSRDDVNTLIKEMTGGYGCDIYIDATGAQKAVEQGLTLLRKLGTFVEFSVFKDPVTVDWSIISDRKELDVLGSHLGPYCFPLVIEGISNGDLPTEGVVTHILPLEKYAEGIELVKRGVDSLKVVLNPNLT

SEQ ID NO: 21596 - protein, 218 aa, Fargesia communis
GMDVSEWDPSKDKYISVKYDKTTAMEAKALNKGALQAEVGLPVDGKIPLVAFIGRLEEQKGPDVTAAAIPQLMEENVQIILLGTGKKKFERMLKSAEEKYPGKVRAVVKFNAPLAHQIMAGADLLAVTSRFEPCGLIQLQGMRYGTPCVCASTGGLVDTIIEGKTGFHLGRLSVDCNVVEPGDVQKVATTLKRAIKLVGTPAYQEMVRNCMAQDLSWK

SEQ ID NO: 21597 - protein, 301 aa, Shewanella sp. MR-4
MNKLTDFERYVIEEKGTERPFSGEYYKHDAKGVYLCKKCHAPLYRSEDKFNAHCGWPAFDDEIPGAVSRHVDADGRRTEIVCSQCGGHLGHVFEGEYLTPKNIRHCVNSVSMVFQAADEVTISTHKTAFATFGAGCFWCVEAIFKSLKGVLNVSSGYSGGEASDADYKSVCSGLTGHAEVVHIEFDPAQISFTTLLQVLFESHDPTTLNRQGNDKGPQYRSVVFAHDAAQIEETNAMITKLTEARVFDAPIVTQVVAFESFYPAEDYHNDYFALHGEQPYCQIVVRPKVEKIRALFAELQA

SEQ ID NO: 21598 - protein, 493 aa, Arabidopsis thaliana
MDPYKYRPSSAYNAPFYTTNGGAPVSNNISSLTIGERGPVLLEDYHLIEKVANFTRERIPERVVHARGISAKGFFEVTHDISNLTCADFLRAPGVQTPVIVRFSTVVHERASPETMRDIRGFAVKFYTREGNFDLVGNNTPVFFIRDGIQFPDVVHALKPNPKTNIQEYWRILDYMSHLPESLLTWCWMFDDVGIPQDYRHMEGFGVHTYTLIAKSGKVLFVKFHWKPTCGIKNLTDEEAKVVGGANHSHATKDLHDAIASGNYPEWKLFIQTMDPADEDKFDFDPLDVTKIWPEDILPLQPVGRLVLNRTIDNFFNETEQLAFNPGLVVPGIYYSDDKLLQCRIFAYGDTQRHRLGPNYLQLPVNAPKCAHHNNHHEGFMNFMHRDEEINYYPSKFDPVRCAEKVPTPTNSYTGIRTKCVIKKENNFKQAGDRYRSWAPDRQDRFVKRWVEILSEPRLTHEIRGIWISYWSQVRTKKHSVKFLRPFYQVSAN

SEQ ID NO: 21599 - protein, 450 aa, Silicibacter pomeroyi DSS-3
MAPVIYPTTNLTATEQLVLDRGKGIYVYDTDGNEYIEGLAGLWCTSLGYDNAEVIGAITDQLNRLPFTHTFGGKTHEPIMKLAEKLKAMVPVEDAYFFFGNSGSDANDTHYKMLRYYFNAIGKPEKRKIITRERGYHGVTVAAGSLTSLPANLAHFDAPVEALHILRSDAPHYYTGRQGNETEAQFVDRILDNLEQQILAEGADTIAAMIVEPITGASGVIVPPEGYYEKLQTLLRKHDILVWADEVICGFGRTGADFGCTTMGIKPDLMTFAKQLSSAYFPISASVIPGWMYEKMIAPSAAVGVFGHGYTYSGHPVACAAALKTLEIYERDDLFGHAAEVGAHMQEQLRAIFTDHPLVGEVRGKGLIAALELVSNKTTGATIEKGAGGATVQRLAQENGLLIRAVAGNSAALCPPLIITKEEVDEMLRRLKTAVDGAYAELKDKGLLAA

SEQ ID NO: 21600 - protein, 634 aa, Rickettsia conorii str. Malish 7
MSNSNIDNDLDKIDSLLKKAKSKKIPVTYDDINNALPLNKNPSIRQLEEAILKFSDAGVDILESNEDDEIKLDIGMDEEFKLSTNVDNEPEDEVEEENIGTTDDPVRLYLKDMGGVDLLTREHEVEIAKRIEEGHKTMIASLCRSPIAMRCFIVWYEDLVNEKMLLRDLIDLEANMLHDETPENDEENSSETEGEEHEDNHLSMSRVETQILPNIIERMKKIAFICEELLIEAKKCYEKSFEPKVLQNSKKYNNLELLINEVSEIHFNSKRTEEILGKMYGINRDLINKETAFLKLAEKYGVTRQNFLDEYIGSVINAAWKEKMLKNKKVAWKELMTKESDYIDQMIAELSVIESKTGLLVNDFKKLVNTIQKSERQTLQAKKDMIEANLRLVISIAKKYANRGLQFLDLIQEGNIGLMKAVDKFEYRRGYKFSTYATWWIRQAITRAIADQARTIRIPVHMIETINKILRTSRQMLNELGYEPTATEIANRLSMPLDKVRKVMKIAKEPISLENPVGDDSDGGQLGDFIEDKNAVAPIDAAIQSNLREVTTRVLATLTPREERVLRMRFGIGMNTDHTLEEVGQQFKVTRERIRQIESKALRKLQHPIRSKKLNSFRSGGKRGDGNSSDLLEA

SEQ ID NO: 21601 - protein, 75 aa, Acetabularia acetabulum
EAEFQDMINEVDTDGNGTIDFPEFLNLMARKMQDTDNEEELREAFKVFDKDGNGYISAAELRHVMTYLGESSDTS

SEQ ID NO: 21602 - protein, 353 aa, Brassica rapa subsp. pekinensis
MEKPNRMSESQNVVVSEAARSIIPNNSSAPPGFISISKKKLLKNLEIINDGERINAWVDSMRASSPTHPKSLPSSISSEQQLSSWIMQHPSALEMFEKITEASGGKQIVIFLDYDGTLSPIVDDPDRAFMSSKMRRTVKKLAKCFPTAIVTGRCLDKVYSFVKLAELYYAGSHGMDIKGPAKGFSRHKRVKQSLLYQPASDYLPMIDEVYRQLLEKTKSTPGVIVENNKFCASVHFRCVDEKKWSELVLQVRSVLKEYPRLKLNQGRKGLETLTTFSQFTSVMTGPTKMHLSCYETEVKAVAFLSPNSPKIRMLHIICKIRPRQVHTHISDEFLATIGGVETNAAKSVKRMNV

SEQ ID NO: 21603 - protein, 592 aa, Cryptococcus neoformans var. neoformans JEC21
MCGIFCCFNRAGDISQYRARAIACSKRQRHRGPDWSGCYMTNNTVLVHERLAIVGVDTGAQPLTNEDESLVLAVNGEIYNHVALRKSLKNKDAVFKTHSDCEVIMHLYKEHDTGLCNMLDGMFSFVLVDKSVSPPRLIAARDPIGITTLYMGWNSQSPDTLYFASELKCIHEECDNLQAFPPGHFYDSKEKKLTRYFNPSWWDSDKGVVPHNDIDYKLLRETLEAAVKKRLMSEVPYGVLLSGGLDSSLIASIAARETDKLAEEQEKLRQERKQAIASGKWVGDEQPLASWPQLHSFAIGLPGAPDLIAARKAADFLGTIHHEYNFTVQEGLDAIPEVIHHLETYDVTTVRASTPMYLLSRKIKAMGVKMVLSGEGSDEIFGGYLYFHAAPTAKDFHEECVKRVKNLHTADCLRANKSTMAWGLEARVPFLDKTFLEVSMNVDAKYKMFSKGTHQEVDEDGRPKMEKYILRKAFDCSPEGKAYLPDSILWRQKEQFSDGVGYSWIDGMKDHAAAIVSDEKFANRATRWPLDTPDTKEAYWIREIFEHHFPTEAAAKTAVRWVPKQEWGVSSDPSGRAVSIHTAAYADGEAKA

SEQ ID NO: 21604 - protein, 376 aa, Brassica juncea
MEPSSPQHSHIIEVNASKSDEEQRTTTLGSVKVCGETPCHLNNASGDAEERTASMRKLCIAVVLCLLFMTVEVFGGIKANSLAILTDAAHLLSDVAAFAISLFSLWAAGWEATPRQTYGFFRIEILGALVSIQLIWLLTGILVYEAIIRLLTETSEVDGFLMFLVAAFGLLVNIVMAVLLGHDHGHGHGHGHSHDGVTVTTHHHHGHTHGEDKHHSHGDVTEELLDKSEKRKRNINVQGAYLHVLGDLIQSVGVMVGGAIIWYKPEWKIVDLICTLVFSVIVLGTTINMIRSILEVLMESTPREIDATKLEQGLLEMEEVVAVHELHIWAITVGKVLLACHVNITPEADADMVLNKVIDYIRREYNISHVTIQIER

SEQ ID NO: 21605 - protein, 557 aa, Ashbya gossypii ATCC 10895
MASVWRRSLKTLSSYPRPSGSSAKRFVEEQTTELEQLWSSPRFQEITRPYTPLDVVKHRGSLGRVGYASSVQAERLHDLLEDKFHKREAVSTLGVIDPVQMTQLARCEGIEAAYVSGWACSSTMVGSTNEVSPDFGDYPYDTVPNQVERIFRAQQMHDRKAFLADGAEGRASTDYLKPIIADGDMGHGGSTTVMKLAKLFAEKGAAAIHLEDQMHGGKRCGHLGGAVLAPTYVHISRLIATRLQWDIMGTQNLLIARTDSANAKLIASSSDPRDHEFILGTTQPAAQPWAELVLDMEAAGCTAQEIAAAEQEWFDECPLLTFDQAAEQQLSSSEYGAYGARKKELCSQLGRPYLALREMRHIAEAVAPHKSVNFDWDAPRTREGHHMLHGCMELAVRRTLAFAPYSDLLWLETKTPDLRQASAFAAAIHRAYPHAKLVYNLSPSLNWTAHGYDDRQLRAFIPSLAAAGFVLQLVSLAGLHSDALAFWQLAAAFPADGMLAYVQHVQAPERRSGCDVLLHQRWSGVDYVDSLGNLVQNGASSHTRGAGGDSFTESQFQ

SEQ ID NO: 21606 - protein, 398 aa, Pseudomonas aeruginosa PAO1
MTDNHIDVLINGCGIGGAMLAYLLGRQGHRVVVVEQARRERAINGADLLKPAGIRVVEAAGLLAEVTRRGGRVRHELEVYHDGELLRYFNYSSVDARGYFILMPCESLRRLVLEKIDGEATVEMLFETRIEAVQRDERHAIDQVRLNDGRVLRPRVVVGADGIASYVRRRLLDIDVERRPYPSPMLVGTFALAPCVAERNRLYVDSQGGLAYFYPIGFDRARLVVSFPREEARELMADTRGESLRRRLQRFVGDESAEAIAAVTGTSRFKGIPIGYLNLDRYWADNVAMLGDAIHNVHPITGQGMNLAIEDASALADALDLALRDACALEDALAGYQAERFPVNQAIVSYGHALATSLEDRQRFAGVFDTALQGSSRTPEALGGERSYQPVRSPAPLG

SEQ ID NO: 21607 - protein, 467 aa, Synechococcus elongatus PCC 6301
MTVWQTLTFAHYQPQQWGHSSFLHRLFGSLRAWRASSQLLVWSEALGGFLLAVVYGSAPFVPSSALGLGLAAIAAYWALLSLTDIDLRQATPIHWLVLLYWGVDALATGLSPVRAAALVGLAKLTLYLLVFALAARVLRNPRLRSLLFSVVVITSLFVSVYGLNQWIYGVEELATWVDRNSVADFTSRVYSYLGNPNLLAAYLVPTTAFSAAAIGVWRGWLPKLLAIAATGASSLCLILTYSRGGWLGFVAMIFVWALLGLYWFQPRLPAPWRRWLFPVVLGGLVAVLLVAVLGLEPLRVRVLSIFVGREDSSNNFRINVWLAVLQMIQDRPWLGIGPGNTAFNLVYPLYQQARFTALSAYSVPLEVAVEGGLLGLTAFAWLLLVTAVTAVRQVSRLRRDRNPQAFWLMASLAGLAGMLGHGLFDTVLYRPEASTLWWLCIGAIASFWQPQPSKQLPPEAEHSDEKM

SEQ ID NO: 21608 - protein, 410 aa, Ralstonia solanacearum
MSRRRVVVTGLGLVSPVGNSVAEGWANLVAGKSGIATVTKFDPSNLAVHFAGEVKGFNVEEYLSAKDARQMDTFIHYGIAAGVQALKDSGLEVNEANAERAGVLVGSGIGGLPMIEDTHSTYVERGPRRISPFFVPGSIINMISGHLSIMHGLKGPNLAAVTACTTGLHSIGLAARLIQAGDADVMLAGGAESTVSPLGIGGFAAARALSTRNDDPATASRPWDKDRDGFVLGEGAGVMVLEEYESAKARGARIYAELVGFGMSGDAYHMTAPNMDGPRRCMLNALRDAGINTDQVQYLNAHGTSTPLGDKNESDAIKAAFGEHARKVVVNSTKSMTGHLLGGAGGLESVFSVLALHHQVSPPTINIFNQDPECDLDYCANTARDMKIDVAVKNNFGFGGTNGTLVFRRL

SEQ ID NO: 21609 - protein, 473 aa, Streptococcus dysgalactiae subsp. equisimilis
TVKVTLGPKGRNVVLEKAFGSPLITNDGVTIAKEIELEDHFENMGAKLVSEVASKTNDIAGDGTTTATVLTQAIVREGLKNVTAGANPIGIRRGIETATATAVEALKAIAQPVSGKEAIAQVAAVSSRSEKVGEYISEAMERVGNDGVITIEESRGMETELEVVEGMQFDRGYLSQYMVTDNEKMVADLENPFILITDKKVSNIQDILPLLEEVLKTNRPLLIIADDVDGEALPTLVLNKIRGTFNVVAVKAPGFGDRRKAMLEDIAILTGGTVITEDLGLELKDATMPALGQAAKVTVDKDSTVIVEGAGSSEAIANRVGLIKSQLETTTSDFDREKLQERLAKLAGGVAVIKVGAATETALKEMKLRIEDALNATRAAVEEGIVAGGGTALITVIEKVAALELDGDDATGRNIVLRALEEPVRQIAFNAGYEGSVVIDKLKNSPVGTGFNAATGEWADMIAAGIIDPVKVT

SEQ ID NO: 21610 - protein, 417 aa, Streptomyces avermitilis MA-4680
MSRESEADFPGDAELPGALPEALRAELVAFRRDVHMHPELGNQEFRTTAALKARLEKADLHPRVLDTGTGLICDIGNTAETGDGAQAADAGPRPMLALRADIDALPIPDAKVDCAYRSTVPDRAHACGHDVHTTVVLGAGLVLAELHSQGRLPYPVRLIFQPAEEVLPGGAVDAIASGALEGVGRIIGVHCDPRVDAGRIGLRHGPITSACDRLEVALNGPGGHTARPHLTTDLVTAAARVATDVPALVARRVDARSGLALTWGRIESGHACNVIPQRAELSGTVRCLDLNAWRAAPDLVHAAIDEIAGLYRAKTEINYVRGVPPVVNDPAVSDLLHDAMTARRGPDSVEDTEQSLGGEDFSWYLEHVPGAMARLGVRKPGERVVRDLHQGDFDVDEHAITVGVELFTAAALLDAAR

SEQ ID NO: 21611 - protein, 580 aa, Brassica rapa subsp. pekinensis
MCGILAVLGCVDNSQATRSRIIKLSRRLRHRGPDWSGLHCYEDCYLAHERLAIIDPISGDQPLYSEDKTVVVTVNGEIYNHKALRESESLKSHKYHTGSDCEVLAHLYEEHGEEFINMLDGMFAFVLLDTKDKSYIAVRDAIGVIPLYIGWGLDGSVWFASEMKALSDDCEQFMAFPPGHIYSSKQGGLRRWYNPPWFSELVPSTPYDPLVLRDTFEKAVIKRLMTDVPFGVLLSGGLDSSLVASVAIRHLEKSDARQWGSKLHTFCIGLKGSPDLKAGKEVADYLGTRHHELHFTVQEGIDAIEEVIYHVETYDVTTIRASTPMFLMSRKIKSLGVKMVLSGEGSDEIFGGYLYFHKAPNKKELHEETCRKIKALYQYDCLRANKSTSAWGVEARVPFLDKAFLDVAMGIDPEWKMIRPDLGRIEKWVLRNAFDDEKNPYLPKHILYRQKEQFSDGVGYSWIDGLKDHANKHVSDAMLTNANFVFPENTPLTKEAYYYRAIFEKFFPKSAARATVPGGPSVACSTAKAVEWDAAWKGNLDPSGRAALGVHVAAYEGDKAEAPRPEKVQKLAEKTAEAIV

SEQ ID NO: 21612 - protein, 207 aa, Zea mays
  misc_feature (156)..(157): Xaa can be any naturally occurring amino acid
  misc_feature (188)..(188): Xaa can be any naturally occurring amino acid
  unsure (1)..(207): unsure at all Xaa locations
MASEINPKTEAFDAHDGSPRYDEKHGTTEPIQTPKGSWALRNGLTIESFKAHDDYAKGTVELSRDMKPRHLNMIAIGGSIGAGFFVGSGGALQTGGPGSLTIGFLIMGVMIFNVVYALGELAVMYPVSGGFYTYANRFVDPSWGFAMGWNYVMQWXXVLPLELTVCGTVIQYWAPDTSVAIWVSVFLXVIIIVNIFGTLGYAEEEFW

SEQ ID NO: 21613 - protein, 474 aa, Streptococcus dysgalactiae subsp. equisimilis
KVTLGPKGRNVVLEKAFGSPLITNDGVTIAKEIELEDHFENMGAKLVSEVASKTNDIAGDGTTTATVLTQAIVREGLKNVTAGANPIGIRRGIETATATAVEALKAIAQPVSGKEAIAQVAAVSSRSEKVGEYISEAMERVGNDGVITIEESRGMETELEVVEGMQFDRGYLSQYMVTDNEKMVADLENPFILITDKKVSNIQDILPLLEEVLKTNRPLLIIADDVDGEALPTLVLNKIRGTFNVVAVKAPGFGDRRKAMLEDIAILTGGTVITEDLGLELKDATMPALGQAAKVTVDKDSTVIVEGAGSSEAIANRVGLIKSQLETTTSDFDREKLHERLAKLAGGVAVIKVGAATETALKEMKLRIEDALNATRAAVEEGIVAGGGTALITVIEKVAALELDGDDATGRNIVLRALEEPVRQIAFNAGYEGSVVIDKLKNSPVGTGFNAATGEWVDMIAAGIIDPVKVTRSA

SEQ ID NO: 21614 - protein, 263 aa, Arabidopsis thaliana
METLHPFSHLPISDHRFVVQEMVSLHSSSSGSWTKEENKMFERALAIYAEDSPDRWFKVASMIPGKTVFDVMKQYSKLEEDVFDIEAGRVPIPGYPAASSPLGFDTDMCRKRPSGARGSDQDRKKGVPWTEEEHRRFLLGLLKYGKGDWRNISRNFVVSKTPTQVASHAQKYYQRQLSGAKDKRRPSIHDITTGNLLNANLNRSFSDHRDILPDLGFIDKDDTEEGVIFMGQNLSSENLFSPSPTSFEAAINFAGENVFSAGA

SEQ ID NO: 21615 - protein, 471 aa, Streptococcus dysgalactiae
LGPKGRNVVLEKAFGSPLITNDGVTIAKEIELEDHFENMGAKLVSEVASKTNDIAGDGTTTATVLTQAIVREGLKNVTAGANPIGIRRGIETATATAVEALKAIAQPVSGKEAIAQVAAVSSRSEKVGEYISEAMERVGNDGVITIEESRGMETELEVVEGMQFDRGYLSQYMVTDNEKMVADLENPFILITDKKVSNIQDILPLLEEVLKTNRPLLIIADDVDGEALPTLVLNKIRGTFNVVAVKAPGFGDRRKAMLEDIAILTGGTVITEDLGLELKDATMPALGQAAKVTVDKDSTVIVEGAGSSEAIANRVGLIKSQLETTTSDFDREKLQERLAKLAGGVAVIKVGAATETALKEMKLRIEDALNATRAAVEEGIVAGGGTALITVIEKVAALELDGDDATGRNIVLRALEEPVRQIAFNAGYEGSVVIDKLKNSPVGTGFNAATGEWVDMIAAGIIDPVKVTRSA

SEQ ID NO: 21616 - protein, 248 aa, Bacteroides fragilis NCTC 9343
MKKIVLLRHGESAWNKENRFTGWTDVDLTEKGIAEACKAGELLKENGFNFDKAYTSYLKRAVKTLNCVLDRMDQDWIPVEKSWRLNEKHYGDLQGLNKSETAAKYGDEQVLIWRRSYDIAPNALSEDDPRNPRFENRYQEVPDAELPRTESLKDTIERIMPYWKCIIFPNLKTADEILVVAHGNSLRGIIKHLKHISDEEIVKLNLPTAVPYVFEFSDELNLEKDYFLGDPEEIRKLMEAVANQGKKK

SEQ ID NO: 21617 - protein, 462 aa, Xanthomonas oryzae pv. oryzae KACC10331
MPLPTDPVAETAASAAPVLRHALKPRQLMMMGLGTAIGAGLFLGSGVGIHAAGPAALVSYLIAGGLVIIVMNALGEMAAAKPTSGAFSVYAADAMGPTAGATVGWLWWLQIVVVIAAEAVGAAGLLATVWPALPVPLLALLFMATFTAINLLGVRNFGEFEFWFAILKVLAIVVFLLIGIALLAGWLPGVTSPGLSNFTQNGGFAPKGLAGIGSALLVVVFAFGGTEIVAVAAAETADPGRSLARTIRTVAGRILVFYIGSISVIVAVVPWTSTALSSPFAAVLQVARIPGAATAITLVAVVALLSALNANLYGASRMIFSLAQRGEAPRVLARTSSEQVPLVAVIASVLFGFAAAALELLYPNKVLPMLLNIVGATCLLVWTISLVSQLILRARADRAGLALPFRMRGFPFLTVLALAILAVIFGLLAYSADTRAQFLSMVTLTAVIAVVSEVARRFRSRM

SEQ ID NO: 21618 - protein, 415 aa, Tradescantia virginiana
TTPISIEDVRREVKILKALSGHKHLVKFYDACEESLNVYLIMELCEGGELLDRILSRGGKYTEEDAKAIVMQILNVVAYCHLQGVVHRDLKPENFLFINRDENAPMKLIDFGLSDFTRPDERLNDIVGSAYYVAPEVLHRSYSMEADIWSIGVITYILLCGSRPFWARTESGIFRSVLRADPNFDDSPWPTASPEAKDFVKRLLNKDYRKRMTAAQALSHPWLRDKEPQIPLDILIYKQTKLYLRATPLKRAALKALSKALTEDELVYLRLQFKLLEPNNDGRVSLENFHTALAQNATEAMKESRVLDILNSLESLAYRRMDFEEFCAAAISCYQLEALEHWEQIASTAFEYFEQDGNRVVSVEELAQDLNLPQNAYAILKDWIRQSDKKLSFLGYTRYTRYLHGVTPRPNTRQH

SEQ ID NO: 21619 - protein, 175 aa, Triticum aestivum
MAPTVMASSATSVAPFQGLKSTAGLPVSRRSNGASLGSVSNGGRIRCMQVWPIEGIKKFETLSYLPPLSTEALLKQVDYLIRSKWVPCLEFSKVGFIFREHNTSPGYYDGRYWTMWKLPMFGCTDTTQVINEVEEVKKEYPDAYVRIIGFDNMRQVQCVSFIAFKPPGCEESGKA

SEQ ID NO: 21620 - protein, 414 aa, Pseudomonas putida KT2440
MSRRRVVVTGMGMLSPLGTDVPSTWQGILAGRSGIGPIEHTDLSAYSTRFGGSVKGFEVEQYLSAKEARKLDLFIQYGLAAGFQAVRNAGLEVTDANRERIGVAMGSGIGGLTNIEETSRTLHDSGPRRISPFFVPGSIINMISGFLSIHLGLQGPNYAIATACTTGTHCIGMAARNIAYGEADVMIAGGAEMAACGLGMGGFGASRALSTRNDEPSRASRPWDKGRDGFVLSDGAGALVLEELEHAKARGATIYAELVGFGMSGDAYHMTSPPDSGEGAARCMANALRDAGIQPEEVSYINAHGTSTPAGDVAEVAAIKRVFGEHAYKLAVSSTKSMTGHLLGAAGAVEAIFSVLAINSQMAPPTINLDEPDEGCDLDFVPHQARSMPIDVVLSNSFGFGGTNGSLVFRRFAG

SEQ ID NO: 21621 - protein, 203 aa, Escherichia coli
MIESNLRLVVKIARRYGNRGLALLDLIEEGNLGLIRAVEKFDPERGFRFSTYATWWIRQTIERAIMNQTRTIRLPIHIVKELNVYLRTARELSHKLDHEPSAEEIAEQLDKPVDDVSRMLRLNERITSVDTPLGGDSEKALLDILADEKENGPEDTTQDDDMKQSIVKWLFELNAKQREVLARRFGLLGYEAATLEDVGREIG

SEQ ID NO: 21622 - protein, 457 aa, Salmonella typhimurium LT2
MQKYTSEARQLLALRIPVILAQVAQTAMGFVDTVMAGGYSATDMAAVAIGTSIWLPAILFGHGLLLALTPVIAQLNGSGRRERIAHQVRQGFWLAGFVSVLVMIVLWNAGYIIRSMHNIDPALADKAVGYLRALLWGAPGYLFFQVARNQCEGLAKTKPGMVMGFLGLLVNIPVNYIFIYGHFGMPELGGIGCGVATAAVYWVMFIAMLSYIKHARSMRDIRNEKGFGKPDSVVMKRLIQLGLPIALALFFEVTLFAVVALLVSPLGIVDVAGHQIALNFSSLMFVLPMSLAAAVTIRVGYRLGQGSTLDAQTAARTGLGVGICMAVVTAIFTVTLRKHIALLYNDNPEVVALAAQLMLLAAVYQISDSIQVIGSGILRGYKDTRSIFFITFTAYWVLGLPSGYILALTDLVVDRMGPAGFWMGFIIGLTSAAVLMMLRMRYLQRQPSAIILQRAAR

SEQ ID NO: 21623 - protein, 196 aa, Shigella flexneri
LVVKIARRYGNRGLALLDLIEEGNLGLIRAVEKFDPERGFRFSTYATWWIRQTIERAIMNQTRTIRLPIHIVKELNVYLRTARELSHKLDHEPSAEEIAEQLDKPVDDVSRMLRLNERITSVDTPLGGDSEKALLDILADEKENGPEDTTQDDDMKQSIVKWLFELNAKQREVLARRFGLLGYEAATLEDVGREIG

SEQ ID NO: 21624 - protein, 433 aa, Rubrivivax gelatinosus PM1
MSAKTDPTQLSSFLSYVTPSPTSPWGTYLSQVDRVIPYLGHLGKWAETLKRPKRALIVDVPIEMDDGSVRHFEGFRVQHNLSRGPGKGGVRYHPDVTLEEVMALSAWMTVKCAAVNLPYGGAKGGIRVDPKQLSQKELEKMTRRYTSEIGIIIGPQRDIPAPDVNTNGQIMAWMMDTYSQNTGATATGVVTGKPIHLGGSLGRVKATGRGVFVTGREAARRLGLALDGARVAVQGFGNVGGSAAELFAQAGAKIVAAQDHTGTIYNDKGLDLAELVPYVKQVGGVGGFKGAEAMDGESFWDVNADILIPAALEGVISAERAARIKARLVLEGANGPTVPAADDILRDRGVLVVPDVICNAGGVTVSYFEWVQDFSSFFWTEDEINVRLDKIMVDALRRIWDTADLHKITLRTATFAVACERILTAREERGLYP

SEQ ID NO: 21625 - protein, 256 aa, Yersinia pestis KIM
MPNDYKWFDTAFSLSGKVAAITGGATGIGHAIAELYLAKGARVVLMDCADNVAEIAEQLDRDNAVGLHCDVSDSQSVRQAVAQAIGAFGQLDILVNSAGIAALDPAEKVREQDWDRTIDINLKGVFLMCQEVGKHFIQHGHGKIVNLASQAGVVALPNHLAYCASKFGVIGITKVLALEWGPLDIQVNAISPTVVLTALGQKAWSGQLAEDMKLKIPARRFAYPAEVAACALFLASDAANMITGENLVIDGGYTIQ

SEQ ID NO: 21626 - protein, 199 aa, Shigella flexneri
RMIESNLRLVVKIARRYGNRGLALLDLIEEGNLGLIRAVEKFDPERGFRFSTYATWWIRQTIERAIMNQTRTIRLPIHIVKELNVYLRTARELSHKLDHEPSAEEIAEQLDKPVDDVSRMLRLNERITSVDTPLGGDSEKALLDILADEKENGPEDTTQDDDMKQSIVKWLFELNAKQREVLARRFGLLGYEAATLEDV

SEQ ID NO: 21627 - protein, 218 aa, Fargesia fractiflexa
GMDVSEWDPSKDKYISAKYDKTTAMEAKALNKEALQAEVGLPVDGKIPLVAFIGRLEEQKGPDVMAAAIPQLMEENVQIILLGTGKKKFERMLKSAEEKYPGKVRAVVKFNAPLAHQIMAGADLLAVTNRFEPCGLIQLQGMRYGTPCVCASTGGLVDTIIEGKTGFHLGRLSVDCNVVEPGDVQKVATTLKRAIKLVGTPAYQEMIRNCMAQDLSWK

SEQ ID NO: 21628 - protein, 188 aa, Clostridium perfringens
MLKSYWRDILLLIFGDKRVAAGVLSDGVGSALGGLVGSCPNTSFSQNIGIISLTKVASRHVAVMAGILLVILGFLPKVAAIITGIPNPVLGGVGIMMFGTVAAAGIRTLSNIKLTERNLLIIAISMGLGLGVTFRPDVIHNLPEAIRMIFSSGISTGTIAALILNAVLKESPTSMEFENMYDEETKAS

SEQ ID NO: 21629 - protein, 218 aa, Fargesia frigida
GMDVSEWDPSKDKYISVKYDKTTAMEAKALNKEALQAEVGLPVDGKIPLVAFIGRLEEQKGPDVMAAAIPQLMEENVQIILLGTGKKKFERMLKSAEEKYPGKVGAVVKFNAPLAHQIMAGADLLADTSRFEPCGLIQLQGMRYGTPCVCASTGGLVDTIIEGKTGFHLGRLSVDCNVVEPGDVQKVATTLKRAIKLVGTPAYQEMVRNCMAQDLSWK

SEQ ID NO: 21630 - protein, 156 aa, Arabidopsis thaliana
MSLVPSFFGGRRTNVFDPFSLDVWDPFEGFLTPGLTNAPAKDVAAFTNAKVDWRETPEAHVFKADVPGLKKEEVKVEVEDGNILQISGERSSENEEKSDTWHRVERSSGKFMRRFRLPENAKVEEVKASMENGVLSVTVPKVQESKPEVKSVDISG

SEQ ID NO: 21631 - protein, 218 aa, Fargesia fungosa
GMDVSEWDPSKDKYISVKYDKTTAMEAKALNKEALQAEVGLPVDGKIPLVALIGRLEEQKGPDVMAAAIPQLMEENVQIILLGTGKKKFERMLKSAEEKYPGKVRAVVKFNSPLAHQIMAGADLLAVTSRFEPCGLIQLQGMRYGTPCVCASTGGLVDTIIEGKTGFHLGRLSVDCNVVEPGDVQKVATTLKRAIKLVGTPAYQEMVRNCMAQDLSWK

SEQ ID NO: 21632 - protein, 218 aa, Fargesia lushuiensis
GMDVSEWDPSKDKYISVKYDKTTAMEAKALNKEALQAEVGLPVDGKIPLVAFIGRLEEQKGPDVMAAAIPKLMEENVQIILLGTGKKKFERMLKSAEEKYPGKVRAVVKFNAPLAHQIMAGADLLAVTSRFEPCGLIQLQGMRYGTPCVCASTGGLVDTIIEGKTGFHLGRLSVDCNVVEPGDVQKVATTLKRAIKLVGTPAYQEMVRNCMAQDLSWK

SEQ ID NO: 21633 - protein, 384 aa, Brassica rapa subsp. pekinensis
MELKEGSNQISEIEEGENKRDRYKRSANMRRSPCSDDSGLKKGPWTPEEDEKLVNYIQKHGHSSWTALPKRAGLNRCGKSCRLRWTNYLRPDIKRGRFSPEEEQTILNLHAVVGNNQRFCVPVLLAYVDNVIRWSTIANNLPGRTDNEIKNFWNTHLKKKLIQMGVDPMTHRPRPDIFSSLSQLVSMSSNLRGFVDMQLQFQTDQEQTILKLQTEMAKLKLLHDLLQPPSMNNNTNPNDFDTRSLLHSIASLKETYTTSNNPDLGPYLQDFSSIPSLETLNTNMVPSSISPRDLEDSHFKFFSQRDNLPVSPVWLSDPSSSNQSLLPSLDHSSVVSGDLIRNQYIIEDVNSNLMTSSSGQESGASASPVWPDHLLDDSIFSNIL

SEQ ID NO: 21634 - protein, 505 aa, Ralstonia solanacearum
MRTARTVYALRLLCVAAVFAAGGALMPAYAQNATGSVATGTYGLPDFADLVEKVSPAVVNIRTTEKVRMQNNPSDDDMAEFFRRFFGVPMPGTPGQGQGQKRRNAPPQAEEEQSRGVGSGFIMSGDGYVLTNAHVVEGAETIYVTLTDKREFKAKLIGSDKRTDVALVKVEATGLPSLKLGDSDKVRVGEWVLAIGSPFGLDNTVTAGIVSAKGRDTGDYLPFIQSDVAVNPGNSGGPLINLRGEVIGINNQIFSQSGGYMGISFAIPIDEAMRVAEQLKTQGRVTRGRIGVAIDNVPKDAAESLGLGRARGAYVGNVESGGPADKAGIEAGDIVLKFNGRDVEKAGDLQRQVGESKPGTRATVQVWRKGATRDLTVTVAELQPDTKVAQRGKGGQSDNGQPGAGKQNALGLVVADLSEGAQREFKTKAGVEVQVADGPAARAGIRPGDVILRVGDTDVTSAKQFNDVVGRLDKSRMVAVFVRRGDATQVVTMRPSTARAGGGQP

SEQ ID NO: 21635 - protein, 144 aa, Triticum aestivum
  misc_feature (72)..(72): Xaa can be any naturally occurring amino acid
  unsure (1)..(144): unsure at all Xaa locations
MALAEGNNGAVVFSEEQEALVLKSWAVMKKDSANLGLRFFLKVFEIAPSAKQMFSFLRDSDVPLEKNPKLKXHAMSVFVMTCEAAAQLRKAGKVTVRETTLKRLGATHLKYGVADGHFEVTGFALLETIKEALPADMWSLEMKK

SEQ ID NO: 21636 - protein, 329 aa, Glycine max
  misc_feature (157)..(157): Xaa can be any naturally occurring amino acid
  misc_feature (186)..(186): Xaa can be any naturally occurring amino acid
  misc_feature (247)..(247): Xaa can be any naturally occurring amino acid
  misc_feature (265)..(265): Xaa can be any naturally occurring amino acid
  misc_feature (287)..(287): Xaa can be any naturally occurring amino acid
  misc_feature (290)..(290): Xaa can be any naturally occurring amino acid
  misc_feature (305)..(305): Xaa can be any naturally occurring amino acid
  unsure (1)..(329): unsure at all Xaa locations
MASMAAIGSLNVPCSASSRSSNVGRKSFPRSLSFSASQLCGDKIHTDSVSFAPKIGRNPVIVTPKAVSDSQNSQTCLDPDASRSVLGIILGGGAGTRLYPLTKKRAKPAVPLGANYRLIDIPVSNCLNSNVSKIYVLTQFQGGGAKKEGGFLGGFFXPKRGFAENSYFFSGGSQNFLGGIFFCFFXKAHNFWDFFVLGGGPFFLGGVRGNIFPGLMGKFWGDIPGGGHSQRGKGGGPLPFGFNKNLXKGGLKLDLAEKPKRGTSXKALKLDTTILGLDDERAKEMPXYMXSMGIYVFSKNVMLDXLREKFPGANDFGSEVIPGATSIGC

SEQ ID NO: 21637 - protein, 202 aa, Synechococcus elongatus PCC 6301
MAIVKHQSRFLCKIATIESDRSCLIAAMTAAAPTLSRRRLLLGLVSAGAGAGGFLFWRQSRSPLSSTDAVYPMQLSEAEWQQRLSPEAYAVLREAATERPFTSDLLAEKRVGQYCCAGCEQPLFESAAKYESGTGWPSFREAIAGSLGFQTDYKLVVPRTEYHCSRCGGHQGHVFNDGPAPTGKRFCNNGVAIAFVPAADQG

SEQ ID NO: 21638 - protein, 485 aa, Cryptococcus neoformans var. neoformans JEC21
MMHASKHKMGFSDFRDAILIQPPSFKKKKEYVLEELLGRGGFGKVVKALWAPPEREPKEVALKIINKKLVKGNEQAVLDEISVLKHLDHPNIVHVWDDFESRDKYYIAFELAVGGELFDRISERGKFTERDAVECIRQVLQATAYLHEHNVAHRDLKPENILYKTRDADSPLVIADFGIAKHLETPDQECSEAAGSFGYAAPEVLLGKPHGMKVDCWSIGIIAYTLLCGYPPFRSDDRNGLLQEMTRGRIMFHDRYWSKVSRTAKDFVKDMLETDPKKRSTAADALNHPWLTSGQATETDLSAAIRDNFDAKRKWKSALRIIQASNRIRSASRSRSPSLSTSPPSTANTANPSPNSALFVPEVPHVLTPLSMTDEDPMSDEHYYFSADDQGHTEEEEEAKVMTRGGKKKAGSMPVGSGSGVTTGTVTPYTTGNEGSNTPKPTIKVIDGNGELRPEETDMQTPPATAPVGAGMMGSIRGMMGKLSL

SEQ ID NO: 21639 - protein, 290 aa, Campylobacter jejuni subsp. jejuni NCTC 11168
MKIALIQQKFHLNKEQTIKKTCEFIEEASKQGAELVCLGELHQSEYFCQSENVDFFDYANDYEKDVKFWANIARKNQIVLIASLFEKRSAGLYHNTAVVFEKDGSIAGKYRKMHIPDDPCFYEKFYFTPGDLGFEPINTSLGKLGVLICWDQWYPEAARIMALKGAEILIYPTAIGWFDKDKDEEKQRQLNAWLGVQKGHAIANGLYVVAINRVGFEKDVSGVEEGIRFWGNSFVFGPQGEELCLLDSQNECVKIIEIDKKRSENVRRWWPFLRDRRIEYFTDLTKRFID

SEQ ID NO: 21640 - protein, 325 aa, Campylobacter jejuni subsp. jejuni NCTC 11168
MIKSIPEWSEQEYLMLSLPHEKSDWNPYLEEILQSYKEFVKVVSEFQKVLLIAPKQSDFENFKDIKNVEFFKCDTNDTWIRDFGAIDIVENGRLKALDFTFNAWGNKFQSELDNAVNSKLFKEKFKEELKKVDFILEGGSIDFNGEGVMLTSSHCLLNENRNSHLNKTQIDTKLKEIFGLKQIIWLENGFIKGDDTDHHIDTLARFIDKNTIAHCICEDEEDEHYLPLQKMKEELKKTGFDLLELPIPKPLYYEERRLGATYANFVFINNALIVPFYKDKNDEIIAKRLSKALPNHKIIGVDARVFLRQNGSLHCSCQNRFKGLR

SEQ ID NO: 21641 - protein, 867 aa, Candida glabrata CBS138
MSAELKSHKLDRSIGSNKAGHEHPISRNYVNNVHNANKHKLSDYPMMLTITHIGTSRLSSSSSSSSSSSSNSSSSSSYSRGFISDNLSEYRSMDPKSPNRPVRYRSIHSKYTSIREDTQHELVTDKEEIQNNKEVSINILSKPNKHTSIDYHNQGVDTTYQINSGQISRHKQMSKSLPNTPKPLQYQKSLSLSHSPRKLSLKSPSRNFSFKSNSKLNVGTKHDQEKKRPVKMKEVFSLFVNSIKVSNNSNNSNDRSDQEVPPKHDLKKVKSISKPYNPKHVHHVGFDPVTGDYIGLPEKWQALLESNGITKKEQEKDIKTLLNVVQFYQDVSASKTTDKLLQTFPLEKGTICVDDTQVSTPSNITSSADDDAAKPSFNESLMPAISIESRHKNEVNQLILKESFSTEDKFIPSRPAPKPPALQELKAIPPKSPNRPKATRVKNNSSKITSVNSLPNNGEPTVQFSNDQKSHKSQRVGTSTDTFRFEKSLSGNKKTISITSTSTSTSKHPTNYRESWGIKGHTDKKENSNVIKRDEGNKKAEKDKRMQVVLSRLSKICTPGTPEDKFETYLKIGQGASGGVYLSHSRSDKSQCVAIKQMNLEKQPKKELIVNEIMVMSSSKHQNIVNYIDSYLSGLDLWVVMEYMEGGCLTDVVTYCVLTEGQIGAVCREVLQGLEFLHSKGVLHRDIKSDNVLLSMNGDIKLTDFGFCAQVNDTVIKRTTMVGTPYWMAPEIVSRKEYGPKVDIWSLGIMIIEMIEGEPPYLNETPLRALYLIATNGRPEVQEPDRLSKDFKEFIDKCLAVTVSERAESSELLQHKFITEVAENTEGLSALVKFSRMKKAAEQNSDSEGRSSSSSSKAVASVESGIQ

SEQ ID NO: 21642 - protein, 360 aa, uncultured bacterium
MSASQEKLRFGICGLGFMGRTYFHHLCNHPRASVVAVCDRDPQLRAGDWAQATGNIGPRAGQRVDLGGATAYSDPQELIGDPDVDVVAVTLPTPLHAPVTEQALAAGRHVLCEKPMARDLEGCDRMIWAAEQAGRTLMIAQCVRFWPQYEAIKRLVDEGRLGPLRFAKLKRVTSPPLYSSQNWLMDGRQSGGALLDLHVHDTDFAHHLLGMPESIFARGTRGPSGEIDHVLATYSYADGRYALIEGGWAHHHAPWPFEMAISVFGERGAAQWSSQRGPEVLLYAGADEVQRIDCADEAGWMHELDYFIDRVVAGQPVERCLPASSRTSVALALLEKQAIESGGAVRVSPTATDCSDASRR

SEQ ID NO: 21643 - protein, 487 aa, Malus x domestica
MGFTLSNQQQLLSKIATSNGHGENSPYFDGWKAYDSDPFHPTKNPNGVIQMGLAENEMCFDLIQEWVLNNPEASICTAAGVNEFKDIAIFQDYHGLPVFRNAVANFMGKVRGNRVTFDADRIVMSGGATGAHETIAFCLADPGDAFLVPVPYYPGFDRDLGWRTGVQLMPVACDSSNNFKVTRAALEAAYEKAQKANIRVKGLLITNPSNPLGTVLDRDTLRSLVTFINEKKIHLVCDEIYAATVFSQPSFISIAEIIEENIECNRNLIHIVYSLSKDMGFPGFRVGIVYSYNDDVVNCARKMSSFGLVSTQTQHLIASMLSDNEFVERFIAQSAKRLKARHMRFTMELDQVGTSCLNSNGGLFVWMDLRRLLKEQTFEAEMVLWHTIIHEVKLNVSPGSSFHCPEPGWFRVCFANMDDKTMEIALTRIRNFVAQYKEPIAPRKNNRYWQSNLRLSFQSRRMDDIMMSPCMMSPHSPIPQSPLVRAT

SEQ ID NO: 21644 - protein, 462 aa, Oryza sativa
MTGAVSKLAAPRPAAAAPLPPASVRSAFLASAPSPRRFSVSIAAGRARSPIIAMASAKEGNGAPTKRTTLHDLYDLQGQSPWYDNLCRPVTDLLPLIGSGVRGVTSNPSVRYTTYFFCSLAPCSESAILIADCVPMAMQIFQKAISTSNAYDDQFKQLILAGKDAESAYWELVIKDIQDACKLFEPIYDQTDGADGYVSVEVSPRLANDTQGTVEAAKWLHKVVDRPNVYIKIPATAECVPSIKEVIANGISVNVTLIFSIARYEAVIDAYIDGLEASGLSDLSRVTSVASFFVSRVDTLIDKMLEKIGTPEALALRGKAAVAQAKLANQLYQKKFSGPRWEALVKKGAKKQRLLWASTSVKNPAYPDTLYVDPLIGPDTVSTMPDQALLAFIDHGTVSRTIDANVSDAEGVYSALEKLGIDWDEVGKQLELEGVDSFKKAFDSLLGSLEEKGNSLKKTVSL

SEQ ID NO: 21645 - protein, 457 aa, Wolbachia endosymbiont of Drosophila ananassae
MNEYDITVIGSGPGGYIAAIRAAQLGFKTAIVEKEKNLGGICLNWGCIPTKSLLRASEVYRLIKRSKEFGIEVKGANFDIQSIVKYSRNVVDKLSSGVAYLMKKNNIKVHQGFGKLAGNGTIKVAGDKEEQEIVSKHIILATGVRARNLPGIEADGDLIWNAQHAMTPERLPKSLLIIGSGAIGIEFASFYSTLGVDVTIIEIKSTILPLEDKDISDLAQEIFTKQGIEIYTSSSVKALTKSKDSAQVLLSSGESKEFERVIVAVGIQANIENIGLENTKIKLSPSGFIETNEWYETSESNVYAIGDVAGPPCLAHKASHEAVICIEKIAGKNAHALKKECIPNCTYSHPQIASIGLTEEQAIKGGYDIKIGKFHSNFNGKSVALSETEGLVKTIIDKKTGEILGSHMIGAEVTELISNFALVKQLEGTDFDIKSTIFPHPTISEMIHESVLAADVK

SEQ ID NO: 21646 - protein, 487 aa, Malus x domestica
MGFTLSNQQQLLSKIATGNGHGENSPYFDGWKAYDSDPFHPTKNPNGVIQMGLAENQMCFDLIQEWILNNPEASICTAAGVNEFKDIAIFQDYHGLPEFRNAVANFMGKVRGNRVTFDADRIVMSGGATGAHEMIAFCLADPGDAFLVPVPYYPGFDRDLGWRTGVQLIPVACDSSNNFKVTRAALEAAYEKAQKANIRVKGLLITNPSNPLGTVLDRDTLISLVTFINEKKIHLVCDEIYAATVFSQPSFISIAEIIEENIGCNRNLIHIVYSLSKDMGFPGFRVGIVYSYNDAVVNCARKMSSFGLVSTQTQHLIASMLSDNEFVKRFIAQSAKRLKTRHMRFTMGLAQVSTNCLKSNGGLFVWMDLRRLLKEQTFEAEMVLWRTIIHEVKLNVSPGSSFHCPEPGWFRVCFANMDDKTMEVALTRIRTFVLQNKEAIVPRKSNRLWHSNLRLSFQSRRMDDTMMSPCMMSPHTPIPQSPLVRAT

SEQ ID NO: 21647 - protein, 448 aa, Pseudomonas syringae pv. phaseolicola
MYRVGLRCQFSGATDEIPMNTELTGRSVPVPKQSERKSAFVDRYGAVFGRQQGLMLKMSGLSASEARGDGAWVEDTQGGRWLDFGSFGVHLLGHSHSGVVSALVEQIQRFGLSTKILSNEPIVLAAERLLVMAGPEKDKVIFGNTGSEVVEAALKLARIVTGRRRVIAFEQAYHGRTAAALSVSHGYMRHAGLLTEGDVVFCPIDDLDAVANALEAGDIAAIIIEPIQGEGGIRPVENEFLRGLGDLAQAFDCRLIFDEIQTGLGRIGSLRVDVPCDILLLGKVLGGGVFPISAALFTSKRFDAAARDPVVHASSFAGSALAGAVVNAVLDVVSAPDFTLRVQRLGDRVLSYLRQRLADNPLITDIRGQGLMIGVEFKRLDHVGEMIIEAAKRHLLLAFCLTDPKVLRLYPPAVISDADLETGLEHFCQSVEAITRTEFDKEIPLCQQ

SEQ ID NO: 21648 - protein, 204 aa, Escherichia coli
RMIESNLRLVVKIARRYGNRGLALLDLIEEGNLGLIRAVEKFDPERGFRFSTYATWWIRQTIERAIMNQTRTIRLPIHIVKELNVYLRTARELSHKLDHEPSAEEIAEQLDKPVDDVSRMLRLNERITSVDTPLGGDSEKALLDILADEKENGPEDTTQDDDMKQSIVKWLFELNAKQREVLARRFGLLGYEAATLEDVGREIG

SEQ ID NO: 21649 - protein, 271 aa, Triticum aestivum
MSLLSKLRLVTVDVTGTLLAYKGRLGDYYCMAAKAAGKPCPDYDRMHEGFKLAYTEMARKYPCFGFAAKMPTIEWWRICVKDSFVKAGYDYDDETFDKVFKRIYSAFGSSAPYSVFPDAQPFMRGLREKGITVGIVSNAEYRYKEVILPALGLNQGSEWDFGVFSGIVGVEKPDPKIYKIALEMAGNVAPEEALHIGDSYRKDYVPARSIGMHALLLDRFKTADAESWRQSGAPVLPDLEAAQAWLTKNPTEEPAEEPLGAALLRRMAEKL

SEQ ID NO: 21650 - protein, 198 aa, Escherichia coli
MIESNLRLVVKIARRYGNRGLALLDLIEEGNLGLIRAVEKFDPERGFRFSTYATWWIRQTIERAIMNQTRTIRLPIHIVKELNVYLRTARELSHKLDHEPSAEEIAEQLDKPVDDVSRMLRLNERITSVDTPLGGDSEKALLDILADEKENGPEDTTQDDDMKQSIVKWLFELNAKQREVLARRFGLLGYEAATLEDV

SEQ ID NO: 21651 - protein, 754 aa, Lycopersicon esculentum
MGSLLRMNRLLSSIVESCNCIIDPQLPADDLLMKYQYISDFFIALAYFSIPVELIYFVKKSAVFPYRWVLVQFGAFIVLCGATHLINLWTFNMHTRNVAIVMTTAKALTALVSCITALMLVHIIPDLLSVKTRELFLKKKAAQLDREMGIIRTQEETGRHVRMLTHEIRSTLDRHTILKTTLVELGRTLALEECALWMPTRTGLELQLSYTLRHQNPVGLTVPIQLPVINQVFGTNHVVKISPNSPVARLRPAGKYMPGEVVAVRVPLLHLSNFQINDWPELSTKRYALMVLMLPSDSARQWHVHELELVEVVADQVAVALSHAAILEESMRARDLLMEQNVALDLARREAEMAVRARNDFLAVMNHEMRTPMHAIIALSSLLQETDLTPEQRLMVETILKSSNLLATLINDVLDLSRLEDGSLQLDIGTFNLHALFREVHSLIKPIASVKKLFVTLSLSSDLPEYVIGDEKRLMQILLNVVGNAVKFSKEGNVSISAFVAKSDSLRDPRAPEFFAVPSENHFYLRVQIKDTGIGITPQDIPNLFSKFTQSQALATTNSGGTGLGLAICKRFVNLMEGHIWIESEGLGKGSTAIFIIKLGIPGRANESKLPFVTKLPANHTQMSFQGLKVLVMDENGVSRMVTKGLLTHLGCDVTTVGSRDECLRVVTHEHKVVIMDVSMQGIDCYEVAVVIHERFGKRHGRPLIVALTGNTDRVTKENCMRVGMDGVILKPVSVYKMRSVLSELLEHGVVLES

SEQ ID NO: 21652 - protein, 144 aa, Hevea brasiliensis
MSKSYFKQEHDLDKRRAEAARIREKYPDRIPVIVEKAERSDIPNIDKKKYLVPADLTVGQFVYVIRKRIKLSAEKAIFIFVDNVLPSTGAIMSAIYEEKKDEDGFLYVTYREKTHSDLISHCSVVVGFALFLPLFHQFDSVRIV

SEQ ID NO: 21653 - protein, 389 aa, Staphylococcus epidermidis ATCC 12228
MFDWFQLASNKEKRMVQLRRYLHQYPELSFEEKRTHDFIVNQLSQLACTIETPVGRNGIKATFKGSDSNGPTIALRADFDALPVQELNDVPYRSKNKGCMHACGHDGHTAILLGVAEIVHEHRHLLKGNVVFIFQYGEEIMPGGSQEMIDDGCLQNVDKIYGTHLWSGYPSGTIYSRPGAIMASPDEFSVTIYGKGGHGAKPHETIDPIVIMAEFILSAQKIISRTIDPVKEAVLTFGMIQAGSTDSVIPDTAFCKGTVRTFDTKLQSHVQNKMDKLLQGLSLSNDITYELEYIKGYLPVHNHQQSYDVVKQAANDLHLRFNESDLMMIGEDFSHYLKVRPGAFFLTGCGNKDKGITAPHHNPHFDIDESSLKYAASEFLKILEIENVF

SEQ ID NO: 21654 - protein, 492 aa, Oryza sativa (japonica cultivar-group)
MVLSKAVSESDMSVHSTFASRYVRASLPRYRMPENSIPKEAAYQIINDELMLDGNPRLNLASFVTTWMEPECDKLIMAAINKNYVDMDEYPVTTELQNRCVNMIAHLFHAPLGEDETAVGVGTVGSSEAIMLAGLAFKRRWQNKRKAEGKPFDKPNIITGANVQVCWEKFARYFEVELKEVKLRDGYYVMDPEKAVDMVNENTICVAAILGSTLNGEFEDVKLLNDLLDKKNKETGWETPIHVDAASGGFIAPFLYPELEWDFRLPWVKSINVSGHKYGLVYAGIGWCIWRNKEDLPEELIFHINYLGTDQPTFTLNFSKGSSQVIAQYYQLIRHGFEGYRNIMENCHENAMVLKEGLVKTGRFDIVSKDEGVPLVAFSLKDRSRHDEFEISDMLRRFGWIVPAYTMPPDAQHVTVLRVVIREEFSRTLAERLVLDIEKVMYQLDALPSRLMPPVPPAPLLVVAKKSELETQRSVTEAWKKFVLAKRTNGVC

SEQ ID NO: 21655 - protein, 736 aa, Lycopersicon esculentum
MDCNCFDPLLPADELLMKYQYISDFFIAVAYFSIPIELVYFVQKSAVFPYRWVLVQFGAFIVLCGATHLINLWTSTPHTRTVAMVMTTAKFSTAAVSCATAVMLVHIIPDLLSVKTRELFLKNKAAELDREMGLIRTQEETGRYVRMLTHEIRSTLDRHTILKTTLVELGRALQLEECALWMPTRTGVELQLSYTLHHQNPVGFTVPIQLPVINQVFSANCAVKISPNSAVARLRPTRKYIPGEVVAVRVPLLHLSNFQTNDWPELSPKSYALMVLMLPSNSARQWHVHELELVDVVADQVAVALSHAAILEESMRARDLLIEQNVALDLARREAETAVRARNDFLGVMNHEMRTPMHAVVALSSLLQESELIPEQRLMVETILKSSNLLATLINDVLDLSRLEDGSLQLDVGTFNLHALFREVLNLIKPVAAVKKLFVTLSLSSDFPEVAIGDEKRLMQILLNVVGNAVKFSKEGSVSVSAVNAKSESLIDPRAPEFFPVQSENHFYLRVQVKDTGSGINPQDFPKLFCKFAQNQEPATKNSAGTGLGLAICKRFVNLMEGHIWIESEGVGKGSTAIFIVKLGIPGRLNESKLPFTAGLPANHMQMTFQGLKVLVMDDNGFSRMVTKSLLVHLGCDVTTIGSGDECLRILTREHKVLIMDASITGMNCYDVAVSVHEKFGKRLERPLIVALTGNTDQVTKENCLRVGMDGVILKPVSIDKMRSVLSGLLEHGTVL

SEQ ID NO: 21656 - protein, 218 aa, Fargesia porphyrea
GMDVSEWDPSKDKYISVKYDKTTAMEAKALNKEALQAEVGLPVDGKIPLVAFIGRLEEQKGPDVMAAAIPQLIEENVQIILLGTGKKKFERMLKSAEEKYPGKVRAVEKFNAPLAHQIMAGADLLAVTSRFEPCCLIQLQGMRYGTPCVCASTGGLVDTIIEGKTGFHLGRLSVDCNVVEPGDVQKVATTLKRAIKLVGTPAYQEMVRNCMAQDLSWK

SEQ ID NO: 21657 - protein, 178 aa, Glycine max
  misc_feature (91)..(91): Xaa can be any naturally occurring amino acid
  misc_feature (105)..(105): Xaa can be any naturally occurring amino acid
  unsure (1)..(178): unsure at all Xaa locations
DLTIIVLLLETPIPYLAHSMTYVTEHRDITVPLSNPFILDRTIICAYFTNHMLDDPSLIEMKRTANIPSLNDMAMLLMSGTQIVCIAPSGXGRDRPDPHTGKMVXPLPLDTSSDDNMRRLVEHSRTPGHAYPLARLCHDIMPSTLNVDIDIVEKRIIFSYVAGISVASALICTETTAT

SEQ ID NO: 21658 - protein, 651 aa, Oryza sativa (indica cultivar-group)
MAGSERTVVWFRRDLRIDDNPALAAAARDGVVLPVFIWCPADEGQFYPGRCSRWWLKQSLPHLSQSLESLGCPLVLIRAESTLEALLRCIDSVGATRLVYNHLYDPVSLVRDDKIKKELSALGISIQSFNGDLLYEPWEIYDDSGLAFTTFNMYWEKCMELPIDISPSLAPWKLVPAPGLESVRSCSVDDLGLESSKDEESSNALLRRAWSPGWRNAEKMLEEFVSHGLLEYSKHGMKVEGATTSLLSPYLHFGEVSVRKVYQLVRMQQIKWENEGTSEAEESIHFFMRSIGLREYSRYLCFNFPFTREKSLLGNLKHYPWKVDEERFKSWRQGMTGYPLVDAGMRELWATGWTHNRIRVIISSFAVKFLLIPWTWGMKYFWDVLLDADLESDILGWQYISGSLPDGHELSRLDNPEVQGQKYDPDGVYVRTWIPELARMPTEWIHHPWDAPSCILEVAGVELGFNYPKPIVDLHIARECLDDSISTMWQLDTAEKLAELDGEVVEDNLSNIKTFDIPKVVLRETSPCALPIDQRVPHASSKDHNLKSKVLKASNRSSICVDMIRSSKMEATSSVANSPVSRKRSFCETAFHVPSYSSSAEVHSHIQDHGGSLVGPSRYLLQEAGRNCVDEVEDSSTADSGSSISRQRKAA

SEQ ID NO: 21659 - protein, 378 aa, Dunaliella salina
MAFALRTGVAPSVLPRGQSRRQMVCRAGKFDEELMKTARTIASPGRGILAMDESNATVGKRLDSIGLENSEANRQAYREMLVSTKGLGQYISGAILFEETLYQSGSNGKRMTDMLVENGIVPGIKVDKGLAPLANSNNEQWAMGLDGLDKRCAEYHKAGARFAKWRSVVSIPNGPSPIAVRETAYGLARYAAICQNNGLVPIVEPEILLDGDHDINRCLAVFEDVWAETFKYLADNKVLFEGILLKPSMVTPGAESPARATPQQVAEMTLIGLKRRVPPAVPGIMFLSGGQSELEATLNLQEMNRQPNPWHVSFSYARALQNTVLKTWQGKPENVPKAQEALLKRAKANSDAQRGQYDPATEGSTEAAQSMYQEGYSY

SEQ ID NO: 21660 - protein, 594 aa, Coccidioides posadasii
MHRALSASSRASVLSSAASTRGQLSHFRPALSSGLNLQQQRYAHKELKFGVEGRAALLKGVDTLAKAVTTTLGPKGRNVLIESSYGSPKITKDGVTVAKAISLQDKFENLGARLLQDVASKTNEIAGDGTTTATVLARAIFSETVKNVAAGCNPMDLRRGIQAAVDSVVEYLQANKREITTSEEIAQVATISANGDTHIGKLISNAMERVGKEGVITVKDGKTIEDELEVTEGMRFDRGYVSPYFITDTKTQKVEFEKPLILLSEKKISAVQDIIPALEASTTLRRPLVIIAEDIEGEALAVCILNKLRGQLQVAAVKAPGFGDNRKSILGDIGILTNSTVFTDELDMKLDKATPDMLGSTGSITITKEDTIILNGEGSKDAIAQRCEQIRSIIADPATSEYEKEKLQERLAKLSGGVAVIKVGGASEVEVGEKKDRVVDALNATRAAVEEGILPGGGTALLKASANGLKDVKPANFDQQLGVSIVKSAIQRPARTIVENAGLEGSVIVGKLTDEFAGDFNRGFDSAKGEYVDMIGAGIVDPLKVVRTALVDASGVASLLGTTEVAIVEAPEEKAPAAAGMGGMGGMGGMGGMY

SEQ ID NO: 21661 - protein, 368 aa, Staphylococcus aureus subsp. aureus N315
MSDNTVKIKKQTIDPTLTLEDVKKQLIEKGKKEGHLSHEEIAEKLQNFDIDSDQMDDFFDQLNDNDISLVNEKDSSDTDEKLNPSDLSAPPGVKINDPVRMYLKEIGRVNLLSAQEEIELAKRIEQGDEVAKSRLAEANLRLVVSIAKRYVGRGMLFLDLIQEGNMGLIKAVEKFDFNKGFKFSTYATWWIRQAITRAIADQARTIRIPVHMVETINKLIRVQRQLLQDLGRDPAPEEIGEEMDLPAEKVREVLKIAQEPVSLETPIGEEDDSHLGDFIEDQEAQSPSDHAAYELLKEQLEDVLDTLTDREENVLRLRFGLDDGRTRTLEEVGKVFGVTRERIRQIEAKALRKLRHPSRSKRLKDFMD

SEQ ID NO: 21662 - protein, 218 aa, Fargesia yuanjiangensis
GMDVSEWDPSKDKYISVKYDKITAMEAKALNKEALQAEVGLPVDGKIPLVAFIGRLEEQKGPDVMAAAIPQLMEENVQIILLGTGKKKFERMLKSAEEKYPGKVRAVVKFNALLAHQIMAGADLLAVASRFEPCGLIQLQGMRYGTPCVCASTGGLVDTIIEGKTGFHLGRLSVDCNVVEPGDVQKVATTLKRAIKLVGTPAYQEMVRNCMAQDLSWK

SEQ ID NO: 21663 - protein, 743 aa, Schizosaccharomyces pombe
MPVAEIKNATQQPSSTNRVQAYAKLEFEKFSFFVQTLQVTMGRKASNSSDCDVHLGDTKAISRQHAKIFYSFPNQRFEISVMGKNGAFVDGEFVERGKSVPLRSGTRVQIGQISFSFLLPEGSEEDGHLKETGITPLSLQQGKIAYSDEFGGKPTGSFHTVTSNQEKDLLFSHIKHESDLPLGLSPADTNISNATSIIEHPDAANAHTLASLNQPPKHLTVSPSSIQRLSPQPYVRPTSDERPIETDSSVSAPKVANHDEELKQGKSTSPSDTVLHPDLNGSPDTGDATQKPNLSYANLIARTLIANPNKKMTLGDICEWIANNWSYYRHQPPAWHNSIRHNLSLNKAFIRIPRRQNEPGKGSFWMLDPSYIDQFEGNFFRRTKKPTPSATPAAHPDTARENELAAIQTKGISAGKTEQLNPQKETSRSKTHTSRGENVEDRPQSLLQNGIQPIIMRDGKLALNPEFFKNANGEQQAPNEQAVQAISLLQQHINKQLGPAAANNPEQATAIANALAVALAQKLQKQQTQMQGPQQVQQQAKRRKAYTSQQLNPAPTAMPHPNITSPSPSISVTQRPAVNVGPPPYVRPSAPSKLPDTRQSIGDPLPPGAMANVSAGPSSVRSSSYNSTASESKSEITSHQNLHTIPINKPFTSDRPLYSSPNDTLERVETGNQGQRMNSIGNASSFSKRDIMENENGSFDTNAKNGNNVDDSSSVRGMNLPSNSSDALRGVKRPLDETSSSYT

SEQ ID NO: 21664 - protein, 500 aa, Oryza sativa (japonica cultivar-group)
MAMMAMGAASWAPIPAPARAAAAFYPGRDLAAARRRRGAAARRPFVFTPRAVSDSRSSQTCLDPDASTSVLGIILGGGAGTRLYPLTKKRAKPAVPLGANYRLIDIPVSNCLNSNVSKIYVLTQFNSASLNRHLSRAYGNNIGGYKNEGFVEVLAAQQSPENPNWFQGTADAVRQYLWLFEEHNVMEFLILAGDHLYRMDYQKFIQAHRETNADITVAALPMDEERATAFGLMKIDDEGRIIEFAEKPKGEKLKSMMVDTTILGLDTERAKELPYIASMGIYVFSKDVMLKLLRQNFPAANDFGSEVIPGATEIGMRVQAYLYDGYWEDIGTIEAFYNANLGITKKPVPDFSFYDRSAAIYTQPRYLPPSKVLDADVTDSVIGEGCVIRHCTINHSVVGLRSCISEGAVIEDSLLMGADYYETETDKKALSETGGIPIGIGKNAHIRKAIIDKNARIGENVKIINVDNIQEASRETDGYFIKSGIVTVIKDALIPSGTVI

SEQ ID NO: 21665 - protein, 377 aa, Arabidopsis thaliana
MTTTTTTTMSTLPMVLVDEILSRVPITSLRSLRSTCKRWEAQSKTNLVGGKATARKSSYLGFILIGNKICSMKLDLNGGDDFVDTSVNQISAFDDFEISQLFHCDGLLLCVSNKHYYSNTVMVCNMYLGETRLIEHCCLLEGFDNFGSYAFGYDSSKNRNHKIFRKKLVSGGYEIYSFKSDSWKDLNVDLGESTELCELGSVSLKGNAYFSVITKHEEEELWENNLLCFDFTTESFGKFLSLPFDNVTAEEEFGIMVLSCVRDEHLAVLYQLDTLGIWISTEIEPNKVSWREFLQVDLYTLDGFPDAFTAGRFIVDEEKQVVVVFNEATEIDLNHGNAFIFGRDGYFTSFNVGDTPPQDFTSYVPSLASLQIEKTGG

SEQ ID NO: 21666 - protein, 603 aa, Yarrowia lipolytica CLIB122
MMDVERVEHMPPKPMYSLMTQPVVLKEEPVAPSPPTTQAAQQQQQQAPTQTQTPAQPPQAQQPTHNQTHTQPPQQQPTSAQQPTSSNATASNSTDNKKPGTTPKVSQAAFIHKLYSMLEDSSIEHLISWSASNDSFIVSPGEEFSKVLRQYFKHTNVSSFVRQLNMYGFHKVNDTFTFHTGDSSQWEFKHGGGSFKRGDVESLRGIKRRASRQSASQRDSVPLRPVGLVSDYGVAPSGGAPPGMNGSVDVGTAAAAAAAQHGHMMLHPSQHPHHPHPADDAAAAAATAATWHLHDSVSRMAATQAALIDAVRSLQSDVISLLDVLPRITEGRAAVESAHTECQRVAHAMGHRNAFLASLDGRRESQPQPQQQQPYFYQQSAAASAASATAPGGSQWRQPEPQYPVPPTDPFHRGSRGRAVSVYFDPLAKEPAAGPDGQAPPTHTSAPPPPPQQQQQQQQQPPHSQGAAPPPPFGSSPGPTGPPGGVPRSQRPGSFPLLHRQDKTEFVGGGFAEALKYRTDAPARRHTASGAETMPLPQYTAPTSTPHPHEPSTPPPHSSPHTPYRSPHPSGGSTRSNSSSSTRGASVAALLNPEGGDKKRKIE

SEQ ID NO: 21667 - protein, 218 aa, Fargesia yulongshanensis
GMDVSEWDPSKDKYISVKYDKTTAMEAKALNKEALQAEVGLPVDGKIPLVAFIGRLEEQKGPDVMAAAIPQLMEENVQIILLGTGKKKFERMLKSAEEKYPGKVRAVVKFNAPLAHQIMAGADLLAVTSRFEPCGLIQLQGMRYGTPCVCASTGGLVDTIIEGKTGFHLGRLSVDCNVVEPGDVQKVATTLKRAIKLVGTPAYQEMVRNCMAQDLSWK

SEQ ID NO: 21668 - protein, 485 aa, Arabidopsis thaliana
MDPYKYRPSSAYNAPFYTTNGGAPVSNNISSLTIGERGPVLLEDYHLIEKVANFTRERIPERVVHARGISAKGFFEVTHDISNLTCADFLRAPGVQTPVIVRFSTVVHERASPETMRDIRGFAVKFYTREGNFDLVGNNTPVFFIRDGIQFPDVVHALKPNPKTNIQEYWRILDYMSHLPESLLTWCWMFDDVGIPQDYRHMEGFGVHTYTLIAKSGKVLFVKFHWKPTCGIKNLTDEEAKVVGGANHSHATKDLHDAIASGNYPEWKLFIQTMDPADEDKFDFDPLDVTKIWPEDILPLQPVGRLVLNRTIDNFFNETEQLAFNPGLVVPGIYYSDDKLLQCRIFAYGDTQRHRLGPNYLQLPVNAPKCAHHNNHHEGFMNFMHRDEEINYYPSKFDPVRCAEKVPTPTNSYTGIRTKCVIKKENNFKQAGDRYRSWAPDRQDRFVKRWVEILSEPRLTHEIRGIWISYWSQKLASRLNVRPSI

SEQ ID NO: 21669 - protein, 364 aa, Brassica rapa subsp. pekinensis
MNTTTSTHFVPPTRFEIYDPLNQIGTMWEESFKNNGGGFYTPNSIIIPTNQKPYSLSEDGTEGTPHKFDQEASTSRHPDKTQRRLAQNREAAKKSRLRKKAYVQQLETSRLKLIHLEQELDRARQQGFYASNRVDTNALSFSDNMCSGIVAFEMEYGHWVEEQNRQISELRTVLNGQVSDIELRLLVDNAMKHYFQLFRMKSAAAKLDVFYIMSGMWKTSAERFFLWIGGFRPSELLKVLLPHFDPMMDQQVLDVCNLRQSCQQAEDAVSQGMEKLQHTLAESVAAGELGEGSYVPQITSAMERLEALVSFVNQADHLRHETLQQMHRILTTRQAARGLLALGEYFQRLRALSSSWETRQREPT

SEQ ID NO: 21670 - protein, 382 aa, Oenococcus oeni PSU-1
MLSDEQLIKIRRHLHANPEIGMQEVKTHQFLLEQIAKFPQENLTIETISEIPTALLVRIAGSDPKRTIALRTDMDALPIQEETGLDFASKNDHVMHACGHDIHMTVALGILSYFAKHQPKDNLLVFFQPAEENEFGGKRFYDAGGFQGEYLPDEFYALHVNPQLPAGQIASRKGTLFAGSNELRISFIGKSGHAAYPQNAKDSIVAAANFVTNVQTVVSRNVDPIEGGVVTIGKFNAGKAMNIIAGKADIEGTIRSFTQSGMEIMTKHIRMIAEGIAGAFGQELKINFRQGGYMPVVNDERTTNFFIDYMKNADGVDFKIVQPAMIAEDFGFLSNQFEGTMCWLGVNDPKHSLHSDHLNPDESAITKGVEAIKGFLIARMQK

SEQ ID NO: 21671 - protein, 440 aa, Bacillus anthracis str. A2012
MKQHPFKIASLGMQHMLAMYAGAIIVPLIVGGGLGLNQKELTYLVSIDLLMCGVATILQALSNRFFGIGLPVVLGCTFTAVGPMIAIGKQYGVSSIYGAIIAAGLFVVIFAKLFGKLVKLFPPVVTGSVVTVIGVTLVPAAINDMAGGVGSKDFGSLENLALAFGVLLFIIIMYRFFDGFIRSISILLGLLFGTIVAAFMGKVSLQAVGEADWFHGIQPFYFGTPTFELTPIITMILVACVGIVEATGVYFALSDICNKKIGEKELTKGYRAEGLAMVLGGIFNAFPYTTYSQNVGLVQLTGVRNRVIIYTCGGMLIALGFIPKIAAITTIIPKSVLGGAMLAMFGMVMAYGIKMLSSVDFGRQENLLIVACSVGIGLGVTVVPTLFSQLPESIRILTDNGIVLGSASAVLLNIVFNMVPQRKVKVKDEPVPMQSAVREA

SEQ ID NO: 21672 - protein, 214 aa, Schizosaccharomyces pombe
MGFSDLTSDAGLKQLNDFLLDKSFIEGYEPSQADAVVFKAVGVAPDTAKYPNGARWYKQIATYDLATLPGTAKEVSAYGPEGAAAAEEDEIDLFGSDEEEDPEAERIKAERVAEYNKKKAAKPKAVHKSLVTLDVKPWDDETPMDELEKAVRSIQMDGLVWGLSKLVPVGFGVNKFQINLVVEDDKVSLEALQEELEGFEDYVQSTDIAAMSKL

SEQ ID NO: 21673 - protein, 303 aa, Streptococcus agalactiae 2603V/R
MSNIVIIGSISMDLVMETNRIAKEGETVFGQRFSMVPGGKGANQAVAIGRLSQERDNITILGAIGEDSFGPILLDNLNKNHVTTDFVGTIPSSSGVAQITLYNNDNRIIYCPGANGKVDTKKWSQEWSIIKEADLVVLQNEIPHQANMKIANFCKEHSIKLLYNPAPSRETDIEMLDKVDYFTPNEHECQELFPNQKLEDILATYPEKLIVTLGTKGAIYSDGKESHLIPALETKAVDTTGAGDTFNGAFGYAISKKFKIAKALRFATLAAHLSVQKFGAQGGMPTIKEMEDNQHYEKDWYIK

SEQ ID NO: 21674 - protein, 303 aa, Candida glabrata CBS138
MTLLSDNAKQEIAKNIELIDDSCLNCDCQNEEGLDEIQSGEKVFDKLVIDHETELFNSSKIPKVHFIVPTSQMDWQFDACMEKPNSVQYKISTWCSENTERLSAITGCGGVSMNCNVTSMPLNILDIEAMRGTKNNVLVLPFGIWIQDLRSDNVEAILDELVPAILDPKTDIKQLIASKEYLYESHKKAFIFICSHKTRDKRCGITAPILKKIFDRELQNHGLFRDNSDLRGDGVNVSYINHVGGHKFAANVQIYLKDQHTLVWFGRITPKDIPHIVNHLIVPDHGKLPFPEKIRCVKKYDSW

SEQ ID NO: 21675 - protein, 314 aa, Glycine max
PSLIVAFLGFKMEFEDRFRHQAQRPKYDCLLFDLDDTLYPLKSGLAKSCLQNIKDYMVEKLGIHPSKIDDLSNLLYKNYGTTMAGLRAIGYDFDYDEYHSFVHGRLPYENLKPDQVLRNLLLSLPYRKLIFTNADKVHAAKALNRLGLEDCFEGIICFETLNPIHKSIVSDDEDDIEFVGSRTTNPTTTCNGSGTSQIFDIIGHFAQLNPSAVLPKTPIVCKPSENAIELALNIANLNPQRTLFFEDSTRNIQAGKRVGLHTVLVGTSQRCKGADYALESIHNLREAVPELWEADIKSEAAYPGKLAVETSVTA

SEQ ID NO: 21676 - protein, 365 aa, Brassica rapa subsp. pekinensis
MVSFVVEKPQRMSNGVVSETTRLSIIPNNSSSAQKTLLKNLEIINGGQRVNAWVDSMRASSPTHLKSLPSSVSSEKHLSSWIMQHPSALEMFEKITQASGGKQIVMFLDYDGTLSPIVDDPDKAFMSSKMRRTVKKLAKCFPTAIVTGRCIDKVYNFVKLAELYYAGSHGMDIKGPAKGFSRHKRVKQSLLYQPASDYLPMIDEVYKQLLEKTKSTPGVIVENHKFTASVHFRCVEEKKWSELVLQVRSVLEKYPTLKLSQGRKVFEIRPMIDWDKGKALEFLLESLGFGNSNNVFPVYIGDDRTDEDAFKMLRVRGEGFGILVSKFPKDTDASYSLQDPSEASPHTRILYLSVPKYKMFSRADL

SEQ ID NO: 21677 - protein, 600 aa, Shewanella sp. ANA-3
MTASPKDEMWKVFKRLLGYLKPMKGMFLLSVVGLIVYGLVDAAFISFIGPFIDKGFSSAPAISNGIALPTSQGFHADNQVLLMAPIVVILMFSLRGFANFVSTYGISYMSARLIMDMRQQVFEHYLSLPVSYMDKENTGNLISKVTFDTEQIARASGSALISIVRDGVTVIGMLALMFYNSWKLSLCILVIGPIMGLVITIVSRRFRKVSKQIQTAMGDVSAATEQMIKGHKNVLAFGGQETETARFAKVNDRNRHQNMKLAVAQAISQPLIMVIGSFALAFVLYAASLDSMKADLTAGTFATILGAMMAMLQPIKNLTRVNAEFQRGIAACTTVFELLDTLPESDTGTYTVKRAKGNLRFDNVSFSYDGQERRALDNIDFEVTQGQTLALVGRSGSGKSTIASLVTRFYTGLESGDILLDDVSIYDYSLKSLRNQVALVSQQVTLFNDTIANNIAYAYPGEATREQIIQAATLAHAMEFIEQLPEGLDTQVGENGVLLSGGQRQRIAIARAMLRDAPVLILDEATSALDTESEKAIQQGLDNLRQNRTSVVIAHRLSTIESADQILVVDQGRIVERGTHKSLLELGGMYAKLYQMQFGS

SEQ ID NO: 21678 - protein, 191 aa, Candida glabrata CBS138
MQTLKCVVVGDGAVGKTCLLISYTTNQFPADYVPTVFDNYAVTVMIGDEPYTLGLFDTAGQEDYDRLRPLSYPSTDVFLVCFSVISPPSFENVKEKWFPEVHHHCPGVPCLVVGTQVDLRDDKVIIEKLRRQRLRPITAEQGERLARELRAVKYVECSALTQRGLKNVFDEAIVAALEPPVIKKSKKCTIL

SEQ ID NO: 21679 - protein, 561 aa, Plasmid pSB102
MTTLKITGMTCDSCATHVKEALEKVPGVQSAVVSYAKGAAQLDLDPGTASDALTAAVAGLGYKATFADTLSTDNRAGLLDKVRGWMGTADKGSDGERQLQVAVIGSGGAAMAAALKAVEQGAKVTLIERGTIGGTCVNIGCVPSKIMIRAAHIAHLRRESPFDDGIAATVPAINRSKLLAQQQARVDELRHAKYEGILDGNPAITVLHGEARFKDDQSLTVRLNDGGERVVVFDRCLVATGASPAIPPITGLKGTPYWTSTEALVSDTIPERLAVIGSSVVALELAQAFARLGSQVTILARSTLFFREDPAIGEAVTAAFRAEGIKVLEHTQASQVAYADGEFVLTTGHGEVRADKLLVATGRTPNTRSLALEAAGVAVNAQGAIVIDKGMRTSTPHIYAAGDCTDQPQFVYVAAAAGTRAAINMTGGDATLNLTAMPAVVFTDPQVATVGYSEAEAHHDGIETDSRLLTLDNVPRALANFDTRGFIKLVIEEGSGRLIGVQAVAPEAGELIQTAVLAIRNRMTVQELADQLFPYLTMVEGLKLAAQTFTKDVKQLSCCAG

SEQ ID NO: 21680 - protein, 407 aa, Lactococcus lactis
MAKANIGKLLLTGVVGGAIALGGSAIYQSTTNQLGNANRSNTTSTKVSNVSVNVNTDVTSAIKKVSNSVVSVMNYQKQNSQSDFSSIFGGNSGSSSANDGLQLSSEGSGVIYKKSGGDAYVVTNYHVIAGNSSLDVLLSGGQKVKATVVGYDEYTDLAVLKISSDHVKDVATFADSSKLTIGEPAIAVGSPLGSQFANTATEGILSATSRQVTLTQENGQTTSINAIQTDAAINPGNSGGALINIEGQVIGITQSKITTTEDGSTSVEGLGFAIPSNDVVNIINKLETDGKISRPALGIRMVDLSQLSTNDSSQLKLPSSVTGGVVVYSVQAGHPAATAGLKAGDVITKVGDTAVTSSTDLQSALYSHNINDTVKVTYYRDGKSATANVKLSKSTSDLETNSSSSSN

SEQ ID NO: 21681 - protein, 518 aa, Ustilago maydis 521
MNAALSSVRSRAFEAISQLSAGSRSSLPTSSSRSNDKPRRSLDRPRLFKRHGSNVDHIHTQLFDKAVAPPSRSTVLFVLGCLAWYISSSLSSNTSKALLSKGRNHVDSGLPQVRPPAFPYPVTLTLIHFGFVNVCCAICASRRMLGHRALTRLVPPSLSRVAEVGQLAFFNVVGQALSSLAIARVPVSTVHTIKALSPLFTVLSYTYLFNVSYSSKTYMSLFPLTAGVMMACTGFAFNADDMVGFAAALASTLVFVAQNIYSKKLLRKGERSEGEKMDKINILFYSSGCSIVLMIPMALYYDGSSLLFRPSWNASEAYPYDRRTFVLSWLLCNGLVHFAQNILAFNVLSMVSPVTYSIASLLKRVFVIVLAILWFRQSVTRLQWFGIGLTFYGLWMYNDSKTKDDVDKGDKKVERQQGVGNHAILPLTSASTASTASGASGWTDALHNRPHPFAPSTSAYAFAAQQPSAHAAPARLHQPVYPPAPTKGWNDIPDSTLTSYINDPTKSLPSPPDSDKEV

SEQ ID NO: 21682 - protein, 616 aa, Pseudomonas syringae pv. syringae B728a
MSGKAQQQSRIKELITLGREQKYLTYAEVNDHLPEDISDPEQVEDIIRMINDMGIPVHESAPDADALMLADADTDEAAAEEAAAALAAVETDIGRTTDPVRMYMREMGTVELLTREGEIEIAKRIEEGIREVMGAIAHFPGTVDHILSEYTRVTSEGGRLSDVLSGYIDPDDGIAPPAEVPPPVDPKAVKAEGADDDEEESADASDEEDEVESGPDPVIAQQRFGAVSDQMEITRKALKKFGRDDKHAIAEMVALAELFMPIKLVPKQFEGLVERVRGALERLRAQERAIMQLCVRDARMPRADFLRQFPGNEVDESWTDALAKGKSKYAEAIGRLQPDIQRCQQKLSALEEETGLKIAEIKDINRRMSIGEAKARRAKKEMVEANLRLVISIAKKYTNRGLQFLDLIQEGNIGLMKAVDKFEYRRGYKFSTYATWWIRQAITRSIADQARTIRIPVHMIETINKLNRISRQMLQEMGREPTPEELGERMEMPEDKIRKVLKIAKEPISMETPIGDDEDSHLGDFIEDSTMQSPIDVATVESLKEATREVLSGLTAREAKVLRMRFGIDMNTDHTLEEVGKQFDVTRERIRQIEAKALRKLRHPTRSEHLRSFLDE

SEQ ID NO: 21683 - protein, 407 aa, Lactococcus lactis
MAKANIGKLLLTGVVGGAIALGGSAIYQSTTNQLGNANRSNTTSTKVSNVSVNVNTDVTSAIKKVSNSVVSVMNYQKQNSQSDFSSIFGGNSGSSSANDGLQLSSEGSGVIYKKSGGDAYVVTNYHVIAGNSSLDVLLSGGQKVKATVVGYDEYTDLAVLKISSDHVKDVATFADSSKLTIGEPAIAVGSPLGSQFANTATEGILSATSRQVTLTQENGQTTSINAIQTDAAINPGNSGGALINIEGQVIGITQSKITTTEDGSTSVEGLGFAIPSNDVVNIINKLETDGKISRPALGIRMVDLSQLSTNDSSQLKLPSSVTGGVVVYSVQAGLPAATAGLKAGDVITKVGDTAVTSSTDLQSALYSHNINDTVKVTYYRDGKSATANVKLSKSTSALETNSSSSSN

SEQ ID NO: 21684 - protein, 126 aa, Brassica napus
MAALLARQAALALRARQTARLGPSATAMQGHLRTYMDAGAPKRFKEDEEKEQLAKELAKDWSAVFERSINTLFLTEMVRGLMLTLKYFFERKVTINYPFEKGPLSPRFRGEHALRRYDTGEERCIA

SEQ ID NO: 21685 - protein, 483 aa, Lactobacillus plantarum WCFS1
MAEKQHQEVHRSLQTRHLSMIALGGSIGTGLFVASGSAISTAGPGGALLAYVGIGVMVYFLMTSLGEMATYLPVSGSFSTYATKFVDPALGFAMGWNYWFNWAITLAVDISTAAIVMQFWLPSVPGWVFSLIALVLIFTINALSVRSFGETEYWLSLIKVVTVLVFLVIGVLTIVGIMGGHATGLSNFTYKKAPFVGGIPTILSVFVVAGFSFQGTELIGITAGESATPEKSIPAAIKQVFWRILLFYILAIFVIAAIIPYTSKDLLGSSASDIAISPFTLVFKRAGLAAAASVMNAVILTSVLSAANSGMYASTRMLYSLSLQGYAPKTFGRVNRRGIPIMALLGTTVIGLLTFLSSLFGERIYIFLVSASGLTGFIAWLGIAISHLRFRRAFVKQGHQLSELRYHAKWFPFGPWFAFILCVVVIIGQDLHSFATLDWQAIGVTYMSIPLFIILYVYYKIRYHTKMIPLDKVDLTRKRHHQD

SEQ ID NO: 21686 - protein, 219 aa, Pseudomonas syringae pv. phaseolicola
MYGVMATNTPVRYQERIRMSKNDNVVWQLGTVSPVERHRNLNQAPMTLWFTGLSGSGKSTLAFNLERLLMRRGIFCAVLDGDNIRHGLCKDLGFDAESRAENIRRVSEVARLMNDAGLTVLAAFISPHSSDRALAKEIIGDDRFSEVYVSSPLHICESRDPKGLYKKARQGELANFTGIDAPYEPPPYPSVCLDTSSLSIEACLEILLSEVERNRGSSK

SEQ ID NO: 21687 - protein, 449 aa, Bacillus cereus G9241
MKTKQTDELLAKDEQYVWHGMRPFSPNSTMVGAKAEGCWVEDIQGKRYLDGMSGLWCVNSGYGRKELAEAAYKQLQTLSYFPMSQSHEPAIKLAEKLNEWLGGEYVIFFSNSGSEANETAFKIARQYYAQKGEPHRYKFMSRYRGYHGNTMATMAATGQAQRRYQYEPFASGFLHVTPPDCYRMPEIERENIYDVECVKEVDRVMTWELSETIAAFIMEPIITGGGILMPPQDYMKAVHETCQKHGALLISDEVICGFGRTGKAFGFMNYDVKPDIITMAKGITSAYLPLSATAVKKEIYEEFKGKGEYEFFRHINTFGGNPAACALALKNLEIMENENLIERSAQMGSLLLEQLKEEIGEHPLVGNIRGKGLLVGIELVNDKETKEPIDNDKIASVLNACKEKGLIIGRNGMTTAGYNNVLTLAPPLIISSEEIAFVVGTLKTAMERI

SEQ ID NO: 21688 - protein, 295 aa, Pneumocystis carinii
MGILDAQPAADIEMLISANCHIGSRNCELRMEPYVFKRRADGVHIINLGKRWEKLILAARIIVTIENPTDIIAVSSRSYGQRAVHKYALHTGAREAISSRFTPGSFTNYITRSYKEPRLIIVTDPRTDSQAIKEASYVNIPVIALCDTDSPLQYVDVAIPTNNKGRHSIGLIWWMLAREVLRLRGTLANRDVEWGIMVDLYFYRDPEETEKDTESEQKALEASGNPAGQFGSVPVTSDWEIAAQSTGAGIITNVASNVQSVGNWDENFGVETGVPSDWAADSIQQSEIQHAQNWN

SEQ ID NO: 21689 - protein, 354 aa, Xanthomonas campestris pv. vesicatoria str. 85-10
MRKGIALIVGVTGISGYNLANVLLADGWTVYGLARRPLPHDGVIPVAADLLDADSTNSALRGLPITHVFFCTWTRRDTERENVQANGAMMRHLCDALSDAPLQHMALVTGTKHYLGAFENYGSGKAETPFRESEPRQPGENFYYTLEDLLFAHAQQHGFGWSVHRSHTMIGMANGSNAMNMGVTLAVYASLCKHTGQPFVFPGSQAQWNSLTDLTDAGLLGRQLAWAGLSPAARNQAFNTVNGDVFRWRWMWGEIAKFFQLDAAPCPAVPEPLEPRMSQTAPALWAEVAAQHQLVESDVNRLASWWHTDADLGREIECVNDMTKSRELGFLDFYDSRASFFELFTRLRALRIIP

SEQ ID NO: 21690 - protein, 216 aa, Saccharomyces cerevisiae
MIQREEMNMPRQYSEQQQLQENEGEGENTRLPVSEEEFRMVQELQAIQAGHDQANLPPSGRGSLEGEDNGNSDGADGEMDEDDEEYDVFRNVGQGLVGHYKEIMIRYWQELINEIESTNEPGSEHQDDFKSHSLPFARIRKVMKTDEDVKMISAEAPIIFAKACEIFITELTMRAWCVAERNKRRTLQKADIAEALQKSDMFDFLIDVVPRRPLPQ

SEQ ID NO: 21691 - protein, 87 aa, Triticum aestivum
MANRWVRPEVYPLFAAMGVAVGICGFQLFRNITGNPEVRVNKAGRAAGVLENHEEGRRYAMHGLRSFVHEKTPEIMPAINKFFTDPK

SEQ ID NO: 21692 - protein, 491 aa, Streptococcus sinensis
RGVDILADTVKVTLGPKGRNVVLEKSFGSPLITNDGVTIAKEIELEDHFENMGAKLVSEVASKTNDIAGDGTTTATVLTQAIVREGIKNVTAGANPIGIRRGIEAAVATAVSALKETAIPVSNKEAIAQVAAVSSRSEKVGEYISEAMEKVGNDGVITIEESKGMETELDVVEGMQFDRGYLSQYMVTDSEKMVADLDNPYILITDKKISNIQEILPLLESILKTNRPLLIIADDVDGEALPTLVLNKIRGTFNVVAVKAPGFGDRRKAMLEDIAILTGGTVITEDLGLELKDATIEALGQASKVTVDKDSTVIVEGSGNPEAIANRVVVIKSQIESTTSEFDKEKLQERLAKLSGGVAVIKVGAATETELKEMKLRIEDALNATRAAVEEGIVSGGGTAFVSVLGAVAALELTGDEATGRNIVLRALEEPVRQIALNAGFEGSIVIDRLKNSEAGTGFNAATGEWVNMIEAGIIDPVKVTRSALQNAASV

SEQ ID NO: 21693 - protein, 303 aa, Oryza sativa
  misc_feature (251)..(251): Xaa can be any naturally occurring amino acid
  unsure (1)..(303): unsure at all Xaa locations
MAMRRWREDAVALSLRGCGFGDGDDDRPEKPRRYGVTEMRSPFYAFRPAHHALQEILDSLGPFVDGLKFTGGSHSLMGKELVREITDLAHKHDIYVSTGDWAEHLLRQGPSFFKQYVEECKALGFDTIELNAGSLKLPEEALLRLVRLIKTSGLQAKPLFSVKFDSSDIPPSGDRAFGAYIVPVKQNSERVEDVDLLIRRAERCLEAGADMIMIDADDICQRADSLRADIVAKIVGRLGLEKTMFEASNPXNTSEWFVRRYGPRVNLFVDHSDVMNLERLRGFNMRGVCNSPLFGIGSPFFLT

SEQ ID NO: 21694 - protein, 197 aa, Arabidopsis thaliana
  misc_feature (99)..(99): Xaa can be any naturally occurring amino acid
  misc_feature (184)..(184): Xaa can be any naturally occurring amino acid
  unsure (1)..(197): unsure at all Xaa locations
MYDDSTSSVYRDRLQALAEGCQWRDPPIAKESVGEGLMNKKPPLSQDGVRDSGNGGWDNWDNDDSFRSTDMRRNRSAGDLRSSGGRGVPAKSKSSEDIXSRSQLEASSSNKESLFAKRMAENESKHEGLPPSQGGKYVGFASSPGPATRTNQQSGGGEVFSVMCEDFGRLSLDSAPAANDVQTXGAMEFTSKVNEGG

SEQ ID NO: 21695 - protein, 597 aa, Shewanella sp. MR-4
MSLEQYHVIRLLQQQSQSLKEAIALEGFEMAAPWHQVSWQAFDQISHKIAQVLIELGVQVQDRCVILSQNCPQWTCADIGTLKSRAVVVPIYPTSTLEQASFIINDAAAKVIFVDDAKQYALACELQKQCPTLEHVIVFDASVELAQDKAQHQHLDSLLAKEYGQSAELEQRLKDANLDDLLTLIYTSGTTGDPKGVMLDYRNMASTVRQHDQILPFTTGDVSLAFLPLSHVFERGWSFYVLCRGGHNVYLQNTQRVKEAISAVRPHTLCVVPRFLEKVYSAVQDKVAKSAEGRKKLFAWAMGVGERQFEVSQGRAKGGLWLSLQWRLAHKLVYSKLQAVLGGRLKFMPCGGAALDLNVASFFHAIGIPVLCGYGMTETNATVTCNTLDNRVAGSNGKVLPEIEVKLGKDDEILVRGDTVMRGYYNRPEDTAAAFEDGWLKTGDAGRLDANGNLFITDRIKELMKTSNGKYIAPQRVEGTVGRCPFIEQVAVIADARNYVTALIVPAFESLEAWAKDKGLKYESSIELLRHSHVVEHFEQRLKHLQQELAGFEQIKKFTLLPEAFSMEAGLITPTLKLRRKMIYHKYAHEINAMYNN

SEQ ID NO: 21696 - protein, 416 aa, Thermoanaerobacter tengcongensis MB4
MSTESLNPLVIAQKQIKKACDILGVEESVYELLKEPMRVLEVSIPVQMDDGSIKVFKGYRSQHNDALGPTKGGIRFHPDVTLDEVKALSMWMTFKCGVVGLPYGGAKGGVVVNPKELSNDELQRLSRGYIRAIASIIGPEKDIPAPDVGTNAQIMAWMVDEYNKIVGYNSPAVITGKPLIYGGSKGRVAATGYGVALMAREAVKRLNMDFKDCTVAIQGFGNVGSHAGLSLQRLGAKIIAVSDVYGGIYNEKGIDAEKLVEHVNKTGTVCNFEGTTPITNEELLTMKVDILVLAALENQITSANANEVKAKIICEGANGPTTPEADKILSEKGVFVVPDILANSGGVIVSYFEWVQNLMNYYWTEKEVEERQEIMMVNAFNSIYDLAQQYKVDMRTAAYMISIKRVYEAMKVRGWL

SEQ ID NO: 21697 - protein, 218 aa, Yushania bojieiana
GMDVSEWDPSKDKYISVKYDKTTAMEAKALNKEALQAEVGLPVDGKIPLVAFIGRLEEQKGPDVMAAAIPQLIEENVQIILPGTGKKKFERMLKSAEEKYPGKVRAVVKFNAPLAHQIMAGADLLAVTSRFEPCGLIQLQGMRYGTPCVCASTGGLVDTIIEGKTGFHLGRLSVDCNVVEPGDVQKVATTLKRAIKLVGTPAYQEMVRNCMAQDLSWK

SEQ ID NO: 21698 - protein, 218 aa, Yushania niitakayamensis
GMDVSEWDPSKDKYISVKYDKTTAMEAKALNKEALQAEVGLPVDGKTPLVAFIGRLEEQKGPDVMAAAIPQLMEENVQIILLGTGKKKFERMLRSAEEKYPGKVRAVVKFNAPLAHQIMAGADLHAVTSRFEPCGLIQLQGMRYGTPCVCASTGGLVDTIIEGKTGFHLGRLSVDCNVVEPGDVQKVATTLRRAIKLVGTPAYQEMVRNCMAQDLSWK

SEQ ID NO: 21699 - protein, 444 aa, Bacteroides fragilis YCH46
MNAAKVLEDLKRRFPNEPEYHQAVEEVLSTIEEEYNKHPEFDKANLIERLCIPDRVYQFRVTWVDDKGNVQTNMGYRVQHNNAIGPYKGGIRFHASVNLGILKFLAFEQTFKNSLTTLPMGGGKGGSDFSPRGKSNAEVMRFTQAFMLELWRHIGPETDVPAGDIGVGGREVGFMFGMYKKLSHEFTGTFTGKGREFGGSLIRPEATGYGNIYFLMEMLKTKGTDLKGKVCLISGSGNVAQYTAEKVLELGGKVVTMSDSDGYIYDPDGIDRAKLDYIMELKNLYRGRIREYAETYGCKYVEGARPWGEKGDIALPSATQNELNGDDARKLVANGVIAVSEGANMPSTPEAIKVFQDAKILYAPGKAANAGGVSVSGLEMTQNSIKLSWSSEEVDEKLKSIMKNIHEACVQYGTEPDGYVNYVKGANVAGFMKVAKAMMAQGIV

SEQ ID NO: 21700 - protein, 280 aa, Vigna radiata
GEGTYGVVYKARDRVTNEAIALKKIRLEQEDEGVPSTAIREISLLKEMQHRNIVRLQDVVHSGKRLYLVFEYLDLDLKKHMDSSPEFAKDLRQVKMFLYQILCGIAYCHSHRVLHRDLKPQNLLIDRSTNSLKLADFGLARAFGIPVRTFTHEVVTLWYRAPEILLGSPRYSTPVDIWSVGCIFAEMVNQRPLFPGDSEIDELFKIFRILGTPNEDTWPGVTSLPDFKSAFPKWQPKDLKTVVPNLDPAGLDLLSRMLHLDPSKRITGRSALEHEYSERH

SEQ ID NO: 21701 - protein, 529 aa, Oryza sativa (japonica cultivar-group)
MAAPAPKQEELQPHAVKDQLPAISYCLTSPPPWPEAILLGFQHYLVMLGTTVIIPTALVPQMGGGNEEKARVIQTLLFVAGINTLIQSFLGTRLPAVIGGSYTFVAPTISIILAGRYNGIADPHEKFVRIMRGTQGALIVASTLQIIMGFSGLWRIVVRLLSPLSAAPLVALVGFGLYELGFPSVAKCVEIGLPQIILLVALSQYIPKLVPLLGTAFERFAIIMSVALVWLYAFFLTVGGAYKNAAPKTQFHCRTDRSGLVGGAPWISVPYPFQWGAPTFDAGEAFAMMAASFVALVESTGAFIAVSRYASATPCPPSVMSRGIGWQGVGILLGGLFGTANGSSVSVENAGLLGLTRVGSRRVVQISAGFMIFFSILGKFGAVFASIPGPIIAAIYCLLFAYVGMAGVGFLQFCNLNSFRTKFIVGFSVFMGLSVPQYFNEYTSVAGYGPVHTHARWFNDMINVVFSSKAFVGGAVAYLLDNTLQRHDSTARKDRGHHFWDRFRSFRTDPRSEEFYSLPFNLNKFFPSF

SEQ ID NO: 21702 - protein, 218 aa, Yushania oblonga
GMDVSEWDPSKDKYISVKYDKTTAMEAKALNKEALQAEVGLPVDGKIPLVAFIGRLEEQKGPDVMAAAIPQLMEENVQIILLGTGKKKFERMLKSAEEKYPGKVRAVVKFNAPLAHQIMAGADLLAVTSRFEPCGLIQLQGMRYGTPCVCASTDGLVDTIIEGKTGFHLGRLSVDCNVVEPGDVQKVATTLKRAIKLVGTPAYQEMVRNCMAQDLSWK

SEQ ID NO: 21703 - protein, 315 aa, Phytophthora infestans
HYTEGAELIDSVLDVVRKEAESCDCLQGFQITHSLGGGTGSGMGTLLISKIREEYPDRIMCTYSVCPSPKVSDTVVEPYNATLSVHQLVENADEVMCLDNEALYDICFRTLKLTTPTYGDLNHLVCAAMSGITTCLRFPGQLNSDLRKLAVNLIPFPRLHFFMIGFAPLTSRGSQQYRALTVPELTQQQFDAKNMMCAADPRHGRYLTAACMFRGRMSTKEVDEQMLNVQNKNSSYFVEWIPNNIKASVCDIPPKGLKMSTTFIGNSTAIQEMFKRVSEQFTAMFRRKAFLHWYTGEGMDEMEFTEAESNMNDLA

SEQ ID NO: 21704 - protein, 218 aa, Yushania polytricha
GMDVSEWDPSKDKYISVKYDKITAMEAKALNKEALQAEVGPPVDGKIPLVAFIGRLEEQEGPDVMAAAIPQLMEENVQIILLGTGKKKFERMLMSAEEKYPGKVRAVVKFNAPLAHQIMAGADLLAVTSRFEPCGLIQLQGMRYGTPCVCASTGGLVDTIIEGKTGFHLGRLSVDCNVVEPGDVQKVATTLKRAIKLVGTPAYQEMVRNCMAQDLSWK

SEQ ID NO: 21705 - protein, 314 aa, Phytophthora infestans
YTEGAELIDSVLDVVRKEAESCDCLQGFQITHSLGGGTGSGMGTLLISKIREEYPDRIMCTYSVCPSPKVSDTVVEPYNATLSVHQLVENADEVMCLDNEALYDICFRTLKLTTPTYGDLNHLVCAAMSGITTCLRFPGQLNSDLRKLAVNLIPFPRLHFFMIGFAPLTSRGSQQYRALTVPELTQQQFDAKNMMCAADPRHGRYLTAACMFRGRMSTKEVDEQMLNVQNKNSSYFVEWIPNNIKASVCDIPPKGLKMSTTFIGNSTAIQEMFKRVSEQFTAMFRRKAFLHWYTGEGMDEMEFTEAESNMNDLA

SEQ ID NO: 21706 - protein, 499 aa, Ruegeria sp. PR1b
MNAASFTKSFWHDEAKKLEFRTKHLINGEWVDSEDGTTFDTINPATGETIAKVASGKAADIDKAVKNARETFKSGVWSMLAPRERLAVIERFSALIEENAVEFALLDCLDMGKPVMDMINIDIPESVKNLKFFAETADKVHGSLTATDPSVVHYILRQPLGVVGLITPWNYPLMMAAWKLGPALITGNSVVLKPAEQAPLSCALLGDLFLKAGGPAGVLNVVQGLGEEAGKAIGLHPDVDKIGFTGSTEVGKLLMTYAGQSNMKRVTTECGGKTPQIVFADYDNLDKAVTSAVYGIYGNMGEMCNAGSRILVQRPIYDEFIKRFSELTASNMVVGDPLDPDTTIGPLVTVEQQERVLEYIEIGKKEGATLALGGGRGLNSGCYVEPTLFTDVTNSMRVAQEEIFGPVGTVIPFDTAEEALEIANDSLYGLAAAVWTNDLKTAHRFGRDLESGFVWVNTFDIGDMTSIWGGYKQSGNGRDTCIEALSQYTQTKSVWMDMA

SEQ ID NO: 21707 - protein, 313 aa, Phytophthora infestans
YTEGAELIDSVLDVVRKEAESCDCLQGFQITHSLGGGTGSGMGTLLISKIREEYPDRIMCTYSVCPSPKVSDTVVEPYNATLSVHQLVENADEVMCLDNEALYDICFRTLKLTTPTYGDLNHLVCAAMSGITTCLRFPGQLNSDLRKLAVNLIPFPRLHFFMIGFAPLTSRGSQQYRALTVPELTQQQFDAKNMMCAADPRHGRYLTAACMFRGRMSTKEVDEQMLNVQNKNSSYFVEWIPNNIKASVCDIPPKGLKMSTTFIGNSTAIQEMFKRVSEQFTAMFRRKAFLHWYTGEGMDEMEFTEAESNMNDL

SEQ ID NO: 21708 - protein, 571 aa, Schizosaccharomyces pombe
MFMWMKIAKGLVGLLILYKNVCQVLCKSGSSVKSGSPWSIKNDGKSIIHDTLNSSYSDIENLNSRVSPLLFDLTEKSDYMRFYRLNLFNKECRYNLDDNVACGSSACNVLVTDEQDVPEVWSSKSLGKLEGFMPELSRQIVETDRSVMEHVDKISQSCLLERLDDEAHQYCYVDNELDSGCVYVSLLENPERFTGYSGPHSTRIWEMIYNQCLPDSSAPTIDFPALFMQGPLAPPPKPQEQLLKERMDAWTLEQRVFYRVLSGMHSSISTHLCHGYLNQRNGVWGPNLQCFQEKVLNYPERLENLYFAYALMQRAIDKLYGHLDSLTFCHDSVLQDSEVRQKIAGLVSLIHNSPKMFDETMLFAGDPSISTALKEDFREHFKTVSALMDCVGCERCRLWGKIQTNGFGTALKILFEVSNIEDEVTNFDSRSFSLRLRRSEIVALINTFDRLSRSINFVDDFKQIYSEQHKPASFKRRVLRRIKQLLFSVTPVALHPFLQKTSSILVDLYFDFKAEWDNVMLGFRYVFASYLRFPRLFKFVLFSQESPFLNWTSHHLQRYIPKNWFPEVASV

SEQ ID NO: 21709 - protein, 584 aa, Streptomyces avermitilis MA-4680
MKIHKYDTVIVGAGGAGMRAAIEATKRSRTAVLTKLYPTRSHTGAAQGGMAAALANVEEDNWEWHTFDTVKGGDYLVDQDAAEILAKEAIDAVLDLEKMGLPFNRTPEGRIDQRRFGGHSRNHGEAPVRRSCYAADRTGHMILQTLYQNCVKEGVEFFNEFYVLDQLIVEEDGVKKSAGVVAYELATGEIHVFQAKAVIYASGGTGKFFKVTSNAHTLTGDGQAAVYRRGLPLEDMEFFQFHPTGIWRMGILLTEGARGEGGILRNKDGERFMEKYAPVMKDLASRDVVSRSIYTEIREGRGCGPEGDHVYLDLTHLPPEQLDAKLPDITEFARTYLGIEPYTDPIPIQPTAHYAMGGIPTNVEGEVLSDNTTVVPGLYAAGEVACVSVHGANRLGTNSLLDINVFGRRAGIAAAEYSAKAGYLELPEDPAAQVVSQVERLRASTGTERVATLRLELQETMDANVMVFRTEQTIKTAVEKIAELRERYLNVSIQDKGKRFNTDLLEAIELGNLLDLAEVMAVSALARKESRGGHYREDYPNRDDVNFMRHTMAYREVGDDGTESIRLDYKPVVQTRYQPMERKY

SEQ ID NO: 21710 - protein, 510 aa, Pseudomonas syringae pv. phaseolicola 1448A
MPLLNWSRHMVCLTAVGLVTVPTAYAADTLTRDNGAVVGDNQNSQTAGAQGPVLLQDVQLLQKLQRFDRERIPERVVHARGTGVKGEFTASADISDLSKATVFKSGEKTPVFVRFSSVVHGNHSPEALRDPHGFATKFYTADGNWDLVGNNFPTFFIRDAIKFPDMVHAFKPDPRTNLDNDSRRFDFFSHVPEATRTLTLLYSNEGTPAGYRFMDGNGVHAYKLVNAKGEVHYVKFHWKTLQGIKNLDPKEVAQVQSKDYSHLTNDLVGAIKKGDFPKWDLYVQVLKPEELSKFDFDPLDATKIWPDVPEKKIGQMVLNKNVDNFFQETEQVAMAPANLVPGIEPSEDRLLQGRVFSYADTQMYRLGANGLSLPVNQPKVAVNNGNQDGALNTGHTTSGVNYEPSRLEPRPADEKARYSELPISGTTQQAKITREQNFKQAGDLYRSYSPKEKTDLVQSFGESLADTDTESKNIMLSFLYKADPDYGTRVTEVAKGDLSKVKSLAASLKD

SEQ ID NO: 21711 - protein, 271 aa, Zea mays
MGRRACCAKEGVKRGAWTAKEDDTLAAYVKAHGEGKWREVPQKAGLRRCGKSCRLRWLNYLRPNIKRGNISYDEEDLIVRLHKLLGNRWSLIAGRLPGRTDNEIKNYWNSTLGRRAGAGAGAGGSRVVFAPDTGSHATPAAAGSHEMTGGQKGAAPRADLGSPGSAAEVWAPKAARCTGGLFFHRRDTHTPHAGGTETPTPMMAGGGGGEARSSDDCSSAASVSPLVGSSQHDPCFSGDGDGDWMDDVRALASFLESDEEWLRCHTGEQLV

SEQ ID NO: 21712 - protein, 231 aa, Triticum aestivum
MAGDGELLPRIAVVGAGIFARTQYIPRLREISHLVVLKAIWSRTQESAEAAAELARDFAPGIECKWGDAGLEEIMGDPSILGVAVVLAGQVQVELSLKMLKAGKHVIQEKPASGSSTEAETALSVYNSFPNKLPCKPIWAVGENYRFEPAFVESSKLMDDIGDMMNIQVIVEGSMNSSNPYFNSSWRRNFVGGFILDWGVHFIAGLGNACGSSTLIVILAVTDYTLYLSLH

SEQ ID NO: 21713 - protein, 851 aa, Candida glabrata CBS138
MCPIETCIMNDTLLRTNTRSSFCIQIYKPINSTVYNLISYDSKDLVILYFICSISINSKVSEDYCHTFKINCILKSWFCFNKESNYDILNKWASLIGKGNSIKKVLDLVKNRSHIIQILFCFMQIMSVQGLLDRIPLLISYPTIILSSNLIIPSHREVLQRGSVGIVDYEHTFFNTDHFIRLVLLPIFTASTFICLGSLFHVIESPLGRLNPNHSLKWTDIIKSYGPIFLILFMLSQLNFIQGSIQSTILSLLVIREYGKMNISNKKLNFSCAIGSVKIFIPLFFISLIIAYDPESYYYLFSNLLSYSIVVFIVLVLVPYTKSTAINKEKSQELKLTTDYKYQLFFLPLLSLGALLMSSHIYGMYQVQLLMLLVYVGCLSIFFLTVADIKTTELGTNGESNCPSDFYLANISLEYTLSACGFMAILLQYLSFNKIVSNIRGDIFTLVFVLAAECCNSLLSEKEQEIVHNHSHSRVTVSEKSNVSLLKQIALNEDTRSIFSFLLLNTTFMFVQLLYSFRSKSLGLLSDSLHMALDCTSLLLGLIAGALSKNPPSDKFPFALKSLGTLAGFTNGILLLGIVCGIFIEALGRFFNPVHLHGTSELLVVAILGLLVNLVGLFAFDHAGHGHAEGAGHEENMKGIFLHILADTLGSAGVIVSTILIKLTGWTVFDPLASMFIASLILVSSIPLLKSSMNGILFKLDDRNHNVVKNALNQISMTPGITGYTTPRFWPSQSSSVSMHGHSHGHSHSHSSDHTHEHEHKDEHEHEHQHEDKHVHEVHKEHDETSDTSNEKLTGYIHVQYIDGENSTIIKKRVEKIFENNAIRAWIQVEPQSSECWCRSAQVQQPLPMSK

SEQ ID NO: 21714 - protein, 318 aa, Brassica rapa subsp. pekinensis
MASLKIPANVPLPEEDSEQLHKAFKGWGTNEGMIISILAHRNAAQRSLIRAVYAANYNKNLLNELDKELSGDFERAVMLWTLEPVERDAYLAKESTKMFTKNNWVLVEIACTRPALEFFKAKQAYQAHYKTSLEEDVAYHTSGDIRKLLVPLVSTFRYDGNADEVNMKLASSEAKTLHKKITEKAYTDEDLIRILTTRSKAQIMATLNHFKDKFGSSINKYLKEDSEDEYVQLLKTAIKCLTYPEKYNEKVLRRAINKVGTDEWALTRVVTTRAEVDMERIKEEYLRRNSVPLDRAIANDTSGDYKDMLLALLGHDHS

SEQ ID NO: 21715 - protein, 429 aa, Listeria monocytogenes str. 1/2a F6854
MQNYSKSEKAFKEAKKVLPGGVNSPVRAFNSVDASPVFMDHGKGAYITDVDGNEYIDYVLSWGPLILGHADPAVVNAITKAALKGTSFGTPTEIETELAKLVIERVPSIEIVRMVSSGTEATMSAIRLARGYTKREKILKFEGSYHGHGDSLLIKAGSGVATLGLPDSPGVTKGLAADTITVPYNDIEGAKLAFEKYGEEIAAVIVEPVAGNMGVVPPIEGFLEGLRELTTKFGSLLIFDEVMTGFRVDYYSAQGYYVVTPDLTCLGKVIGGGLPVGAYGGKKEIMEQIAPAGSIYQAGTLSGNPLAMNAGFETVRQLTPQHYDVFRTLIKRMEEGLTEISARRQVPLSINKAGSMFGFFFTDQKVINFDTAKTSNLEFFRNYYREMLGQGIFLPPSQFEGVFISTMHTENEIDKTLEAFDTTCKILRG

SEQ ID NO: 21716 - protein, 316 aa, Brassica rapa subsp. pekinensis
MASLKVPASVPLPEEDAEQLQKAFKGWGTNERMIISILAHRNAEQRSFIRAVYAANYNKDLLKELDKELSGDFERAVMLWTLEPAERDAYLAKESTKMFTKDNWVLVEIACTRSSLEFFKAKQAYQVRYKTSIEEDVAYHTSGDVRKLLVPLVSTFRYDGDEVNMMIAKSEAKILHEKMEAKDYNDGDLIRILTTRSKAQISATLNHFKNKFGTSITKYLKEDSDNEYVQLLKAVIKCLTYPEKYFEKVLRQAINKMGTDEWGLTRVVTTRAELDMERIKEEYLRRNSVPLDRAIAKDTHGDYEDILLALIGHGHA

SEQ ID NO: 21717 - protein, 315 aa, Lupinus angustifolius
MSLLSDLINLNLSDTTEKIIAEYIWVGGSGVDLRSKARTLSGPVNDPSKLPKWNYDGSSTGQAPGKDSEVILWPQAIFKDPFRRGNNILVICDTYTPSGKPIPTNKRHAAAKIFSHPDVAAEEPWFGIEQEYTLLQKDIHWPIGMALGGFPGPQGPYYCGTGAEKAFGRDIVDSHYKACLYAGINISGINAEVMPGQWEFQVGPSIGISAGDELWVARYILERITEIAGVVLSLDPKPIPGDWNGAGAHTNYSTKSMRNDGGYEVIKQAIEKLEKRHNEHIAAYGEGNERRLTGRHETADISTFSWGVANRGASI

SEQ ID NO: 21718 - protein, 82 aa, Triticum aestivum
MALTRRMAASALLLLLLLVATEMGTTRTKTAEARDCLSQSHKFKGACLSSSNCAGVCRTENFPDGECHTHNFARKCFCKRAC

SEQ ID NO: 21719 - protein, 277 aa, Oryza sativa
  misc_feature (259)..(259): Xaa can be any naturally occurring amino acid
  unsure (1)..(277): unsure at all Xaa locations
TSAKVLTMEWIEGVKLNQQAAIEKQGLKVLDLVNIGIQCSLRQLLEYGYFHADPHPGNILATPEGKLAFLDFGMMSETPEDARVAIIGHVVHMVNRDYEAMARDYYALDFLEPDVDVSPIVPALKSFFDDALNSTVSELNFKTIVDGLGAVLYQYPFNVPAYYALILRSLTVLEGLALYADPNFKVLAASYPYFAKRLLTDPNPYLRDALIELLFKDGKFRWNRLENLLVPGSHDREFAAKDALQPVLKLLLGPDGEEXRVLLVNEAVAYRSHTFGR

SEQ ID NO: 21720 - protein, 140 aa, Rhodospirillum rubrum
MAIERTLSIIKPDATRRNLTGAINARFEEAGLRIVGQKRLRLTTAQAEGFYEVHKERSFFGSLVEFMTSGPVVVQVLEGENAVLKNREVMGATNPANAAEHTIRKDFAESIEANSVHGSDSAENAAHEIAYFFAQTEIVA

SEQ ID NO: 21721 - protein, 509 aa, Zea mays
MVKAVVVGAAVVACAAVGVAVVLERRRRKRDADLLGSAEAERRRRAAAVIEEVESSLATPTALLRGIADAMVAEMERGLRGDIHAQLKMLISYVDSLPTGDEHGLFYALDLGGTNFRVLRVQLGGKEKRVVKQQYEEVSIPPHLMVGTSMELFDFIAAALAKFVGTEGEDFQLPEGRQRELGFTFSFPANQTSISSGTLIKWTKGFSINGTVGEDVVSELSRAMERQGLDMKVTALVNDTVGTLAGGRYMDNDVVAAVILGTGTNAAYVEHANAIPKWTGLLPKSGNMVINTEWGSFKSNKLPLSEYDKAMDFESLNPGEQIYEKMISGMYLGEIVRRILLKLAHEASLFGDVVPPKLELPFILRTPDMAAMHHDSSHDLKTLGAKLKDIVGVADTSLEVRYITRHICDLVAERAARLAAAGVYSILKKIGRDKVPSGGGKMPRTVVALDGGLYEHYKKFSSCVEATLTDLLGEEASSSVVAKLANDGSGIGAALLAASHSQYQYGASD

SEQ ID NO: 21722 - protein, 395 aa, Vibrio sp. Ex25
MFSNLPTPVLDPILSLSVAYRNDDRPNKVDLGIGVYKNSAGETPIMKAIQMAQDVVVETQKTKSYVGLAGCEEFNKSMIDLLLTGTSAMDRVAAIQTPGASGALRMLGDLMKVAQPDTTVWISNPSYVNHKPVMEAAGLKVKFYHYFSPETKQVDTAKMMDDLAKAGPSDVVLLHGCCHNPTGADIDFSAWQVITELSQKNGFTPFVDIAYQGFGDGLEEDAKGLRFMADNVEEMLITTSCSKNFGLYRERTGAAIVVGKNMQDVANAKGKLLTLARSTYTMPPDHGAALVKTILQDDNLTSVWKQELSEMQHRLVSLRQSLCNELRNNHNTDQFDFIEGHKGMFTVLGFSENQMAQLREDYGIYGVGDGRINIAGLTETHIPYVADAIKKVSQA

SEQ ID NO: 21723 - protein, 791 aa, Streptomyces avermitilis MA-4680
MSACVPTRAADSNRTKRIHQPHSPPPPQPRRFRIAGADWSASIAVFLIALPLSLGIALATGAPLQSGLVAAAVGGLLAGRLGGSPLQVSGPAAGLTVVTAELIHRYGWRTTCAITVLAGVAQLGLGCLRVARTALAVSPAIVHGMLAGIGVTIAVAQLHIVLGGTPQSSVLANLHALPAQLAHLQPAAVSMSALTLALLLAWPRLPGRVGRLLRTIPAALVAVAGATTAASLAALSLPKVDLPSWRSHALASLPEGPVLGIAAAVLTTTLVCSVQSLLGAVAVDKLTAGRPLPNRRSDLDRELLGQGTANIVSGALGGLPVAGVAVRTSANVRAGAVSRNSTMLHGVWVVVAALLMVPILELIPLASLAALVMAVGIQMVSLHHIRTVTRHREVLVYAVTTLGVVLLGVLEGVTLGVAVAVAVALNRLARTRITHDEQEGVHYVQVRGQLTFLAVPRLSRALHLVPHGADAVVELDGSFMDHAAYESLQDWQTAHTAQGGSVEFTGRAGTRISLPAMEAPAAERSTGLGEASACRCRPWTPWRNHQCARPQPAPPGEDPDESAATGPSGHQLARGISAFQRNTAPLVRGELARLAREGQRPSQLFLTCADSRLVTSMITSSGPGDLFVVRNVGNLVPPPGEESGDDSVAAAIEYAVDVLEVRSITVCGHSGCGAMQALLSSDPGSSQTPLKRWLRYGLPSLERMAAEDRARLAGRAAADAVEELCLTNVVQQLAHLRAHESVARALREGALELHGMYFHVGEAQAYLLSEDPAADGVFARVTETARDDMPA

SEQ ID NO: 21724 - protein, 368 aa, Haemophilus influenzae R2866
MNKKTIVVKFGTSTLTQGSPKLNSPHMMEIVRQIAQLHNDGFRIVIVTSGAIAAGRHYLNHPQLPPTIASKQLLAAVGQSQLIQAWEKLFAIYDIHIGQLLLTRADIEDRERFLNARDTLHALLDNHIIPVINENDAVATAEIKVGDNDNLSALVAILVQAEQLYLLTDQQGLFDSDPRKNSEAKLIPIVEQITDHIRSIAGGSGTNLGTGGMMTKIIAADVATRSGIETIIAPGNRPNVIADLAYEQNIGTKFIAHQSDRLESRKQWLFAAPSAGIITIDNGAQNAILEQNKSLLPAGIINVEGRFSRGEVVKIRTQSGKDIALGMPRYNSDSLQLIKGRKSADIENVLGYEYGAVAMHRDDMIILS

SEQ ID NO: 21725 - protein, 275 aa, Pseudomonas putida KT2440
MKLDTVFSVEGARVIVTGAASGLGLAFTEAMAESGAQVAMLDLNREALDAQFRRLRSLGYSVRSHVLDVTDRDAVDDTFNAVAAGFGGLDIVFANAGIDPGPGFAALNAAGEREPANMLEEYSDHRWRKVISVSLDAVFYSIRAAARHMRANRSGSIIVTTSVSALRPAVTLGAAYAAAKAGAAQLVRATALELASDGVRVNAIAPGPFETDIGGGFMHNSEVRAKMAAGVPMGRIAEVEEIKPLALYLASKASSFVTGQQFVIDGGLSLSAARA

SEQ ID NO: 21726 - protein, 469 aa, Corynebacterium efficiens
MTEHYDVVVLGAGPGGYVSAIRAAQLGKKVAVIEKQYWGGVCLNVGCIPSKALIKNAEIAHIFNHEKKTFGINGEVTFNYEDAHKRSRGVSDKIVGGVHYLMKKNKITEIDGFGTFKDAKTIEVTDGKDAGKTVTFDDCIIATGSVVNSLRGVEFSENVVSYEEQILNPVAPKKMVIVGGGAIGMEFAYVLGNYGVDVTLIEFMDRVLPNEDPEVSKVIAKAYKKMGIKLLPGHATTAVRDNGDSVEVDYQKKGSDKTETITVDRVLISVGFRPRVEGFGLENTGVKLTERGAIDIDEHMRTNVDGIYAIGDVTAKLQLAHVAEAQGIVAAETLAGAETQTLGDYMMMPRATFCNPQVASFGYTEEQAKEKWPDREIKVSSFPFSANGKAVGLAETDGFAKIVADAEFGELLGGHIVGANASELLNELVLAQNWDLTTEEISRSVHIHPTLSEAVKEAAHGVNGHMINF

SEQ ID NO: 21727 - protein, 148 aa, Triticum aestivum
MAPKAEKKPAEKKPAAEEKAEKAPAGKKPKAEKRLPASKSSGKEGGEKKGKKKAKKSVETYKIYIFKVLKQVHPDIGISSKAMSIMNSFINDIFEKLAGEAAKLARYNKKPTITSREIQTSVRLVLPGELAKHAVSEGTKAVTKFTSN

SEQ ID NO: 21728 - protein, 153 aa, Zea mays
MAIAGQCSSCYYTSPTLQLHRRHSHLPRQPQAARRARRPRLQVAAAADSGPIRAATDAEFFQPSDTRPIMLFDGVCNLCNGGVRFVREHDPNRSFIKSEAVLRIMEYLNLPFPQLAVFLKFVPLFLRDFAYDNVANNRYAMFGRAEAEACEIL

SEQ ID NO: 21729 - protein, 450 aa, Miscanthus sinensis f. glaber
MREFISIHIGQAGIQVGNACWELYCLEHGIEPDGTMPSDTSVGVADDAFNTFFSETGSGKHVPRAIFVDLEPTVIDEVRTGSYRQLFHPEQLISGKEDAANNFARGHYTVGKEIVDLCLDRVRKLADNCTGLQGFLVFNAVGGGTGSGLGSLLLERLSVDYGKKSKLGFTIYPSPQVSTAVVEPYNSVLSTHSLLEHTDVAVLLDNEAIYDICRRSLDIERPTYTNLNRLITQIISSLTTSLRFDGAINVDVTEFQTNLVPYPRIHFMLSSYAPLISAEKAYHEQLSVPEITSAVFEPSSMMAKCDPRRGKYMACCLMYRGDVVPKDVNAAVATIKTKRTVQFVDWCPTAFKCGINYQPPSVVPGGDLAKVQRAVWMISNNTAVAEVFSRIDHKFDLMYAKRAFVHWYVGEGMEEGEFSEAREDLAALEKDYEEVGAEGADDEGDEGDDC

SEQ ID NO: 21730 - protein, 268 aa, Bouteloua hirsuta
ASYAAAAMPALDVLPEKPHHGWESNGAAAVAPTPAPRRLDGKVAIVTGGARGIGEAIVRLFARHGARVVIADVDAAAGDALAAALGPQVSCVRCDVSVEDNVRRAVEWAVARHGRLDVLCNNAGVLGRQTRAAKSILSFDAGEFDRVLRVNALGAALGMKHAARAMAPRRAGSIVSVASVAGVLGGLGPHAYTASKHAIVGLTKNAACELGAHGIRVNCVSPFGVATPMLINAWRQGHADAVPSDEEVEKMEEVVRGLATLKGPTLRP

SEQ ID NO: 21731 - protein, 416 aa, Vibrio cholerae [sequence omitted]

SEQ ID NO: 21732 - protein, 717 aa, Actinidia chinensis [sequence omitted]

SEQ ID NO: 21733 - protein, 450 aa, Miscanthus transmorrisonensis
MREIISIHIGQAGIQVGNACWELYCLEHGIEPDGTMPSDTSVGAAHDAFNTFFSETGSGQHVPRAIFVDLEPTVIDEVRTGLYRQLFHPEQLISGKEDAANNFARGHYTVGKEIVDLCLDRVRKLADNCTGLQGFLAFNAVGGGTGSGLGSLLLERLSVDYGKKSKLGFTIYPSPQVSTAVVEPYNSVLSTHSLLEHTDVAVLLDNEAIYDICRRSLDIERPTYTYLNRLISQIISSLTTSLRFDGAINVDVTEFQTNLVPYPRIHFMLSSYAPVISAEKAHHEQLSVPEITSAVFEPSSMMAKCDPRHGKYMACCLMYRGDVVPKDVNAAVATTKTKRTVQFVDWCPTGFKCGINYQPPSVVPGGDLAKVQRAVRTICNNTAVAEVFSRIDHKFDLMYAKRAFVHWYVGEGMEEGEFSEAHEDLAALEKDYEEVGAEGADDEGDEGDDY

SEQ ID NO: 21734 - protein, 719 aa, Mesembryanthemum crystallinum [sequence omitted]

SEQ ID NO: 21735 - protein, 570 aa, Kluyveromyces lactis
MESVIRSSAKICPFMHSATGSMQSVKALKNANLPAIAQQCPFMGKAMEQRRGYASSASGASAAAAATATASTSASNSNSSVEASASADVVDHATKEASFDYQGLFDSDLAKKRMDKSYRFFNNINRLAKEFPMAHRKLEDDKVTVWCSNDYLALSKNQEVIEVMKKTLDKYGAGAGGTRNIAGHNKHALQLEAELATLHKKEGALVFSSCFVANDAVISLLGQKIKDLVIFSDELNHASMIVGIKHASTKKHIFKHNNLDQLEELLAMYPKSTPKLIAFESVYSMSGSVADIDKICDLAEKYGALTFLDEVHAVGLYGPHGAGVAEHCNFDRHRKAGIASPEFRTVMDRVDMITGTLGKSFGTVGGYVAGSLQLIDWVRSYAPGFIFTTTLPPAVMAGAAEAIRYQRSHLDLRQDQQRHTTYVKDGLADLGIPVMPNPSHIVPVLVGNPHLAKQASDILMDKHRIYVQAINFPTVARGTERLRITPSPGHTNDLSDILMDALEDVWSTLQLPRVRDWEAQGGLLGVGDPNHVPQPNLWTKDQLTLTNNDLHPNVKQPIIEQLEVSSGIRY

SEQ ID NO: 21736 - protein, 559 aa, Pseudomonas fluorescens
MTTLRIHGMTCASCADRVRDALEGISGVHRADVSYAGGKAEMTADGRVSREQMQAAVEALGYQASFEVASLQPRPGQLDKALGWLRSDTEVGKNGDALHIAVIGSGGAAMAALKAVEAGARVTLIERGTIGGTCVNVGCVPSKIMIRAAHVAHLRRESPFDDGMPATPPTVLRDGLLAQQQGLVDELRHAKYEGILESTPAITVLRGTARFQDGHTLSVELVEGGGREVRFDRCLIATGAGRAVPPIRGLQDTPYWTSEEALASASIPQRLAVIGSSVVALELAQAFARLGSRVTILARNSLFFREDPAIGEALTAAFRMEGIDVLEQTQASQVTLANGEFVLTTNHGELRADQLFVATGRTPNTQSLNLEAAGVLLDERGAIQIDQGIGSSAVDIYAAGDCTNQPQFVYVAAAAGTRAAINMTGGERTLNLDAMPAVVFTDPQVATVGYSEAEAQRAGLETDSRTLSLDNVPRALANFDTRGFIKLVAEAGSGRLLGVQAVAPEAGELIQTAVLAIRNRMTVQELADQLFPYLTMVEGLKLAAQTFTKDVKQLSCCAG

SEQ ID NO: 21737 - protein, 965 aa, Gossypium hirsutum
MAGRKVEKMASIDAQLRLLAPGKVSEDDKLVEYDAVLLDRFLDILQDLHGEDIRETVQECYELSAEYEGKHDPKILEELGKVLTSLDPGDSIVVTKSFSHMLNLGNLAEEVQIAYRRRIKLKKGDFADESSATTESDIEETFKRLVGQLNKSPEEVFDALKNQTVDLVLTAHPTQSVRRSLLQKHGRIRNCLTQLYAKDITPDDKQELDEALQREIQAAFRTDEIRRNPPTPQDEMRAGMSYFHETIWKGVPKFLRRVDTALKNIGINERVPYNAPLIQFSSWMGGDRDGNPRVTPEVTRDVCLLARMMAANLYFSQIEDLMFELSMWRCSDELRIRADELHRSSKKDAKHYIEFWKQIPPNEPYRIILGDVRDKLYNTRERARSLLANGFSDIPEEAAFTNVEQFLEPLELCYRSLCACGDRPIADGSLLDFLRQVSTFGLSLVRLDIRQESDRHTDVLDAITKHLDIGSYREWPEERRQEWLLSELRGKRPLFGPDLPKTEEVADVLDTFHVISELPSDSFGAYIISMATAPSDVLAVELLQRECHVKQPLRVVPLFEKLADLEAAPAAVARLFSIDWYRDRINGKQEVMIGYSDSGKDAGRLSAAWQLYKAQEELVKVAKQYGVKLTMFHGRGGTVGRGGGPTHLAILSQPPDTIHGSLRVTVQGEVIEQSFGEEHLCFRTLQRFTAATLEHGMHPPVSPNPEWRALMDEMAVVATKEYRSVVFQEPRFVEYFRLATPELEYGRMNIGSRPSKRKPSGGIESLRAIPWIFAWTQTRFHLPVWLGFGAAFKHVIQKDIKNLHMLQEMHNQWPFFRVTMDLIEMVFAKGDPGIAALYDKLLVSKELWPFGENLRANYEDTKRLVLQVAGHRDLLEGDPYLKQRLRLRDAYITTLNVCQAYTLKRIRDPDYHVKVRPHLSREYMESSKAAAELVKLNPTSEYAPGLEDTLILTMKGIAAGMQNTG

SEQ ID NO: 21738 - protein, 630 aa, Brassica rapa subsp. pekinensis
MDSASASQLKSSDDDETVADKVCNKSIVVPHRVVALANSFEKKDRSWYVKSQIPNDLSIQVNDITFQAHKFPLISKCGYLSNIELQPSTSGNGYHLKLENFPGGAETFETILKFCYGLQLDLNPLNVAPLRCASEYLYMTEEFQDGNLISKTDGFITFVVLVSWRDTLTVLRSCTSLSPWAENLQIVRRCCDLLAWKACNDSHDIPEDVENNERSLYSGIANLQLDHFMRVVTTVNARRGKPETIGRLIMKYAENWLPLIDEDIEGIRGYGSGNNELQFSVEGERTEESSLGCQEQKRIIESLVSVLPQQPEAVSCQFLLRLLKTAIVYSASPALVSDLEKRVGMALEDANVCDLLIPNFKNEDQQKGASSPEDYTIYNVDVVHRILEYYVMHEQQQQEQQIQGKPSITKLLDNYLAEIAKDPCLSITKFQVLAEMLPENAWKCHDGLYRAIDMFLKTHPSLSEHDRRRLCKTMNCEKLSLDACLHAAQNDRLPLRTIVQINTQVLFSEQVKMRMMMQEKQAGNNEENPEGCDDKRTSRDSEVRKLKGELENVRSKMAELQDDYNELQQEYEKLNSSKHKSTQYWGSRWQKVKRSFQMKREDDETRDTPRRRRSSTGPRTSLTRRRMSMS

SEQ ID NO: 21739 - protein, 1741 aa, Anabaena variabilis ATCC 29413
MQSLPQLLWPPCLESVIDLSPLTVEPEMPLSDAVSQMAKQGAAIVVVANTQILGWLSERDVVKLVALGVDLQTTTISQVMNTSIIFFQVAQFEDIGAIISLLRQHQSSCLLVVDEQEQLMGTITSESIYQALGAATELNSQEELETSQQDFQLLKSAVVNPLDAIGASDESLWRVANTAPILIWISATDTSCIFFNKAWLELTGSTLEQEIGKSWSEKLHPEDLQGFLDVYLSAFHTHQFFSVEYRLLGLNGEYLWLLNIGVPRFTSNGDFAGYINSCIDITEHKQYFAALEESTNRLKLALEATNTIYWERNLSNDQLFFLNPVIEFGDSEELTHSEVMSFFHPDDREKVDMAAQEAIANCSCLEIEHRLPVAGQPSKYKWFLSKSTILTDTTGKPTRMIGISMDITDRVEAQDALEQANQELERRVAERTLALQKANRQLLAEIGDRQIAQEQLRQSQQMLQLVIDTIPHCVFWKDRNSVFLGCNRKFAKLLGFDYPENIIGKTAHDFLANLQDADLHRQSDVRVIETNTPEYHIVEPLLKPNGQKIWLEKNKIPLHDPKGNVVGILSTLEDITERKQVQEALEKSEERFRFLAESIPQQVWIARPDGYLEYVNRRTLEYFGNVPEAILGWKWQQSIHPDDRNRCLEIWQHCVATGEPLDVEFRWLRTTDQTYRWHIGRALALRDSQGNIINWFGTNTDIDDRKRTEEALAERVKLSDFRSAVDTILTQSYTLQDLMHGSADAVVKHLNAAFARIWILNKQENLLELQVSSGRYTHLDGSHRCIPVGQCKIGLIAQIGKPHLTNSVQTDPLISNPDWAKQEGIVAFAGYPLIVENETLGVIAMFSCQALSESHFQALGIAANQIAIGIKRQQTEAALRHSEERFRNLVETSSDWVWEVDENAIYTYVSPKAKDILGYEPQELLGRTPLDMMPPTEAERVMKIFNSIIAAQQPFKCLENTNVHQDGHLVVLETSGVPIFDAVGKFCGYRGVDRDITARKEVETNLYQTQQQLQVILDNSPAIIYVMDLQNRFILVNQQYEKLFHTTQSEIVGKSVYETWPDDIAYQYAINNRQVITTGMAIEVEEMVPQEDGLHTYLSIKFPLKDRNGIIYAMCGISTDITERKLAEDSLLRFHKAMESTSDAIIFGDILNISNYANPSFQELYGYNLEQLQAAGGVCTIFQEPQKQREIMARVMKGESWRGEVAMRSRDGHLLQVDLRADAIRDSNGKIIGTVCIHTDITKRQQVEEGLKLRDRAIDASSNGIIIADASTPNRPIIYVNPAFERMTGYSSDEVIGQNFRLFQSADIDQLGLRELSTAMQAGKACTVVLRNYRKDGSLLWNELNISPVYDQTGQLTHYIGIQTDITERKQAETALLVSQQRLQYLLTSSPAVIYTCKTCGDFGSIFVSNNITTITGYEAQEFIENSDFWFNHIHPEDAPSVLKKLSSVLEAETYKLEYRFLHKDGTYHWLYDQRRVVKDDTKNPVEMVGYLIDITDRKQLEEYLKVALEKEKELSELKSRFVSMTSHEFRTPLSTILSSSELLEHYRHKWTEEKQLTHLHRIQTAVKRMTEMLNDILIIGKAEAGKLEFMPKPLDVVAYCRNLVEEIQLNLNNKQVDFISEYQSMSCCMDEKLLGHILINLISNAIKYSPVNSNVQVKFYCRDQCAVFEVHDWGIGIPAEDITHLFESFYRAKNVGNILGTGLGLAIVKKCVDVHEGEISVSSNSEIGTLFTVNIPLKQQ

SEQ ID NO: 21740 - protein, 240 aa, Listeria monocytogenes str. 1/2a F6854
MSKKVVLTREASKNKPWQTYFSQNGYEVMSIPLIKTQPIKINLSREQQETDWLFLTSANAVEYFFTNQYERSNYKIAVIGEKTKEKLAEFGHEPSFVPSIYQSEVFLEEWLNENPEKTSILLPQSNLSRTIIKDTLIEKGYIVFSIELYETIFPEASKKLLTEQLKLNETQIIVFASPSAWKNFYSIAKSFPAQKEKWHIASIGSITTEAILADGWEVKYQPKTFTMKHLADLIIQEELK

SEQ ID NO: 21741 - protein, 192 aa, Gossypium hirsutum
PWIFAWTQTRFHLPVWLGFGAAFKHVIQKDIKNLLMLQEMYNEWPFFRVTIDLVEMVFAKGDPGIAALYDKLLVSEELWSFGERLRTNFEETKSLLLQIAGHKDLLEGDPYLKQRLRLRDSYITTLNVCQAYTLKRIRDPNYSVKLRPHISREIMESSKPADELVKLNPTSEYTPGLEDTLILTMKGIAAGM

SEQ ID NO: 21742 - protein, 543 aa, Brassica rapa subsp. pekinensis
MAVADDGKLNIEEHPPLWGSRSVDCFEKLEQIGEGTYGQVYMAKDIKTGEIVALKKIRMDNEKEGFPITAIREIKILKKLHHENVVELKEIVTSPGRDTDDQGKPDNNKYKGGIYMVFEYMDHDLTGLADRPGLRFTIPQIKCYMRQLLTGLHYCHAHQILHRDIKDPGAGSNLLIDNEGQLKLADFGLARMYSQDHSGNLTNRVITLWYRYAFKVLHLCIMMFANVSAIVTLLTYIYCGRPPELLLGATKYGPAIDMWSVGCIFAELLYAKPILPGKNENEQLSKIFELCGSPDENNWPGVSKMPWFNNFKPSRPLKRRVREFFGQYQVFDRHALELLDKMLVLDPSQRITAKDALDAEYFWTDPLPCDPKSLPTYEASHEFQTKKKRQEQRQREEAAKRQKLQHPHQQHSRLPPLQHGGQSHAAAPHWPAHPTNNAPPQVPAGPSHHYYGKPRGPPGPNRYPPSGNQSRGYNQSRGGYSSSGSYHQQGRGAHYVGVGPRGPSGGAYGVGPPNYTQSGQHGGSGRGQNPMGGSRNQQYGWQQ

SEQ ID NO: 21743 - protein, 570 aa, Cryptococcus neoformans var. neoformans JEC21
MRLPRLLSVTFSLSALLTTATATITDLDDDFQLRELTEDNFKSSVSQGVWLVEHFSPKCAHCRAFAPTWTQLARDKRHLERLTGFHMAQINCLAQGDLCNSNGIKFYPQIIMYTDGKPSPHYTGDRSYEELSKYIDEHAHTYAETILDPAVQSQEALVIGPANSEGKVQEVDERGLEALKAEGPVLVEYFAPWCGHCKALRPTYEQLALELQGQLNVAAVNCDDHRALCVNSGIKAYPTIRLLHHGTSAEYSGARSLAKLKEFSQRAEKPASLTSIKAGDFDKIVSANEAFFLYLQTFDTTVAEVDSVKKAFEPLLGTVPAYTSADVALYQRLHVVNPPTSTLFAFSSYSTRPVGTMGLPASPNDLRKFINLHRFPTLVRLDASNFQSLMRSDTRAIVVLAGVHKGEEGKKERDKFADVARAWKRGGRRFEQPVWFVWVEGETSRWANWLKRFYGIKKRDLPGVVVIDTPLEEYYDTTIEGTKIEFEGSSIFSVLEGFYQHFLRPKRIESTLEWGSRSASETLISVGESAVEHPFLFLTVLVGTVALFVYLLQKCLVKDPKDGYSPSRLD

SEQ ID NO: 21744 - protein, 325 aa, Brassica rapa subsp. pekinensis
MGRSPSSGDSRLKKGPWTPDEDEKLVKYVKKHGHSSWSALPKLAGLNRCGKSCRLRWTNYLRPDIKRGKSLRRREQTILNLHAVVGNKWSTIANNLPGRTDNEIKNFWNTHLKKKLIQMGVDPMTHRPRTDVLSSLSQLISLSSNLRGFVDQEQIMLKLQTEMAKLELFQYLLQPPSMYNNINPNDFDTRSLLSSIASTTNNNLNLGSYLQDFNSLPSLKTLNTNIGPSSVFPQNLDDNHFKFFNQRENLPVSPIWLSDPSSSNQSFLPSLDPSYSMADDLIRNQYVIEDVNSNLTSSSCQESGASVSAAWPDHLLDDSIFSHIP

SEQ ID NO: 21745 - protein, 557 aa, Cryptococcus neoformans var. neoformans JEC21
MSETPDQLATRVQNLSTAPTTTQRTGSGSAVLENGTNIGSAAGRKASIPAQVDPERIISTSGSGRTSRRGSGLVMTPGGVQTVYHTRTNEDIEFPHAGKKTMADLLRKYESLFTLTPQRMRMIVHAIEETLDNGLQKNGQVVPMIPTYVFGWPTGNEVGDFLALDLGGTNLRVCLVTLLGSGKFEVTQTKYRLTEEQKQGEGQALLDFCAECLNSFIRDTLGRTEKDGILPLGFTFSYPCSQDRIDHGVLIRWTKGFGAPNIEGYDVAAMFKDSLKRMDVPAELTALINDTTGTLIASNYVDPHTKIAVIFGTGCNAAYMETAGSIPKIDYVGLPEEQGMAINCEWGAFDSFDHQHLPRTKYDIIIDESSNKPGEQSFEKMIAGLYLGEIFRLVLCELIDSGDLFLGQNTYKLEKAYAFDTAFLSLMEADVTEELLTIIGVFAHFFGLETTLEERQFFKKLAVLVGTRSARLSACGIAAIVSKKGYLEEGCAVGADGSLYNKYPNFADRVHEALTDIFGESGKKIVTHHAEDGSGVGSAIIAAMTKARKDSGFFVEY

SEQ ID NO: 21746 - protein, 765 aa, Candida glabrata CBS138
MDEGPLGKGAVATPAMVEKVANESPKKTRPRRLSSLNEFYDPFSTAEVYYGPATDPRKQKKSSTKLNRTRTMSVFDNTSIAKTTASFGQFQLKRRGSEDDSLTASQGNRKFFIEDVDGTLEELLSSEDTDRNYQITIEDTGPKVLKVGTANSGGYKHVNIRGTYMLSNLLQELTIAKSFGRHSIFLDEARINENPVNRLSRLITNQFWNNLTRRIDLNNIGEIASDTKVDTPEAKNPRVYVPYNCPEQYEFYIQASQMNPSMKLEVEYLPKDITPEYVKSLNATPGLLALAMEEHVNPATGEVSLIGYPYAVPGGRFNELYGWDSYMMALGLLESNKVDVARGMVEHFIFEIEHYGKILNANRSYYLCRSQPPFLTDMALVVFNRIGGDNNPNAIDFLKRSFKAAIKEYKTVWMAHPRLDPETGLSCYHPDGLGIPPETEPTHFDSILTPYAAKYYCTIPEFIAMYNDGSVKEPHLDEFFLHDRGVRESGHDTTYRFEGVCAYLATIDLNSLLYKYEVDIANFIEKYHNDEYHDPFDGTVTNSAYWRDLAAKRKENITKYMWDEETGFFYDYNIKVKCRTNYESATTFWSLWAGLATPEQAKKMVELALPKLEMLGGLVACTEESRGPISIDRPHRQWDYPFGWAPHQILAWEGLNDYGYTSVATRLAYRWLFMMTKAFVDYNGIVVEKYDVTRGTDPHRVDAEYGNQGADFKGVAKEGFGWVNTSYILGLKFMNSHARRALGACIPPAPFFNSLKDDEKSIYGL

SEQ ID NO: 21747 - protein, 384 aa, Zea mays
  misc_feature (16)..(16): Xaa can be any naturally occurring amino acid
  misc_feature (131)..(131): Xaa can be any naturally occurring amino acid
  misc_feature (165)..(165): Xaa can be any naturally occurring amino acid
  unsure (1)..(384): unsure at all Xaa locations
MQIFDKTLTWKDYHPXAESSDTIDNVKAKIQDKEGIPPDQQRLIFAGKELEDGRTLADYNIQKESTLHLALRLRGGMQIFVKTLTGKTITLEVKSSDTIDNVKAKIQDKEGIPPDQHRLIFAGKQLEDGRXTLADYNIHKESTLHLVLRLTGGMHIFEKTLTGKXTIHPFEVESSDTIDNVKAKIQDKEGIPPDQQRLIFAGKQLEDGRTLADYNIQKESTLHLVLRLRGGMQIFVKTLTGKTITLEVESSDTIDNVKAKIQDKEGIPPDQQRLIFAGKQLEDGRTLADYNIQKESTLHLVLRLRGGMQIFVKTLTGKTITLEVESSDTIDNVKAKIQDKEGIPPDQQRLIFAGKQLEDGRTLADYNIQKESTLHLVLRLRGGQ

SEQ ID NO: 21748 - protein, 416 aa, Mycobacterium avium subsp. paratuberculosis K-10
MSKPSTANGGYPSVVVTAVTATTSIAPDVESTWKGLLAGESGIHVLEDDYITKWDLPVRIGGHLKEPIDERMSRLDLRRMSYVQRLAKLLSTQLWETAGNPELDPDRFSVVVGTGLGGAERIVESYDLMNEGGPRKVSPLAVQMIMPNGAAAVVGLQLGARAGVITPVSACSSGSEAIAHAWRQIVMGDADVAVCGGVEGPIDALPIAAFSMMRAMSTRNDEPERASRPFDKDRDGFVFGEAGALMLIETEEHAKARGAKPLARLMGAGITSDAFHMVAPAGDGVRAGRAMTRSLELAGLSPKDVDHVNAHGTATPIGDTAEANAIRVAGCQEAAVYAPKSALGHSIGAVGALESVLTVLTLRDGVIPPTLNYETPDPEIDLDIVAGEPRYGDYQYAINNSFGFGGHNVALAFGRY

SEQ ID NO: 21749 - protein, 223 aa, Brassica rapa subsp. pekinensis
MSSGGYGDPSQKIDYVFKLVLIGDSGVGKSQILSRYARNEFSLDSKATIGVEFQTRTLVMDHKSVKAQIWDTAGQERYRAVTSAYYRGAVGAMLVYDVTRRQTFDHIPRWLEELRGHADKNIVIILVGNKSDLEDQRAISTEDAKEFAETEGLFFLETSALNAVNVETAFSTVLTEIFNIVNKKNLVAGEGNGDPGSLAGKKIDIVPGPAQVVPTKSGMCCNS

SEQ ID NO: 21750 - protein, 440 aa, Mycobacterium avium subsp. paratuberculosis K-10
MRAAPARKVAGQVREGIFARPMTELVTGKTLPNVVVTGIAMTTALATDAETTWKLLLDSQSGIRTLDDPFVEEFDLPVRIGGHLLEEFDSQLTRVELRRTGYLQRMSTILGRRVWENAGSPEVDSNRLMVSIGTGLGSSEEMVFSYDDMRARGMKAVSPLGVQKYMPNGAAAAVGLEHHAKAGVITPVSACASGSEGIAQAWRNIVFGEADIAICGGVETKIEAVPIAAFAQMRIVMSTKNDDPVGACRPFDRDRTGFVFGEAGALMVIETEEHAKARGANILARIMGASITSDGYHMVAPDPNGERAGHAMSRAIQLAGLTPGDIDHVNAHATGTSVGDVAESKAINNALGPHGGNAAVYAPKAALGHSVGAVGAVESILTVLALRDQVVPPTLNLENLDPEIDLDVVAGKPRPGNYQYAINNSFGFGGHNVAIAFGRY

SEQ ID NO: 21751 - protein, 221 aa, Neisseria meningitidis Z2491
MTFTAVLFDLDGVITDTAEYHYRAWKKLAEELGIGIDRKFNEQLKGVSRDDSLKRILAHGGKTVGEAEFAELTRYKNDNYVEMIQAVKPEDVYPGILPLLEALKANGKKIALASASKNGPFLLERMGLTDFFDAIADPAAVAHSKPAPDIFLAAAEGVGADIRRCIGIEDAAAGVAAIKAAGALPIGVGKAEDLGSDIALVSGIAELTYAYLQNVWAQSGR

SEQ ID NO: 21752 - protein, 951 aa, Oryza sativa
MVLWPWEKLLIPFLLGVSVVVLFLCSSSLFLLCETMQGIGRRYGRIKVYAVLGDDEAQHAKNNMRGALFHVDNPGPMAPIAKGNFLDVNQALEVVRFGIQYCDWRARQDLLTIMVLHNKVVEVLKSLAIEFKSNGTLRKELAELQEELAKAHNQVHLSETRASSALDKLAQADNLVNDRLLQDGGSSASIDNYVSLASRTSSASRFVNKKTLRPSLDVSGPVQPYNPNLKNFWYPVVFSGDLKDDTMVPIDCFEEQWVIFRGKDGRPGCVQNTCAHRACPLHLGSVSEGRIQCPFHGWEYSTDGKCEKMPATKLLNVRIRSLPCFEQEGMVWIWPGDGTPESTIPSLQPPSGFTIHAEMVMELPVEHGLLLDNLLDIAHAPFAHTSTFAKGWSVPSLVKFLTPASGLQGYWDPYPIDMEFRPPCMVLNEDLRLVLGQQERMINGANVWNWPVSYDKLGIRYRLWRDAIERGANRLPFNNQSHSLGARSASILSRRSSRQGSRGSISLSREMGDSILSSMRHSLQSADQLLGDVDGSVLAQVIDSGDRGLAFENDVDEEEENNVEDHQAVPLPDDTSMRIHGRSSQGTSVVAPVSAMKPKDTNVNGPASSSIKVEPYKLSWMQDYASYLIHLAVFGFLGVFTRYGLQKLFGPSCLALTSDQSPLYLDLPSNMLGSFLMGWFGIIFKADIRHISDHLIVGITTGYMGSLTTFSGWNQKMVGLSSKGHWVYAVAGIVLGMFIVNESITVGAETGERLRGWILKCIIEKNSIGSKCGWEDWRVDTRTKHYALLGVMVILMSLIWILSIVLAIVKVHSLGHGAVLWLGCSVAPPGVWLRWYLARLNGGGIGIGKRRHLKWLPVGTLAANVLAAAIMAALAVTAKAENTRRLTTVLNGIQLGFLGCLSTVSTFAAEVYTMRRSGQIARAFVYAAATFVLSFVLGTLIYSVPVWVEHY

SEQ ID NO: 21753 - protein, 272 aa, Zea mays
  misc_feature (216)..(216): Xaa can be any naturally occurring amino acid
  misc_feature (259)..(259): Xaa can be any naturally occurring amino acid
  unsure (1)..(272): unsure at all Xaa locations
SLLPSSVQQQASSTPPAAAVAARSKVFGGGVNQARTRTGCRVGITRKNFGRVMMALAVDVSRFEGVPMAPPDPILGVSEAFKADKSELKLNLGVGAYRTEELQPYVLNVVKKAENLMLEKGENKEYLPIEGLAAFNKATAELLLGADNPVINQGLVATLQSLSGTGSLRLAAAFIQRYFPEAKVLISSPTWGNHKNIFNDARVPWSEYRYYDPKTXVGLDFEGMIADIEAAPEGSFVLLHGCAHNPTGIDPTPEQWEKXADVIPEKKHMPFL

SEQ ID NO: 21754 - protein, 451 aa, Neisseria meningitidis Z2491
MSEYTPQTAKQGLPALAKSTIWMLSFGFLGVQTAFTLQSSQMSRIFQTLGADPHSLGWFFILPPLAGMLVQPIVGHYSDRTWKPRLGGRRLPYLLYGTLIAVIVMILMPNSGSFGFGYASLAALSFGALMIALLDVSSNMAMQPFKMMVGDMVNEEQKGYAYGIQSFLANTGAVVAAILPFVFAYIGLANTAEKGVVPQTVVVAFYVGAALLVITSAFTIFKVKEYNPETYARYHGIDVAANQEKANWIELLKTAPKAFWTVTLVQFFCWFAFQYMWTYSAGAIAENVWHTTDASSVGYQEAGNWYGVLAAVQSVAAVICSFVLAKVPNKYHKAGYFGCLALGALGFFSVFFIGNQYALVLSYTLIGIAWAGIITYPLTIVTNALSGKHMGTYLGLFNGSICMPQIVASLLSFVLFPMLGGLQATMFLVGGVVLLLGAFSVFLIKETHGGV

SEQ ID NO: 21755 - protein, 484 aa, Desulfovibrio desulfuricans G20
MTPAKGLIVVSNRLPVVLSRNEDGWGITTGAGGLVSAMAPVLRDRGGTWVGWTGASGEHEAESLLGEFSREAGYSLKPVRLEKEDVADFYYGFANEVIWPLFHDFQSLCNFFPKYWKSYLRVNELYARAVMDSGDPEAYVWVHDYHLMHVGEMLKSMGSRRRAGFFLHIPFPPMDNYLKLPWRRRLLSALLEYDLVGFQTYRDRRNFMQSVQVLLPHVKPQGRGPVIELLLDGRKVRLGAFPISIDYRSFVRTARSPAVSGRVNELKSAMDGRRMLLAVDRLDYSKGITFRLEAFREALEKYPGLRGNVTLMQIMVPSRQEVPRYNALKQEIERLVGEINGLFSRPGWNPVQYQYRSLGREELVAYYRAASMAIVTPLRDGMNLVAKEYCACNVNRRGVLLLSEFAGAAAQLQNGAVLVNPFDREGMAQSIKEALDMPAEEARRRMDRMRDVIRKNDIFRWVDMFLLAAFSRHLDDFPPTYARK

SEQ ID NO: 21756 - protein, 151 aa, Wolbachia endosymbiont of Drosophila ananassae
MSNIVHSNKNNKCDNFSVRGLQRAVDNIFDSFFTGWDSELSRRGSSLLPACDFYETKESYCLSLELPGISKESIDISISSDSLIVKGEKTCNNESKDKQFYHRERYYGSFYRSIQLPVNVEQDKVSANFSDGILHVTIPKSEKHIKRIDVK

SEQ ID NO: 21757 - protein, 415 aa, Xylella fastidiosa [sequence omitted]

SEQ ID NO: 21758 - protein, 479 aa, Escherichia coli O157:H7 EDL933
MSVPVQHPMYIDGQFVTWRGDAWIDVVNPATEAVISRIPDGQAEDARKAIDAAERAQPEWEALPAIERASWLRKISAGIRERASEISALIVEEGGKIQQLAEVEVAFTADYIDYMAEWARRYEGEIIQSDRPGENILLFKRALGVTTGILPWNFPFFLIARKMAPALLTGNTIVIKPSEFTPNNAIAFAKIVDEIGLPRGVFNLVLGRGETVGQELAGNPKVAMVSMTGSVSAGEKIMATAAKNITKVCLELGGKAPAIVMDDADLELAVKAIVDSRVINSGQVCNCAERVYVQKGIYDQFVNRLGEAMQAVQFGNPAERNDIAMGPLINAAALERVEQKVARAVEEGARVALGGKAVEGKGYYYPPTLLLDVRQEMSIMHEETFGPVLPVVAFDTLEDAISMANDSDYGLTSSIYTQNLNVAMKAIKGLKFGETYINRENFEAMQGFHAGWRKSGIGGADGKHGLHEYLQTQVVYLQS

SEQ ID NO: 21759 - protein, 371 aa, Salmonella typhimurium LT2
MMVRTLLRLIARWCGIAISKTGGSEMNDKIRVGLIGYGYASKTFHAPLIMGTPGLELAAVSSSDETKVKADWPAVSVVSEPRHLFNDPHIDLIVIPTPNDTHFPLAKRALEAGKHVVVDKPFTVTLSQARELDALARSTGRVLSVFHNRRWDSDFLTLKALLADGVLGEVSLFESHFDRFRPQVRDRWREQGGPGSGIWYDLAPHLLDQAIQLFGLPVSMTVDLAQLRPGAQSTDYFHAILSYPQRRVILHGTMLAAAESARYIVHGSRGSYVKYGLDPQEERLKNGERLPQEDWGYDMRDGVLTLVEGETRKEENWLTLPGNYPAYYAAIRDALNGNGENPVPASQAIQIMELIELGMESAKHRATLCLA

SEQ ID NO: 21760 - protein, 348 aa, Thermus thermophilus HB8
MKGLILAAGRGTRLRPLTHTRPKPAIRVAGRPIIHYAVENLLEAGVREIGVVVSPETERDLKVALEGYPVRYVLQEEPQGLAHAVDVARGFLGESPFVLYLGDNLFQKGIRRFLEAFKPGVSAVIALVRVEDPRQFGVAVLEGNRVVRLLEKPKDPPSDLAVAGVYVFSPEVLEVVRGLKPSARGEYEITDAIQGLIDRGKTVVGVEVEGWWKDTGRHQDLLDANRLLLEELTPKVEGDVVESQLTGRVVVEKGAKVVRSTVIGPAHIGAGAVVEEAFVGPFTSVGPRARVVRSEVEYSLLEEEAVVEEVRLRLQECILGVRAEVKSRDGLPRAHRLILGDLSQVELA

SEQ ID NO: 21761 - protein, 116 aa, Oryza sativa
MADYFPAPGRNHLFVPGPTNIPDKVIQAMTRNNEDHRSPAFPALSKTCLEDVKQLFGTKKGHAFIFPSTGTGGWESALTNTLSPGDKIISFRVGQFSLLWIDQMPRLNFDVDVGDT

SEQ ID NO: 21762 - protein, 268 aa, Bouteloua hirsuta
ASYAAAAMPALDVLPEKPHHGWESNGAAAVAPTPAPRRLDEKVAIVTGGARGIGEAIVRLFARHGARVVIADVDAAAGDALAAALGPQVSCVRCDVSVEDDVRRAVEWAVARHGRLDVLCNNAGVLGRQTRAAKSILSFDAGEFDRVLRVNALGAALGMKHAARAMAPRRAGSIVSVASVAGVLGGLGPHAYTASKHAIVGLTKNAACELGAHGIRVNCVSPFGVATPMLINAWRQGHADAVPSDEEVEKMEEVVRGLATLKGPTLRP

SEQ ID NO: 21763 - protein, 338 aa, SYNECHOCOCCUS SP. WH 8102
MVTTVKVAAAQIRPVLFSLDGSLQKVLDAMAEAAAEGVELIVFPETFLPYYPYFSFVEPPVRMGRSHLALYDQAVVVPGPVTDAVAAAARQHGMQVLLGVNERDGGTLYNTQLLFNSCGEIALKRRKITPTYHERMVWGQGDGSGLSVVSTPLGRVGALACWEHYNPLARYALMVQGEEIHCAQFPGSLVGPIFSEQTAVTMRHHALEAGCFVICSTGWLDPEDYAAITPDASLHKAFQGGCHTAVISPEGRYLAGPLPDGEGLAIAELDLALITKRKRMMDSVGHYSRPELLSLRINRNTAVAMQEMASDPVPSETSMAETSMAAGMSHVIEEINHV

SEQ ID NO: 21764 - protein, 367 aa, Thermus thermophilus HB8
MVKETHRFETFTEEPIRLIGEEGEWLGDFPLDLEGEKLRRLYRDMLAARMLDERYTILIRTGKTSFIAPAAGHEAAQVAIAHAIRPGFDWVFPYYRDHGLALALGIPLKELLGQMLATKADPNKGRQMPEHPGSKALNFFTVASPIASHVPPAAGAAISMKLLRTGQVAVCTFGDGATSEGDWYAGINFAAVQGAPAVFIAENNFYAISVDYRHQTHSPTIADKAHAFGIPGYLVDGMDVLASYYVVKEAVERARRGEGPSLVELRVYRYGPHSSADDDSRYRPKEEVAFWRKKDPIPRFRRFLEARGLWNEEWEEDVREEIRAELERGLKEAEEAGPVPPEWMFEDVFAEKPWHLLRQEALLKEEL

SEQ ID NO: 21765 - protein, 272 aa, Triticum aestivum
MDAQYNPRTVEEVFRDYKGRRNGLARALTTDVEEFFRQCDPEKENLCLYGFPNEHWEVNLPAEEVPPELPEPALGINFARDGMQEKDWLSMVAVHSDAWLLSVAFYFGARFGFDKSDRKRLFGMINELPTIFDVVSGKSKTKAPTNNNHSNSKSKSNNKMKTSEPRAKQPKPQLKEEDHEDEAPDAGEDGGGAAGGGGGGEEHGDTLCGACGDNYGQDEFWIGCDMCEKWFHGKCVKITPAKAEHIKQYKCPSCMGANGGGSGSNKRARPSS

SEQ ID NO: 21766 - protein, 349 aa, Gloeobacter violaceus PCC 7421
MQTPLSDGFIQPAEWQPHSACWLAWPSDAELWQSDLPKAQVEFAGLCRTIADPDPQSGLPRGEYLKILVPDAEAERAARLALEGLGARFHRIRFGDIWLRDTAPIFLTGPCRALAAVRFAFNGWGGKYVLDHDTEVAAAVAATADLPTYSFPWVLEGGSVEVDGEGTCLTTRQCLLNPNRNPGMDSKAIEQGLKEALGVRKVLWLDEGLLNDHTDGHIDTIARFAAPGVVVCMQAAPDDPNAPVLDNIAATLAGFTDAAGRMLTVVRVPSPGRVVDDNGEVMPASYVNFYIANRTVAVPTYGAPQDAAAVSAIAALFPGRRTVGLPARTILLGGGAFHCITQQQPEAGS

SEQ ID NO: 21767 - protein, 801 aa, Streptomyces avermitilis MA-4680
MAGLSTPHQFDHPTALAAAVLTDDNRVIVMVIGVVALAALVVAGILVRQVLAAGEGTDSMKKIAAAVQEGANAYLGRQMRTLGVFAVVVFFLLMLLPADDWNQRAGRSVFFLIGALFSATTGYTGMWLAVRSNVRVAAAAREATPAEGEPEKDLTAVSHKAMKIAFRTGGVVGMFTVGLGLLGASCVVLVYAADAPKVLEGFGLGAALIAMFMRVGGGIFTKAADVGADLVGKVEQGIPEDDPRNAATIADNVGDNVGDCAGMAADLFESYAVTLVAALILGKAAFGDSGLAFPLIVPAIGVLTAMIGIFAVAPRRADRSGMSAINRGFFVSAVFSLALVAVAVYVYLPGKYADLDGVTDVAIRAKDGDPRILAMVAVAIGIVLAALIQQLTGYFTETTRRPVRDIGKSSLTGAATVVLAGISVGLESAVYTALLIGLGVYGAFLLGGTSIMLALFAVALAGTGLLTTVGVIVAMDTFGPVSDNAQGIAEMSGDVTGAGAQVLTDLDAVGNTTKAITKGIAIATAVLAASALFGSYRDAITTAANDVGEKVSGAGAPMNLMMDISQPNNLVGLIAGAAVVFLFSGLAINAVSRSAGAVVYEVRRQFREHPGIMDYTEQPEYGRVVDICTKDALRELATPGLLAVLAPIAIGFTLGVGALGAYLAGAIGTGTLMAVFLANSGGAWDNAKKLVEDGHHGGKGSEAHAATVIGDTVGDPFKDTAGPAINPLLKVMNLVALLIAPAVVKFSYGEDKNLGVRIAIAVLSILVIVGAVYISKRRGIAVGDEGNAERVTKSADPAVVS

SEQ ID NO: 21768 - protein, 246 aa, Candida albicans SC5314
MFKQIITSSSTKSTRLFTSSTLKYLSTSSSLLKPTLAAAAAASITTTTTTTDNSSEYLTTGGSTHSIPAKGFRLSQPKTWEESNESALSKATKFLFLSEIARGMYICLEMYFRAPYTIYYPFEKGPISPRFRGEHALRRYPSGEERCIACKLCEAICPAQAITIEAEERIDGSRRTYKYDIDMTKCIYCGYCQESCPVDAIVETPNVEYSTATREELLYNKEKLLENGDKWEQELQYCIDADAPYR

SEQ ID NO: 21769 - protein, 382 aa, Pinus radiata
MDSNMNGLAKSNGCEISRDGFFESEEEELQGQAEAWKCTFAFAESLAVKCVVLLGIPDMIAREGPRATLSLGEIVAKLPTESPDAACLFRIMRFLVAKGIFRASKSAREGGAFETRYGLTPASKWLVKGRELSMAPMLLMQNDETTLAPWHHFNECVLEGGVAFQKANGAEIWSYASDHPDFNNLFNNAMACNARIVMKAILSKYQGFHSLNSLVDVGGGTGTAVAEIVRAYPFIRGINYDLPHVVATASSLSGVQHVGGDMFETVPTGDAIFMKWIMHDWNDEDCIKILKNCRKAIPDTGKVIIVDVVLDADQGDNTDKKRKKAVDPIVGTVFDLVMVAHSSGGKERSEKEWKRILLEGGFSRYNIIEIPALQSVIEAFPR

SEQ ID NO: 21770 - protein, 305 aa, Phytophthora tropicalis
DSVLDVVRKEAESCDCLQGFQITHSLGGGTGSGMGTLLISKIREEYPDRIMCTYSVCPSPKVSDTVVEPYNATLSVHQLVENADEVMCLDNEALYDICFRTLKLTTPTYGDLNHLVCAAMSGITTCLRFPGQLNSDLRKLAVNLIPFPRLHFFMIGFAPLTSRGSQQYRALTVPELTQQQFDAKNMMCAADPRHGRYLTAACMFRGRMSTKEVDEQMLNVQNKNSSYFVEWIPNNIKASVCDIPPKGLKMSTTFIGNSTAIQEMFKRVSEQFTAMFRRKAFLHWYTGEGMDEMEFTEAESNMNDL

SEQ ID NO: 21771 - protein, 475 aa, Pirellula sp. 1
MHAPVVVLGGGPGGYAAAFLAADEGMEVTIVEAEPRLGGTCLIRGCIPSKALLHVAKVISEVEELKSEWGIEYSGEPKIDVDVVRARKDKVIDNLTGGLGGLAKRRNVTVIQARGSFVSSNELKLEGDHESIPEGGKLTFDKCIVATGSIPAMPPAFDIGSDRVMDSTGALALKDIPETLLVVGGGYIGLEMGTVYAHLGSKVSVVELGEGLLPGADRDLVKPLAKKIDKMCDGRVFLNTKVGSLAEDGDKVVVSFEGPSKFGTESYDRVLISIGRRPVTRGLGLENTKVEVNERGFIVCDEQQRTADPNILAIGDVAGDPMLAHKATHEGRVAAEVLAGKNVAFDKAAIPAVVFTDPEIAWAGLTEGEAKAAGRKVDVEVYPWAASGRAQAIGVTNGLTKWLVDPETHRVLGCGIVGTGAGELIAEAVLAIEMGCEVTDITESVHPHPTLSETLMNAGEVHFGTATEIYKPKRK

SEQ ID NO: 21772 - protein, 313 aa, Pythium aphanidermatum
  misc_feature (5)..(5): Xaa can be any naturally occurring amino acid
  misc_feature (25)..(25): Xaa can be any naturally occurring amino acid
  misc_feature (304)..(304): Xaa can be any naturally occurring amino acid
  unsure (1)..(313): unsure at all Xaa locations
YTEGXELIDSVLDVVRKEAESCDCXQGFQITHSLGGGTGSGMGTLLISKIREEYPDRIMCTYSVCPSPKVSDTVVEPYNATLSVHQLVENADEVMCLDNEALYDICFRTLKLTTPTYGDLNHLVCAAMSGITTSLRFPGQLNSDLRKLAVNLIPFPRLHFFMVGFAPLTSRGSQQYRALTVPELTQQQFDAKNMMCAADPRHGRYLTAACMFRGRMSTKEVDEQMLNVQNKNSSYFVEWIPNNIKASVCDIPPKGLKMSATFIGNSTAIQEMFKRVSEQFTAMFRRKAFLHWYTGEGMDEMEFXEAESNMNDL

SEQ ID NO: 21773 - protein, 135 aa, Zea mays
MSSSRRSSSPDSNDTTDERKRKRMLSNRESARRSRARKQQRLEELVAEVARLQAENAATQARTAALERDLGRVDGDNAVVRARHAELAGRLQSLGGVLEVLQMAGAAVDIPEMVTDDPMLRPWQPSFPPMQPIGF

SEQ ID NO: 21774 - protein, 352 aa, Listeria monocytogenes str. 1/2a F6854
MQVSQGLMVARGDLGVEIPAEEVPIVQKELIRKCNKLGKPVITATQMLDSMQRNPRPTRAEASDVANAIFDGTDAIMLSGETAAGDYPVEAVKMMAKIAVRTEEVLVAQDKFALKLHENTDMTEAIGQAVGHTAKNLNVQTIVAATQSGHTARMISKYRPKSHIVAVTFNEHVYRGLALSWGVYPRLATPVSNTDEMFDLAVKESLASGVAKQGDLIIITAGVPVTESGTTNVMKIQLIGEKVVKGQGIGSKSVIGKAIVAKSNAEALEKAEEGGILIVKTTDKEILPAFEKSAAVVVEEGGLTSHAAVVGINLGIPVIVGAKDATSLVKDGEIITVDSRQGVVYNGKTATH

SEQ ID NO: 21775 - protein, 323 aa, Bacillus licheniformis ATCC 14580
MKPFVYVTKPVPKEIEEMLAEHCEYEIWTSRERIPRTTLLEKIKEADGLLTSGTKIDRELLSNALKLKIVSNNSVGYDNFDIEAMKEKSVIGTHTPYILDDTVADLAFGLILSSARRIAELDRYVREGKWTKSEDDESLFGSDVHHRTLGIIGMGRIGEQVAKRAALGFDMEVLYYSRSRKPDTEKKTGAVYTGFHELLERSDFIVLVTPLTDETYRLIGEAEFKKMKPSSIFINISRGKTVDEQALIQALKEGWIKGAGLDVFEKEPIEKDNPLLSLSNVTLVPHIGSSTHVTHVNMLKSAVQNLIDGLQGKRPKDIVKELR

SEQ ID NO: 21776 - protein, 417 aa, Streptomyces avermitilis MA-4680
MGRGVTRRRAVGNGVLVSTTETLIASADAHSAHTYHPLPVVVATADGAWMTDVEGRRYLDLLAGYSALNFGHGHRRLIDAARAQLERVTLTSRAFHHDRFAAFCTQLAELCGMEMVLPMNTGAEAVETAVKTARKWGYRVKGVPAEMAKIVVAGNNFHGRTTTIISFSTDPEARADFGPYTPGFEIVPYGDLTAMRSALTENTVAVLLEPIQGEAGVLVPPAGYLAGVRELTRDRNVLFVADEIQSGLGRTGRTFACEHEGVVPDVYVLGKALGGGIVPVSAVVASSEVLGVFRPGEHGATFGGNPLACAVALEVIAMLRSGEYQARAAELGEHLHRELGVLAGTGRVTAVRGRGLWAGVDVDPAYGTGREISEKLMDRGVLVKDTHGSTIRIAPPLVISKEDLDWGLAQLRGVLGV

SEQ ID NO: 21777 - protein, 520 aa, Neurospora crassa
MVHLTIIPKEDEIRDGLDIPLTGALKAVHLQLANDEDRFTTSVYGSKFAAADLPRHEMPDEEMPKEVAYRMIKDELSLDGNPLLNLASFVTTYMEEEAEKLMTESLPKNFIDYEEYPQTADIQNRCVSMIGRLFNAPVKDAEASSAVGTSSVGSSEAIMLGVLAMKKRWKNKRIAEGKPADKPNLIMSSAVQVCWEKATRYFEVEEKFVYCTPDRYVIDPKETVDLVDENTIGICCILGTTYTGEYEDVKAVNDLLVERGLDTPIHVDAASGGFVAPFVVPDLEWDFRLKNVVSINVSGHKYGLVYPGVGWVVWRSAEYLPQELVFNINYLGADQASFTLNFSKGASQVIGQYYQLIRLGKHGYRAIMSNLTRTADYLAESLAALGFIIMSQKSGQGLPLVAFRLKEDPDRTYDEFALAHQLRVRGWIVPAYTMAPKTEGLKMLRIVVREDFSRNRCDGLISDIRSCQGILEQMDKETVKKQQEFIHKHHVVSGKASHNHPKYHILWSESNSSRNQATPE

SEQ ID NO: 21778 - protein, 345 aa, Neurospora crassa
MRLPQNGQLIAEYIWIDSEGGTRSKSRTLPEKESQYLPEELPIWNFDGSSTGQAPGENSDVYLKPVAVFPDPFRGSPNILVLSECWNADGTPNKFNHRHEAAKLMEAHADQVPWFGLEQEYTLLDINDRPYGWPRNGFPAPQGPYYCGVGTGKVVQRDIVEAHYKCCLYAGVKISGTNAEVMPAQWEFQVGPCDGIEMGDHLWLARFLLHRVSEEFGAKVSFDPKPIPGDWNGAGLHTNFSTENMRKEGGMKYIEDAIKKLEARHKEHIAVYGEGNDKRLTGRHETGSIDSFTYGVANRGASIRIPRECGAKGYGYFEDRRPASNADPYQITGIIMETCFGAVSE

SEQ ID NO: 21779 - protein, 319 aa, Ustilago maydis 521
MPGLRLPHRVAVITGGGSGIGRECAILFASEGANLILADINLEACQQTADIVNERFSNAELPVKAIAVKCDVSKEDEVAAIVKRAVDEFGRLDVMFNNAGIMHPADDNALNTDEKIWDLTQAINVKGVWYGCKHAILAMRNNATDEAKKLHVGGSIINTASFVALRGAATPQIAYTASKGAVLAMTRELAMVHAREGIRVNSLCPGPLQTPLLMDFLNTPEKLNRRLTHLPLGRFGEAVEQAKAVLFRKLIPPHSHLVYVDNATDKLDSLRTLLRIRCTVATDESSYVLGHDLLVDGGLSAAYVTAEGQPVLPPPKSLV

SEQ ID NO: 21780 - protein, 268 aa, Bouteloua hirsuta
ASYAAAAMPALDVLPEKPHHGWESNGAAAVAPTPAPRRLDGKVAIVTGGARGIGEAIVRLFARHGARVVIADVDAAAGDALAAALGPQVSCVRCDVSVEDDVRRAVEWAVARHGRLDVLCNNAGVLGRQTRAAKSILSFDAGEFDRVLRVNALGAALGMKHAARAMAPRRAGSIVSVASVAGVLGELGPHAYTASKHAIVGLTKNAACELGAHGIRVNCVSPFGVATPMLINAWRQGHADAVPSDEEVEKMEVVVRGLATLKGPTLRP

SEQ ID NO: 21781 - protein, 458 aa, Zea mays
  misc_feature (17)..(17): Xaa can be any naturally occurring amino acid
  misc_feature (48)..(48): Xaa can be any naturally occurring amino acid
  misc_feature (255)..(255): Xaa can be any naturally occurring amino acid
  unsure (1)..(458): unsure at all Xaa locations
MYTLPVRPTTSSIVASXRHPRAVLLLRLRPPQAQAQAHPERPRLRRPXATVVGMDPTVERLKSGFQKFKTEVYDKKPELFEPLKSGQSPRYMVFACSDSRVCPSVTLGLQPGEAFTVRNIASMVPPYDKIKYAGTGSAIEYAVCALKVQVIVVIGHSCCGGIRALLSLKDGAPDNFHFVEDWVRIGSPAKNKVKKEHASVPFDDQCSILEKEAVNVSLQNLKSYPFVKEGLVGGTLKLVGAHYDFVKGQFVTWEXPPQDAIERLTSGFQQFKVNVYDKKPELFGPLKSGQAPKYMVFACSDSRVCPSVTLGLQPGEAFTVRNIAAMVPGYDKTKYTGIGSAIEYAVCALKVEVLVVIGHSCCGGIRALLSLQDGAPDTFHFVEDWVKIGFIAKMKVKKEHASVPFDDQCSILEKEAVNVSLENLKTYPFVKEGLANGTLKLIGAHYDFVSGEFLTWKK

SEQ ID NO: 21782 - protein, 455 aa, Spirodela punctata
MARLVLAVMLLLNAAILCSGGITSEFVRLQESAVDMPLHADVFRMPPGYNAPQQVHITQGDHEGRSIIVSWITPSEKGSSTVFYGTSENKLDQHAEGTVTMYKFYTYTSGYIHHCVLTDLKYDRKYFYKVGEGSAARLFWFKTPPEVGPDVPYTFGLIGDLGQTFDSNVTLTHYESNPGGQAVLYVGDLSYADVYPDHDNVRWDTWGRFVERSTAYQPWIWTTGNHEIDYAPEIGEYVPFKPFTHRYHVPHKSSGSGSPFWYSIKRASAYIIVLASYSAFGKYTPQSEWLEQEFPKVNRSETPWLIVLMHSPLYNSYNYHYMEGETMRVMYEPLFVTYKVDVIFAGHVHAYERSYRISNVAYNITDGKCTPTSDLSAPVYITVGDGGNQEGLASSMTEPQPNYSAYREASFGHAIFGIKNRTHAYYNWYRNQDGNAVEADSLWFFNRVWNPREES

SEQ ID NO: 21783 - protein, 268 aa, Bouteloua hirsuta
ASYAAAAMPALDVLPEKPHHGWESNGAAAVAPTPAPRRLDGKVAIVTGGARGIGEAIVRLFTRHGARVVIADVDAAAGDALAAALGPQVSCVRCDVSVEDDVRRAVEWAVARHGRLDVLCNNAGVLGRQTRAAKSILSFDAGEFDRVLRVNALGAALGMKHAARAMAPRRAGSIVSVASVAGVLGGLGPHAYTASKHAIVGLTKNAACELGAHGIRVNCVSPFGVATPTLINAWRQGHADAVPSDEEVEKMEEVVRGLATLKGPTLRP

SEQ ID NO: 21784 - protein, 396 aa, Triticum aestivum
MALSISAPTSSPFLPAPRQVGRWSSSPSSAKPAVFSLRRPVVVARAAAGNAPSSPAGAVVTELDVVSSFSEIVPDTVVFDDFEKFAPTAATVSSSLLLGIAGLPDTKFKSAIDTALVDGECNTMEKPGDRMSCYLTKALGNVGAELAHQVPGRVSTEIDARLAYDTQGIVQRVHELLQIYNEHDIPSERLLFKIPATWQGIEASRLLESEGTQTHLTFVYSFAQAAAAAQAGASVVQIFVGRIRDWAKNHSGDPEIDEALKKGEDAGLALVKKAYVYIHKNGYKTKLMAAAVRNKQDVFSLLGIDYIIAPLKILQSLDESVTDSDEKYGYVQRLTLSLDKMYNFSQEELVKWDQLSLAAAMGPAAEELLASGLEGYANQARRVEELFAKIWPPPNV

SEQ ID NO: 21785 - protein, 126 aa, Musa acuminata
REYRARERLNKERQEIISQLIQRNPAFRPPADYRPLKLQKKLYIPMKEYPGYNFIGLIIGPRGNTQKRMEKETGAKIVIRGKGSIKEGKHQQRRDKLLDPAENEDLHVLVEAETQESLGQDSSSSP

SEQ ID NO: 21786 - protein, 268 aa, Bouteloua hirsuta
ASYAAAAMPALDVLPEKPHHGWESNGAAAVAPTPAPRRLDGKVAIVTGGARGIGEAIVRLFTRHGARVVIADVDAAAGDALAAALGPQVSCVRCDVSVEDDVRRAVEWAVARHGRLDVLCNNAGVLGRQTRAAKSILSFDAGEFDRVLRVNALGAALGMKHAARAMAPRRAGSIVSVASVAGVLGGLGPHAYTASKHAIVGLTKNAACELGAHGIRVNCVSPFGVATPMLINAWRQGHADAVPSDEEVEKMEEVVRGLATLKGPTLRP

SEQ ID NO: 21787 - protein, 398 aa, Pseudomonas putida KT2440
MSLFSAVELAPRDPILGLNEAFNADPRTDKVNLGVGVYCNEEGRIPLLRAVIEAETQRAAQHASRGYLPIDGIATYDQAVQKLLFGAESPLLAAGRVVTVQAVGGTGALKIGADFLKRLSPNAVVAISDPSWENHRALFESAGFPVQTYRYYDAPTNDVNRAGMLEDLNALPSGSIVVLHACCHNPTGVDLNLDDWKNVLEVVKAKGHVPFLDMAYQGFGDGIAEDAFAVRLFAESGLEFFVSSSFSKSFSLYGERVGALSIVTASKDESTRVLSQVKRVIRTTYSNPPTHGATIVATVLNSAELRQMWETELAEMRERIHGMRKQMVSLLAEYGANRDFSFVGRQVGMFSYSGLTVEQVTRLKNDFGIYALDTGRIAVAALNQSNIHVVTKAIVEVL

SEQ ID NO: 21788 - protein, 268 aa, Bouteloua hirsuta
ASYAAAAMPALDVLPEKPHHGWESNGAAAVAPTPAPRRLDGKVAIVTGGARGIGEAIVRLFARHGARVVIADVDAAAGDALAAALGPQVSCERCDVSVEDDVRRAVEWAVARHGRLDVLCNNAGVLGRQTRAAKSILSFDAGEFDRVLRVNALGAALGMKHAARAMAPRRAGSIVSVASVAGVLGGLGPHAYTASKHAIVGLTKNAACELGAHGIRVNCVSPFGVATPMLINAWRQGHADAVPSDEEVEKMEEMVRGLATLKGPTLRP

SEQ ID NO: 21789 - protein, 380 aa, Arabidopsis thaliana
MADDKEMPAAVVDGHDQVTGHIISTTIGGKNGEPKQTISYMAERVVGTGSFGIVFQAKCLETGETVAIKKVLQDRRYKNRELQLMRVMDHPNVVCLKHCFFSTTSKDELFLNLVMEYVPESLYRVLKHYSSANQRMPLVYVKLYMYQIFRGLAYIHNVAGVCHRDLKPQNLLVDPLTHQVKICDFGSAKQLVKGEANISYICSRFYRAPELIFGATEYTTSIDIWSAGCVLAELLLGQPLFPGENAVDQLVEIIKVLGTPTREEIRCMNPHYTDFRFPQIKAHPWHKIFHKRMPPEAIDFASRLLQYSPSLRCTALEACAHPFFDELREPNARLPNGRPFPPLFNFKQEVAGSSPELVNKLIPDHIKRQLGLSFLNQSGT

SEQ ID NO: 21790 - protein, 451 aa, Oryza sativa (japonica cultivar-group)
MRECISIHIGQAGIQVGNACWELYCLEHGIQADGQMPSDRTVGGGDDAFNTSFSETGAGKHVPRAVFVDLEPTVIDEVRTGCYRQLFHPEQLINGKEDAANNFARGHYTIGKEIVDLCLDRIRKLADNCTGLQGFLVFNAVGGGTGSGLGSLLLERLSVDYGKKSKLGFTVYPSPQVSTSVVEPYNSVLSTHSLLEHTDVAVLLDNEAIYDICRRSLDIERPTYTNLNRLVSQVISSLTASLRFDGALNVDVNEFQTNLVPYPRIHFMLSSYAPVISAEKAYHEQLSVAEITNSAFEPSSMMAKCDPRHGKYMACCLMYRGDVVPKDVNAAVATIKTKRTIQFVDWCPTGFKCGINYQPPSVVPSGDLAKVQRAVCMISNSTSVVEVFSRIDHKFDLMYSKRAFVHWYVGEGMEEGEFSEAREDLAALEKDYEEVGSESDENEDGDDGDEY

SEQ ID NO: 21791 - protein, 451 aa, Oryza sativa (japonica cultivar-group)
MRECISIHIGQAGIQVGNACWELYCLEHGIQPDGQMPGDKTVGGGDDAFNTFFSETGAGKHVPRAVFVDLEPTMIDEVRTGDYRQLFHPEQVISGKEDAANNFARGHYTIGKEIVDLCLDRIRKLADNCTGLQGFLVFNAVGGGTGSGLGSLLLERLSVDYGKKSKLGFTVYPSPQVSTSVVEPYNSVLSTHSLLEHTDVAVLLDNEAIYDICRRSLDIERPTYTNRNRLVSQVISSLTASLRFDGALNVDVNEFQTNLVPYPRIHFMLSSYAPAISAEKAYHEQLSVAEITNSAFEPSSMMAKCDPRHGKYMACCLMYRGDVVPKDVNAAVATIKTKRTIQFVDWCPTGFKCGINYQPPSVVPGGDLAKVQRAVCMISNSTSVVEVFSRIDIKFDLMYSKRAFVHWYVGEGMEEGEFSEAREDLAALEKDYEEVGSEFDDGDEGDEGDEY

SEQ ID NO: 21792 - protein, 1289 aa, Arabidopsis thaliana
MAEPEKKRDQPFSQEKDEEKDLYLVHDEHESPLPLTVTSRVLYMLGDIASGPAYRFTQWLDLVRKRSATYGSSGFPHRLHRIDDMLIQVLSSAGERNTDPKSPPSRQSSEISLWERLGKASTVDIDSSCFSWNMLSSLHHTEHSSSTDHSEEDQSKPLEVTVNSGGVVFFALFNSSSSEDASRKEEAAVIKFASSRMATQSERLGYEFSKWLGVQIPQARVIHSCNPEWTLIKEATEKAQAKATSEGDEVGEMTCSELLEALELSRCLLLMSYVHGCPMLESMSSFETEEKAERAAAALGRILVLDLVIRNEDRLPCRQLRWRGNPANLLLTDRIVSSAKHHECSFDEAFDSAIKRYHPKDYRSIQRERRASSVDSRSRLSISDQMLVSQASDFSDITESPRSYDTGLMSPMSDRSVAADFHLVAIDSGVPRRPPAGKRASDQEIYPRLVELLLNSSQYSSNLLHEITEGSLGYPQAEDGEETSNVRSVVTPVVREFRNGFRAGLRDLQEFHIFLVTLHQKLDVLLRAFFSMMDKTMCADFDREDFAVPESPSHTHGHEVNHYPSPSKDRVPSDNSSDHSESDMQKSVPRTPNSENKEDGSSPKSRESWHGRSGKGGESLSSQRLAAKLRDFHKFAKVDAESNKELDQWNETLRNEVMKLCQENGFNTGFFEGSDNNSCTDAYELKVRLEHILERISLISKAANTEKPSMIQENLFIGGGLAARSIYTLQHLGITHVLCLCANEIGQSDTQYPDLFEYQNFSITDDEDSNIESIFQEALDFIKHGEETGGKILVHCFEGRSRSATVVLAYLMLQKKLTLLEAWSKLRKVHRRAQPNDGFARILINLDKKCHGKVSMEWRQRKPTMKVCPVCGKNAGLSSSSLKLHLQKSHRKLSSGSVDSAMNMEIQKALEALKLSTGRGSSASSNSFQSHPEQAQQQEEARYEWDLSLSTVVSSSSSSASDVIGAIEFDPTDNIVATAGISRKIRFYGLPSLLRNNAVSGTGVSFVDQATACEYYICTPAKLSSLRWRPGSGGRVIGSGDYDGVVMEYDLEKRTPVFERDEHGGRRVWSVDYTRHGGASTVGASGSDDGTMQVWDPRCPPEESVGVVRPAGICRSAVCCVEFDPSGGPAVAVGCADRKGYVYDIRKLVDPALTLQGHTKTVSYVRFLDGGTVVTAGTDGCLKLWSVEDGRVIRTYEGHVNNRNFVGLSVWRNGALFGCGSENNRVFVYDRRWGKPVWVDGFEPVGMNSGSDKRFVSSVCWRQSGVDQCTLVAGGSDGVLQVYVGKRKP

SEQ ID NO: 21793 - protein, 234 aa, Triticum aestivum
  misc_feature (165)..(165): Xaa can be any naturally occurring amino acid
  misc_feature (177)..(177): Xaa can be any naturally occurring amino acid
  misc_feature (189)..(189): Xaa can be any naturally occurring amino acid
  unsure (1)..(234): unsure at all Xaa locations
YPAITTGFFFFMWYFLNVIFNILNKKIYNYFPYPYFVSVIHLLVGVVYCLLSWAVGLPKRAPINATLLKLLFPVALCHALGHVTSNVSFATVAVSFAHTIKALEPFFNAAATQVCPWDRQVPLSLWLSLAPVVLGVSMASLTELSFSWKGFINAMISNISFTYRXVFIPKKAMTDMXDSTNVYAYISIXIALVVCIPTALIIEGPQLMQYGLNDAIAKVGMTKLYKSFRWIVTS

SEQ ID NO: 21794 - protein, 268 aa, Zea mays
MGRGRIEIKRIENNTSRQVTFCKRRNGLLKTYELSVLCDAEVALIVFSSRGRLYEYANNSVKATIERYKKAHTVGSSSGPPLLEHNAQQFYQQESAKLRNQIQMLQNTNRHLVGDSVGNLSLKELKQLESRLEKGISKIRARKSELLAAEISYMAERETELQNDHMTLRTEIEEGEQQLQQVTVARSVAAAAAAATNLELNPFLEMDTKCFFTGGPFATLDMKCFLPGSLQQMLEAQQRQMLATELNLGYQLAPPGSDAADNNPHHQF

SEQ ID NO: 21795 - protein, 224 aa, Zea mays
MPAPPPPAPAVYLVKKKRKKTPASVASAKKPWWPPKSGKQCLHCGSSSTPQWREGPLGRSTLCNACGVRYRQGRLLPEYRPLASPTFEPSEHANRHSQVLQLHRQRRSGSQSHHQQQQHPLPVEKHPPRPTAALQFPQRWHVKEEYPPTPPHQPLLHPVVAGSLAAGELRVGGMVDAAADADADAGHGGGNGNGLSNAPSSLDSLLLEGPSAPLLVDDDDPLID

SEQ ID NO: 21796 - protein, 403 aa, Glycine max
  misc_feature (327)..(327): Xaa can be any naturally occurring amino acid
  misc_feature (357)..(357): Xaa can be any naturally occurring amino acid
  unsure (1)..(403): unsure at all Xaa locations
MDRNGPKIKSTILHHLYEKQRQSPYYDNLCRPVSDLLPFIANGIRGVTTNPAVLTTQFFLHLKTLLFSIWFYFYLVSVCCVLTSQIFERAISSSNAYDDQLRELVGAGKDIESAYWELVVKDIQDTCKLLEPIYNETDGEDGHVSLAVSPKLANDTKGTIEAAKWLHNMVGSPCVYMKIPATDESISSMKEVISLGISVNATLIFCLPKYEAVIDAYLDGLESCGMTDLSKVSSAAAFYISRVDATLDKKLEQIGTTEALDLKGKGAVSQAVLAYQLYQKKFSGTRWERLEKRGAKKQRLMWASTKVKNPSYPDTFYVNSLIGPDTXQALHAFIDHGILSRTLDAKVSEAQDIYNAXLEKLGIDWSSVGSQLEHEMLDSFTKSFDNVLECMQKKAKLRDFISL

SEQ ID NO: 21797 - protein, 599 aa, Thanatephorus cucumeris
MARSTTSLFALSLVASAFARVVDYGFDVANGAVAPDGVTRNAVLVNGRFPGPLITANKGDTLKITVRNKLSDPTMRRSTTIHWHGLLQHRTAEEDGPAFVTQCPIPPQESYTYTMPLGEQTGTYWYHSHLSSQYVDGLRGPIVIYDPHDPYRNYYDVDDERTVFTLADWYHTPSEAIIATHDVLKTIPDSGTINGKGKYDPASANTNNTTLENLYTLKVKRGKRYRLRIINASAIASFRFGVQGHKCTIIEADGVLTKPIEVDAFDILAGQRYSCILKADQDPDSYWINAPITNVLNTNVQALLVYEDDKRPTHYPWKPFLTWKISNEIIQYWQHKHGSHGHKGKGHHHKVRAIGGVSGLSSRVKSRASDLSKKAVELAAALVAGEAELDKRQNEDNSTIVLDETKLIALVQPGAPGGSRPADVVVPLDFGLNFANGLWTINNVSYSPPDVPTLLKILTDKDKVDASDFTADEHTYILPKNQVVELHIKGQALGIVHPLHLHGHAFDVVQFGDNAPNYVNPPRRDVVGVTDAGVRIQFRTDNPGPWFLHCHIDWHLEEGFAMVFAEAPEDIKKGSQSVKPDGQWKKLCEKYEKLPEALQ

SEQ ID NO: 21798 - protein, 467 aa, Bradyrhizobium sp. HW13
MSIVNIAEVIESQTLNRKVVSLLLLSFLIMLCDGYDLQTISFASPSIVADWGIEKSAFGFVFTAGALGIMVGGFLFGSLADRIGRRPSFIIGTLLFSVMTLSTVLATTVTHLAVFRFIAGLGIGGVTPICFALNVEYVPKRFRATVVAVVMIGYMIGTGIGGILAAWLVPQHGWHVLFYIGGVAPLALMPLLVFALPESIKYLLLSNEHSKSVPLLVNALCPAAGATSDTRFVLDDTEDQAKLGSWKEIILSLFKGRLRRVTPVLWISFIASNMTVFLLAFWIPLITVSTGRSASLAAIGLTLYSLGGAFGGLLASRIVDMRGVAAVALIPLIASAVIIATGALEFSDAGFLTMMGVIGFFVFGGHLALMSVTGMFYPNSNRASGAGWALSVGKLGAIFGPALAGFVIASHPPLIDLFLIAAAPLPIVALGFFMLGRLGGAQAVATRAEDGGQANVEKPVLVHGSAS

SEQ ID NO: 21799 - protein, 478 aa, Bacillus anthracis str. A2012
MKIAGRNLNHHGTSAAFVKNKLLWKVEEMMKTKQTDELLAKDEQYVWHGMRPFSPNSTMVGAKAEGCWVEDIQGKRYLDGMSGLWCVNSGYGRKELAEAAYKQLQTLSYFPMSQSHEPAIKLAEKLNEWLGGEYVIFFSNSGSEANETAFKIARQYYAQKGEPHRYKFMSRYRGYHGNTMATMAATGQAQRRYQYEPFASGFLHVTPPDCYRMPGIERENIYDVECVKEVDRVMTWELSETIAAFIMEPIITGGGILMPPQDYMKAVHETCQKHGALLISDEVICGFGRTGKAFGFMNYDVKPDIITMAKGITSAYLPLSATAVKREIYEAFKGKGEYEFFRHINTFGGNPAACALALKNLEIIENENLIERSAQMGSLLLEQLKEEIGEHPLVGDIRGKGLLVGIELVNDKETKEPIDNDKIASVVNACKEKGLIIGRNGMTTAGYNNILTLAPPLVISSEEIAFVIGTLKTAMERI

SEQ ID NO: 21800 - protein, 572 aa, Thanatephorus cucumeris
MARTTFLVSVSLFVSAVLARTVEYNLKISNGKIAPDGVERDATLVNGGYPGPLIFANKGDTLKVKVQNKLTNPDMYRTTSIHWHGLLQHRNADDDGPAFVTQCPIVPQASYTYTMPLGDQTGTYWYHSHLSSQYVDGLRGPLVIYDPKDPHRRLYDIDDEKTVLIIGDWYHTSSKAILATGNITLQQPDSATINGKGRFDPDNTPANPNTLYTLKVKRGKRYRLRVINSSAIASFRMSIQGHKMTVIAADGVSTKPYQVDSFDILAGQRIDAVVEANQEPDTYWINAPLTNVANKTAQALLIYEDDRRPYHPPKGPYRKWSVSEAIIKYWKHKHGRGLLSGHGGLKARMMEGSLHLHGRRDIVKRQNETTTVVMDETKLVPLEHPGAACGSKPADLVIDLTFGVNFTTGHWMINGIPHKSPDMPTLLKILTDTDGVTESDFTQPEHTIILPKNKCVEFNIKGNSGLGIVHPIHLHGHTFDVVQFGNNPPNYVNPPRRDVVGATDEGVRFQFKTDNPGPWFLHCHIDWHLEEGFAMVFAEAPEAIKGGPKSVPVDRQWKDLCRKYGSLPAGFL

SEQ ID NO: 21801 - protein, 531 aa, Thanatephorus cucumeris
MLSSITLLPLLAAVSTPAFAAVRNYKFDIKNVNVAPDGFQRPIVSVNGLVPGTLITANKGDTLRINVTNQLTDPSMRRATTIHWHGLFQATTADEDGPAFVTQCPIAQNLSYTYEIPLHGQTGTMWYHAHLASQYVDGLRGPLVIYDPNDPHKSRYDVDDASTVVMLEDWYHTPAPVLEKQMFSTNNTALLSPVPDSGLINGKGRYVGGPAVPRSVINVKRGKRYRLRVINASAIGSFTFSIEGHRLTVIEADGIPHQPLPVDSFQIYAGQRYSVIVEANQTAANYWIRAPMTVAGAGTNANLDPTNVFAVLHYEGAPNAEPTTEQGSAIGTALVEENLHALINPGAPGGSAPADVSLNLAIGRSTVDGILRFTFNNIKYEAPSLPTLLKILANNASNDADFTPNEHTIVLPHNKVIGAQHHRGADHPIHLHGHVFDIVKSLGGTPNYVNPPRRDVVRVGGTGVVLRFKADNPGPWFVHCHIDCTWRLGSHLSLPRPPARFARVSSRSSPTMPGTSSAPSTRLFLPICSKW

SEQ ID NO: 21802 - protein, 337 aa, Monascus purpureus
MVVPKVGINGFGRIGRIVFRNAIEHEGVDIVAVNDPFIEVHYAAYMLKYDSTHGRFNGTVEFDGNTLIVNGKKIKFYAERDPAQIPWSETGAEYVVESTGVFTKQEKASLHLKGGAKKVIISAPSSDSPMFVMGVNNDQYTKDITVLSNASCTTNCLAPLAKVINDKFGIVEGLMTTVHSYTATQKVVDGPSNKDWRGGRTAAQNIIPSSTGAAKAVGKVIPSLNGKLTGMSMRVPTSNVSVVDLTARLEKAATYDEIKQAVKEASEGPLKGVLGYTEDDVVSSDLNGDPHSSIFDAKAGIALNSNFVKLVSWYDNEWGYSRRVIDLIAYIAQVDAQ

SEQ ID NO: 21803 - protein, 329 aa, Streptomyces avermitilis MA-4680
MTRTPVNVTVTGAAGQIGYALLFRIASGQLLGADVPVKLRLLEITPALKAAEGTAMELDDCAFPLLQGIDITDDPNVAFDGTNVGLLVGARPRTKGMERGDLLSANGGIFKPQGKAINDNAADDVKILVVGNPANTNALIAQAAAPDVPAERFTAMTRLDHNRALTQLAKKTGSTVADIKRLTIWGNHSATQYPDIFHASVAGKNAAEVVNDEKWLAEDFIPTVAKRGAAIIEARGASSAASAANAAIDHVYTWVNGTADGDWTSMGIPSDGSYGVPEGLISSFPVTTKDGRYEIVQGLEINEFSRARIDASVKELEEEREAVRALGLI

SEQ ID NO: 21804 - protein, 268 aa, Bouteloua hirsuta
ASYAAAAMPALDVLPEKPHHGWESNGAAAIAPTPAPRRLDGKVAIVTGGARGIGEAIVRLFARHGARVVIADVDAAAGDALAAALGPQVSCVRCDVSVEDDVRRAVEWAVARHGRLDVLCNNAGVLGRQTRAAKSILSFDAGEFDRVLRVNALGAALGMKHAARAMAPRRAGSIVFVASVAGVLGGLGPHAYTASKHAIVGLTKNAACELGAHGIRVNCVSPFGVATPMLINAWRQGHADAVPSDEEVEKMEEVVRGLATLKGPTLRP

SEQ ID NO: 21805 - protein, 329 aa, Escherichia coli O157:H7 EDL933
MKLAVYSTKQYDKKYLQQVNESFGFELEFFDFLLTEKTAKTANGCEAVCIFVNDDGSRPVLEELKKHGVKYIALRCAGFNNVDLDAAKELGLKVVRVPAYDPEAVAEHAIGMMMTLNRRIHRAYQRTRDANFSLEGLTGFTMYGKTAGVIGTGKIGVAMLRILKGFGMRLLAFDPYPSAAALELGVEYVDLPTLFSESDVISLHCPLTPENYHLLNEAAFDQMKNGVMIVNTSRGALIDSQAAIEALKNQKIGSLGMDVYENERDLFFEDKSNDVIQDDVFRRLSACHNVLFTGHQAFLTAEALTSISQTTLQNLSNLEKGETCPNELV

SEQ ID NO: 21806 - protein, 268 aa, Bouteloua hirsuta
ASYAAAAMPALDVLPEKPHHGWESNGAAAVAPTPAPRRLDGKVAIVTGGARGIGEAIVRLFTRHGARVVIADVGAAAGDALAAALGPQVSCVRCDVSVEDDVRRAVEWAVARHGRLDVLCNNAGVLGRQTRAAKSILSFDAGEFERVLRVNALGAALGMKHAARAMAPRRAGSIVSVASVAGVLGGLGPHAYTASKHAIVGLTKNAACELGAHGIRVNCVSPFGVATPMLINAWRQGHADAVPSDEEVEKMEEVVRGLATLKGPTLRP

SEQ ID NO: 21807 - protein, 416 aa, Virgibacillus pantothenticus
MQIFEELESAVRSYSRGWPTIFEKAKGYKLWDIDGNMYIDFFAGAGALNYGHNHDTMQEKLIAYIQDDHIIHSLDMGTTPRKTFLETFHNTILKPRNLDYKIMFPGPTGTNTVESALKIARKVTGRDTVISFTNAFHGMTIGSLSVTGNSFKRHGAGVPLHHSVSMPYDKYVNDQDSIAYLERFLEDSGSGVALPAAIILETVQGEGGINAASIEWLQKIASICERWDILLIIDDVQAGCGRTGTFFSFEPAGIAPDIVCLSKSIGGIGLPMAITLIKPEYDQWGPGEHNGTFRGNNLAFIAATEALTAFWQDNTFSKSIIQKSKLVRQRIDRIIDKFPSLQGEARGRGLMQGIVIPEPNCASEICKAAFDIGLIVETSGPNDEVVKFLPPLIIDKEGINQGFDILEVSMEHVLKK

SEQ ID NO: 21808 - protein, 173 aa, Nephroselmis olivacea
MFDFLTSLQTYRQEAAQAAQYIGQGFGVTFDHMSRRPITIHYPYEKLIPSERFRGRIHFEFDKCIACEVCVRVCPINLPVVDWDYQKSVKKKQLRSYSIDFGVCIFCGNCVEYCPTNCLSMTEEYELSVYDRHELNFDHVALGRVPTSVVQDTLVTPVLGLGYLPKGELSSLP

SEQ ID NO: 21809 - protein, 268 aa, Bouteloua hirsuta
ASYAAAAMPALDVLPEKPHHGWESNGAAAVAPTPAPRRLDGKVAIVTGGARGIGEAIVRLFARHGARVVIADVDAAAGDALAAALGPQVSCVRCDVSVEDDVRRAVEWAVARHGRLDVLCNNAGVLGRQTRAAKSILSFDAGEFDRVLRVNALGAALGMKHAARAMAPRRAGSIVSVASVAGVLGGLGPHAYTASKHAIVGLTKNAACELGAHGIRVNCVSPFGVATPMLINAWRQGHADAVPSDEEVEKMEEVVRGLATLKGPTLRP

SEQ ID NO: 21810 - protein, 93 aa, Cryptococcus neoformans var. neoformans
WHGLRQLGTAFMDGVPGITQCPIPPGGSFTYNFTVSHQSGTFWWHSHYSNSMADGIWGPLIVHSPNEPLQRGRDYDEDRIVFITDWMHDNSEI

SEQ ID NO: 21811 - protein, 268 aa, Bouteloua hirsuta
ASYAAAAMPALDVLPEKPHHGWESNGAAAVAPTPAPRRLDGKVAIVTGGARGIGEAIVRLFTRHGARVVIADVDAAAGDALAAALGPQVSCVRCDVSVEDDVRRAVEWAVARHGRLDVLCNNAGVLGRQTRAAKSILSFDAGEFDRVLRVSALGTALGMKHAARAMAPRRAGSIVSVASVAGVLGGLGPHAYTASKHAIVGLTKNAACELGAHGIRVNCVSPFGVATPMLINAWRQGHADAVPSDEEVEKMEEVVRGLATLKGPTLRP

SEQ ID NO: 21812 - protein, 268 aa, Bouteloua hirsuta
ASYAAAAMPALDVLPEKPHHGWESNGAAAVAPTPAPRRLDGKVAIVTGGARGIGEAIVRLFARHGARVVIADVDAAAGDALAAALGPQVTCVRCDVSVEDDVRRAVEWAVARHGRLDVLCNNAGVLGRQTRAAKSILSFDAGEFERVLRVNALGAALGMKHAARAMAPRRAGSIVSVASVAGVLGGLGPHAYTASKHAIVGLTKNAACELGAHGIRVNCVSPFGVATPMLINAWRQGHADAVPSDEEVEKMEEVVRGLATLKGPTLRP

SEQ ID NO: 21813 - protein, 348 aa, Gloeobacter violaceus PCC 7421
MTRSSAAAKRPSGGLPPGLLIRLGRLVWTTLWRAMMARLAPSDRTGAYVRPAGQFRGVIGAHGPYPPEAGRYRLYVGLGCPWAHRTLVVRALKGLEEAIGVSVVQPSPEAGGWVLERPEEGCRSLAQLYALARPGYTGRATVPVLWDTRTRAIVNNESAEIIVILDGEFNEFARRPDLELYPAELRETIDRWNEKTYHSVNNGVYRCGFAQTQEAYDRAIEELFTALDTLDAALETRRYLCGERVTLADVRLFTTLFRFDIAYHGLFKCNRRRIRDYRNLGAYLRDLYQLAGVAGTCDAESVKRDYYGNLFPLNPGGIVPAGPDPANLNEPHGRERLGALAGGLDEIA

SEQ ID NO: 21814 - protein, 396 aa, Vibrio cholerae O1 biovar eltor str. N16961
MQCGLLKHRLLKFFSTEAIMTTNQRSIKAPQTVVVKLGTSVLTGGTLALDRAHMVELARQCAELKKQGHSVVIVTSGAIAAGREHLGYPALPNAISSKQLLAAVGQSRLIQVWESLFAIYGIKIGQMLLTRADLDDRERFLNARDTINALVENGIVPVVNENDAVATNEIKVGDNDNLSALVGILCGADKLLLLTDQKGLFTADPRKDPNAQLIKEVTTIDDTLRKIAGGSGTTLGTGGMATKLQAADIARRAGIEVIIAAGRAPNVIFDSLSDEPQGTRFLALEEALENRKRWILAGPAASGDIVIDDGAVKAVQTKGSSLLAKGVVRVQGQFARGEVVRVLDKQSHLIARGIAAYSNDELAQIAGKHSKEIIDILGYDHGSEVIHRDDMVVIQE

SEQ ID NO: 21815 - protein, 263 aa, Physcomitrella patens
MHVRNDSSGSSLVAMLASCSPAAAVQAQPGGGGMEDTVSCGQKRPYYSTIEASGEDPGEEDVGDDCIQQSKKRRLTFDQVRSHEKNFEIENKLEPERKMQLANELGLQPRQVAVWFQNRRARWKTKQLERDYEVLTLDYNRLKSEFEAVLQEKQELQDEMECLTEKIQTAIPNSADPILEKRKRIISMSQPSSLKTFEGPVKSERIAAEANGRNDALTPCKEEGSKEEGSKETSSDSISQVKYLTRTAFVLWIAARFSHCPIV

SEQ ID NO: 21816 - protein, 525 aa, Streptomyces aureofaciens
MSASTSRTLPPEIADSESVMALIERGKAEGQIAGDDVRRAFEADQIPATQWKNVLRSLNQILEEEGVTLMVSAAESPRRTPRKSVAAKSPAKRTATKTVAAKTAAPPAAAGIVADTGTGTAEPDITDALAEEPVAEPAAKKTAARKTAAKKAAPAKKTAAKKTAAKKTAAKKDADEDGEETADEGPDAPKAEAEEEEEGGENKGFVISDDEDDAPAQQVVVAGATADPVKDYLKQIGKVPLLNAEQEVELAKRIEAGLFAEDKLANSDKLAPKLKRELEIIAEDGRRAKNHLLEANLRLVVSLAKRYTGRGMLFLDLIQEGNLGLIRAVEKFDYTKGYKFSTYATWWIRQAITRAMADQARTIRIPVHMVEVINKLARVQRQMLQDLGREPTPEELAKELDMTPEKVIEVQKYGREPISLHTPLGEDGDSEFGDLIEDSEAVVPADAVSFTLLQEQLHSVLDTLSEREAGVVSMRFGLTDGQPKTLDEIGKVYGVTRERIRQIESKTMSKLRHPSRSQVLRDYLD

SEQ ID NO: 21817 - protein, 78 aa, Musa acuminata
MSCSGENCGCGSSCSCGSGCGGCRKLTDLGEERSSTSQTMIMGVAPQKGHFEELETAAGSENGCKCGSNCTCDPCNCK

SEQ ID NO: 21818 - protein, 272 aa, Physcomitrella patens
QVQCGNFLARQCWGSPGYSGIILRQQPDLSEVQGVFNPSTARLDMASNVGRRGYSRGGSNVVPVRNDSSTDTLVAMLASCSPVALQVQRTGGSLEDAVVSCGQKRSFFPLFEASREDAGDEDLGDDCTHNVEKKRRLTFDQVRSLELNFEVENKLEPERKMQLAKELGLQPRQVAVWFQNRRARWKTKQLERDYEVLTLDYNRLKSEFEAVLQEKQELQGEMECLTGRLQTSPQLASGDGVSEKPSKKSSKAVASQLSLQKMVSEECVEVRE

SEQ ID NO: 21819 - protein, 268 aa, Mycobacterium avium subsp. paratuberculosis K-10
MVNELAGKVAIVTGGASGIGRGIVERFVAEGARVVIADIETERGERLAAELGGEAVFRRTDVSDIEQVGALVAAAVEKFGGLHVMVNNAGISSPLRRLLDDDLADFHRVMGVNVLGVMAGTRDAARHMADNGGGTIINLTSIGGIQAGGGVMTYRASKAAVIQFTKAAAIELARYDIRVNAIAPGNIPTPILGKSAGDMDPEQRERFEARIREGMREDRPLKREGTPDDVAEAALYFATDRSRYVTGTVLPVDGGTSAGKAMRSKRQG

SEQ ID NO: 21820 - protein, 160 aa, Oenococcus oeni PSU-1
MSIYDYKATLENGESYKLDKYKGKIMVIVNTATKCGFAPQFEELEKIYKQFKDSGLVVLGFPSNQFKQELDSSQAAAEACRTTYGVTFLMHEINDVNGKDELPLFSYLKDNAPGAIGKSIKWNFTKFLVKQDGEVAKRYAPKTDPEKMIPDIEELLQLQK

SEQ ID NO: 21821 - protein, 528 aa, Streptomyces aureofaciens
MSLSPSRTFPPEIAESEALVALVERGREQGHINGDDVRQAFEAGRIPVDQWKRVLRSLNQVLDEEGVALHVSAAPATKAAAKKPRKAAAAPARTVTKKAAAPPRPIGARKTSAAAPAAAAAISAPSAAATGDEATAEAAAEPKKRTVKKTAAKKATATKKTAATKKAGAKDGDDAENPAVEGEDWAVEDLADEAEEETPKAGGTQGFVLSDDDEDDAPAQTVMVAGATADPVKDYLKLIGKVPLLNAEQEVELAKRIEAGLFSEYKLEEEEDHKPAFKRELEILVEDGRRAKNHLLEANLRLVVSLAKRYTGRGMLFLDLIQEGNVGLIRAVEKFDYTKGFKFSTYATWWIRQAITRAMADQSRTIRIPVHMVEIINKLARVQRQMLQDLGREPTPEELGKELDMTPEKVIEVQKYGREPISLHTPLGEEGDSEFGDLIEDSEAVVPADAVSFTFLQEQLQSILGTLSEREAGVVSMRYGLNDGQPKTLDEIGRVYGVTRERIRQIESKTMSKLRHPSRSQVLRGYLD

SEQ ID NO: 21822 - protein, 271 aa, Oryza sativa
RSRQRKPYFTTSRRSPRDFARRRRRRSPSREKLVAGVPLHPSSPAMAITLSNVNSEAGLQKLDEYLLTRSYISGYQASKDDMTVFTSLPSAPAASYVNVTRWYDHISALLRSSGVTAEGEGVKVESTACSVSPTADQKAPAADEEDDDDVDLFGEETEEEKKAAEERAAAVKASGKKKESGKSSVLLDVKPWDDETDMAKLEEAVRNVKMEGLLWGASKLVPVGYGIKKLQIMMTIVDDLVSVDSLIEDYFYTEPANEFIQSCDIVAFNKI

SEQ ID NO: 21823 - protein, 84 aa, Glycine max
  misc_feature (49)..(49): Xaa can be any naturally occurring amino acid
  misc_feature (51)..(51): Xaa can be any naturally occurring amino acid
  misc_feature (64)..(64): Xaa can be any naturally occurring amino acid
  unsure (1)..(84): unsure at all Xaa locations
ISSPWYYFIYHRFAALNGGSNSEFGGFDFSCFSYGWYFTFVQGVVYLFXIXLQGFTSKPMVNPXETYVKLSAVLMGSHGLTKGS

SEQ ID NO: 21824 - protein, 643 aa, Catharanthus roseus
MNLGGGQLVKSMAVPSSSASWKSGGDGVSDQFPAGLRVLVVDDDPTCLRILEKMLKNCLYEVTKCNRAEIALKLLRDNRNGYDIVISDVHMPDMDGFKLLEQVGLEMDLPVIMMSADDSKNVVMKGVTHGACDYLIKPVRIEALKNIWQHVVRKGKHEWKEKDYEQSGSVEDGERQQKPNEDVDYSSSANEGNWKNSKKRKDDEEDQEEKDDSSTLKKPRVVWSVELHQQFVAAVNQLGIDKAVPKKILELMNVPGLTRENVASHLQKYRLYLRRVSGVSQHQNGLNNSFMGTPDATFGSMSSINGLDFQALAATGQIPAQSLASLQAAAIGRPTSKPTISMPVVDQRNLFSFEPHKLRFGEGQQQLNGSTKQISLLHGIPTNMEPKQLASLNQSAQTFGGINMQVSSQASQGNTLLMQMTQPMSRAPMLNENNASQISRLPSSVGQAILSNGIPSGVLGRNGIVDSVRGPVYTPVSQTSSLVDFSVSNSAELPGSTFPHASNSGISSLTPKGMMQEEVNSEGKGSRGFPSSYDIFSELQQHKTQDWGLQNVGSTFDGTQHSSIQGSLEGGRNNPPNFGQQFSSYMVDNSLRIKSERHPDANCQTNLFPQLFGQDDLMSALLKQEGIGSVESDFGFDGYALDL

SEQ ID NO: 21825 - protein, 343 aa, Haemophilus somnus 2336
MSKILLPTSTAGSLPKPVWLAEPEKLWSEWKYQGDELFQAKRDALLVSLAEQVAAGIDIISDGEQTRQHFVTTFIEHLEGVDFNKRKTVRIRNRYDANVPSVIGEVSRPSSVFVDDAKFLRKHTDKPIKWALPGPMTMIDTLYDAHYKSREKLAWEFAKILNEEAKELEAAGVDIIQFDEPAFNVFFDELNDWGVAALERAAEGLKCETAVHICYGYGIKANTDWKQTLGSEWRQYEESFPKLQQSKIDIISLECQNSCVPMELIELVRGKKVMLGAIDVATNIIETPEQVADILRKALQFVDAKNLYPCTNCGMAPLSRQVANSKLNALSQGAAIIRAELAG

SEQ ID NO: 21826 - protein, 740 aa, Catharanthus roseus
MESCNCIEPQWPADELLMRYQYISDFFIALAYFSIPLELIYFVKKSAVFPYRWVLVQFGAFIVLCGATHLINLWTFTMHSRTVAVVMTTAKVLTAVVSCATALMLVHIIPDSLSVKTRELFLKNKAAELDREMGLIRTQEETGRHVRMLTHEIRSTLDRHTILKTTLAELSRTLALEECALWMPTRSGVELQLSYTLRLPNPVGFTVPILLPVINQVFSTNRAVKISPNSPVARLRPTGKYMPGEVVAVRVPLLHLSNFQINDWPELSTKRYALMVLMLPSDSARQRHVHELELVEVVADQVAVALSHAAILEESMRARDLLMDQNVALDLARREAETAIRARNDFLAVMNHEMRTPTHAIIALSSLLQETELTPEQRLMVETILKSSNLLATLINDVLDLSRLEDGSLQLDIATFNLHSLFREVLNLIKPITSVKRLFATLSLAPDIPEYAISDEKRLMQIMLNVVGNAVKFTKEGGISITAFVAKSDSLRDPRAPEFFPVPSDSHFYLRVQVKDSGSGINPQDIPQLFTKFAQSQTLATRNSGGGGLGLAICKRFVNLMEGQIWLESDGLGKGCTAIFMIKLGIPGRSSEAKLPLVSRVPADHVQTTFPGLKVLLMDDNGVSRMVTKGLLLQLGCEVTTVSAGDECLRVISNEHRVAFMDVSIPGKDIYEVAVRIHEKFSKRLDRPLIIALTANADRVMKENCLRVGMDGVVQKPISVDKMRSVLSELLDHGVLLEAQ

SEQ ID NO: 21827 - protein, 526 aa, Brassica napus
SASATTESDIEETLKRLLQLNKTPEEVFDALKNQTVDLVLTAHPTQSVRRSLLQKFGRIRDCLTQLYAKDITPDDKQELDEALQREIQAAFRTDEIRRTPPTPQDEMRAGMSYFHETIWKGVPKFLRRVDTALKNIGINERVPYNAPLIQFSSWMGGDRDGNPRVTPEVTRDVCLLARMMAANLYFSQIEDLMFEMSMWRCNEELRVRAEVQRCAKRDAKHYIEFLKQIPSNEPYRAIPRDVRDKLYNTRERARQLLSSGVSDIPEDSVFTSVDQFLEPLELCYRSLCDCGDRPIADGSLLDFLRQVSTFGLALVKLDIRQESDRHTDVLDAITQHLGIGSYKEWSEDKRQEWLLSELSGKRPLFGHDLPKTEEIADVLDTFKVISELPHDSFGAYIISMATAPSDVLAVELLQRECGITHPLRVVPLFEKLADLENAPASVARLFSIEWYRNRINGKQEVMIGYSDSGKDAGRLSAAWQLYKTQEELVKVAKEYGVKLTMFHGRGGTVGRGGGPTHLAILSQPPD

SEQ ID NO: 21828 - protein, 448 aa, Streptococcus pneumoniae R6
MTSAKEYIQSVFETVKARNGHEAEFLQAVEEFFNTLEPVFEKHPEYIEENILARITEPERVISFRVPWVDRDGKVQVNRGYRVQFNSAVGPYKGGLRFHPTVNQGILKFLGFEQIFKNVLTGLPIGGGKGGSDFDPKGKTDAEVMRFCQSFMTELQKHIGPSLDVPAGDIGVGGREIGYLYGQYKRLNQFDAGVLTGKPLGFGGSLIRPEATGYGLVYYTEEMLKANGNSFAGKKVVISGSGNVAQYALQKATELGATVISVSDSNGYVIDENGIDFDLLVDVKEKRRARLTEYAAEKATATYHEGSVWTYAGNYDIALPCATQNEINGEAAKRLVAQGVICVSEGANMPSNLDAIKVYKENGIFYGPAKAANAGGVAVSALEMSQNSLRLSWTREEVDGRLKDIMTNIFNTAKTTSETYGLDKDYLAGANIAAFENVANAMIAQGIV

SEQ ID NO: 21829 - protein, 765 aa, Listeria monocytogenes str. 1/2a F6854
MVKAISSNLGYPRLGEKREWKRALEKFWNGAISEEELLAETKALRLHALKKQQEKGIDLIPVGDFSFYDQVLDTSVTFGIIPKRFQHDGGKVSLNTYFDIARGKSDAVASEMTKWFNTNYHYIVPELADADPKVLDNRALYYYEEAKKELGIEGKPVLVGPVTYLKLGKGNDAENFEALLDKFIPAYVEILRELERAGAKWVQIDEPYLATSFDKSEIKLFEKVYQAFQTAVPNLKIELQTYFESLDYYEEIVNLPVAAIGIDFVHDHGDSLEALKAHGFPEDKYLAAGVIDGRNVWRSDLDAKLSLLTEIADYVTDGKLIVQPSNSLLHVPVTKLSEPDLDEVILGGLSFADQKLDEIAILTKALTDGAESVTAELEDARAAVTALNESSHRNNLEVQEAIANLENVRVDRELPFAERIKLQHAWLNLPLFPTTTIGSFPQSPEVRKTRADWLKGNITDAEYNAFIEKETARWIKIQEELDIDVLVHGEFERTDMVEYFGQKLAGFQATKFGWVQSYGSRAVRPPLIYGDVAFTEEITVKESVYAQSLTKRPVKGMLTAPVTIINWSFVRDDVPESVVANQVGLALRKEVEALERNGIKVIQVDEPALREGLPLKQARWEKYLNDAVYSFKLTTASVQNDTQIHTHMCYSDFDDIIDTISALDADVISIETSRSHGEIISTFEEVTYDKEIGLGVYDIHSPRVPTVTEIQDNIRRALRAIDAKQFWINPDCGLKTRKEPETIAALQDMIKATKEVRAEYQVLEK

SEQ ID NO: 21830 - protein, 157 aa, Arabidopsis thaliana
MSLIPSFFGNNRRSNSIFDPFSLDVWDPFKELQFPSSLSGETSAITNARVDWKETAEAHVFKADLPGMKKEEVKVEIEDDSVLKISGERHVEKEEKQDTWHRVERSSGQFSRKFKLPENVKMDQVKASMENGVLTVTVPKVEEAKKKAQVKSIDISG

SEQ ID NO: 21831 - protein, 274 aa, Glycine max
MDENSATNGTHEVVLDVNRDVSRTTQASRSCVNVSFLQKLVAEVVGTYFLIFAGSASVVVNKNNNNVVTLPGISIVWGLVVMVLVYSVGHISGAHFNPAVTIAFASTKRFPLKQVPVYVVAQVVGSTLASGTLRLLFSGKETQFSGTLPSGSNLQAFVIEFLITFFLMFVISGVATDDRAIGELAVIAVGSTVLLNVMFAGPITGASMNPARSIGPAILHNEYRGIWIYIVSPTLGAVAGTWVYNTIRYTDKPLREITKSTSFLKGVGRSGSSR

SEQ ID NO: 21832 - protein, 199 aa, Zea mays
  misc_feature (19)..(19): Xaa can be any naturally occurring amino acid
  misc_feature (25)..(25): Xaa can be any naturally occurring amino acid
  misc_feature (35)..(36): Xaa can be any naturally occurring amino acid
  misc_feature (58)..(59): Xaa can be any naturally occurring amino acid
  unsure (1)..(199): unsure at all Xaa locations
DNRFFRNQAFYTFNMPYIXQSRLVXSNLYFISQFXXRKFSGNFFVNLLGQWKESEYSXXSIPVSGLAYLITAPASFSDMAAHPFHALFYIVFMLTACALFSKTWIEVSGSSARDVAKQLKEQQMVMPGHRESNLQKELNRYIPTAAAFGGVCIGALTVLADFMGAIGSGTGILLAVTIIYQYFETFEKEKASELGFFGF

SEQ ID NO: 21833 - protein, 351 aa, Neisseria meningitidis Z2491
MTILSDVKALGQQIWLDNLSRSLVQSGELAQMLKQGVCGVTSNPAIFQKAFAGDALYADEVAALKQQDLTPKQRYETMAVADVRAACGVCLAEHESTGGKTGFVSLEVSPELSKDAQGTVEEARRLYAAIGCKNAMIKVPATDAGIDALETLVSDGISVNLTLLFSRAQTLKAYAAYARGIAKRLAAGQSVAHIHVVASFFISRVDSALDTTLPDRLKGKIAIALAKAAYQDWEQYFTAPEFAALEAQGANRVQLLWASTGVKNPAYPDTLYVDSLIGAHTVNTVPDATLKAFIDHGTAKATLTEGADEAQAQLAEIAALGIDVETLAARLQEDGLKQFEEAFEKLLAPLV

SEQ ID NO: 21834 - protein, 268 aa, Bouteloua hirsuta
ASYAAAAMPALDVLPEKPHHGWESNGAAAVAPTPAPRRLDGKVAIVTGGARGIGEAIVRLFARHGARVVIADVDAAAGDALAAALGPQVSCVRCDVSVEDDVRRAVEWAVARHGRLDVLCNNAGVLGRQTRAAKSILSFDAGEFDRVLRVNVLGAALGMKHAARAMAPRRAGSIVSVASVAGVLGGLGPHAYTASKHAIVGLTKNAACELGAHGIRVNCVSPFGVATPMLINAWRQGHADAVPSDEEVEKMEEVVRGLATLKGPTLRP

SEQ ID NO: 21835 - protein, 94 aa, Filobasidiella neoformans
WHGLRQLGTAFMDGVPGITQCPIPPGSSFTYQFTVCHQSGTFWWHSHYTNSMSDSIWGPLIVHSPNEPLQRGRDYDEDRIVFITDWVHDNSEVV

SEQ ID NO: 21836 - protein, 1406 aa, Frankia sp. CcI3
MSPAYDPQPSARHDLDAPGGDATATIVPHASLPVDDTRASRAAADELIADLLHGLTRLCEGDFSTRLAARDGYAGDVVRKFDELAAIQERHARELARVSKVIRRDGRLTLRMEDLGNPGGWSDMTQAVNSLIDDLARPTHEVARVIAAVAEGDLSQHMALEIAGQPVRGEFLRIGTTVNTMVDQLSSFADEVTRVAREVGTEGNLGGQAKVKGVSGVWRDLTESVNSMAGNLTSQVRNIAQVTTAVAQGDLSQKITVDARGEIHELKSTVNTMVDQLSAFADEVTRMAKEVGTEGKLGGQAQVKGVSGVWRDLTDSVNVMAGNLTTQVRSIAEVAAAVARGDLTRQITVDARGEVAGLAHTLNTMVDQLSSFADEVTRVAWEVGTEGNLGGQAHVRAVSGVWRDLTESVNSMAGNLTSQVRNIALVATAVARGDLSQKITVAAQGEILELKDTLNTMVDQLSSFADEVTRVAREVGTEGNLGGQAHVRGVSGVWRDLTESVNSMAGNLTSQVRNIALVTTAVARGDLSQKITVTAQGEIAELKDTVNTMVDQLSSFAAEITRVGREVGVEGKLGGQATVAGVAGTWKDLTDNVNQLASTLTIQLRAIGDVSTAVTRGDLTRSISVEAEGEVAELKDNINQMIARLRETTEVNAQQDWLKSNLARIGSKMQGQRDLYAVCQMIISEMTPAVNAQQGTVYLLDFIEGDKLRYVAGYGSVPRRRSDGTFLFGEGLIGQAALERDRIRVEHVPAGYLNIRSGLGEAPPCDLVVVPVVFENQVLGVIELASFSPFSELHLTLVDQLVDTIGVVLNTIMANARTEELLAQSQRLTQELRSQSVELQRTNNELEEKAALLEEKNHEIELARIGLEEKAEQLALSSQYKSEFLANMSHELRTPLNSLLILAKLLADNPDRNLSRKQIDFAETIHSAGSELLELINDILDLSKVEAGKMNVDATTVRTAALCDAVAGVFGPVAEEKGLSFQVNLAPDVPAEFVTDEQRLQQVLKNLLSNAVKFTDTGTVRLDVTVARPDLPFLSPSLCSAGTVLSFAVTDTGIGVAVEKLRMIFEAFQQADGTTSRRYGGTGLGLSISKEIARLLGGAIAVSSVVGRGSTFTLYLPSAPPAQTPPFGVTPGEPDNVLMIVDPSGQYLGRRSGEGVDAEPGGGPAPSAGRDAGPANGWQNPDADRFGTAALAPSSPSSSSSLSPTRSGPGAGGTAGHGDAGGIGGAHWSAAASGPAEGSAAFTSGWRPSEPVTVGTPFLTESTESTESASRPLTEGSEGSDPLVGTTVLVVDDDVRNVFALTSALEMYGMRVLYADNGHDAIRMLQQDTPPVHLVLMDVMLPGMDGNETTSMIRDMPAFADLPILVLTAKAMPGDREKSITAGATDYITKPVDLEHLLGVMRSYLY

SEQ ID NO: 21837 - protein, 268 aa, Bouteloua hirsuta
ASYAAAAMPALDVLPEKPHHGWESNGAAAVAPTPAPRRLDGKVAIVTGGARGIGEAIVRLFTRHGARVVIADVDAAAGDALAAALGPQVSCVRCDVSVEDDVRRAVEWAVARHGRLDVLCNNAGVLGRQTRAAKSILSFDAGEFERVLRVNALGAALGMKHAARAMAPRRAGSIVSVASVAGVLGGLGPHAYTASKHAIVGLTKNAACELGAHGIRVKCVSPFGVATPMLINAWRQGHADAVPSDEEVEKMEEVVRGLATLKGPTLRP

SEQ ID NO: 21838 - protein, 342 aa, Zea mays
MERYEVIRDIGSGNFGVTKLVRDVRTKELFAVKFIERGQKIDEHVQREIMNHRSLKHPNIIRFKEVVLTPTHLAIVMEYAAGGELFERICSAGRFSEDEARFFFQQLISGVSYCHSMQVCHRDLKLENTLLDGSVAPRLKICDFGYSKSSVLHSQPKSTVGTPAYIAPEVLSRKEYDGKVADVWSCGVTLYVMLVGAYPFEDPDDPKNFRKTITRILSVQYSIPDYVRVTMECGHLLSRIFVGNPEQRITIPEIKKHPWFLKNLPIEMTDEYQQSMQLADMNTPGQSLEEVMAIIQEARKPGDAMNLAGQLPCLGSVDLDDIDFDDIDDIDTENSGDFVCAV

SEQ ID NO: 21839 - protein, 268 aa, Bouteloua hirsuta
ASYAAAAMPALDVLPEKPHHGWESNGAAAVAPTPAPRRLDGKVAIVTGGARGIGEAIVRLFTRHGARVVIADVDAAAGDALAAALGPQVSCVRCDVSVEDDVRRAVEWAVARHGRLDVLCNNAGVLGRQTRAAKSILSFDAGEFDRVLRVNALGTALGMKHAARAMAPRRAGSIVSVASVAGVLGGLGPHAYTASKHAIVGLTKNAACELGAHGIRVNCVSPFGVATPMLINAWRQGHADAVPSDEEVEKMEEVVRGLATLKGPTLRP

SEQ ID NO: 21840 - protein, 325 aa, Streptomyces aureofaciens
MATRAVARRQSTSSARAVGGEIADRDLVGMYLDEIARTPLLDAAKEVELSQIIEAGVYARQILDEATPREGESPAREELEALAAEGERAKEVFIRSNLRLVVAVVRRYPRSGLPLLDLIQEGNAGLVRAVEKFDYAKGFKFSTYATWWIRQAITRSIADQSRTIRLPVHLVEELGRIRRVQREFNRENGRDPEHAEIAAELDSTEKRVGDVLDWARDPVSLNMSVDDEGDTQFGDLLEDTSAISPEQSVLSLLRSEELEDLLGKLDQRTASIIKMRYGIEDGRERTLTEVGKQHGLTRERIRQIEKHALLELKRMARDTGFDAVA

SEQ ID NO: 21841 - protein, 268 aa, Bouteloua hirsuta
ASYAAAAMPALDLLSEKSHHGWDGTGAAAVAPTPAPRRLDGKVAIVTGGARGIGEAIVRLFVKHGARVVIADIDDAAGDALAAALGPQVSCVRCDVSVEEDVKRAVEWAVARHGRLDVLCNNAGVLGRQTRAAKSILSFDAGEFDRVLRVNALGTALGMKHAALAMAPRHAGSIVSVASVAGVLGGLGPHAYTASKHAIVGLTKNAACELGAHGIRVNCVSPFGVATPMLINAWRQGHADAVPSDEEVEKMEEVVRGFATLKGPTLRP

SEQ ID NO: 21842 - protein, 307 aa, Physcomitrella patens
MAITSMGHYSGQNEVFTGNGNTSDSFAAMIGPCSPHVDLQALRRSGGGLGDDGQSQGGGQKRRYFASYDAPKMEDGPEDADEGTEDGTGNGSQLEKKRRLTIEQVRSLEKNFEAENKLEPERKMRLAKELGLRPRQVAIWFQNRRARWKTKQLERDYETLESDYKRLKADYEQVLSEKNHLKAELQRKSRDVPASKQDDNNLGLESIQTPERDRHVSDSDARQLNSRSSPTVNISRVKDEISGSTDGNSSDIVDADSPRTTNSSRKSVIQSSDFPPESLMGHPQLLDTYPEEKIRIRHRRKTGGQFS

SEQ ID NO: 21843 - protein, 337 aa, Nocardia farcinica IFM 10152
MAVEMFYDDDADLSIIQGRKVAVIGYGSQGHAHSLSLRDSGVEVRVGLAEGSKSRPKAEEAGLTVGTPAEVSAWADVIMLLAPDTAQASIFTNDIEPNLKDGDALFFGHGLNIHFGLIKPPANVTIGMVAPKGPGHLVRRQFVDGKGVPALIAIDQDPKGEGQALALSYAKGIGGTRAGVIKTTFKEETETDLFGEQAVLCGGTEELVKTGFEVMVEAGYAPEMAYFEVLHELKLIVDLMYEGGIARMNYSVSDTAEFGGYLSGPRVIDAGTKERMKEILKDIQDGTFVKRLVANVEGGNKELEGLRKQNAEHPIEVTGAKLRGLMSWVDRPITETA

SEQ ID NO: 21844 - protein, 345 aa, Physcomitrella patens
MAITSMGGYPCQSAMQQLIRNESSSDSLAAILTPCSPHVGLQAPPHVGGSLEDAVLVASEGSRQKRPFFATYDAPTVEDGSVEDDEGADDSQGASQLEKKRRLTFDQVRSLERNFEMENKLEPERKMQLAKELGLRPRQVAVWFQNRRARWKTKQLERDYEALAADYKSLKHDYDLVLAEKNNLKAEVQRLSGKAPTSPCADGNQIVAGESAQTPEVDVETSELVARQHTSRSTPTVDVSLACVKDKDFETSGCTDGNSSDVLDADSPRTTDSSSLSAMSDHDQLIYSHEIPPPESFMGLSGMLHDVTVKLEEGSGHGFHDDNSSNYFLLHLEDQAGVLPWWDWP

SEQ ID NO: 21845 - protein, 117 aa, Arabidopsis thaliana
  misc_feature (25)..(25): Xaa can be any naturally occurring amino acid
  misc_feature (52)..(52): Xaa can be any naturally occurring amino acid
  misc_feature (55)..(55): Xaa can be any naturally occurring amino acid
  misc_feature (91)..(91): Xaa can be any naturally occurring amino acid
  misc_feature (99)..(99): Xaa can be any naturally occurring amino acid
  unsure (1)..(117): unsure at all Xaa locations
MNSVCISSCINDAHDPRVPVRPVRXSYVNLYKWPESDAEFVRSVRRGGGLPXARXVDSISCRQMYLRSYTFSREDDESKSEKVSSGTQTSXLRGEFKGXAFVRVKGNLESSVLGFKV

SEQ ID NO: 21846 - protein, 321 aa, Bacillus cereus E33L
MKALCFEHFGNPDVLQYKDIHDPIINPNEILVRMKAIGLNFADIYRRRGDYHLAGNPPYVLGYEGAGIVEKVGANVTNIHPGDFIAFADVPFANAELVAVPSEKTIQLPNSISFETAASVLLQGLTAHYLTKDSYQIKQGDIALVHAAAGGVGQLLIQIIKLLGGKVIGLTSSKEKAQIATLAGADHVFLYTEAWHTKVVEITNGTGVNVVYESVGSTLEESFNATKIGGTVVFYGMAGGNPAPVDPRMLMDTSKTLTGGDLWNVLTTYEERKKRSTQLFDWIATGKLNIASPTIFALQDGALAHKLLEIRKSTGKILLIP

SEQ ID NO: 21847 - protein, 296 aa, Physcomitrella patens
MAALGRAGETMSMTAVSSSGGGLEEEATGRGQKRPHHPISDKGPGEEPEEGDDCCYDGAHPMEKKRHLSFEQVRSLERNFEMEIKLEPDRKMKLAKELGLQPRQIAVWFQNRRARWKTKQLERDFELLNSGYSKLKRDFEKVLEEKDVLKAELVRLSAKIIPKDSQSVDFSQSEKDSHCKPTANDPAKSDKLKESKPATPKDNQSTRSSPTTVVCSATTLEAEITSTSSGSNSSDLLDADSPRTTDSNPREEQLANYCGQLLPENFVGHLTVEEAVNTSQKVYSVKLEDGLPSLPS

SEQ ID NO: 21848 - protein, 748 aa, Haloarcula marismortui ATCC 43049
MTAIAETICILHVDDEPGFADMAATFLEREDDRVDVQTATSATAGLEILADNDIDCVVSDYDMPERNGIQFLEAVREEYGSLPFILYTGKGSEEIASDAISAGVTDYLQKESGTDQYAVLANRITNAVESQRVKRERNRQLDAIETAQEGISILDEDGEFIFVNEAYADLYGYEPEEMRGRHWELLYRDEDIPRIYDDILPTVEASGYWTGTTTGLRADGSTFTEDHVLARTDRGELVCTVRDISDQRDGEQELSRIKRAMDEAPVGITITGPKQEDTPISYANRQFLELTGYTESEVRGRNCRFLQGEETEAEPVDAMRAAIDADEPVSVELRNYRKDGTMFWNQVSIAPVRDNDGTVVNYVGFQRDITERKEHERRLKALSESVQDLLQADTREEVAEIGVETARTVLGLEANTIHLYNEAERTLEPVAASDGIYDLLEDLPTFTPGDSIAWRVYESGDALAVDDVHADPDIYNPDTPIKSELYLPLGRHGILLAGSGTNAAFDQRDVILGEILAGHIISALKQVEGTEQLRDRERDLEQHNDRLEAFTSVVSHDLRNPLNVAQGRLQLAREQYESEHLAAVEQAHERMDTLITDLLTLAQDGETVTDRESVALASLAENCWTTVETADATLVTDIDRTVLANESRLKQLFENLVRNAVEHAGADVTVTVGALDDGFYVADDGPGIPEDERETVFEAGYSTSTEGTGFGLSIARKVAAAHDWEISVRDSADGGTRFEITGVSFCDS

SEQ ID NO: 21849 - protein, 439 aa, Glycine max
MASIFKLSTPSPAASLSEALRPRDSRFLSFNPSSNAINYKINLSASLRSIHSLPLKTSLRIKCSQTDGNGSPAKRTVLHDLYEKEGQSPWYDNLCRPVTDLLPLIASGVRGVTSNPAIFQKAISSSNAYNDQFRELVQAGKDIESAYWELVVKDIQDACKLFEPIYDQTDGGDGYVSVEVSPRLADDTEGTIEAAKWLHKVVDRPNVYIKIPATEACVPSIKEVIANGISVNVTLIFSLARYEAVIDAYLDGLEASGLNDLSRVTSVASFFVSRVDTLIDKALEKIGTPEALNLRGKAAVAQAALAYQLYQRKFSGPRWEALVKKGAKKQRLLWASTSVKNPAYSDTLYVAPLIGPDTVSTMPDQALQAFIDHGTVSRTIDSNASEAEGIYNALQKLGIDWSFVGSQLELEGVDSFKKSFDSLLDSLQEKANSLKLVSH

SEQ ID NO: 21850 - protein, 761 aa, Candida albicans SC5314
MIMNMTTDYRDPLLDLFGTESNSGNETSSPSDIPVINRSGTFNQQQFSPLLTQQSLYNTPNSGSTPNIFDPNYTQMQEEQTSPSSNKLQPEDPPRKKRNTRSQTKIHQQSEGDEYNSNDYKDSIDLDKPPVVEPSPPFFVESDTTPEFVIPTPTSEQQQQQHHELIAQDYQRSNNSNQFGNLTHYEPNLPPLPPLSESILPQTNTFHPLVLPHDPRHAITAGPANNSQQQQQRQQQDSSIPSDGISSKIQQLHAPSLSNNQSASQRKKKESSGPKTRPAFVMKIWSMVNDPANHEYIRWNDDGKTFQVFHREDFMKVILPKYFKHNNFASFVRQLNMYGWHKVQDVANGTLNQNSDKNGQDEIWQFENPNFIKDREDLLDKIVRNKSSSNQDDVSGVSFNGINNSANLSLILQELETIKMNQYVISEDLRRVRQDNKMLWQENYLNRERNQVQGRTLDKILKFLSVVYGNNANKILNGHGFADFSDSNNIMTQYRPSPMGSPLLSRPQTQPPPSNSRFARDNNQTAQPTYESPLSTSDTNNNNNNSTFEYQQAVNRPRLMLTNRAHSRRPSMSRTKSTPEGSIEEIIRSYSNDKAAESNVNRMYEQLVGHQPGATTNNNNHSSSTAISAPSPRHSFLQELNLPGTPRNLDDLEKHINNEGQSIQQVQDWIDKLAQEQHEKQQQQQGNEDDDDFDVNEFLKDATTTPGSNVPNGGHYNNGNINFVDSPIAMTPGSNVSSNINDSNGNEKKSKKRSIEEVSDH

SEQ ID NO: 21851 - protein, 139 aa, Zea mays
MAGLQRSATTFRRSGSSGLVWDERFLTEAEADADAEAKAGAAEDAEQPELRHSRSVGMLRRAGGGGDSRSKKGKESRQKQAESARRSNQQVFRTKDVAPDMDPPSPRVSGCAFCAVFRGGSGGTGRRAQARRRSKPRKK

SEQ ID NO: 21852 - protein, 211 aa, Nostoc punctiforme PCC 73102
MNKFNLVIFDCDGVLIDSERIANTILLKMLKEIGLFLTLEDVFDIFVGTSMTRCLEIVKNLLGKSPPENFATEFEERTMQAFMNDVHPVQGIHDVLSKLNLSYCVASNSSHKWIEKALFVIDLLPYFSEKIFSATEVSRSKPYPDVFLYAAERMGFSPKDCVVIEDTPTGVRAGVDTGMTVFGYAELINPEKLRAVGASVLFNDMKLLPKL

SEQ ID NO: 21853 - protein, 376 aa, Saccharomyces cerevisiae
MSNVTTPWWKQWDPSEVTLADKTPDDVWKTCVLQGVYFGGNEYNGNLGARISSVFVILFVSTFFTMFPLISTKVKRLRIPLYVYLFAKYFGSGVIVATAFIHLMDPAYGAIGGTTCVGQTGNWGLYSWCPAIMLTSLTFTFLTDLFSSVWVERKYGLSHDHTHDEIKDTVVRNTAAVSSENDNENGTANGSHDTKNGVEYYEDSDATSMDVVQSFQAQFYAFLILEFGVIFHSVMIGLNLGSVGDEFSSLYPVLVFHQSFEGLGIGARLSAIEFPRSKRWWPWALCVAYGLTTPICVAIGLGVRTRYVSGSYTALVISGVLDAISAGILLYTGLVELLARDFIFNPQRTKDLRELSFNVICTLFGAGIMALIGKWA

SEQ ID NO: 21854 - protein, 333 aa, Streptococcus mutans
MAILVLGGAGYIGSHMVDRLIEKGEEEVVVVDSLVTGHRAAVHPAAKFYQGDLADREFMSMVFRENPDVDAVIHFAAYSLVAESMKKPLKYFDNNTAGMIKLLEVMSEFGVKYIVFSSTAATYGIPNEIPIKETTPQRPINPYGESKLMMETIMKWSDRAYGIKFVPVRYFNVAGAKPDGSIGEDHSPETHLLPIILQVAQGVREKIMIFGDDYNTPDGTNVRDYVHPFDLADRHLLALNYLRQGNPSTAFNLGSSTGFSNLQILEAARKVTGQKIPAEKAARRSGDPDTLIASSEKAREVVGWKPQFDDIEKIIASAWAWHSSHPKGYDDRD

SEQ ID NO: 21855 - protein, 468 aa, Bartonella henselae str. Houston-1
MSYDVVVIGAGPGGYVAAIKAAQLGLKTAIIEKRMTLGGTCLNVGCIPSKALLHASEVFAETQHGFETLGISIAKSKLNLEQMMAHKKAVVTANTSGVSFLMKKNKIDTFFGTAKILNAGQIEVVARDGNKQTIETKNIIIATGSESSGIPGVNVEIDEKVIVSSTGALALEKVPTRMIVVGAGVIGSELGSVWSRLGAKVTIIEYLNKVLGSMDGEVSRQFQKIMEKQGIEYKIGAKVTAITQSGSVAQVTFEAVKGGPSETLEADVVLIATGRFPYTEGLGLEEAGVQLDERGFITIDAHWQTNIPGVYAIGDVVKGPMLAHKAEEEGVAVAEILAGQKGHVNFDVIPSVVYTQPEIASVGKTEEELKAAGIDYNVGKFPFMANGRARAMQKSDGFVKILADKKTDRVLGGHILGFGAGEMIHEIAVLMEFGGSSEDLGRCCHAHPTLSEAVREAALATFAKPLHI

SEQ ID NO: 21856 - protein, 225 aa, Listeria monocytogenes str. 1/2a F6854
MKQILVVDDDRHILKLVGHYLRAEGFRVLEASDGVEAEKIVETEQVHLAVIDVMMPNMDGFELCQKMRASYPDIPVIMLTAKDALADKSRGFEVGTDDYVTKPFEPEELVFRIRALLRRSNQASEVKINIGNITIDQKSYGIKIGNQERMIPVKEFELLYQLASYPGRIFTREELIERIWQRDYDGSDRTVDVHIKRLRDHFDEEKDGIRIVTVRGVGYKLEETR

SEQ ID NO: 21857 - protein, 486 aa, Saccharomyces cerevisiae
MVHLGPKKPQARKGSMADVPKELMQQIENFEKIFTVPTETLQAVTKHFISELEKGLSKKGGNIPMIPGWVMDFPTGKESGDFLAIDLGGTNLRVVLVKLGGDRTFDTTQSKYRLPDAMRTTQNPDELWEFIADSLKAFIDEQFPQGISEPIPLGFTFSFPASQNKINEGILQRWTKGFDIPNIENHDVVPMLQKQITKRNIPIEVVALINDTTGTLVASYYTDPETKMGVIFGTGVNGAYYDVCSDIEKLQGKLSDDIPPSAPMAINCEYGSFDNEHVVLPRTKYDITIDEESPRPGQQTFEKMSSGYYLGEILRLALMDMYKQGFIFKNQDLSKFDKPFVMDTSYPARIEEDPFENLEDTDDLFQNEFGINTTVQERKLIRRLSELIGARAARLSVCGIAAICQKRGYKTGHIAADGSVYNRYPGFKEKAANALKDIYGWTQTSLDDYPIKIVPAEDGSGAGAAVIAALAQKRIAEGKSVGIIGA

SEQ ID NO: 21858 - protein, 154 aa, Neurospora crassa
MSNQEQTFIAVKPDGVQRGLVGNIISRFENRGFKLVAMKLTQPGQVHLELEKHYEDLNTKPFFAGLIKYMNSGPICAMVWEGKDAVKTGRTILGATNPLASAPGTIRGDFALDMGRNVCHGSDSVENAKKEIALWFKPEELNQWNHHSAAWIFE

SEQ ID NO: 21859 - protein, 484 aa, Staphylococcus aureus subsp. aureus MRSA252
MEDNKMNRSLNSRHISMIAIGGAIGTGLFVATGNIISQAGPGGAILAYLVIGVMLYFLMASIGELATFYPVSGSFSSYSTRFIDSSLGFTMGWLYWALWSLVTSVDVIVASNVLYFWDTFKFFHPITWSLIFITILLLLNIFSVKSFGETEFWLSLIKVLTIIVFVIFGFLMIFGILGGHAYGFENYTKGQAPFVGGISGFLGVLLVAGFSVGGTEVVAVTAGESDDPKKSMPKAIKQVFWRILLFYVLSIAVIGAIIPYTDPSLLRASSSISQSPFTIVFDRVGIAFAASVINAVILTSLLSAANSGVYTTGRMLYSLSSDKKAPKFLSKLNKTTKLPLRALLTTYAVVVIVIIYANFNSNAVFNLLEIIGSMIIVVWGSSIWSQIRLRQAIKKQGQDPNKVLPYKAPFYPLGPIIVIATLLFLLFGGSVEYILKDQWLNAFKNFLPLIILALIYFIHKIIHKTKFVKLETINLKPHDYDNQK

SEQ ID NO: 21860 - protein, 320 aa, Clostridium thermocellum
MKNRVISLLMASLLLVLSVIVAPFYKAEAATVVNTPFVAVFSNFDSSQWEKADWANGSVFNCVWKPSQVTFSNGKMILTLDREYGGSYPYKSGEYRTKSFFGYGYYEVRMKAAKNVGIVSSFFTYTGPSDNNPWDEIDIEFLGKDTTKVQFNWYKNGVGGNEYLHNLGFDASQDFHTYGFEWRPDYIDFYVDGKKVYRGTRNIPVTPGKIMMNLWPGIGVDEWLGRYDGRTPLQAEYEYVKYYPNGVPQDNPTPTPTIAPSTPTNPNLPLKGDVNGDGHVNSSDYSLFKRYLLRVIDRFPVGDPQDGCGRHDRVVDSGSK

SEQ ID NO: 21861 - protein, 505 aa, Staphylococcus aureus subsp. aureus MRSA252
MSRQDKKLTGVFGHPVSDRENSMTAGPRGPLLMQDIYFLEQMSQFDREVIPERRMHAKGSGAFGTFTVTKDITKYTNAKIFSEIGKQTEMFARFSTVAGERGAADAERDIRGFALKFYTEEGNWDLVGNNTPVFFFRDPKLFVSLNRAVKRDPRTNMRDAQNNWDFWTGLPEALHQVTILMSDRGIPKDLRHMHGFGSHTYSMYNDSGERVWVKFHFRTQQGIENLTDEVAAEIIATDRDSSQRDLFEAIEKGDYPKWTMYIQVMTEEQAKNHKDNPFDLTKVWYHDEYPLIEVGEFELNRNPDNYFMDVEQAAFAPTNIIPGLDFSPDKMLQGRLFSYGDAQRYRLGVNHWQIPVNQPKGVGIENICPFSRDGQMRVVDNNQGGGTHYYPNNHGKFDSQPEYKKPPFPTDGYGYEYNQRQDDDNYFEQPGKLFRLQSEDAKERIFTNTANAMEGVTDDVKRRHIRHCYKADPEYGKGVAKALGIDINSIDLETENDETYENFEK

SEQ ID NO: 21862 - protein, 670 aa, Lactobacillus plantarum WCFS1
MQAFDEIDELAVNNLRVLSAEMIERAGSGHPGLPLGAAPMMWALWSRQLRVDPQQSQWANRDRFVLSAGHGSALLYSLLHVSGFNVTMGELQRFRQFGSHTPGHPELGIVDGVEATTGPLGQGLGMAVGMALAERQLAAQFSESPQLVDHYTYALVGDGDLMEGVSHEAASFAGNQQLQKLIVLYDDNAVSLDGPTSRSFRTDVNQRFASYGWDTQTVGDGNDLTAINAAIERAKHSSRPSLIAVKTTIGFGAPQAGTNAVHGNPLGTAGLTSLRQQLGWQAAPFTVMPAVAKRAQQLILQRGQRAHRRWQSQREALPQAVQHRFEQQLSMRLPVDLATSLPIFDEGAQASRITSHTVIQKLAAQLPGLVGGAADLASSNKTTIEQDQLSTPVTPDQRNVAFGVREFGMGTILNGMTLHGGLRVFGGTFLVFSDYTRAAIRLAAMMKLPVTYVFTHDSIAVGEDGPTHQPIEQLMSLRLIPNLTVIRPADPNETVAAWWQAINATDHPTVLVLTRQNLAVLSGSKTKAMTGVARGGYVLSPQRGRQPMGILIASGSEVALALQAQAKLATLGEDVSVVSMPSMENFARQSTNYQAQVLPPQIRRRVAVEMGATSGWERYVGLDGAVLGLDHFGASGAADQVLAANQFTVADLVRTYQQTHVDLGQQLRVI

SEQ ID NO: 21863 - protein, 94 aa, Cryptococcus neoformans var. grubii
WHGLRQLGTAFMDGVPGITQCPIPPGSSFTYQFTVSHQSGTFWWHSHYSNSMADGIWGPLIIHSANEPLQRGRDYDEDRIVFITDWVHDNSEVV

SEQ ID NO: 21864 - protein, 476 aa, Arabidopsis thaliana
MQISSSSFITKFTNLHMVRSTSDHHQWRHNYNLKQLFIPNLSVSNSQHLPLNQSVAAIVFGGGSDSELYPLTKTRSKGAIPIAANYRLIDAVISNCINSGITKIYAITQFNSTSLNSHLSKAYSGFGLGKDRFVEVIAAYQSLEDQGWFQGTADAIRRCLWVFEEFPVTEFLVLPGHHLYKMDYKMLIEDHRRSRADITIVGLSSVTDHDFGFGFMEVDSTNAVTRFTIKGQQDLISVANRTATRSDGTSSCSVPSAGIYVIGREQMVKLLRECLIKSKDLASEIIPGAISEGMKVKAHMFDGYWEDVRSIGAYYRANMESIKSYRFYDRQCPLYTMPRCLPPSSMSVAVITNSIIGDGCILDKCVIRGSVVGMRTRIADEVIVEDSIIVGSDIYEMEEDVRRKGKEKKIEIRIGIGEKSRIRRAIVDKNARIGKNVMIINRDNVEEGNREAQGYVIREGIIIILRNAVIPNDSIL

SEQ ID NO: 21865 - protein, 111 aa, Zea mays
GFDPPRPPAHMPGQVTPCVAVPMPAARFPAPPVRGALPCPPPMYRPLVPPTLDTQFQLQTQPSSESIDAAIGDVLTKPWLPLPLGLKPPSVDSVMGELQRQGVANVPPACG

SEQ ID NO: 21866 - protein, 218 aa, Oryza sativa
MLAKSPSLPFLTATETAAISLSPSCDLFSSPNARFSKKKYGGRLTIQPNIEFGKTQNSRTQRKWRTFSADQAQATVVDAGDNKTWEEAKQILTSLDYSIEDADKMLKKAFGWIHSPYWSEERKKEVPNAEVVSGVLNYIRTLGLSDDDLRKLLKKFPEVLGCDLDSEVKLNVGKLDSDWGINGKTLRSLLLRNPKVLGYNVDCRGDCMAQCTRCWVRF

SEQ ID NO: 21867 - protein, 592 aa, Saccharomyces cerevisiae
MTEDFISSVKRSNEELKERKSNFGFVEYKSKQLTSSSSHNSNSSHHDDDNQHGKRNIFQRCVDSFKSPLDGSFDTSNLKRTLKPRHLIMIAIGGSIGTGLFVGSGKAIAEGGPLGVVIGWAIAGSQIIGTIHGLGEITVRFPVVGAFANYGTRFLDPSISFVVSTIYVLQWFFVLPLEIIAAAMTVTYWNSSIDPVIWVAIFYAVIVSINLFGVRGFGEAEFAFSTIKAITVCGFIILCVVLICGGGPDHEFIGAKYWHDPGCLANGFPGVLSVLVVASYSLGGIEMTCLASGETDPKGLPSAIKQVFWRILFFFLISLTLVGFLVPYTNQNLLGGSSVDNSPFVIAIKLHHIKALPSIVNAVILISVLSVGNSCIFASSRTLCSMAHQGLIPWWFGYIDRAGRPLVGIMANSLFGLLAFLVKSGSMSEVFNWLMAIAGLATCIVWLSINLSHIRFRLAMKAQGKSLDELEFVSAVGIWGSAYSALINCLILIAQFYCSLWPIGGWTSGKERAKIFFQNYLCALIMLFIFIVHKIYYKCQTGKWWGVKALKDIDLETDRKDIDIEIVKQEIAEKKMYLDSRPWYVRQFHFWC

SEQ ID NO: 21868 - protein, 91 aa, Cryptococcus neoformans var. grubii
WHGLRQLGTAFMDGVPGITQCPIPPGSSFTYQFTVSHQSGTFWWHSHYSNSMADGIWGPLIIHSPNEPLQRGRDYDEDRIVFITDWVHDNS

SEQ ID NO: 21869 - protein, 308 aa, Escherichia coli
INGFGRIGRIVFRAAQKRSDIEIVAINDLLDADYMAYMLKYDSTHGRFDGTVEVKDGHLIVNGKKIRVTAERDPANLKWDEVGVDVVAEATGLFLTDETARKHITAGAKKVVMTGPSKDNTPMFVKGANFDKYAGQDIVSNASCTTNCLAPLAKVINDNFGIIEGLMTTVHATTATQKTVDGPSHKDWRGGRGASQNIIPSSTGAAKAVGKVLPELNGKLTGMAFRVPTPNVSVVDLTVRLEKAATYEQIKAAVKAAAEGEMKGVLGYTEDDVVSTDFNGEVCTSVFDAKAGIALNDNFVKLVSWYDN

SEQ ID NO: 21870 - protein, 218 aa, Physcomitrella patens
MRNIGSNTNSLVAMLQGSCSPRIASNQVPRSMGSPKDMTKVCGQKRPFYPTIDRRSVEEPDDDDEGADEFSLRSEKKRRLSFDQVQSLERSFELENKLEPERKLQLAKELGLQPRQVAVWFQNRRARWKIKQLERDYGALAKDYNRLKEEFEAVSPAHPIPSRELCRSQLSTSLRGSEPRCGSCWCPSEDSQPRCRSSLRCLSNGGANHFDPIGWDWD

SEQ ID NO: 21871 - protein, 332 aa, Glycine max
MEIITPTATATNATAKSPEPDIETMTRIHQNPNPNPKPVSFSNGVLKRHHVNHRAAVVYKECLKNHVASLGGHALDGCGEFMPSPAATADDPSSIKCAACGCHRNFHRREPEESPISPATHHVLEYRPHHRHHPPPPHRSPNSASPPPISSYPSAPHMLLALSGGAGLSVAPENTAAPAPPHHSRKRFRTKFTQEQKEKMHEFADKVGWKMQRRDEEMVMEFCNEIGVERGVLKVWMHNNKNTFAKKDNLNNGNGSTLSVSANGISLDGAVGSATVRTGVHVPEHGHEHSGINGNGSGDNNHNHNLASHDVNEYENDSGTNGGGTNGSSSSS

SEQ ID NO: 21872 - protein, 94 aa, Filobasidiella neoformans
WHGLRQLGTAFMDGVPGITQCPIPPGSSFTYQFTVSHQSGTFWWHSHYSNSMADGIWGPLIIHSPNEPLQRGRDYDEDRIVFITDWVHDNSEVV

SEQ ID NO: 21873 - protein, 399 aa, Glycine max
  misc_feature (178)..(178): Xaa can be any naturally occurring amino acid
  misc_feature (234)..(235): Xaa can be any naturally occurring amino acid
  unsure (1)..(399): unsure at all Xaa locations
MDVAVTAVRSPLIVLGSPVNGSASARLGSTFGFSRKLCLNSVFIPKQVRRRGFVVRAASSSPEWDDAKIAPLQLESPIGQFLSQILKDHPHLVPAAVDQQLHQLQTDRDAHLQNQQQPSSPTDLVLYRRIAEVKANERRKALEEILYALVVQKFMDANISLIPSVTPDLSGKVDLWPXEDGKLEQLHSDEAYEMIQNHLSLILGNKAGDLTSVAEISKFRVGQVYAASVMYGYXXKRVDQRFQLEKTMKVLPNATEEENGVHRNTMDNARPSIEQDTSQVMSHPEVSAWPGGDVSPGGFGYGIKATRLRNYVMSFDGDTLQRYAAIRSKEAVSIIEKHTEALFGRPEIVVTPEGAVSKDENIKISFGGLKKLVLEAVTFGSFLWDVESYVDSRYHFVFN

SEQ ID NO: 21874 - protein, 93 aa, Filobasidiella neoformans
WHGMRQKNSPYMDGIPGITQCPIPPGGSYTYNFTISDQSGTYWWHSHYSNAMADGLWGPLIVHSVHEPIQRGRDYDEDRIVFVSDWMHDNSEI

SEQ ID NO: 21875 - protein, 392 aa, Methanosarcina acetivorans C2A
MKACIMCGGAGTRLRPLTFKHPKPSIPILNKPSVRHLIEHLSREGFNEIVMTLGYMGERIEEQLGDGHMFGVHIDYVYEKEKLGTAGGVKNAEKYLKNEPFIVLGGDHVLNLDLREMYRFHEANDALITIGLLSIDDPREFGIADMDINNRIHRFLEKPKSGQIFSNLASTGIYICDPEIFNWIPENKKYDFAKDLFPALLAADKKINGMLVRGKWTDVGSSAAYRQAQRWMLDALPGTTIEGNFTTRNARIRGPLSIGNNVSIGSNSSLVGPIVIGENTVIGDSVLIGPYSVIGANCTIENNAKILSSYLFDGVSIGKNSNISGAVVADETAVGEECNLENGTVIGHKVVIGDNSTIHSGIKIWPEVVIEKNSSIKETVVNPAYDTTYEGS

SEQ ID NO: 21876 - protein, 93 aa, Filobasidiella neoformans
WHGMRQKNTPYMDGIPGITQCPIPPGGSYTYNFTISDQSGTYWWHSHYSNAMADGLWGPLIVHSVDEPIQRGRDYDEDRIVFVSDWMHDNSEI

SEQ ID NO: 21877 - protein, 365 aa, Alkalilimnicola ehrlichei MLHE-1
MIPPLTPWAQRPRLPAEWERQAAVQLTWPHDRDGLWGDQLPAVEGCFVAMASAIAAHQPVLVVCHDERLRERVDVLLARAGMAAEARRLAVAPSNDIWARDHGPITVLNGDGRPLIQDFAFNGWGQRYRADRDDVITQHLVQQGVFGESRFRRVEWVLEGGAIDADGAGTLLTTTRCLLNDNRNPGATRAQVEQQLIARLGASRVLWLERGGLTGDDTDGHVDMLARFVDPETIVYQACDDPDDADYPELQAMLSALRGFTTLRGGGYRLVPLPWPAIKRDEQGMRLPASYANFLIINGAVLVPQYQDPADDRARAVLGELFPDREIIGIPAVPLIQQHGSVHCATMQLPAGVTVVAPDPAGHAA

SEQ ID NO: 21878 - protein, 422 aa, Streptomyces halstedii
MSRRVVVTGIGVVAPGGIGAARFWDLLAGGRTATRRISLFDPARLRSQIAAECDFDPSAHGLDDETVRRCDRYVQFALVATAEAVRDAGLDTTREDPWRMGAVLGTAVGGTTRLEHDYVLVSEGGSRWDVDHRRAEPHLHRAFAPSTLASTVAETFGAQGPVQTVSTGCTSGLDAVGYAYHAIAEGRADVCLAGASDSPISPITMACFDAIKATSPSNDDPEHASRPFDARRNGFVMGEGGAVLVLEELEHARARGADVYCELAGYATFGNAHHMTGLTREGLEMARAIDTALDMARLDGTDIDYVNAHGSGTQQNDRHETAAVKRSLGEHAYRTPMSSIKSMVGHSLGAIGSIEVVACVLALAHQVVPPTANYETPDPECDLDYVPREARERELRSVLSVGSGFGGFQSAVVLTGPERRLR

SEQ ID NO: 21879 - protein, 470 aa, Streptomyces avermitilis MA-4680
MPLHKGPVKSDERPMSFNPFFGEANPVSGMTEAPPKHRLADGPLPPSTAYQLVHDELMLDGNARLNLATFVTTWMEPQAGVLMAECQDKNMIDKDEYPRTAELEKRCVAMLADLWNAPDAGAAVGCSTTGSSEACMLAGLALKRRWARRNADRYPARDVRPNLVMGINVQVCWEKFCNFWEVEMRQVPLEGERYHLDPGAAAELCDENTIGVVGILGSTFDGSYEPIAELCAALDALQERTGLDIPVHVDGASGAMIAPFLDEDLVWDFRLPRVASINTSGHKYGLVSPGVGWALWRDSEALPEELVFRVNYLGGNMPTFALNFSRPGAQVVAQYYTFLRLGREGFRAVQQTTRNVARSLAERVAALGDFHLLTRGDELPVFAFTTAPEVASYDVFDVSRRMREHGWLVPAYTFPPNREDLSVLRVVCRNGFSTDLAELFVEDLSRLLPDLRRQARPQTHDKDAATGFHH

SEQ ID NO: 21880 - protein, 318 aa, Triticum aestivum
MAMESLGVLLLHPMNAYLEQELDRRFRLFRFWDSPPDGRAEFLRANASAIRAVVGNAGYNADAALIDALPSLEIVASFSVGIDRVDLPKCRERGIRVTNTPDVLTDDVADLAVGLAIAALRKIPQADRYVRAGLWKAKGDYTLTARFSGKRVGIIGLGRIGLAIATRVEAFDCPVNYYQRTKKDYPNYTYYPSVVELAANSDILVVACPLNEQTRHIVNREVIEVLGPKGVLINIGRGPHVDEPELVSALVEGRLGGAGLDVFEDEPNVPEALFALDNVVLVPHVGSGTHETRQAMADLVLGNLEAHVLKKPLLTPVV

SEQ ID NO: 21881 - protein, 352 aa, Bipolaris oryzae
MPPAGSGSSRKISFNVSEQYDIQDVVGEGAYGVVCSALHKPSGQKVAIKKITPFDHSMFCLRTLREMKLLRYFNHENIISILDIQKPRNYETFTEVYLIQELMETDMHRVIRTQELSDDHCQYFIYQTLRALKAMHSANVLHRDLKPSNLLLNANCDLKVCDFGLARSAASTEDNSGFMTEYVATRWYRAPEIMLTFKEYTKAIDVWSVGCILAEMLSGKPLFPGKDYHHQLTLILDVLGTPTMEDYYGIKSRRAREYIRSLPFKKKIPWKAMFPKTNDLALDLLERLLAFNPVKRISVEDALKHPYLEPYHDPDDEPGADPIPEEFFDFDKNKDNLTKEQLKLLIYQEIMR

SEQ ID NO: 21882 - protein, 384 aa, Mycobacterium avium subsp. paratuberculosis K-10
MRETVIVEAVRTPVGKRNGALSGMHAADLSAIVLNELVERTGIGPELIDDVVWGCVSQVGDQSSNIGRYAVLAAGWPESIPGTTVNRACGSSQQALDFAVQAVMSGQQDVVVAGGVEVMSRVPLGAARATGMPYGPKVLARYDDFSFNQGLSAEMIAKKWGFTRTQLDEYSVRSHERAAAAQDAGAFTDQIVPVFVEDAENKVVAADEGVRRGSSVEKLAALKPAFAEDGVIHAGNSSQISDGAAALLVTTAEMAVELGLTPIVRYVAGAVTGADPVLMLTGPIPATEKVLKKAGVALSDVGVFEVNEAFAPVPLAWLAETGADAARTNPLGGAIALGHPLGASGAVLMTRMAHHMRDNGIRYGLQTMCEGGGTANATLVELVS

SEQ ID NO: 21883 - protein, 620 aa, Candida albicans SC5314
MSGKKKENSFSNPDNAELQANAPSTPQNDSDSSVIVQPNIHNDIENQPTAEQKGFKESDAGDGTKKEDHYLHGVQLILCFLSLFLCLFLFALDQTIVVTILTTVGTKFDAFSKVGWLSSGFLLTMAVFIQFFGKLSIIIGRKWAMVIAIILFEAGSLMCALANDMNVLIGGRVLAGIGGSGINSSVFVIGSEVVPITRRPLALSIFSITFAVASVVGPLIGGAFTSKVTWRWAFYINLPIGGFATLVFLYAFRPPRPKVNVKQQLKQFDYFGTFLLIAGSVILLLAITFGTSDFPWDSAAVISCFVLGPVLLIAFVVWNFGFSKNQVISTEIVKVPQIIASTLAISGIFSAFIMFMIYGAIYFQVVKDASPLSAGLHLLPTIIAVVLSSMLSGLLVQKFKFVKPYNVISGILGPIGCGLITLLEVDSNFSQQVGLLIILGVSAGLQMQPSFLSAQIKAPKTPSGMIMTTTFINFSRSILSAFGAVLADAVYTTSLKNIYSKAVKKVTNPVILQDLQKFSLSQLTSSTALLKTLHPETEHFVKTQIMNAIRNVFYMAIGFSAITFFAAFFVTNERLPKNVEKPEEQSNEKETKESDSSASDVSQPKETEEDEVRNEEPERI

SEQ ID NO: 21884 - protein, 291 aa, Arabidopsis thaliana
MDGSSEKTTNKLVSILPNYRIGKTLGHGSFAKVKLALHVATGHKVAIKILNRSKIKNMGIEIKVQREIKILRFLMHPHIIRQYEVIETPNDIYVVMEYVKSGELFDYIVEKGKLQEDEARHLFQQIISGVEYCHRNMIVHRDLKPENVLLDSQCNIKIVDFGLSNVMHDGHFLKTSCGSPNYAAPEVISGKPYGPDVDIWSCGVILYALLCGTLPFDDENIPNVFEKIKRGMYTLPNHLSHFARDLIPRMLMVDPTMRISITEIRQHPWFNNHLPLYLSIPPLDTIDQAKK

SEQ ID NO: 21885 - protein, 337 aa, Candida albicans SC5314
MTKVFITGASGFIAQHIIKLLLSKGYEVVGTVRSTTKGEQLKSFMPSDAKFTYEIVKELSTPNSFDEALSKHNDIEYLFHTASPLTFDTEDPENVILQPAIKGTENILHAAADLCPNLKRVVLTSSDAAIYSNTDETNPTLSFNEGSWNNTSYQDALKDNITAYYASKAFAEKLAWEFVLMQKPVFGLVVVNPSWVFGPKAYDFDPKRFNSSNEMIDDLLKLNHENNSTFENVSGGYISATDIAKVQVYAIESDDLVNKRLLMTNGYFTCQQILDIINKHFPELNLPKGNPGTEAEEFKKLARVNNDATRKLLPWEFEPLETIVVDTVKQILESKQN

SEQ ID NO: 21886 - protein, 481 aa, Papaver somniferum
SLVAVVITTFLYLIFRDSSPKGLPPGPKPWPIVGNLLQLGEKPHSQFAQLAETYGDLFSLKLGSETVVVASTPLAASEILKTHDRVLSGRYVFQSFRVKEHVENSIVWSECNETWKKLRKVCRTELFTQKMIESQAEVRESKAMEMVEYLKKNVGNEVKIAEVVFGTLVNIFGNLIFSQNIFKLGDESSGSVEMKEHLWRMLELGNSTNPADYFPFLGKFDLFGQSKDVADCLQGIYSVWGAMLKERKIAKQHNNSKKNDFVEILLDSGLDDQQINALLMEIFGAGTETSASTIEWALSELTKNPQVTANMRLELLSVVGKRPVKESDIPNMPYLQAFVKETLRLHPATPLLLPRRALETCKVLNYTIPKECQIMVNAWGIGRDPKRWTDPLKFSPERFLNSSIDFKGNDFELIPFGAGRRICPGVPLATQFISLIVSSLVQNFDWGFPKGMDPSQLIMEEKFGLTLQKEPPLYIVPKTRD

SEQ ID NO: 21887 - protein, 228 aa, Zea mays
MDSEHWISRLAAAKRFYAAQLGHSDRAGMDELEMDEEVRPEFPCPYCYEDHDVGSLCAHLEEEHPFEPQAAACPVCSEMVTKDMVNHITTQHGYLFKNRRRLRRFIIPGSQALSLLSRDLREAHLQVLLGGGGQRSSDNNSSSATNISADPLLSSFGLGFPTSDAEQASKSTVSIPDDATTVKEAPAQARKLSIDSSLTSEERELKRKQARVRATFVQDLLLSTLFGD

SEQ ID NO: 21888 - protein, 503 aa, Oryza sativa
MALAILARRRAAEALLRRPLGAAGVSALRASYAAVAGEESDVVVVGGGPGGYVAAIKAAQLGLKTTCIEKRGTLGGTCLNVGCIPSKALLHSSHMYHEAKSSFAHHGVKFSNLEVDLPAMMAQKDKAVAGLTKGIEGLFKKNKVTYVKGFGKLASPSEVSVDLSDGGSTVVKGKNIIIATGSDVKSLPGVTIDEKKIVSSTGALCLSEIPKKLVVIGAGYIGLEMGSVWNRLGSEVTVVEFAPDIVPSMDGEVRKQFQRMLEKQKMKFMLKTKVVGVDTSGDGVKLTLEPAAGGEQSVIEADIVLVSAGRVPYTAGIGLESVGVETDKAGRILVDKRFMTNVNGVYAIGDAIPGPMLAHKAEEDGVACVEFIAGKEGHVDYDTVPGVVYTHPEVASVGKTEEQVKALGIPYRVGKFPLLANSRAKAIDDAEGLVKVVAEKETDKILGVHIMAPGAGEIIHEAVLALQYGASSEDIARTCHAHPTVSEALKEACLQTFTKAIHI

SEQ ID NO: 21889 - protein, 302 aa, Zymomonas mobilis
MATSSTLPAVVPALGGDQSLNHYLADIRKFPILKPEEEYMLAKRFQEHQDPKAASRLVTSHLRLVAKIAMGYRGYGLPVSELISEGNIGLMQGVKKFDPERGFRLATYAIWWIKASIQEYILRSWSLVKMGTTAAQKKLFFNLRRLKSNMNAFEDGDLKPDEVDSIATNLGVSNEEVVNMNRRMAMGGDSSLNITMREDGEGQMQDWLVDQEPLQDQQIEEEEESLVRHKLLIEAMDRLNDREKHILTERRLSDNPKTLEELSQVYGVSRERVRQIEVRAFDKLQKAIMELAGDRKLLPAMA

SEQ ID NO: 21890 - protein, 468 aa, Methanosarcina barkeri str. fusaro
MISKKVNLETLDESKKYRVGAYSARYIPQVKEKGIPKYEFPEEGMSPRAAYQLVHDEQSLDGNPFLNLASFVNTWMEPEADKLVMENINKNIIDIFEYPQTDKVIQSNIVNMLGRLFNGHHTKFMGTATAGSSEAIMLGLLAHKWSWKNSGRGTGKPNIIFGNDAHVCWDKFAKYFDVEARKIPIDKDERKISAAAVSEQIDENTICVGCVLGTTFTGEIDPVKDINDLLLRYKKEKGWDIPIHIDAASGGFILPFTEPDFEWDFRLESVKSINVSGHKYGLTYPGLGWLIFRDENDLPEDLIFHVNYLGEMEDSYTLNFSGGSAMVVAQYYNILRFGRAGYTRIMKNILEVSQDLAEKVDRLGRFEMLNKGERLPIIAFKQKEETDYSLQQLSYKLRERGWIIPAYCLPENAADIEIMRIVVRENFTSDMAAILVNDIENACQFFENGRKSETKKPCPPDDGMVHIC

SEQ ID NO: 21891 - protein, 541 aa, Streptococcus agalactiae 2603V/R
MTIDKRKVVYQIYPKSYKDTTGNGVGDLRGIIEKLPYLAELGIDMVWLNPFYPSPQRDNGYDISDYTAINPDFGTMDDFEEMIEVGRQYRIDFMLDMVLNHCSIEHEWFKKALAGDRYYQDFFILRDNPTDWVSKFGGNAWAPFGDTGKYYLHLFDITQADLNWRNADVRKELFKVVNFWRDKGVKGFRFDVINLIGKDEILENCPINDGKPAYTDRPITHDYLKMLNNASFGQDDSFMTVGEMSSTTIANCILYTAPEREELSMAFNFHHLKVDYKDGQKWTIMAFDFPALRDLFHSWGEGMSEGNGWNALFYNNHDQPRALNRFVDVKRFRNEGATMLAASIHLSRGTPYIYMGEEIGMLDPDYSSMDDYVDIESLNAYQIMLDEGKSQEEAFSIIRAKSRDNSRVPMQWDDSTNAGFSEGAPWLKVGKSYKEINVAKEKTGLIFTFYQELIRLRKQLPIIADGNYKAAFKDNEKVYAFERHLDKEKLLVLNNFFAEKVKIKLPENYLQGQVLLSNYKDVTLDETVTLQPYQTLAILVS

SEQ ID NO: 21892 - protein, 303 aa, Glycine max
SARGSLGRVYKADFPNGKVMAIKKIDNSALSLQEEDNFLEAVSNMSRLRHPSIVTLAGYCAEHGQRLLVYEYIANGNLHDMLHFAEDSSKALSWNARVRIALGTARALEYLHEVCLPSIVHRNFKSANILLDEELNPHLSDCGLAALTPNTERQVSTQMVGSFGYSAPEFALSGVYTVKSDVYSFGVVMLELLTGRKPLDSLRVRSEQSLVRWATPQLHDIDALAKMVDPTLNGMYPAKSLSRFADIIALCVQPEPEFRPPMSEVVQALVRLVQRASVVKRRPSEESGFGHKTPDHEAMDMPF

SEQ ID NO: 21893 - protein, 636 aa, Streptomyces coelicolor A3(2)
MHDPALAPRTVPPLTGSLADSLFETAARTPTLPMLARRRGPGSTAWDEVTAVEFRDTVVDLAKGLIASGISPGDRVAILARTRYEWTVFSYALWTVGAEVVPIYPTSSRDQVEWILRDAGCVGVLVEDEQNVMTVGSVCASLPALRHVWQLDAGALDTLVARGAFLPSATVDSMRRIVLPDATAVVAYTSGTSGRALGCALSHRGLAAPCDTLLAGWGHTVAPPGEQGAVLAYLPFSHVYGLMIQNLCVRGGFLMAHEPALTGEALSSALRSFRPTYLYAVPSVLEKIYKNFLRTAQQAGHGALFERAAATARDFATALERRRLGRGTGPGLDLRLQHALYERTVYRRLRSALGGRVTRATSGGSPLSRELSLFYEGIGVYVHDGYGLTETSGGLTMQPLGREKSGTVGQPLPGMEVRVADDGEILVRGPSLFQGYVGDGTATREVLRGGWLATGDLGHLDAENYLAITGRKKDVIITSGGKSVAPAALEQRLRMHPLVHQAVLVGDNRPCVGALITLDPEFLTHWRASLALPGDAPAREAREENALREEVARAVAAANSAVSRSESIRVFRVLPHPFDVAGGLLTPSMKLRRDEIVRTYSLEIDAMYEARSHRRPTTPPPQEPAGWEDADNVFLR

SEQ ID NO: 21894 - protein, 255 aa, Bordetella parapertussis 12822
MTQRLSGRIAIVTGAGSGIGEATARLMAREGAVVVVADKAIEAAERVAQAIVAEGGRAEARQADVGEAQSVRALVDAVAARWERIDVLVNNAGYGIAATVVDTDEADWSALMRVNVDGVFLGCKYVIPIMQRQGAGVIVNTASAGALVGLRQRAAYCASKGAVAALTRAMALDHATEGIRINCVAPGTIESPYFREIYARSDDPEALRASLAARQPMNRLGQPEEVAHAIVFLASDDASFATGSTLVLDGGLTAA

SEQ ID NO: 21895 - protein, 662 aa, Staphylococcus aureus subsp. aureus MRSA252
MFNEKDQLAVDTLRALSIDTIEKANSGHPGLPMGAAPMAYTLWTRHLNFNPQSKDYFNRDRFVLSAGHGSALLYSLLHVSGSLELEELKQFRQWGSKTPGHPEYRHTDGVEVTTGPLGQGFSMSVGLALAEDHLAGKFNKEGYNVVDHYTYVLASDGDLMEGISHEAASFAGHNKLSKLVVLYDSNDISLDGELNKAFSENTKARFEAYGWNYLLVKDGNDLEEIDKAITTAKSQEGPTIIEVKTTIGFGSPNKAGTNGVHGAPLGEDERKLTFENYGLDPEKRFNVSEEVYEIFQNTMLKRANEDESQWNSLLEKYAETYPELAEEFKLAISGKLPKNYKDELPRFEFGHNGASRADSGTVIQAISKTVPSFFGGSADLAGSNKSNVNDATDYSSETPEGKNVWFGVREFAMGAAVNGMAAHGGLHPYGATFFVFSDYLKPALRLSSIMGLNATFIFTHDSIAVGEDGPTHEPIEQLAGLRAIPNMNVIRPADGNETRVAWEVALESESTPTSLVLTRQNLPVLDVPEDVVEEGVRKGAYTVYGSEETPEFLLLASGSEVSLAVEAAKDLEKQGKSVRVVSMPNWNAFEQQSEEYKESVIPSSVTKRVAIEMASPLGWHKYVGTAGKVIAIDGFGASAPGDLVVEKYGFTKENILNQVMSL

SEQ ID NO: 21896 - protein, 572 aa, Streptomyces coelicolor A3(2)
MTVNEPVPDTFEDTPAGDRHPDWFKRAVFYEVLVRSFQDSNGDGIGDLKGLTAKLDYLQWLGVDCLWLPPFFKSPLRDGGYDVSDYTAVLPEFGDLADFVEFVDAAHQRGMRVIIDFVMNHTSDQHPWFQESRKNPDGPYGDYYVWADDDTRYADARIIFVDTEASNWTHDPVRGQYYWHRFFSHQPDLNYENPAVQEEMLAALKFWLDLGVDGYRLDAVPYLYAEEGTNCENLPASHAFLKRVRREIDAQYPDTVLLAEANQWPEDVVDYFGDYSTGGDECHMAFHFPVMPRIFMAVRRESRYPVSEILAKTPAIPSGCQWGIFLRNHDELTLEMVTDEERDYMYAEYAKDPRMRANIGIRRRLATLLDNDRDQIELFTALLLALPGSPILYYGDEIGMGDNIWLGDRDAVRTPMQWTPDRNAGFSTCDPGRLYLPAIMDPVYGYQVTNVEASMASPSSLLHWTRRMIEIRKQNPAFGLGTYTELPSSNPAVLAFLREYEDDLVLCVNNFARFAQPTELDLREFAGRHPVELFGGVRFPAIGELPYLLTLGGHGFYWFRLTRVASRIGRRA

SEQ ID NO: 21897 - protein, 93 aa, Filobasidiella neoformans
WHGLRQLGTAFMDGVPGITQCPIPPGGSFTYNFTVSHQSGTYWWHSHYSNSMADGIWGPLIVHSPNEPLQRGRDYDEDRIVFITDWMHDNSEI

SEQ ID NO: 21898 - protein, 89 aa, Filobasidiella neoformans
WHGMRQKNTPYMDGVPGITQCPIPPGGSYTYNFTISDQSGTYWWHSHYSNAMADGLWGPLIVHSVDEPIQRGRDYDEDRIVVVTDWMHD

SEQ ID NO: 21899 - protein, 157 aa, Zea mays
  misc_feature (16)..(16): Xaa can be any naturally occurring amino acid
  unsure (1)..(157): unsure at all Xaa locations
KEMPLLLRGGSQLIWXIPPSGGRDPPNPSSGEWYPAPFDSSAVNNMRRLLEHAGVPGHIYPLSLLCYEVMPPPQQVEKEIGEQRVISFHGAGLSVTEEINYGDITAHTKNADEGRELFTNTLYNSVVNQYNVLKSAIFRDRGAAVSNNVISLSQPWR

SEQ ID NO: 21900 - protein, 516 aa, GIBBERELLA ZEAE PH-1
MEGNPEPEPVRGEPPHETEAKAPADINLPSEPLGTQGQLETGETPVEDPAQEQVKSWIESQTETEPQQPPIESSTVDAEGDDTAGELPRVEADAPSTETEVPGMTGTAAESASTTASAPPQGTDATAPPAGVGVVTGPALITPRRRAASASTGPSSSTSAAGHGHVPHFVAPSSYLRRRTSIRSPMAPTEPKPLSPLDRDQLQGLNAIRDFLRVRTSYDVLPLSFRLIVLDNELLIKKAINILTQNSIVSAPLWNSKTSRFAGILTSTDFINVIQYYCQYPDEFHKLDQFRLSSLRDIEKSIGAIPIETVSVHPSKPLYEACRRMLKTRARRIPLVDVDSETNKEMVVSVITQYRILKFIAVNNEHNTVLLKKTVREIGLGTYSGIATAKMNSSVLDVVHLMVKYNISCVPIIDSHGRVLNVFEAVDVIPCIKGGAYEDLDGSVGEALCKRSDESPGIYTCSEGDRLDSIFDTVRKSRVHRLIVVDDDNKLKGIISLSDILKYVLLYGVEDTSNWA

SEQ ID NO: 21901 - protein, 91 aa, Filobasidiella neoformans
WHGMRQKNTPYMDGVPGITQCPIPPRGSYTYNFTISDQSGTYWWHSHYSNAMADGLWGPLIVHSVDEPIQRGRDYDEDRIVVVSDWMHDDS

SEQ ID NO: 21902 - protein, 87 aa, Filobasidiella neoformans
WHGMRQKNTPYMDGVPGITQCPIPPGGSYTYNFTISDQSGTYWWHSHYSNAMADGLWGPLIVHSVHEPIQRGRDYDEDRIVFVTDWM

SEQ ID NO: 21903 - protein, 88 aa, Filobasidiella neoformans
WHGMRQKNTPYMDGVPGITQCPIPPGGSYTYNFTISDQSGTYWWHSHYSNAMADGLWGPHIVQSVDEPIQRGRDYDEVVIIVVTDWMN

SEQ ID NO: 21904 - protein, 396 aa, Photorhabdus luminescens subsp. laumondii TTO1
MFEKITAAPADPILGLADSFRSDPRTNKINLGIGVYKDETGKTPVLTSVKKAEQYLLENETTKNYLPISGLAEFGRVTQELLFGKDHPVVTDKRARTAQSPGGTGALRIAADFIAKQTNAKRVWISNPTWPNHKNVFSAAGLEVCEYKYYDAEKHALNFEDMLASLSEAQAGDVVLFHGCCHNPTGIDPTPAQWAKLAEMSAEKGWLPIFDFAYQGFAKGLNEDAEGLRIFAKNHNELIVASSYSKNFGLYNERVGACTIVASDSDTAEKAFSQAKAIIRANYSNPPAHGASIVTTILSNEDLKAAWEQELTTMRERIQRMRQLFVNTLQEKGAKQDFSFIISQNGMFSFSGLTKEQVERLRDEFGIYAVSSGRINVAGLTLENMAPLCEAIVAVL

SEQ ID NO: 21905 - protein, 92 aa, Filobasidiella neoformans
WHGMRQKNTPYMDGVPGITQCPIPPGGSYTYNFTISDQSGTYWWHSHYSNAMADGLWGPLIVHSVDEPIQRGRDYDEDRIVFVTDWMHDDSE

SEQ ID NO: 21906 - protein, 371 aa, Rubrobacter xylanophilus DSM 9941
MKCILHAPPSGRIRVPGGGGLCPGPLFRGKAEFSGGLAVEGTQARHEALGLDEGDLLRMYRLMLLARRVDERSWILNRQGKAAFVISCQGQEAAQVGAAMHLRPGYDYVYPYYRDHGIVLTLGMTARDEMLALLAREEDPNSGGRQMPGHFSSRELNIVTASAPIAVQFPQAVGSALAFKMRGEDGVVLACGGEASTSEGDWHEAMNFAGVHGLPVVFLIQNNHYAISVPEPLQVAGSIARRAEGYGFPGVEVDGNDVLAVYEAAGEAFARARKGEGPTLIEAKTYRLTAHSSDDDDRRYREREEVEQWRLKDPIPRFERYLMENGVLDEAARDRIDAEVREEVREASEYAENAPVADPDSVLEGVYAEGV

SEQ ID NO: 21907 - protein, 294 aa, Escherichia vulneris
IVFRAAQERSDIEIVGINDLLDADYMAYMLKYDSTHGRFNGTVEVKDGHLVVNGKTIRVTAEKDPANLKWDEIGVDVVAEATGIFLTDETARKHITAGAKKVVLTGPSKDNTPMFVKGANFDKYEGQDIVSNASCTTNCLAPLAKVINDNFGIIEGLMTTVHATTATQKTVDGPSHKDWRGGRGASQNIIPSSTGAAKAVGKVLPELNGKLTGMAFRVPTPNVSVVDLTVRLEKAASYEEIKKAIKAASEGDMKGVLGYTEDDVVSTDFNGEICTSVFDAKAGIALNDNFVKLV

SEQ ID NO: 21908 - protein, 212 aa, Hordeum vulgare subsp. vulgare
MAPVKLYGATLSWNVTRCVAALEEAGVEYELVPINFSTGEHKSPDHLARNPFGQVPALQDGDLYVFESRAICKYACRKNKPELLKEGDIKESAMVDVWLEVEAHQYTAALSPILFECLIHPMLGGATDQKVIDDNLVKIKNVLAVYEARLTKSKYLAGDFLSLADLNHASVTLCLAATLYASLFDAYPHVKAWWTDLLTRPSVQKVAALMKP

SEQ ID NO: 21909 - protein, 472 aa, Bacillus cereus E33L
MNHLRGGSEVANKELKRGLEARHIQMIALGGTIGVGLFMGSASTIKWTGPSVMLAYAIAGIFIFFIMRAMGEMLYMEPSTGSFATFGHKYIHPLAGYMTAWSNWFQWVIVGMSEIIAVGAYMQYWFPDLPAWIPGVIAMVILGAANLISVKSFGEFEFWFAMIKIVTILLMIIAGFGLIFFGIGNGGEAIGISNLWSNGGFFTGGFSGFFFALSLVVGAYQGVELIGITAGEAKDPKKTLTRAIQSTIWRILIFYIGAIFVIVTVYPWDQLSTIGSPFVATFAKVGITAAAGLINFVVITAAMSGCNSGIYSAGRMLYTLGVNGQAPKYFTKLSGNGVPLFGTVGVIIGLAVGVVLSYIAPKNLFVYVYSASVLPGMVPWFVILISQINFRKEKEAEMKDHPFKMPFAPVTNYLTIAFLIMVLIGMWFNDDTRISLVVGIIFLVIVTISFYAFGIGKRTPLDVQNDQEISSK

SEQ ID NO: 21910 - protein, 475 aa, Arabidopsis thaliana
MGGGFRVLHLVRPFLAFLPEVQSADRKIPFREKVIYTVISLFIFLVCSQLPLYGIHSTTGADPFYWMRVILASNRGTVMELGITPIVTSGLVMQLLAGSKIIEVDNNVREDRALLNGAQKLLGILIAIGEAVAYVLSGMYGPVGQLGVGNAILIILQLFFAGIIVICLDELLQKGYGLGSGISLFIATNICESIIWKAFSPTTINTGRGAEFEGAVIALFHMLITKSNKVAALRQAFYRQNLPNVTNLLATVLIFLIVIYFQGFRVVLPVRSKSARGQQGSYPIKLFYTSNMPIILQSALVSNLYFISQLLYRKFSGNFFVNLLGQWKESEYSGQSIPVSGLAYLITAPASFADMAAHPFHALFYIVFMLTACALFSKTWIEVSGSSARDVAKQLKEQQMVMPGHRESNLQKELNRYIPTAAAFGGVCIGALTVLADFMGAIGSGTGILLAVTIIYQYFETFEKEKASELGFFGF

SEQ ID NO: 21911 - protein, 235 aa, Lactobacillus acidophilus NCFM
MSGFIGEFLGTMVLIVLGTGCGAAINLNKSYAKGSHWLYVTIAWGMAVTFGVYVAANFGSQGHLNPAVTIGFAAFGFFPWSGVLPYLLGQFLGAFVGAVLVIIQYYPHFKATKTTEEGNQVGIFATAPAIKNNLFNFLSETIATFIFIFALLNLGDFDKGLKPLIVGLLIMVVGQGLGATTGFALNPARDWSPRLAYTILPVPNKSSANWQYAWVPMCGPIVGGLLASALQYFLK

SEQ ID NO: 21912 - protein, 560 aa, Eschscholzia californica
MEKPILLQLQAGILGLLALICFLYYVIKVSLSTRNCNQLVKHPPEAAGSWPIVGHLPQLVGSGKPLFRVLGDMADKFGPIFMVRFGVYPTLVVSTWEMAKECFTSNDKFLASRPPSAASSYMTYDHAMFGFSFYGPYWREIRKISTLHLLSHRRLELLKHVPHTEIHNFIKGLFGIWKDHQKQQQPTGREDRDSVMLEMSQLFGYLTLNVVLSLVVGKRVCNYHADGHLDDGEEAGQGQKLHQTITDFFKLSGVSVASDALPLLGLFDLGGKKESMKRVAKEMDFFAERWLQDKKLSLSLSSETNNKQNDAGEGDGDDFMDVLMSILPDDDDSLFTKYSRDTVIKATSLSMVVAASDTTSVSLTWALSLLLNNIQVLRKAQDELDTKVGRDRHVEEKDIDNLVYLQAIVKETLRMYPAGPLSVPHEAIEDCNVGGYHIKTGTRLLVNIWKLQRDPRVWSNPSEFRPERFLDNQSNGTLLDFRGQHFEYIPFGSGRRMCPGVNFATLILHMTLARLLQAFDLSTPSSSPVDMTEGSGLTMPKVTPLKVLLTPRLPLPLYDY

SEQ ID NO: 21913 - protein, 478 aa, Oryza sativa
MEFGNGGSSSSERRAAAEGATLARQGSVYSLTFDEFQSALAGGGGGGGGGSGFGKDFGSMNMDELLRSIWTAEESQAMASASGSAAGVGVAVGAPPTSLQRQGSLTLPRTLSAKTVDEVWRNLVRDEPPPVGAADGGDMPPQRQSTLGEMTLEEFLVRAGVVRENPPAAPPPVPPPMPPRPVPVVPKTTAFLGNFPGANDAGAAALGFAPLGMGDPALGNGLMPRAVPVGLPGAAVAMQTAVNQFDSGDKGNSDLSSPTEPMPYSFEGLVRGRRNGGGVEKVVERRQRRMIKNRESAARSRARKQAYTLELEAEVQKLKEMNKELERKQADIMEMQKNEVEEMIKDPFGRRKRLCLRRTLTGPWPFTVLHPGLVLWDGTLDFCCRGARTRVSSRNLVSMLSDAGLRQNDVASRGEDWRHARCGRRGFAHACPRSEIQGRNPRYALQIHSHHSKIQGGLAISSDGTAAATRVPDEQGGA

SEQ ID NO: 21914 - protein, 363 aa, Alternaria brassicicola
MPLTKYKAACVTSEPCWFDLEAGVQKTINFINEAGAAGCKLIAFPEVWIPGYPYWMWKINYQQSLPMLKSYRENSLPMDSEEFRRIRRAARDNQIYVSLGFSEIDHATLYLAQALIGPTGEVINHRRKIKPTHVEKLVYGDGAGDTFKSVTQTELGRLGQLNCWENMNPFLKALNVSEGEQIHIAAWPVYPGKETLKYPDPATNVADPASDLVTPAYAIETGTWTLAPFQRLSVEGLKKTTPEGVEPETDPSTYNGHARIYKPDGTLVCKPDKDFDGLLFVDIDLNECHLAKALADFSGHYMRPDLIRLLVDTRRKELITEADTNGGIATYTTRERLGLNIPLDAQAPKQKATAADVPSSSVM

SEQ ID NO: 21915 - protein, 375 aa, Candida albicans SC5314
MASTDTNNSKTVSSSTSSPSTPTKTATTKTTATPPIQSSLEVPSLANNSNGSSSTSTSSTNASSTGANDSNYDPFAGLSFRVGVAENKNTTFRNKMEDVHTYIANFAERVDWGYFAIFDGHAGKDTARWCGNNLHTLLEEEIDRNSDEGSPPPTPITGKDDLREDLYKCFVKADELIEKSGQGKSGCTAAVAVLRWESDNEEPVSHTKSQDGGKFDFKPTKNHKRLLYTSNVGDSRIVLCRAGQAYRLSYDHKATDTHEINRIEDNGGLVLKNRVNGVLAVTRSLGDTYMKSLVIGVPFTTATEITADDEFIIIACDGLWDVVSDKHACKLAAESFKQGYSPSQVAKKLCQFAIELSTTDNVTVMVVQLDNDVFS

SEQ ID NO: 21916 - protein, 358 aa, Pseudomonas syringae pv. tomato str. DC3000
MPAPLTDTPEDGTREQWYVACTQKQLRQGKPYRATILGLNIVLFRQRSGQAAALLDQCVHRGTRLSAGKITDDCLVCPYHGWRYDANGHVVHIPSVDAGQGEPKSPGYRYRQRHFAVCEQDGLVWVYTGAGDAHDTPIFRLPAYGERPWQSYFMINTFDADVGSLVQNFLDVPHTVFVHEGIFRSSSGRAMEATLACKAQSIEVVYHDEVDEIGLMQWLTNPDGEPLVHTDRFLAPNVTFCDYLWGARSGFLIVSQITPVNARQSRVYTYIAYRFPMPRWVLRMLRPFIHLYTHIVIQQDVKIIRAHREGLDNVANFKPCNVPADAIHVGVEQLLAAVRHGEALPEAQRRERRIRFEL

SEQ ID NO: 21917 - protein, 404 aa, Oryza sativa (japonica cultivar-group)
MAAARALLPVGGAAAVAVPRRLRSGEASSTSLSGPVSDGARLVRRMQLRPAPLLGSSTCALPSLRGKRLIRTPAASSSSSSLDSTGEAKPVGFAERYPALVTGFFFFMWYFLNVIFNILNKKIFDYFPYPYFVSVSHLLVGVLYCLVGWSFGLPKRAPINSTVLKLLFPVAVCHAIGHVTSTVSFAAVAVSFAHTIKALEPFFNAAASQFILGQQVPLTLWLSLAPVVIGVSMASLTELSFNWTGFVNAMISNISFTLRSVYSKKAMTDMDSTNLYAYISIIALLVCIPPAIIIEGPQLVQHGFKDAIAKVGLAKLVSNLLVVGLFYHLYNQVATNTLERVTPLTHAVGNVLKRVFVIGFSIIAFGNKITTQTGIGTCIAIAGVALYSYIKAKIEEEKTQMKSA

SEQ ID NO: 21918 - protein, 268 aa, Methylobacillus flagellatus KT
MSRIQATFATLKSQGKKALIPYITAGDPHPKHTVALMHALVQAGSDIIELGVPFSDPMADGPVIQCATERALAHKVGLINVLEMVREFRRVDDRTPVVLMGYANPIEAMGQAKFAERACAAGVDGVLTVDYPPEECQDFVQLLKSQQLDPIFLLSPTSDSSRVDMIVHQAAGFVYYVSLKGVTGSQNIDIAEVGTRVKAIRSRTDLPVGVGFGVRDAATAKAVAEIADAVVIGSRMIQEIENSSEDALLSNVAALTQSMRTAIDDAKT

SEQ ID NO: 21919 - protein, 1411 aa, Arabidopsis thaliana
  misc_feature (20)..(20): Xaa can be any naturally occurring amino acid
  misc_feature (80)..(80): Xaa can be any naturally occurring amino acid
  misc_feature (97)..(97): Xaa can be any naturally occurring amino acid
  unsure (1)..(1411): unsure at all Xaa locations
MVLRLLTIRIKSQLNTLHLXTKPQEPLPPPQQTQGFQEYRRQDCLSTGGTGHDNVSNSGSSYPPVDELLGGLHISTNQPXSLSSTTILPSFELLAKXRPGDLYGYPNSSFPSNSHLPQLGRVDSSSSYYASTESPHSADMQMTLFGKGSLKVLLLHGNLDIWIYHAKNLPNMDMFHKTLGDMFGRLPGKIEGQLTSKITSDPYVSVSVAGAVIGRTYVMSNSENPVWMQHFYVPVAHHAAEVHFVVKDSDVVGSQLIGLVTIPVEQIYSGAKIEGTYPILNSNGKPCKPGANLSLSIQYTPMDKLSVYHHGVGAGPDYQGVPGTYFPLRKGGTVRLYQDAHVPEGMLPGIRLDNGMSYEHGKCWHDMFDAIRQARRLIYITGWSVWHKVKLIRDKLGPASECTLGELLRSKSQEGVRVLLLIWDDPTSRSILGYKTDGVMATHDEETRRFFKHSSVQVLLCPRNAGKRHSWVKQREVGTIYTHHQKNVIVDADAGGNRRKIIAFVGGLDLCDGRYDTPQHPLFRTLQTIHKDDFHNPTFTGNLSGCPREPWHDLHSKIDGPAAYDVLTNFEERWLKAAKPSGIKKFKTSYDDALLRIDRIPDILGVSDTPTVSENDPEAWHVQIFRSIDSNSVKGFPKDPKDATCKNLVCGKNVLIDMSIHTAYVKAIRAAQHFIYIENQYFIGSSYNWNAHKDIGANNLIPMEIALKIAEKIRANERFAAYIVIPMWPEGVPTGAATQRILYWQPKSSFRFSNQNHKTKVETSRDNIDFNVHRSPIWLNDFLEVRYMHHKTIQMMYETIYKALVETGLEGAFSPQDYLNFFCLGNREMVDGIDNSGTGSPSNANTPQALSRKSRRFMVYVHSKGMVVDDEYVVIGSANINQRSMEGTRDTEIAMGAYQPQHTWARKHSGPRGQIYGYRMSLWAEHMATLDDCFTQPESIECVRKVRTMGERNWKQFAAEEVSDMRGHLLKYPVEVDRKGKVRPLPGSETFPDVGGIQMGLEEQGRAREDTPLLGKGRPLSGKFKTFANVFIAIVGAGVLGLPYAFKRTGWLMGLLTLFSVAALINHCMMLLVHIRRKLGVSNIGSFGDLGFAACGNLGRFVVDILIILSQAGFCVGYLIFIGNTLANLSKPTKSTTLMSLRHLMGVSPKSLYIWGCFPFQLGLNSIKTLTHLAPLSIFADVVDLGAMAVVIVEDIKITVVQRPQVVAFGGMSVFFYGMGVAVYAFEGVGMVLPLESETKDKDKFGKVLALSMLFIAVMYGSFGVLGYMAFGDDTMDIITANLGAGVVSSLVQLGLCINLFFTFPLMMNPVFEIVERRFWSGMYCVWLRWLLVLAVTLVALLVPNFADFLSLVGSSVCCALGFVLPSLFHLMVFKDEMEWKQRALDVGILLLGVILGVSGTWSSLTEIFQE

SEQ ID NO: 21920 - protein, 527 aa, Bacillus cereus ATCC 10987
MGLIYKVADQDWEFERIHKLNYKTFVEEIPQHEETKDRVRIDRFHDENTYLICLDEDKLVGMVALRGKRPFSLDYKISNLDFYLQEHGENVYEIRLLSVEREYRNGRALLGLIRFLHRYLLLNGYELALISATTRELPLYEQMGFKSFHTLVGTEEAAFQPMYVTPAMFEESSVGGIMTKEYTFLPGPVDIEENVRKAFSTKPISHRSKSFHVTMENVKKRLLQMTKAKRVQIMLGTGTLANDAIALQLRSLKGNGLVLTNGEFGNRLVRHATRAQLHFDTYKKEMGQPFISTELEQIMEAGNYEWLWFVHHETSTGMLNDLDELNALCEKYKVKLCVDCISSIGAIPIDLKSVYFASGVSGKAIKSFTGLSFVFHNHNVKVNETLPAYMDIGMYEENESIPYSHSWNLIYALQEALKGFEDEKAFVKIKETYDYMEEAITSIGLKLVSPKEHAAPIILTIQLNGDLSSKAVGDALALQGYIVHYESAYLQNNNWIQIACLNHYKERDMKRMLNCLQLCVLQSEVHI

SEQ ID NO: 21921 - protein, 394 aa, Zea mays
MASFVVHHHGSPLDREGKVKMSALALRSSLRPCEAAEEVGAGQAWCRGADMGVAAFVDEFSVEDLLDLEDLCEVDKDCAELGDTVPAAESVQEGDKVSSDSHGSSVLSYELMTLPVPHPMIDLPLPAHDAEELEWVSRIMDDSLAELPPPPKLPAAPLGAARRPLEGAVAGPMRSPTTTICALSTEALVPVTRAKRSKRSRGSVWSLSGGAPLSESTSSSSTATTSSCSSSASFSPLLLLPADPSLVLSSHLLDETPRPKKKSKHGKHGKSGKPKKRGRKPKHHPKPPQFSGGAAYAPAQGDRRCSHCGVQKTPQWRAGPEGAKTLCNACGVRYKSGRLLPEYRPACSPTFVSSIHSNSHRKVLEMRRKKDGDLGQLPLPVPAALLLGPAVESF

SEQ ID NO: 21922 - protein, 347 aa, Camellia sinensis
MKDSVASATASAPGTVCVTGAAGFIGSWLVMRLLERGYIVRATVRDPANLKKVKHLLDLPKADTNLTLWKADLNEEGSFDEAIEGCSGVFHVATPMDFESKDPENEVIKPTINGVLSIIRSCTKAKTVKRLVFTSSAGTVNVQEHQQPVFDENNWSDLHFINKKKMTGWMYFVSKTLAEKAAWEAAKENNIDFISIIPTLVGGPFIMPTFPPSLITALSPITRNEGHYSIIKQGQFVHLDDLCESHIFLYERPQAEGRYICSSHDATIHDLAKLMREKWPEYNVPTEFKGIDKDLPVVSFSSKKLIGMGFEFKYSLEDMFRGAIDTCREKGLLPHSFAENPVNGNKV

SEQ ID NO: 21923 - protein, 662 aa, Cucumis melo
MAPLTFLILLFFIMPPYFFADSKFLYNGFREGKGLFLDGAAIVKSSGALCLTSNSQNVVGHAFYPDPVKLFDTNYPSNASSFSTTFVFAIDPSIPGHGGHGLAFTLAPSTKFDEAESGHYLGLFNPLNDGNSSNHIFAVEFDTVKGHGGVRNSRDNHIGININGVSSVASKYAASSYYIDDTFWKEIQIDSGDPIVAWIDYDGRSKNLSVTIGHLEQKPEKPLIIYSIDLTSVMKNQMFVGFAASTGIETSAHYILGWSFAVNAPARQLKYSLLPNVPKEQNLSSSSDNNPQLKAVLAVSSIVVIMTIVVLTFLFIRMKKAESLEDWEKDCPHRFNFKDIYTATNGFNDSAQIGIGGFGSVYKGKLSSTGAEIAVKRVRRDSSQGMKEFAAEIESLGRLRHKNLVNLQGWCKKKNDLLIVYDYIPNGSLYSLLHTPKQSVILKWEQRFNILKGIAAGLLHLHEDWEQVVIHRDVKPSNVLIDADMNARLSDFGLSRQYDHNEMSHTTRVVGTIGYIPPELFRTGKASKSADVFAYGVLLLEVACGRKPLGSNQFILVDWVMERYETGDILHVADPKLNSIYKVEEMEMVLQLGLLCTHWKQEARPSMKQVMRFLNGEDPLPAFDAWTNSQSIFGSSSRLTMTDRSSSLFVGPISSASINAGR

SEQ ID NO: 21924 - protein, 73 aa, Quercus suber
SLDVWDPFEGFPPLSSHSNFPSETSSFAAAKLDWKETPNAHVFADVPGQKKEEVKVEIEDRRVLQISGERSQD

SEQ ID NO: 21925 - protein, 166 aa, Glycine max
MSRRKVREPKEENVTLGPAVRDGEHVFGVARIFASFNDTFIHVTDLSGRETLVRITGGMKVKADRDESSPYAAMLAAQDVAARCKYHWSIVLISCFSDFVQELGITALHIKLRATGGNKTKTPGPGAQSALRALARSGMKIGRIEDVTPIPSDSTRRKSGRRGRRL

SEQ ID NO: 21926 - protein, 347 aa, Schizosaccharomyces pombe
MDTAIEDRPGQTLTDDHQVKVAIKATGICGSDVHYWKEGGIGDFILKKPMILGHESAGVVVEVGKGVSSLKPGDPVAVEPGCVCRLCDYCRSGRYNLCPHMEFAATPPYDGTLRTYYITTEDFCTKLPKQISVEEGALFEPMSVAVHAMTRGNLKCGSRVLVMGCGTVGLLMMAVAKAYGAIDIVAVDASPSRVEFAQKYVGAKPFTPIAAKENESLPDYAQRYKQAIIEKYGEFDFAVDATGVGICIHTAVLALKRGGTFVQAGNGKPVIDFPINHIINYEINVLGSFRYAHGCYKQSLFLVSNGLVDVKPLITHRFAFKDALKAYETVASGEEGVLKVIIGGPDA

SEQ ID NO: 21927 - protein, 900 aa, Magnaporthe grisea 70-15
MPLEVIGGITIREFRARAFAEIVFCAISSDQQVKGYGAHIMAHLKDYVRATSPVMHFLTYADNYATGYFQKQGFTKEISLDKSIWMGYIKDYEGGTLMQCSMLPRIRYLEVGRMLLKQKETVMAKIRLLSKSHLVHQPPEQWASAGNVTPIDPLSVPAIRATGWSPDMDELSREPRHGPHFNELRRFLYQLQNHQQAWPFLKPVNKDEIPDYYKVITSPMDLSTIEERLEQDLYATPKDLVEDVKLIVSNCRQYNNPTTIYHKCANKLEKYMWTLIKEVPECLGALLVTVAYLGSRRLALRGISFRARLRASRVKRFTGTPRIRLSNQKDWTTLNMSSTATETTKVHALAVVTDASPGKGLNPIADDSSGLMVTIGKKSVGRIDDSDCVDGARPGRGNGKSLLRICLAIGQPSLVNFAVSFTNGIITVGLPAISRSINLPRELFLWPHSVYGLTSGAALLLAGSIADLVGAKSVELVGVSIMATFALASGLAQTGQQLVAFRALMGIGMAMHLPSSVSLVAAAVPRGRARNVGFACLGLSTTFGFSLGLILAGVLLQSSDEGWRKAFFASGSLTAVAAMGGYWVLPTVEAAATGDNIWLKLKAEVDWVGLGLSSAGLSLFSYVLAMLSADLSAIRNGTTATLLALSLMLLVSFPFWMSYRTRHGKAALIPNSLWRNIPFASICLLVTLSWGALNSIELFSSLYFQELQHHSSLTTSLLLLPMILAGSLVNFSTGVFVDRLPARWLVAMSSMLTAGSPLIMALVDPNLGYWYLQFWAQVLAPLSADVLFTIGLIVVSESFPEQTQALAGAVFNTVAQLGLSLGMGVCQVVALGVSATGGGVRHGGSGSQDAVAPTDVASLLRGYRASFWAIFGYMLLCTAVAVVGLRNVGRVGVKVGVNRD

SEQ ID NO: 21928 - protein, 435 aa, SYNECHOCOCCUS SP. WH 8102 [sequence omitted]

SEQ ID NO: 21929 - protein, 447 aa, Escherichia coli
MDQTYSLESFLNHVQKRDPNQTEFAQAVREVMTTLWPFLEQNPKYRQMSLLERLVEPERVIQFRVVWVDDRNQIQVNRAWRVQFSSAIGPYKGGMRFHPSVNLSILKFLGFEQTFKNALTTLPMGGGKGGSDFDPKGKSEGEVMRFCQALMTELYRHLGADTDVPAGDIGVGGREVGFMAGMMKKLSNNTACVFTGKGLSFGGSLIRPEATGYGLVYFTEAMLKRHGMGFEGMRVSVSGSGNVAQYAIEKAMEFGARVITASDSSGTVVDESGFTKEKLARLIEIKASRDGRVADYAKEFGLVYLEGQQPWSLPVDIALPCATQNELDVDAAHQLIANGVKAVAEGANMPTTIEATELFQQAGVLFAPGKAANAGGVATSGLEMPQNAARLGWKAEKVDARLHHIMLDIHHACVEHGGEGEQTNYVQGANIAGFVKVADAMLAQGVI

SEQ ID NO: 21930 - protein, 400 aa, Haloarcula marismortui ATCC 43049
MTHGFDLNERLEQRDAQNLRRHLEVAESVSARTRFADDPKGDPPEFGDEEVVFAANNYLGLADDSRVQRAAELGARTVGSGAGASRLVTGDTKVHRALERDLAASKGTERALVFSSGYAANIGTIDALAPDVVFSDELNHASIIDGCRVGASETVVYDHCDPDDLRAKLATRAADVDEDEQWLVVTDSVFSMDGDIAPLSAICDAVDEYGAWLMVDEAHATGLFGDSGGGVVQREGLSHRVDIQLGTLSKALASQGGYIAGDEVLIEYLLNAARSFVFSTGLSPPNAAAACEALRIARKTDRAAELWDTVATLRDGLETMGYEVLGETHILPVIVGDRGDALELADRLRDHGIVAPAIRPPTVPEGTSRIRVAPMATHTADDIAQCLDAFRTAGTEVGVL

SEQ ID NO: 21931 - protein, 416 aa, Geobacillus kaustophilus HTA426
MPIELPDITVICPDPAVEHVFSSIHQRWEQLVKTSSPYSKGELFSLPFPYVVPGGVYQQLFYWDSYFIILGLNISRLHELARNIVNNFFYELKTFGIIPNSSELAHLSRSQPPLLTSMIEEVWRGDKEWLRSAYEWAKIEYKEVWMDETTHYHPQIGLNKYYDRLESMLRVKGEAYLHFDEMYIPPAFWHERVEAESGWDYTGRFHRQCGYFIPVDLNALLYKYETDLAAFARLLALNGEAEQWEQAAKRRKDLMNQYLWNESFGMYFDFHFLNGRQHCYYSLAAFYPLWARAASKQQAAKVVRHLPLFLQPGGLAASNVQTGFQWDFPNGWAPLHWIVIKGLQNYGYDLEAQEIARRWIRLCTKVYLETGNMYEKYNVVDMSIRTIGRYPSQKGFGWTNAVYQKIAVDLLGCTVC

SEQ ID NO: 21932 - protein, 628 aa, Petunia x hybrida
MAMGCKDHNGVPDNLREQLAFAVRGIQWSYAILWSTTVSQPGELEWSDSNYNGDIKTRKTVQAGEVDEDQLGLQRTEQLRDLYSSLLIGEGEEDLQPQAKRPSAALSPEDLTDTVWYFLVCMSFVFNVGQGLPGKSLARHETIWLCNAHQAESSVFSRSLIAKSASIQTVVCFPYLGGVIELGVTELVVEDPNLIQQIKISILKVDHSIIPKRPNYVSSDAKNDAIGLCPKPDHNVLENDAYTVEINNSSPHDSSNGFGANQEVEVSLMVVGVIGETSQAQSWKFTDDNMSNGVHNSLNSSDCTSQNYANCEKLSPLSSGEKETKPAPLDHQEHNQRKLHLLDHQGDETQYQSVLSTLLKSSDQLTLGPYFRNTNKRSCFSGWKNDAHIPSRGTAQKLLKKVLVEVPRMHGSVIHKFSRENRKRNGLWRPEVDDTDRSRVISERRRREKINERFMLLASMLPAGGKVDKISLLDETIEYLKELERRVQDLEAKSGRRPNDVAEQTSDNCGTSKFNAIEESLPNKRKACEIVDLEPESRNGLLKGSSTDSIVINMIDKEVSIKMRCLSSEGLLFKIMEALTGLQMDCHTVQSSNIDGILSISIESKTNVSKTVSVGTIREALQRVVWKS

SEQ ID NO: 21933 - protein, 397 aa, Salmonella typhimurium
MFQKVDAYAGDPILSLMERFKDDSRHDKVNLSIGLYYNEDGIIPQLKTVAEAEARLNAQPHGASLYLPMEGLNTYRHTIAPLLFGADHPVLQQQRVATIQTLGGSGALKVGADFLKRYFPDAGVWVSDPTWENHIAIFAGAGFEVSTYPWYDDATNGIRFNDLLATLNTLPARSIVLLHPCCHNPTGADLTPSQWDAVIEIVKARDLIPFLDIAYQGFGAGMDDDAYVIRAIASAGLPALVSNSFSKIFSLYGERVGGLSVVCEDAEIAARVLGQLKATVRRIYSSPPCFGAQVVATVLGDEALKAGWLAEVDAMRNRIISMRQTLVKELTAEMPDRNFDYLLQQRGMFSYTGLSEEQVDRLRDEFGVYLIASGRMCVAGLNASNVHRVAKAFAAVM

SEQ ID NO: 21934 - protein, 250 aa, Geobacillus kaustophilus HTA426
MRLKGKAAIVTGGASGIGRATAIRFAEEGAKVAVSDINEEGGEETVRLIREKGGEAIFVQTDVADSKQVSRLVQTAVDAFGGLHILFNNAGIGHSEVRSTDLSEEEWDRVINVNLKGVFLGIKYAVPVMKQCGGGAIVNTSSLLGIKGKKYESAYNASKAGVILLTKNAALEYGKFNIRVNAIAPGVIDTNIITPWKQDERKWPIISKANALGRIGTPEEVANAVLFLASDEASFITGATLSVDGGGLTF

SEQ ID NO: 21935 - protein, 861 aa, Candida albicans SC5314
MSGLEHLQNLSIQPSNRSTQQQQTNSQPQSQYSQSAAKRRSARDYQFGAKIGEGSYSTVYSALDKYTNRTYAIKVLSKRHIVKENKIKYVNIEKTTLNRLGQQHPGIVQLYYTFQDESSLFFVLDFAEYGELLSIIRKFGSLSESVSKFYMCQIIDAVRFIHSKGVIHRDLKPENILVGHDFNLKITDFGAAKLLGNHEEFNGEKIDYNSVDASPEVSDTDRKGSFVGTAEYVSPELLKHNICGFESDIWAIGCILYQFFNGVPPFKGSTEYLTFEKIINVDYSYKSPIPLPPDVIQLIDSILISEPSARATIPHIMSSRWFSDIPWDDQNFIWHRKVPRFEAFGAITPSPAMPPMMKNGTNRNVNKSNSYHQLQSQISASEFGFIPSIAAKKSYKPPTMIKNNVAMPALNQTTYNHNYQQHVPLPPPVSSQPLTQQNVPQQIQPQRSGSAQTPQFAPVSASSRQPVGNMQTRQAAPQVLVQQKTPPFPKEKNSTPNLRDNTSFAQMAPRRNGEIPGQPQQQIPLPKSQQSPQPQPKAQYQSQQQKQSEDIRGSKNTSANAAAAAFATKNLPQPNHKTSKDSSTPPPPPPLPPKIKKVQENFIKFNEVSGLLKPDEKILKMDNLIKSVLSKRYLNKPEYQVLDDSVLDELTSKYASILKQESKAVITIVTNMARVFFIDAFLNVMLVDLKANKGADYSMYDYEFENTVDEDGNLLSKQDETFGYLIIELIKDGGDLVFLQRVSDEQRLRLTNAVKVLDKKGEEVVVGSSHGWIDCLLIAREISIEQSEDNKKPRSVSSSSNVSINEVKSEKAKKKNSSLSNKKPRSKKKGTSSNGTPQTTPPPTQHSNFAFAAAAAVHHQK

SEQ ID NO: 21936 - protein, 655 aa, Klebsiella oxytoca
MKRNRFFNTSAAIAISIALNTFFCSMQTIAAEPEETYLDFRKETIYFLFLDRFSDGDPSNNAGFNSATYDPNNLKKYTGGDLRGLINKLPYLKSLGVTSIWITPPIDNVNNTDAAGNTGYHGYWGRDYFRIDEHFGNLDDFKELTSLMHSPDYNMKLVLDYAPNHSNANDENEFGALYRDGVFITDYPTNVAANTGWYHHNGGVTNWNDFFQVKNHNLFNLSDLNQSNTDVYQYLLDGSKFWIDAGVDAIRIDAIKHMDKSFIQKWTSDIYDYSKSIGREGFFFFGEWFGASANTTTGVDGNAIDYANTSGSALLDFGFRDTLERVLVGRSGNTMKTLNSYLIKRQTVFTSDDWQVVFMDNHDMARIGTALRSNATTFGPGNNETGGSQSEAFAQKRIDLGLVATMTVRGIPAIYYGTEHYAANFTSNSFGQVGSDPYNREKMPGFDTESEAFSIIKTLGDLRKSSPAIQNGTYTELWVNDDILVFERRSGNDIVIVALNRGEANTINVKNIAVPNGVYPSLIGNNSVSVANKRTTLTLMQNEAVVIRSQSDDAENPTVQSINFTCNNGYTISGQSVYIIGNIPQLGGWDLTKAVKISPTQYPQWSASLELPSDLNVEWKCVKRNETNPTANVEWQSGANNQFNSNDTQTTNGSF

SEQ ID NO: 21937 - protein, 169 aa, Staphylococcus aureus subsp. aureus MRSA252
MNINTAYFAGGCFWCMTKPFDTFDGIEKVTSGYMGGHIENPTYEQVKSGTSGHLETVEIQYDVALFSYNKLLEIFFSVIDPLDTGGQYQDRGPQYQTAIFYTNDHQKELAETYIEQLKNTINADKAIATKILPASQFYKAEDYHQDFYKKNPERYAEEQKIRQEYKNKQ

SEQ ID NO: 21938 - protein, 468 aa, GIBBERELLA ZEAE PH-1
MVKPFVPFLPEVQQPETKIPFNQKLMWTALTLLIFLVMSQMPLYGIVSSDNSDPLYWLRMVIASNRGTLMELGITPIISSGMVFQLLAGTHMIDVNLDLKSDRELYQTAQKLLAFILSAGTATVYVFSGLYGPPSDLGAGIVFLLILQLVVAGMIVILLDELLQKGYGLGSGISLFIATNICESIMWKAFSPTTINTGRGPEFEGAVIALFHLLFTWPNKQRALQEAFYRQNLPNIMNLLATIAVFAAVIYLQGFRVEIPVKSSRQRGARGSYPVRLFYTSNMPIMLQSALSSNVFLISQMLYSRFSENLLVRLFGVWEAKDGSSQLHAASGLVYYMSPPQSMKDALLDPIHMSAYIIYMLGACALFSKTWIEVSGSSPRDVAKQLKDQGLVMAGHRDQSMYKELKRIIPTAAAFGGACIGALSVTSDLLGALGSGTGTLLAVTIIYGYFEIAAKEGDMSGMKGMIMG

SEQ ID NO: 21939 - protein, 302 aa, Vibrio parahaemolyticus RIMD 2210633
MLPLIYHSIYSRLELPEGHRYPIMKYQYLYEEVRRDVQAEWVQFFEPQALSIEAIKRVHDADYVDLLAQGNMPAAKMRRIGFPWSEALITRTLTSAAGTLLTAEKALEHGIALHLSGGYHHAHKDFGSGFCLFNDLVIAAKHMLDNEHVDKILIIDSDVHHGDGTATLCQEEPDIVTLSFHCDKNFPARKPQSDLDVPLAKGTDDETFLMTFKEVVEMALNLHRPDMVIYDAGVDIHQDDELGYFDVSTQAIFERDRFLFQLMKNRGIPVAAVVGGGYRTNHADLVPIHMQLIKAATKVFAS

SEQ ID NO: 21940 - protein, 579 aa, GIBBERELLA ZEAE PH-1
MCGIFACHRHPDVEKFKPTALKLAKQIRHRGPDWSGSVISNHTILCHERLSIVGVESGAQPLTNADDSIILAVNGEIYNHRHIRKHLKERYHFKTTSDCEVIIPLYTEFDTDAPNHLDGMFSFVLYDKKQDRTIAARDPIGITTFYQGWSSTEPGTIYFASELKCLHSVCDKIVAFPPGHVYDSKTGETTRYFNPSWWDPKKVPSTPVDYKVLRQALEKSVRKRLMAEVPFGVLLSGGLDSSLTASIAQREVTRLRKQALEANGNVLPVEDPDTGEGLVGVDDDDHLDTLTYLPQLNSFSIGLPGSPDNKAALEVAKFLGTKHHVMTFTIEDGLNALSDVIFHLETYDVTTIRASTPMYLLSRKIKAMGIKMVLSGEGSDEIFGGYLYFHAAPDKDSFHEETVRRVKNLHLSDCLRANKSTSAWGLEARVPFLDKEFLEYSMNIDPQDKMITKEKLEKYILRKAFDTSDEPGEQPYLPDNILWRQKEQFSDGVGYGWIDALKDTAEKQVTDEMMKNPKPEWGNDIPDTKEAYWYRCMFDEHFPPHCASTVMRWTPTWSKQTDPSGRAIATHNAKYDSAA

SEQ ID NO: 21941 - protein, 308 aa, ASPERGILLUS NIDULANS FGSC A4
MTRTHPSSFQQLEKLGEGTYATVYKGRNCQTGEMVALKEIHLDSEEGTPSTAIREISLMKELHHDNILSLYDVVHTENKLMLVFEYMDQDLKKYMDTHGNHGQLEPAIVKSFAFQLLRGIAFCHDNRILHRDLKPQNLLINSKGQLKLADFGLARAFGIPVNTFSNEVVTLWYRAPDVLLGSRTYNTTIDIWSIGCIIAEMFTGRALFPGTTNEDQLQKIFRVMGTPSERTWPGVSQFPEYKSDFPVYPPQDLRQVVPRIDPYGLDLLRCMLRLQPDLRISAVDALRHPWFNDPVSDLPIDHGMEALT

SEQ ID NO: 21942 - protein, 373 aa, Helicobacter pylori J99
MFSKSLEALHHVKRYRKRELFDPLLKDYASNDYLGLSVKKDLLQNAFDKLQSFDCHSPKASMLVNGYHPLHAELEERLADLLEFESALLVGSGFLGNLALIDTLLVKNALLFMDAHYHASGIFSTKIKPNQVIFFSHNDIKDLKQKLFNAPKNKLKFIAIEGVYSMDASIAPYDFYEIIQETPNAFLIVDEAHSFGTIGENLLGFLEYHRIKEKDKIIKLSTFSKALASYGACVLAPLQVIEFLTNRAKSVIYTTALSLLDTALTLAHLEYFIAQKQELKNELSKHQQIIFETLGVRTPTGFFTLEFENNPALLNAQYFLKEKGFLVGAIRPPTVSKPLLRVSLSLKNSLEDTKELANALLDYSKIQSSFKSG

SEQ ID NO: 21943 - protein, 242 aa, ASPERGILLUS NIDULANS FGSC A4
MSDVAETKPDPATKAQEETKPEETTTTTEPSKTEEVKEAAESAAETVKDAATKTSDSVFSMFGGGPKKEKKEEEDVDEPSGSSKAQKAEDEEEAPESPDVHFEPVIRLTETVEVKTNEELEEQTFKMRAKLFRFDRDSKEWKERGTGDVRLLKHKENGKTRLVMRRDKTLKVCANHYIVPDMKLSPNVGSDRSWVWNAAADVSEGEPEAQTLAIRFANSENANLFKEAFDKAREENEKLFKQ

SEQ ID NO: 21944 - protein, 292 aa, Oryza sativa
  misc_feature (14)..(14): Xaa can be any naturally occurring amino acid
  misc_feature (59)..(59): Xaa can be any naturally occurring amino acid
  misc_feature (108)..(108): Xaa can be any naturally occurring amino acid
  unsure (1)..(292): unsure at all Xaa locations
MGKDEVMESGGAAXEFAAKDYTDPPPAPLIDAAELGSWSLYRAVIAEFIATLLFLYITXVATVIGYKHQTDASGSGADAACGGVGRARQSRWAYGGMIFILVYCTAGXSGGHINPAVTFGLFLARKVSLVRAILYIVAQCLGAICGVGLVKAFQSAYFNRYGGGANTLAAGYSKGTGLAAEIIGTFVLVYTVFSATDPKRNARDSHVPVLAPLPIGFAWFMVQLATIPITGTGINPARTTGPAVIFNNEKAWHNQWIFWVGPFVGAAIAAFYHQYILRAGPIKALGSFRSNA

SEQ ID NO: 21945 - protein, 374 aa, Methanosarcina acetivorans C2A
MFKFADELGPFKIIHVYEPSVGLKAVLVVDNVARGPAIGGVRIAPDVSTEECFRLARAMTLKNAAADLSYGGGKVVIYGDPKMPLEKKSQILRALASALRYTEEYIFAPDMGTDEVCMACIKDEIGRVVGLPCEVGGIPLDEVGATGWGLFHATEVALQYCDFELKGARVAVQGFGAVGKHAARFLTRKGAVLVGAADSQGTIHDLEGLDVDTLIRLKREGKSVLDYPGGEKLGCDEILSVPCDIWIPAARPDVINEGNVHLLKAKLVVEGANIPVTEGAEKILYEKGILYVPDFIANAGGVICAASEYQGATRCTAFGSIEEKVRGNTEQVLEAAKTKGILPREAAVELAVKRIKRAMRYRRWSIFSSAPGFV

SEQ ID NO: 21946 - protein, 145 aa, Bacillus anthracis str. 'Ames Ancestor'
MRNLFPEITKRQNGIFDFGPSLLEGMTDAFFKPMNMDIFKVDVHEQSDKYTVKADLPGFQKENIQVEFEQDVLTIQATNHNEVEEKNENGTYIRKERSIGSVTRRFSFKQVEEENVRANYKDGVLTIELPKLKEEKNSKTTINIE

SEQ ID NO: 21947 - protein, 495 aa, Hordeum vulgare subsp. vulgare
MAAAAPPLCAWLVAAGAHADCGADEHQHRRTQCLDAGSGAMFGLDRRPLGARRRGPARSGMAMSVALQPERITVEKKRPDVKQRRVVVTGMGVVTPLGHDPDVFYTNLLDGHSGISEIETFDCSKFPTRIAGEIKSFSTEGWVVPKLSKRMDKFMLYLITAGKKALENGGLTEEVRNELDKTRCGVLIGSAMGGMKVFNDAIEALRVSYRKMNPFCVPFATTNMGSAILAMDLGWMGPNYSISTACATSNFCILNAANHIRRGEADVMLCGGSDAPLIPIGLGGFVACRALSQRNSDPTKASRPWDMDRDGFVMGEGAGVLVLEELEHAKQRGATIYAEFLGGSFTCDAYHMTEPHPEGTGITLCIEKALADSGVAREEINYVNAHATSTQSGDLKEYEAIVRCFGQNPQLRVNSTKSMTGHLIGAAGGIEAVACVQAIRTGWVHPNLNLENPEKVVDVGVLVGSEKERCEVKVALSNSFGFGGHNSSILFAPFK

SEQ ID NO: 21948 - protein, 190 aa, Gossypium barbadense
MEGSVGYDNDLNLRATELRLGLPGTEPVSIVRSNKRSLQQVADDDCGVNGCRSDDQNETAPPPPKAQIVGWPPIRSYRKNNIQTKKNESEGGGIYVKVSMDGAPYLRKIDLKIYSGYPELLQAIENMFKFTIGEYSEREGYKGSDYAPTYEDKDGDWMLVGDVPWEMFITSCKRLRIMKGSEARGLGCGV

SEQ ID NO: 21949 - protein, 489 aa, Hordeum vulgare subsp. vulgare
MSAVAPPLCTWIVAACLSATCVADDEGKQRNYIGGGLFCTRRHLAARRRGGARSGVPIAVSFHPERGAVENNKSETKQRRVVVTGMGVVTPLGHEPDEFYNNLLQGVSGVSEIEAFDCSSYPTRIAGEIKSFSTDGWVAPKLAKRMDKFMQYLIVAGKKALDNGGVTEDIMNELDKSRCGVLIGSGMGGMKVFSDAIEALRVSYRKMNPFCVPFATTNMGSAVLAMDLGWMGPNYSISTACATSNFCILSAANHIMRGETDLMLCGGSDAPIIPIGLGGFVACRALSQRNSDPTKASRPWDVDRDGFVMGEGAGVLLLEELEHAKQRGAEIYAEFLGGNFTCDAYHMTEPHPEGKGVILCVENALADAGVTRQDINYVNAHATSTQLGDLKEFEALRRCFGQNPQLRVNSTKSMTGHLLGAAGGIEAVAAIQAIRTGWIHPNINLNNPEKNVDVSLLVGSQKERCDVKVALSNSFGFGGHNSSILFAPF

SEQ ID NO: 21950 - protein, 548 aa, Xenorhabdus nematophila
MAAKDVKFVNDARSKMLRGVNVLADAVKVTLGPKGRNVVLDKSFGAPVITKDGVSVAREIELEDKFENMGAQMVKEVRSKANDAAGDGTTTATVLAQAIVIEGLKAVAAGMNPMDLKRGIDKAVVSAVEELKKLSVPCSDSTAIAQVGTISANSDETVGKLIAEAMDKVGKEGVITVEEGTGLEDELAVVEGMQFDRGYLSPYFINKPESGSVELENPYILLVDKKISNIRELLPVLEGVAKASKPLVIIAEDVEGEALATLVVNNMRGIVKVASVKAPGFGDRRKAMLQDIATLTNGTVISEEIGLELEKATLEDLGQAKRVVINKDTTTIIDGVGEEGAIAARVTQIRQQIEESTSDYDREKLQERVAKLAGGVAVIKVGAATEVEMKEKRARVDDALHATRAAVEEGVVAGGGVALVRVASAISGLTGENEDQNVGIRVAMRAMEAPMRQIVDNSGEEPSVVVNNVKAGENNYGYNATTEQYGDMIEMGILDPTKVTRSALQFAASIAGLMITTEAMVTDLPKDDKADLGAAGGMGGMGGMGGMM

SEQ ID NO: 21951 - protein, 590 aa, Pseudomonas syringae pv. tomato str. DC3000
MCGLAGELRFDHQPADLAAVERITHELAPRGPDAWGFHSQGPIALGHRRLKIMDLSDGSAQPMIDSNLGLSMAFNGAIYNFPELRAELESLGYQFHSGGDTEVLLKGYHAWGAEMLPKLNGMFAFAIWERDSKQLFIARDRLGVKPLYLSKTDKRLRFASSLPALLKGGDISGMLDPVALNHYLNFHAVVPAPRTLLAGVEKLPPASWMRIDASGKVEQKVWWTLPYGPHEDEKNLTLEDWRDRVLDSTREAVAIRQRAAVDVGVLLSGGVDSSMLVGLLREVGVEDLSTFSIGFQDAGGERGDEFQYSDLIAKHYGTRHHQLRIQESEIIEQLPAAFRAMSEPMVSHDCIAFYLLSREVAKHCKVVQSGQGADELFAGYHWYPQVDGASDPVAAYRYAFVDRSYAEYADTVQPKWRTANDAAGDFVRDHFAQPGASAAVDKALRLDSTVMLVDDPVKRVDNMTMAWGLEARTPFLDYRLVELSARIPGKFKLPDGGKQVLKEAARLVIPSEVIDRKKGYFPVPGLKHLQGDTLNWVRELLTDPSQDRGLFNPTMVDKLLTNPEGQLTPLRGSKLWQLAALNLWLSEQGL

SEQ ID NO: 21952 - protein, 217 aa, Triticum aestivum
  misc_feature (192)..(192): Xaa can be any naturally occurring amino acid
  unsure (1)..(217): unsure at all Xaa locations
AALPLYYGTPASCSGLSSVRGPFTPSQWMELEHQALIYKYLAANIAVPHNLVVPIRRSVTSLYPSAYFGSSTLGWGLFQLGYSGSADLEPGRCRRTDGKKWRCSRDAVADQKYCERHMNRGRHRSRKHVEGQPGHAAKAMPATAAAAAQPGALATGGGGGAPAGAAICHEQQPLKNYAASTIDPCSLQYNRXMVSKQQHECEQVQDSDTLLMLTFMS

SEQ ID NO: 21953 - protein, 522 aa, Pseudomonas fluorescens Pf-5
MPGRASAACARTGIFTTPGAYKSTTRDVFLTEMSTRRLSRPAQHHLWTLRPVNSVTDSPAATATATSRPARVGRELHDLLVLALPIMIAQVATTAMGFVDAVMAGRVGPRDLAAVALGNSIWIPVFLLMTGTLLATTPKVAQRFGAGNLHEIGPLVRQALWLAVVAGISALLILISAEPVLHLMNVDPELIKPCMGYLHGIASGLPAVALYYVLRCLSDGLGRTVPSMVIGLGGLALNIPINYIFIYGHFGVPAMGGVGCGWATAIVMWAMMLGMAGWIFWAPAYRKIQLFSRFDWPQGAMIGRLLSIGLPIGIAVFAESSIFAVIALLIGSLGATVVAGHQIALNVSALMFMIPYSLAMAVTVRVGQALGRQQPRNARFSAGVGMATSLAYACLSASLMFFLREPIATIYTTDPMVIQVASMLIVYAALFQFSDGIQVTAAGALRGYQDTRVTMILTLFAYWGIGLPVGYALGLTDWFGPARGPSGLWEGLIVGLSCAALMLSIRLTRSARKQIRISRSAG

SEQ ID NO: 21954 - protein, 515 aa, Zea mays
MANIDMAKILADLDRGASGGDARVPKTKLVCTLGPASRTVPMLEKLLRAGMNVARFNFSHGTHEYHQETLDNLRQAMHNTGILCAVMLDTKGPEIRTGFLKDGKPIKLTKGQEITVTTDYDIKGDENTIAMSYKKLPVDVKPGNVILCADGTISLAVLSCDPDAGTVRCRCENTAMLGERKNCNLPGIVVDLPTLTEKDKEDILGWGVPNDIDMIALSFVRKGSDLVTVRQVLGQHAKRIKLMSKVENQEGVVNFDEILRETDAFMVARGDLGMEIPVEKIFLAQKMMIYKCNIAGKPVVTATQMLESMIKSPRPTRAEATDVANAVLDGTDCVMLSGESAAGAYPEVAVKIMARICIEAESSLDHEAVFKAMIRSAPLPMSPLESLASSAVRTANKAKAALIVVLTRGGTTAKLVAKYRPRVPILSVVVPVLTTDSFDWTISSEGPARHSLIYRGLIPLLAEGSAKATDSESTEVILEAALKSAVQKQLCKPGDAIVALHRIGVASVIKICIVK

SEQ ID NO: 21955 - protein, 622 aa, Pseudomonas fluorescens Pf-5
MSAVIINLTHCDLPKFLRIHLVAVAATNGSPVRQWMNSMLSSRHRRALHLASRFVAPYRWQALGALLALIVTAGITLSMGQGIRLLVDQGFMTQSPHLLNQSIGLFLLLVLALAVGTFVRFYLVSWIGERCVADIRRQVFNHLIYLHPGFYENNRSSEIQSRLTADTTLLQSVIGSSLSLFLRNALMVLGGIVLLFVTNPKLTSIVVIALPLVLAPILIFGRRVRSLSRLSQDRIADVGSYVSETLGQIKTVQAYNHQPQDERRFAVTVEQAFDTARKRIVQRAWLITLVIVLVLGAVGVMLWVGGMDVIAGRISGGELAAFVFYSLIVGSAFGTLSEVIGELQRAAGAAERIAELLRADNIIQPPADGLVSLPARVRGDLELDGLRFSYPSRPDRFAIDGLSLSIRAGETLALVGPSGAGKSTLYDLLLRFYDPQQGRILLDGVALTQLDPLDLRRCFALVSQSPALFYGSIEENIRYGNPEATLAQVQEAAKIAYAHEFIEQMPEGYQTHLGDAGLGLSGGQRQRLAIARALLVDAPILLLDEATSALDAQSEHLIQQALPSLMKNRTTLVIAHRLATVKNADRIAVMDQGRLVAVGTHQQLIASNPLYARLAALQFSDG

SEQ ID NO: 21956 - protein, 253 aa, Silicibacter pomeroyi DSS-3
MDLFDLKGRRALVTGSSMGIGYALARGLAQAGASVVLNARDGARLAGAAEQLRGQGIEVETLVFDVTDADAVRKAVDGFEAEIGQIDILVNNAGMQHRTPLEEFPVEAFDRLMRTNVNSAFYVGQAVARHMIGRGAGKIVNIASVQSALARPGIAPYTASKGAVSNLTKGMATDWARHGLNCNAIAPGYFDTPLNAALVADPEFSAWLEKRTPAGRWGEVEELVGACIFLCSDAASFVNGHVLFVDGGITASL

SEQ ID NO: 21957 - protein, 561 aa, Vibrio vulnificus CMCP6
MTTRNTDAHWWKTATIYQIYPKSFCDSGAKGTGDIQGIISKLEYLKHLGIDAIWLTPVYQSPMVDNGYDISDYYRINPQFGTMADFDELLEKAHQLGIRLIMDIVVNHTSTEHAWFQSALGNKNSPYRDYYIWKDPVEGKVPNNWQSKFGGSAWALDEQTGQYYLHLFAKEQADLNWENPTVREEVKNVIRFWAEKGVDGFRLDVINLISKQQDFCDDEIGDGRRFYTDGPRVHDYLQEISQAVFQKYGSVTVGEMSSTTLEHCQQYSSLDGKELSMVFNFHHLKVDYSNGEKWTKAPFDFLQLKQIFNHWQTGLNGKGWGALFWCNHDQPRIVSRLGNDQVYRVESAKMLAASVHMMQGTPYVYQGEEIGMTNPGYTAIEQYRDVESTNMYQIMVEQQGIDHDEMMAILAQKSRDNSRTPMQWSEEKHAGFTQGEPWLAVASNYPKINAEAAVADLNSVFYFYKRLIELRKEEPVITQGDYQDLLPEHQSVFAYARTSAAQQLVCINNYYGEEVECVLPLDLDMRKAKCLLSNYQNQPSAMASHHQVLKPYETRILLIER

SEQ ID NO: 21958 - protein, 148 aa, Arachis hypogaea
MADPLTDEQISEFKEAFSLFDKDGDGCITTKELGTVMRSLGQNPTEAELQDMINEVDADGNGTIDFPEFLNLMARKMKDTDSEEELKEAFRVLDKDQNGFISAAELRHVMTNLGEKLTDEEVDEMIREADVDGDGQINYEEFVKVMMA

SEQ ID NO: 21959 - protein, 454 aa, Geobacillus kaustophilus HTA426
MEHSRPSLQKGLLPRHVQLMALGGMIGTGIFKGSAEAIHIAGPSVVLTYLIGGVLLFWIMAALAEMAIAYPGSNVQHLIRRAFGFRLSWIVGWLYWINWTLVTVVELLAAGSFLNYWVPSAPLWLLALLCACLIMGLNLFPVKYYGEAEFWLAGLKVAALVVFIVLGACVWAGVIPSGISGSFPSAGDGGWFPHGFAGTLSALLIVMFSYGGAELIGVAVTEMKDAEQVLPRVIRTTIWRVVGFYLLPMAIICGIMPWNTVSETNSPFVQVLEAIGLPGAAHVMNAVLLIAVLSAANTGVYATSRLLYTMAEQGEASRRLQRTTKHGVPLYGMGMVAICIAAGVIGAYLAPGRIIGELMTIPGFTVLIVWMMIGAAQLKLRPHYKTKPFFRTKGFPYTTMAAVGALGAIWLGFLLQREHRIGSLLCVAVLVLLFIYSTVKEKQHQATKAPGRTA

SEQ ID NO: 21960 - protein, 216 aa, Oryza sativa (japonica cultivar-group)
MESSAAEMNPFPPIRKDTDGDNFDTLWDVYPALWLTGAWEEEEVGVGVMDRQRQQSSRGNASATATRGGGGGGGGKGGGNGKAAAAGKKPIKVVYISNPMRVRTSAAGFRALVQELTGRNADPSKYSPRASAGDDGGGATALPDTGAASDADALEAGAAPGRHPAETATFDEGGGGGGGGYDDDDDDVFRSQLLDTSYSVFSPPTLLYDDHPHSKV

SEQ ID NO: 21961 - protein, 235 aa, Ralstonia metallidurans CH34
MTKFHHRAHPESHRTEHIGWLRAAVLGANDGIISTASLVAGVAAAHASHASIMTTAIAGLVAGAMSMAAGEFVSVYSQADTEKADLARERDELKNSPEAEHRELTAIYVRRGLDHRLADQVATQLMVHDALGAHARDELGISETLSARPLQAAMASAGSFAVGAAMPLAVVLLAPEQSLLYWIVATAIVFLALLGAAAAAVGGTPLFKSALRVAFWGTFAMAVTAGVGAMFGTAV

SEQ ID NO: 21962 - protein, 190 aa, Prunus armeniaca
GFFEVTQDVPQLTCADFLRAPGVQTPVIVRFSTVIHERGSPETLRDPRGSAVKFYTREGNFDLVGNNFPVFFVRDAMKFPDAIRAFKPNPKSHIQETWRILDFFSHLPESLHTFAFFYDDLGIPQDYRHMEGSSVHAYTLVSKAGKVHYVKFHWKPTCGVKCLLEDEAIKVGGANHSHATKDLYDSIAAG

SEQ ID NO: 21963 - protein, 579 aa, GIBBERELLA ZEAE PH-1
MFSAVLLGQLLRGKPLQSITSRNFASGKGSRGSNGRKSGPRRPLLYASAGVGTIGATALALGDDIKNSYEAAERIWRKGYRTDGLHSYRTTLNAREATEDHDEQENMLKACHKRCAERTLVVLEKNGGIFIKLGQHLSAMNYLLPSEWTNTFIPLQDKCPVSSLESIEDMFRQDTGEELWDYFSDFASEPIGAASLAQVHLATIKGSDQKVAVKVQHPELQGWAPLDLALTRYTFSTLKRFFPEYDLEWLSSEMDVSLPKELDFQEEADNARRMKEHFAKIPQLPLIIPEVIWAKQRIIVMACEAGSRLDDLEYMDKNGIDRDEVSATLSRIFNEMIFGDGAPLHCDPHGGNIAIRKNTSRRGLGRGPNFDVILYDHGLYRDIELPMRRSYAKMWLAVIDGDMDRMKKYAHEVAGIEDKDFPLFASAITGRDYSIVSKSGSILENRTADEQKTMSGALQEGLIVDLVQLLSRVPRIILLILKTNDLTRSLDENLQTRQGPIRSFMILARYCTKTVFHEKLEEISQNGSLLWPLNAVRLIAAWVGFMRVEIKLEAFELWLFTKRMLGMGNGEFSGAAFQK

SEQ ID NO: 21964 - protein, 148 aa, Arachis hypogaea
MADPLTDEQISEFKEAFSLLDKDGDGCITTKELGAVTRSLGQNPTEAELQDMINEVDADGNGTIDFPEFLNLTARKMKDTDSEEELKEAFRVFDKDQNGFISAAELRHVMTNLGEKLTDEEVDEMIREADVDGDGQINYEEFVKVMMA

SEQ ID NO: 21965 - protein, 113 aa, Daucus carota
MASGQEKRSELDARAKQGETVVPGGTGGKSLEAQEHLAEGRSKGGHTRKEQLGTEGYQEIGTKGGETRREQMGKEGYEQMGRMGGLATKDKSGAERAEEEGIDIDQSKFRTKS

SEQ ID NO: 21966 - protein, 213 aa, Glycine max
  misc_feature (191)..(191): Xaa can be any naturally occurring amino acid
  unsure (1)..(213): unsure at all Xaa locations
MGRRPARCYRQIKNKPYPKSRYCRGVPDPKIRIYDVGMKRKGVDEFPYCVHLVSWEKENVSSEALEAARIACNKYMTKSAGKDAFHLRVRVHPFHVLRINKMLSCAGADRLQTGMRGAFGKPQGTCARVDIGQVLLSVRCKDNNAAHASEALRRAKFKFPGRQKIIESRKWGFTKFSRADYLKYKSEGRIXVPDGVNAKLLGNHGNLRTCWKS

SEQ ID NO: 21967 - protein, 242 aa, Staphylococcus aureus subsp. aureus MRSA252
MTKLFIPYIMGNKDLIENATLLSENGADIIEIGVPFSDPVADGPVIMEAGQQAIKQGITIDYIFEQLEKHGNQIKCQYVLMTYYNIICHYGEQAFFEKCRDTGVYGLIIPDLPFELSQRLKQQFSHYGVKIISLVAMTTDDKRIKDIVSYAEGFIYTVTMNATTGQNGAFHPELKRKIESIKAIANVPVVAGFGIRSPQHVADIKEVADGIVIGSEIVKRFKSNTREEIIKYLQSIQQTLNN

SEQ ID NO: 21968 - protein, 327 aa, Chlamydia muridarum Nigg
MSSQFDQLKLWSVLVGDSGDPDLIKTLDVQDATTNPSLILKVAQEPKYQSMLTEAISWGIRQNGDDVQTLTFVLDKIQVNLGLEILKYVPGRVSLEIDARLSFNTEAMVQRAIFLSQLFEKMGGDKKRLLIKIPGTWEGIRAAEVLENQGIACNVTLIFSLVQAIAAAKAKVTLVSPFVGRIYDWWIAAYGAEGYSIEADPGVASVANIYSYYKKFDIPTQIMAASFRTKEQVLALAGCDFLTISPKILEELKKEQQPVERKLSVEEAKKLDIQPVELSESVFRFLMNEDAMATEKLAEGIRIFSGDTQILESAVTEFIRQIAAQEA

SEQ ID NO: 21969 - protein, 201 aa, ASPERGILLUS NIDULANS FGSC A4
MSSRKKVMLKVIILGDSGVGKTSLMNQYVNKKFSGSYKATIGADFLTKEVLVDDRLIWDTAGQERFQSLGVAFYRGADCCVLVYDVNNSKSFEALDSWRDEFLIQASPRDPESFPFVVIGNKIDMEESKRMISSKRAMTFCQSKGNIPYFETSAKEAVNVEQAFEVIARSALAQEEAEEYGGDYTDPINIHDTTERDGCAC

SEQ ID NO: 21970 - protein, 380 aa, Saccharomyces cerevisiae
MNCIPSPISERKIQINNEDCIGKENAFHTIPRESSINLTPHSTNEKKVLSEVNSNKIDSLQLPRGKLQRDSTHLEKTRKRQLSNDSTDPIEPKTVKKIKCHQWKNLDSIEMDDPFMVAEYTDSIFSHLYEKEIQMLPTHNYLMDTQSPYHLKSSMRALLIDWLVEVHEKFHCLPETLFLAINLLDRFLSQNVVKLNKLQLLCITCLFIACKFEEVKLPKITNLAYVTDGAATVEGIRKAELFVLSSLGYNISLPNPLNFIRRISKADNYCIETRNMAKFIMEYSICCNKFIHLKPSYLAAMSMYIARKIKNENSKWDETFIHYSGGIDIESDPAFKDFISELVEDIAVPDTNLDSLRLKYKKPKHGMVYFKVFDWCKQKR

SEQ ID NO: 21971 - protein, 334 aa, Nostoc sp. PCC 7120
MSSKIAFVTGATGLLGSNLCRALVSQGWQVKGLVRSLDKAKRFLGNSGIEFVQGDIEDVPAFTQALKEVDAVFHTAAFFREYYQPGSDWQKMKRINVDATMELLQAAEAQGVAKVVFTSSSGVIQTDTHQAATETAPYNKFAEQNLYFKTKVLAEQEIYRFLNASQIDVVMILPGWMMGPGDAAPTSAGQLVLDLLAGKLPGVINGGAALTDVRDVAAVMVKAAEQGERGGRYIVAGPLTTMKDIALELEAISGVKAPRIEIPDGMAIAIAWFLEKLTGLTGGVNPMPLAGIQTLLEKAKLSSAKAERDLGATFRPLRDTLKDTVLWYESQGYL

SEQ ID NO: 21972 - protein, 328 aa, Triticum aestivum
  misc_feature (146)..(146): Xaa can be any naturally occurring amino acid
  unsure (1)..(328): unsure at all Xaa locations
MRPILMKGHERPLTFLKYNRDGDLLFSCAKDHTPTVWYADNGDRLGTYRGHNGAVWSCDVSRHSTRLITGSADQTAKLWDVKTGKELFTFRFDAPARSVDLAIGDHLAVITTDSFMGNMPTAQVKRIAEDLQEQTEESALVISGIXGRVNRARCGAPATGTIIPAGWGGHQSASWDSETGKLLKESDKEVGHQKAISSLSKSLDWSHFLTGSLDKSAKLWDARTLTLIKTYVTERPVNAVDISPTLDHVVMGGGQDAMNVTMTDRRAGKFEAKFFHKILEEEIGGVKGHFGPINALAFNPDGRSFSSGGEDGYVRLHHFDPEYFNIKM

SEQ ID NO: 21973 - protein, 431 aa, Escherichia coli
MVSLEKNDHLMLARQLPLKSVALILAGGRGTRLKDLTNKRAKPAVHFGGKFRIIDFALSNCINSGIRRMGVITQYQSHTLVQHIQRGWSFFNEEMNEFVDLLPAQQRMKGENWYRGTADAVTQNLDIIRRYKAEYVVILAGDHIYKQDYSRMLIDHVEKGVRCTVVCMPVPIEEASAFGVMAVDENDKTIEFVEKPANPPSMPNDPSKSLASMGIYVFDADYLYELLEEDDRDENSSHDFGKDLIPKITEAGLAYAHPFPLSCVQSDPDAEPYWRDVGTLEAYWKANLDLASVVSKLDMYDRNWPIRTYNESLPPAKFVQDRSGSHGMTLNSLVSGGCVISGSVVVQSVLFSRVRVNSFCNIDSAVLLPEVWVGRSCRLRRCVIDRACVIPEGMVIGENAEEDARRFYRSEEGIVLVTREMLRKLGHKQER

SEQ ID NO: 21974 - protein, 299 aa, Zea mays
ACSIGSWNKTMESEIMASYETKQNCEIRVFESSDEMATDLAEFISQASEISVKERGCFAIALSGGPLVRHMRKLCEAPYNKTLDWSKWYIFWAEERAVAKNHAESNYKLTKEEFLSKVPILNGHVYSINDNATVEEAASDYEFVMRQLVKVRTVGVSESNDCPRFDLVLLNIGPDGHVASLFPNHPALELKGDWVTYITDSPEPPPERITFTLPVINSASSVAIVATGEDRARAVSFSVSACQDQEEGEGPADDDARTTMIPPASMVQPTDGKLVWFLDEAAASCLEASNGACEHQEGY

SEQ ID NO: 21975 - protein, 361 aa, Ipomoea hederacea
MAMPGNYVNAIAEAEAETGTKFGCFLTDAFLWFGGDLAAERGGVPWIALWTAGACSISAHLYTDFVRSLAAATPTANGNGMEQKLKVIPGMSEISIGEMPGEILAKDLQAPFPGMIYNMALKLPGANAVVLNSFQNLEPTVTEDLRSKLQKVFNIGPMILRQAAATPKPPIISDDHNCIPWLDSLPPASPPAVYLSFGSGLTPPPDEIVALAEALEAKRAPFLWSLKPHGVKHLPEGFLERTKEFGKIVPWAPQVQVLSHPGVGAFLTHCGWNSTLEAISFGVCLICRPFYGDQQINSRFVESVWEIGVKVEGGKFTKDETLKALNVVLDSDRGKLLKENVVKLKGEAMEAVKPNGSSTKD

SEQ ID NO: 21976 - protein, 387 aa, Oceanobacillus iheyensis HTE831
MKQLLNQKMEEIIPSLIDISDHLYYHPELGDQEFKSMKLLTSLLEKHGFQVQTNIVERQTAFHATFSGAQTGPNIAYLAEYDALPGVGHGCGHNLIGTMSVGAAIALSKLMSEVGGTVHVFGTPAEETNGAKVPMSEQGIFDELDAAMILHPGDVSHESGDALAMDALQFSYTGKPAHAAAAPEQGINALDSVIQLFNGINALRQHVTSDVRMHGIITEGGVAANVVPEKATAQFYIRAKDRNYLNRVVDQVRDIAIGAAAMTGASLEITNYELSYDNMITNQRLSEVFTKNLKETSELPVHPQKESYGSIDMGNVSQVVPAIHPYIGMNKSGIIAHTTEFADQTITDDGHKTLYDGALSLAKTGYDLLTDKALLHSVRQEFTQLKK

SEQ ID NO: 21977 - protein, 158 aa, Oceanobacillus iheyensis HTE831
MSVHDFTVTTIEGEEKRLSDYKGKVILIVNTASQCGFTPQLEDLQKLYKQYQDNDFEILGFPCNQFGNQDPGASEEISAFCQKNYGVTFQMFKKVDVKGKEAHPLYKHLTEEKKGILGGQIKWNFTKFLIDQNGNVIERFSPQKNPNTLNKDIEVLLR

SEQ ID NO: 21978 - protein, 268 aa, Glycine max
MDKSEQTQQQHQHGMGVATGASQMAYSSHYPTAPMVASGTPAVAVPSPTQAPAAFSSSAHQLAYQQAQHFHHQQQQHQQQQLQMFWSNQMQEIEQTIDFKNHSLPLARIKKIMKADEDVRMISAEAPVIFAKACEMFILELTLRSWIHTEENKRRTLQKNDIAAAISRNDVFDFLVDIIPRDELKEEGLGITKATIPLVNSPADMPYYYVPPQHPVVGPPGMIMGKPVGAEQATLYSTQQPRPPMAFMPWPHTQPQQQQPPQHQQTDS

SEQ ID NO: 21979 - protein, 330 aa, Lactobacillus acidophilus NCFM
MKVLVVGGAGYIGSHAVRELVKEGNDVVVLDSLYTGHRKAVDPKAKFYQGDIEDTFLVSKILRDEKIDAVMHFAAYSLVPESVKKPLKYYDNNVSGMISLLKAMNDADVKYLVFSSSAATYGIPKKLPITEDTPLDPINPYGETKMMMEKIMAWADKADGIKYTALRYFNVAGASSDGTIGEDHGPETHLIPNILKSAISGDGKFTIFGDDYNTKDGTNVRDYVQVEDLIDAHILALKHMMKTNKSDVFNLGTAQGYSNLEILESAKKVTGIDIPYTMGPRRGGDPDSLVADSTKARTILGWKPKHENVDEVIETAWKWHKSHPKGYEDK

SEQ ID NO: 21980 - protein, 1004 aa, Arabidopsis thaliana
MTIFARDLIYRIETKVLLPLFLVHLLPYVTCQQESESVDRNRKTNFPTETVIAIIVLAIFISLSMVACFLHKTFYRAEVEAASQEVFHSRARRGLEKELVESFPIFLYSEVKGLKIGKGGVECAICLSEFVDKETLRWMPPCSHTFHANCIDVWLSSQSTCPACRANLSLKPGESYPYPITDLETGNEQRDEHSLLQLGTNLDRFTLQLPEEMQRQLVSLNLIRTSNMTLPRAMSSRQGYRSGFSHGRQTLRRAISMSLSFSLQAASVRSTVGRDDLVLETSQAKDKDLCEQSFQHLMPEKILLIYESESLKCNNFFFSFSRYNQNQNLIEDVNIMNIFTRYHLPRVVSGVILPLFLFHLLPYVTCQQESVPTNSIRQTNLSADSIIAIVVLAIFISLGMVSCCLHCIFYREEIGAAGQDVLHSRARRGLEKEVIESFPTFLYSEVKGLKIGKGGVECAICLSEFEDQETLRWMPPCSHTFHANCIDVWLSSWSTCPVCRANLSLKPGESYPYLNMDVETGGVQKLPNERSLTGNSVTTRSRSTGLLSSWRMAEIFVPRSHSTGHSLVQQLGENLDRFTLQLPEEVQRQLVSLNLIRRSHIVLPQAVSSRQGYRSGSVGSERGGFSQGRQTHRRALSMSFSFSFQTASVRSIHDMNDQAQAKDKYFGERSFERLMPEEKQGSESAGRNGKSKESSIIGIVLLSLFLLLLVVYCLNYGCCIEENETGGHEVLHSRVRRGIDKDVIESFPAFLYSEVKAFKIGNGGVECAICLCEFEDEEPLRWMPPCSHTFHANCIDEWLSSRSTCPVCRANLSLKSGDSFPHPSMDVETGNAQRGVQESPDERSLTGSSVTCNNNANYTTPRSRSTGLLSSWHVPELFLPRSHSTGHSLVQPCQNIDRFTLQLPEEVQRQLVSLNLIKRSHIALPRARSSRQGYRSGSVGNERTGFARGRQTLRRAISTSLSFSFQPAPVRSTLDRDNLMRETSQANDKDFGERSFQRLMPEKN

SEQ ID NO: 21981 - protein, 150 aa, Betula pendula
GVKCLLDDEAIRVGGANHSHATKDLYDSIGAGNYPEWKLYIQIIDPDHEDKFDFDPLDVTKIWPEDILPLQPVGRLVLNKNIDNFFAENEQLAFCPSIVVPGVYYSDDKLLQTRIFSYSDTQRHRLGPNYLQLPANAPKCAHHNNHHEGF

SEQ ID NO: 21982 - protein, 517 aa, Oryza sativa
MGIFKLNLLLKLQRQRQRRRRQIQARNGSVLIHPRDKINAPACQNNTHSWSGQAKCSDPTLPEDISCHIHSLMSMRDAARVACVSRAFARSWRCLPNLDFSEESLGINRSTCKKDEKLGDLTSKIDWILKNHSGIGIKKLIIQVGSVYSRDSSHLAHLDSWLQCAVKPGIEELIVNLSSMNAKCNFPCELLSSGTGDSLRYIYLASCNFHPTVRIGCLKSLTRLQLCMVNITENELRCLLSISLGLERLELRHCSTLKCLKVPCLQRLSYLDVMTCTGLQVIESKAPNLSSIRFEGDLYVQLSLGEPLQIKQLYRLCNDAAFYARTELPSSMPNLERLIIHSDTEMVNTPMVPSKFYHLKYLSIALGGQTYDYLSLVSFFDASPFLETFILNALRERTERATIFGDPSGLRMMPEHRHDKLKCVKIINFSSVKTLVELTCHIVESATALECLTLDTTSGSPRCSVNRLGKCFLMRRETLMEAHRALKAVQTYIELKVPSKVELNVLEPCSRCHALDL

SEQ ID NO: 21983 - protein, 446 aa, Dechloromonas aromatica RCB
MFATAVRGLIAHAFPILIAQLSSIGMMVVDTAVLGHVSSLDLAAVAIGGGIHVSVVFALVGILQAVAPVVAHLHGAKRDDEVAGILQQGFWLALLLSVPGILFLTHPGVALGMADMDAAVEAKVRQYLGLLAWSLPASLCYRTFWAFCNALGKPRVLMGIGFFSLCLHAVLAWGLALQGWLGEPLGVVGCALSNVLIGWLACLSGGAYLAFGPLGKRYQPFADWQSPRWPIWRELLRIGVPMGLSNLVEITSFTLIALFVASLGAPVVAGHRIVANISALIYMLPLSLAIATMAALGQAVGARDPLRARATIRAGLVLAACSSSMLGLLLWLGAQPLINAYTDDPAVRSVALGLVAYIAIYQFFDALQTIAGHCLRAYRVTFFPMLVQTFCFWGIGLLGGAWLCYRWQPPLGVAGFWLASVISLVFAAVMLLPLLGKAIQAAESTP

SEQ ID NO: 21984 - protein, 394 aa, Rhodopseudomonas palustris CGA009
MLRPSSKQFFAGEHDLASRSAELFGPLSGARHSALLVTCPSEAADDPTFMLRLAERGVEAVRINCAHDDAAAWQRMINHLHVAEEATGRRMKVLMDIAGPKIRTGDARTPDGRDRIVTGDLVAIVAQGEFERIDLDDEHFAVECTLPDPLTRAAVGARVFVDDGKLCVRIERKTAWGLLGRVTATADTGFRLKPEKGLNFPDTPLDIPALTAKDRADLDFVAAHADGVEFSFVQSVGDVKMLQAALAERRPDDWHKLSLVLKIETPDAVAHLPDILVQAAGRQPTAVMIARGDLAVEIGFARLAEMQEEILWIGEAAHVPVIWATQVLEHLVKKGTPSRGEMTDAAMAARAECVMLNKGPYLFKAITELDTLLGRMADHQHKKTPQLRRLRSWG

SEQ ID NO: 21985 - protein, 316 aa, Methylobacillus flagellatus KT
MANLFDQLKEFTTIVADTGDVEAIKSVKPYDATTNPSLLLKASTIPQYAPLIDEAIAYAKSQSGDKAQQIEDAADKLAVLIGLEILKHIPGKISTEVDARLSFDTEAMVQKGRKLIKLYEDAGIAKDRVLIKLASTWEGIKAGEILEKEGINCNLTLLFSFAQARACAEAGVFLISPFVGRILDWYKAKTGETYTAETDPGVQSVRKIYAYYKEHGYKTVVMGASFRNTGEIIALAGCDRLTVSPNLLEELKATEGKLERVLVDNGVTKQRPPLLTEKEFRFDLNEDAMATEKLAEGIRGFVVDQNKLEKALAEKL

SEQ ID NO: 21986 - protein, 412 aa, Shewanella oneidensis MR-1
MRRLAIPLQGAQMLFVAFGALVLMPLLTGLDTSVALFTAGIGTLLFQLITKRQVPIFLASSFAFIAPILYGVQTWGIPSTMGGIMAAGVVYVCLGALVKVRGTDFIHKLLPPVVVGPVIIIIGLGLAPVAVNMALGKSGDGSLALVPTNTALIISLVSLCTTIAVAIFAKGLLKVMPILAGIIVGYGLSLAFGIVDFSVVTAANWIAIPKFVAPEFNWHAIAFMIPVAIAPAVEHIGDILAISNVTGKDFMKKPGLHRTLTGDGVATIAAAAFGGPPNTTYSEVTGAVTLTRNFDPRIMTWTAITAITLAFVGKLGALMQTIPVPVMGGIMCLLFGSIAAVGLNTLIRNHVDLSEPRNLSIVGVTLVFGIGGMAFGIGSFSLTGISLCGIVAITMNLLLPASKHHKQDVASH

SEQ ID NO: 21987 - protein, 513 aa, Triticum aestivum
  misc_feature (237)..(237): Xaa can be any naturally occurring amino acid
  misc_feature (387)..(387): Xaa can be any naturally occurring amino acid
  unsure (1)..(513): unsure at all Xaa locations
MAVGGDDDMERDFAARLRLAPSNPSSASASASASPTAASPTAGGGGIAFRAPQEQFTAADFELGKIYGVGSYSKVVRARKKDTGNVYALKIMDKKFITKENKISYVKMERIVLDQLDHPGVIRLFFTFQDTYSLYMALESCEGGELFDQIVRKGRLSEDEARFYAAEIVDILEYLHSVGLIHRDVKPENLLLTSDGHIKIADFGSVKPTVDTPIKVLPNSTNERACTFVGTAAYAAXAEVLNSAPATFGNDLWALGCTLFQMLSGSSPFKDASEWLIFQRIIARDLRFPEFFSDEARDLIDKLLDVDPTKRPGAGPDGYASLKKHPFFRGIDWKNIRKTRAPKPAVEANANEDEDNQDSDWLSHMGSAHANQNVPVGNNGAASSSEXRRKMKTGGNGRLHAHNFSTSERQDFLEPDESVVLISKLKKINKLSNKKVQLILTNKPQLICVDPAKMVTKGNISWSDDPSELNVQVANSSHFRISTPKKVFVFEDAKQRAWQWKNAIEDLQHCQKS

SEQ ID NO: 21988 - protein, 109 aa, Methanosarcina barkeri str. fusaro
MARDIGLNIPAPSEECNDSYCPFHGTLSVRGQILVGTVVSSKMDNTVVIERQYMKLVPKYQRYEKRRSKVHAHNPPCISAKVGDIVTIAECRRISKTKSYVVVKAEVPK

SEQ ID NO: 21989 - protein, 596 aa, Rickettsia sibirica 246
MTKAYNIIHHKFDVVVVGAGGAGLRSAFGMAKEGLNTACITKLFPTRSHTVAAQGGISAALGNMGEDDWRWHMYDTVKGSDWLGDQDAIEYMCKNAPDAILELEHYGVPFSRTEEGKIYQRPFGGMTTEYGKGKAAQRTCAAADRTGHAILHTLYQQSLKHKVQFFVEYFAIDLLMEDGECRGVVAWNLDDGSLHCFRAHNVVLATGGYGRAYFSATSAHTCTGDGGGMAIRAGLPLQDMEFVQFHPTGIYSAGCLITEGARGEGGYLVNANGERFMERYAPAAKDLASRDVVSRAMTIEIREGRGVGEHKDHVFLHLNHLSPEILHSRLPGISETAKIFAGVDVTKEPIPVLPTVHYNMGGIPTNYHGQVIIKDGKNHNSVVKGLMAIGEAACVSVHGANRLGSNSLLDLVVFGRSSALKAAELIKSASPHKSIKEESLEKIINRFDKVRHANGNILVAELRLKMQRTMQSHASVFRTQEVLDEGAGMISEIRSGYKDIKINDKSLIWNSDLVEALELDNLLDQALVTVYSAAARKESRGAHAREDYPDRNDEDWMKHTLSSIDEAGKVVLDYKPVTLTTLTDEVTAVPPVKRVY

SEQ ID NO: 21990 - protein, 147 aa, Vibrio parahaemolyticus RIMD 2210633
MPKIVKKEPKFVEQSGKKVTKSDEQWREQLSDEEFRVCREQGTEPPFSGKLLHNKETGVYACTCCNAPLFISDNKYDSGCGWPSFDAPLNNEAIRYLEDLSHGMVRTEIRCASCDSHLGHVFEDGPKTTGERYCVNSVSLIFNKSDE

SEQ ID NO: 21991 - protein, 331 aa, Vibrio parahaemolyticus RIMD 2210633
MTIKVGINGFGRIGRFVFRAAQERADIEVVGINDLIDVEYMAYMLKYDSTHGRFNGTVEVEGGNLIVNGKTVRVTAERNPADLKWDEIGVDVVAEATGLFLTDETARKHIEAGAKKVVLTGPSKDATPMFVMGVNHATYAGQDIVSNASCTTNCLAPIAKVLNDKFGIESGLMTTVHATTATQKTVDGPSAKDWRGGRGASQNIIPSSTGAAKAVGVVLPELNGKLTGMAFRVPTANVSVVDLTVNLKEGASYEAICAAMKEASEGELKGVLGYTEDQVVSQDFIGEVQTSVFDAKAGIALTDNFVKVVSWYDNEIGYSNKVLDLIAHISK

SEQ ID NO: 21992 - protein, 529 aa, Arabidopsis thaliana
MGHRHSKSKSSDPPPSSSSSSSGNVVHHVKPAGERRGSSGSGTVGSSGSGTGGSRSTTSTQQNGRILGRPMEEVRRTYEFGRELGRGQFGVTYLVTHKETKQQVACKSIPTRRLVHKDDIEDVRREVQIMHHLSGHRNIVDLKGAYEDRHSVNLIMELCEGGELFDRIISKGLYSERAAADLCRQMVMVVHSCHSMGVMHRDLKPENFLFLSKDENSPLKATDFGLSVFFKPGDKFKDLVGSAYYVAPEVLKRNYGPEADIWSAGVILYILLSGVPPFWGENETGIFDAILQGQLDFSADPWPALSDGAKDLVRKMLKYDPKDRLTAAEVLNHPWIREDGEASDKPLDNAVLSRMKQFRAMNKLKKMALKVIAENLSEEEIIGLKEMFKSLDTDNNGIVTLEELRTGLPKLGSKISEAEIRQLMEAADMDGDGSIDYLEFISATMHMNRIEREDHLYTAFQFFDNDNSGYITMEELELAMKKYNMGDDKSIKEIIAEVDTDRDGKINYEEFVAMMKKGNPELVPNRRRM

SEQ ID NO: 21993 - protein, 335 aa, Geobacter metallireducens GS-15
MSEVRKGEGMTVLVTGGAGYIGSHVVRQLSEAGYTVVVYDNLSTGFADALVHGERLVVGELADSDRLDALFAEHGFKTVLHFAASIVAPESVTDPLKYYSNNTRNTLNLLTACVKHGVERFIFSSTAAVYGMPENGIAAEESPTVPINPYGTSKLMSEWMLRDVCAAHGMRSVALRYFNVAGADPQARMGQRTPEATHLIKVSSQAALGMREKVSIFGTDYATPDGTGIRDYIHIEDLASAHLAALAYLERGGETTRINVGYGKGASVREVIEMVRRVSGVHFPAEEAPRRPGDPAMLVAKADRARTVLGWTPHYDDLETIVADAWRWEAKLNKR

SEQ ID NO: 21994 - protein, 176 aa, Thermoplasma volcanium GSS1
MVTKPARMYTRITGPAYTRKEFMGGVPYPKITTFVQGNQKRDFPIEMQLIAMESCQVRHTALEAARVSVNRRMTEAAGLDNFYLKVVPYPHHVLREHKMATGAGADRISSGMRAAFGRPVGTAARVYQNDVIMIGRTDEAHAHELKIALKKAAIKLPTPCKVVITKGKEIAGAIGV

SEQ ID NO: 21995 - protein, 619 aa, Zea mays
MWRSCVSRGLSRAKASASRLLSTASSSYTVVDHTYDAVVVGAGGAGLRAAIGLSEHGFNTACITKLFPTRSHTVAAQGGINAALGNMSEDDWRWHMYDTVKGSDWLGDQDSIQYMCREAPKAVIELENYGLPFSRTEEGKIYQRAFGGQSLDFGKGGQAYRCACAADRTGHAMLHTLYGQAMKHNTQFFVEYFALDLLMDNEGKCQGIIALNMEDGTLHRFRASNTILATGGYGRAYFSATSAHTCTGDGNAMVARAGLPLQDLEFVQFHPTGIYGAGCLITEGSRGEGGILRNSEGERFMERYAPTAKDLASRDVVSRSMTMEIREGRGVGPLKDHIYLHLNHLPPEVLKERLPGISETAAIFAGVDVTKEPIPVLPTVHYNMGGIPTNYHGEVVDIKGDNPDAVVPGLMAAGEAACASVHGANRLGANSLLDIVVFGRACANRVADISKPGEKQKPLEKDAGEKTIAWLDKLRNANGSLPTSKIRLNMQRVMQNNAAVFRTQETLEEGCELISKTWESFHDVKLSDQSLIWNSDLIETLELENLLINACITMYSAEARKESRGAHAREDFTTRDDEKWMKHSLGYWENEKVRLAYRPVHMNTLDDEVESFPPKARVY

SEQ ID NO: 21996 - protein, 1035 aa, Desulfovibrio vulgaris subsp. vulgaris str. Hildenborough
MYEGWEASRLPSQGESLNMPGMTYDQRTESTGPQVKDEAAGSAEVQALRERIARLEDENRLLRLCARFEGPAPGEALGSLLPEIIAPASDAPLVYAYVSDMQTHELLFVNRSLTMAVGAWQGRKCYELLQGRDTPCPFCTSGRLQRNPERPVVWEWRNPRLGRWFRCIDRCIHWPDGRPVRYELAVDITDMREAQEDLLRFRAALDASAEAIFLVDLEEGRFLDVNSGACTMLGYDRDTLLGLGLCGIRRSMAADGCRQILDSIAAGAVLENVETVYLHRDGTFVPVEVGARLVDRVGGPRLAIMVARDVSEKRKARRAMEVRYLYEHVLSSCARELLSRSCSESTLVGVLGALRQGAGACRAYIFENYEDAEGRLCCSQRYESSAPGVRPELDNPALQNIIYASEAPNWLHELRKGRAVVGPVADQPLPERDVLQAQGIRSLLVLPIFARGVWCGFVGFDDTRTERTWQGGDILFLQTASEILGAALERHRAEAELAASHQRAEEASRAKSVFLANMSHEIRTPLNAIIGLTELTLQEPISQGVGENLRGVLHSAEALLAVVNDLLDLSRVESGRLHLESVEFSPSRLARGVVRLMTHVADRKGLDFELYIARDVPPTVTGDPARLRQVLLNLVGNALKFTDEGGVSLTVTPCICSTDTGGGILKGGNGGVRGLRFTVTDTGIGIPPDRQACIFESFVQADESTARRFGGTGLGLAISRRLVEMMGGRLELRSEPGKGSEFWCDVPFASEGAARDGICEVACVATPDAPSGTGRRPEGRGAGDRRLEAAPLRILVVESDPLCRRAMVKSLGRRGHAVTALSALSEAAEVLVAERHDAVVVEATPGAWAFCESLRQGGYGANRAALPLVFICDGDTFLPESVEPLAAPHALLSRPVKGRALCEAVEHLAGADAGQPASERVALPEDVPLLQPGALLLTAPDAQMRFVRQVPSLRESLWSAMDRGSRVELASLAHLLRHEAEGIGALRLQVLAERLEDRVRIGATEDARPVFMLLADALNQLEHDLRKLVPALSED

SEQ ID NO: 21997 - protein, 691 aa, Oryza sativa
  misc_feature (513)..(513): Xaa can be any naturally occurring amino acid
  unsure (1)..(691): unsure at all Xaa locations
MAISTWSTRLLLSPSASASSHRPNPTRRLAFPSPISGPGRQAPRAYISAPASGPDAYPSPALDAAAAAADVAAAIASSDAVTWAGVWALLSPHRARIAVSLAALLACTTCTLSMPLFSGRFFETLIGRGSEPLWRLLSKIAVLYTLEPIFTIVFVINMTVIWEKVMARLRSQIFRRILIQKMVFFDRHKVGELTGLLTSDLGTLKSVVSDNISRDRGLRALSEITGTLCILFTLSTELAPVLGLLMVSVSVLVALFKRSTVPTFKSYGIVQARISDTASETFSAIRTVRSFGGEERQISMFDNLALAFQNSGTKLGVLKSANESLTRVVVYVSLMALYVLGGSKVNAGKLSVGTMASFIGYTFTLTFAVQGAVNTLGDLRGTFASVERINSILSAEDIDDSLAYGLAKELEDSNGAVHENGTANKHYMSALKSSSSCSNLAWSGDIHLEGVHFSYPLRSDVEILNGLDLTIECGKITALVGPSGAGKSTVVQLLARYYEPTHGRITVAGEDIXRVFDKREWSRVVSLVNQDPVLFSVSVGENIAYGLPDDVVSKDEIIKAAKAANAHEFIVSLPQGYDTLVGERGSLLSGGQRQRIAIARALLKNSPILILDEATSALDTTSERLVQEALNHLMKGRTSLVIAHRLSTVQNAHQIAVCSDGKIAELGTHAELVASGGRYASLVGTQRLAFE

SEQ ID NO: 21998 - protein, 146 aa, Arabidopsis thaliana
MKATEEAKEAGALLSYDPNLREPLWPSPEEARTQIMSIWDKADIIKLLLVTLGEKGCRYYTKDFHGSVETFHVDAVDTTGAGDSFVGALLNQIVDDQSVLEEEERLRKVLRIANACGAITTTKKGAIPALPTDCEALSFLKRQVEQ

SEQ ID NO: 21999 - protein, 356 aa, Ipomoea trifida
MAMPGNYQTAIAEAEAEMGTKFGCFLTDSFLWFGGDLAAERGGVPWISFWTAGACSISAHLYTDFVRSLVAATPNANGNELDQKLKVIPGMSEVSIGEMPGEILAKDLQAPFPGMIYNMALKLPGANALVLNSFQKLEPTVTDDLRSKLQVFNIGPMILQPATPKPPISDDHNCIPWLDSLPLASPAVYLSFGSGITPPPDEIVGLAEALEAKRAPFLWSLKPHGVKHLPEGFVERTKEFGKIVPWAPQVQVLSHPGIGAFVTHCGWNSTLEAISFGVCMICRPFYGDQKINTRFVESVWEIGVKVEGGIFTKDGTMKALNVVLDSDRGKLLKQNVVKLKGEALEAVKPNGSSTKD

SEQ ID NO: 22000 - protein, 215 aa, Brassica napus
  misc_feature (10)..(10): Xaa can be any naturally occurring amino acid
  misc_feature (70)..(70): Xaa can be any naturally occurring amino acid
  misc_feature (76)..(76): Xaa can be any naturally occurring amino acid
  misc_feature (88)..(88): Xaa can be any naturally occurring amino acid
  misc_feature (108)..(108): Xaa can be any naturally occurring amino acid
  misc_feature (121)..(121): Xaa can be any naturally occurring amino acid
  unsure (1)..(215): unsure at all Xaa locations
KNLLGAVYNXKAKIQDKEGIPPDHQSLIFAGKQLYYLRTLADYNIQKESTLHLVLRLRGGMHIFVKTLTXKTITLXVESSDTIDNVKXKIQDKRGYSSRTSKCLIFAXGKQLEDGRTLADXNIQKESTLPLVLGLRGGMQIFVKTFTGKTITLEVESSDTIDNVKVKIQDKEGIPPDQQRFIFAGKQLEDGRTLADYNIQKESTLHLVLRLRGGF

SEQ ID NO: 22001 - protein, 482 aa, Arabidopsis thaliana
MVAMFQEDNGTSSVASSPLQVFSTMSLNRPTLLASSSPFHCLKDLKPEERGLYLIHLLLTCANHVASGSLQNANAALEQLSHLASPDGDTMQRIAAYFTEALANRILKSWPGLYKALNATQTRTNNVSEEIHVRRLFFEMFPILKVSYLLTNRAILEAMEGEKMVHVIDLDASEPAQWLALLQAFNSRPEGPPHLRITGVHHQKEVLEQMAHRLIEEAEKLDIPFQFNPVVSRLDCLNVEQLRVKTGEALAVSSVLQLHTFLASDDDLMRKNCALRFQNNPSGVDLQRVLMMSHGSAAEARENDMSNNNGYSPSGDSASSLPLPSSGRTDSFLNAIWGLSPKVMVVTEQDSDHNGSTLMERLLESLYTYAALFDCLETKVPRTSQDRIKVEKMLFGEEIKNIISCEGFERRERHEKLEKWSQRIDLAGFGNVPLSYYAMLQARRLLQGCGFDGYRIKEESGCAVICWQDRPLYSVSAWRCRK

SEQ ID NO: 22002 - protein, 120 aa, Brassica napus
MNAAVFTSSALSLPISFCKTRSSQVTRKKGEFRVFAVFGEDSGLVEKKNQWGHLFDVEDPRSKTPPPPYKGKGKFMDVNQALEVARLDIQYLDWRARQDLLTIMLLHDKVVDVLNPLARE

SEQ ID NO: 22003 - protein, 715 aa, GIBBERELLA ZEAE PH-1
MSSEDKYETLEKIGHGSFGIIRKVRRRTDGFIMCRKEISYLRMSQKEREQLHAEFQILSHLRHPNIVAYYHREHLKVSQDLHLYMEYCGNGDLGRVIKDLALKGQRAQESFVWSIFSQLVMALYRCHYGVDPPEVGSNILGLTQGNAAAGPKVPAGTMTILHRDLKPENVFLGEDNSVKLGDFGLSKMIKSHDFASTYVGTPFYMSPEICAAEKYTLKSDIWSLGCIIYELCAREPPFNAKTHFQLVQKIKDGKFPALPDVYSPELYQVIKDCLRVNPDRRPDTSELLNLPVVKLMRKEKEVVDLNKSIRLREDSLRKKERDLNERLVNMEREKELIRDELDSSLRREWEVKARLEIDRLANAEIEQLQNRFEEEVQARVEAELQKKAAAYANSRPNSQEDEYTTSTGKTDYPHSSVGGSEVEFPSTTDLTEYSSIESPEAPRETKKTARTPFGRAQTMFVGNPAGTPMDIEMNSPSPIAIASLSLSPRRNGNTKAPTAASGNIFAVNANRSADNSRWDLRDTLSDSEDEDVMPSPTRNIKSSKNPFTSKTRPVLTSQKSAPINRLKSQPSTSGFVSKQVSQPEAPRSPRRLSKIPSAANLQAESNNSSGGGLTRQSSLNRKNNHSDDGLGKVAAKNNIRGRTLVELQQARAGGRPMSAIVMPSTGENVSPKRAFRDRIGAERKSSGDEPVAVWDPERDEMPSPFLVRQRRIARV

SEQ ID NO: 22004 - protein, 361 aa, Ipomoea nil
MAMPGNYVKAIAEAEAETGTKFGCFLTDAFLWFGGDLAAERGGVPWIALWTAGACSISAHLYTDFVRSLAAATPTANGNGLDQKLKVIPGMSELSIGEMPGEILAKDLQAPFPGMIYNMALKLPGANAVVLNSFQNLEPTVTDDLRSKLQKVFNIGPMILRQAAATPKPPIISDDHNCIPWLDSLPPASPPAVYLSFGSGLTPPPDEIVALAEALEAKRAPFLWSLKPHGVKHLPEGFLERTKEFGKIVPWAPQVQVLSHPGVGAFVTHCGWNSTLEAISFGVCLICRPFYGDQQINSRFVESVWEIGVKVEGGKFTKDETLKALNVVLDSDRGKLLKENVVKLKGEAMEAVKPNGSSTKD

SEQ ID NO: 22005 - protein, 361 aa, Ipomoea purpurea
MAMPGNYVKAIAEAEAETGTKFGCFLTDAFLWFGGDLAAERGGVPWIALWTAGACSISAHLYTDFVRSLAAATPTGNGNGLEQKLKVIPGMSEISIGEMPGEILAKDLQAPFPGMIYNMALKLPGANAVVINSFQNLEPTVTDDIRSKLHKVFNIGPMILRQAAAATPKPPISDDHNCIPWLDSLPPASPPAVYLSFGSGLTPPPAEIVALAEALEAKRAPFLWSLKPHGVKHLPEGFLERTKEFGKIVPWAPQVQVLSHPGVGAFVTHCGWNSTLEAISFGVCLICRPFYGDQQINSRFVESVWEIGVKVEGGKFTKDETLKALNVVLDSDRGKLLKENVVKLKGEAMEAVKPHGSSTKE

SEQ ID NO: 22006 - protein, 97 aa, Stenotrophomonas maltophilia
  misc_feature (5)..(5): Xaa can be any naturally occurring amino acid
  misc_feature (83)..(83): Xaa can be any naturally occurring amino acid
  misc_feature (91)..(91): Xaa can be any naturally occurring amino acid
  unsure (1)..(97): unsure at all Xaa locations
MNIRXLHDRVIVKRKEVETKSAGGIVLTGSAAAKSTRGEVLAVGNGRILENGEVKPLDVKVGDIVIFNDGYGVKSEKIDNEEXLIMSDSDXLAIVEA

SEQ ID NO: 22007 - protein, 461 aa, Oceanobacillus iheyensis HTE831
MTYRDNNNDEERNFPEEENKESPSNFDQEQQNIENGNSDEGHYDDYSSSHYETASTLENDTRNPSTTKATKNKQRGGGWLRSFSGGAIGGIISSLIILMLVGNNILPASDTSVESNQGNSESNNESSNNIVQTLASDDAEKSTNIDEVSKAVVGVINKQQQSVWESSQEAGTGSGIIYKKENDAAYVATNQHVVDGAEEVEVVIDEEHRVSAEVLGVDSLSDLAVLKIDGENVDTVANFGSSTDTQVGETVLAIGNPLGMEFVNTVTKGIISGLNRSVEVDTNSDGRADWITEVLQTDAAINPGNSGGALVNENGDVIGINSMKIAQSSVEGIGFAIPADEALPIIEQLETEGEVSRPLIGISTAPLNQVPAQYRAEIDIPDDIKGGMVIADVQADSPAANAGLEQFDVITKINGNEVTSIIELRKHLYENGEAGEHVKIEYVRDGEVHSITLKLDEFQAE

SEQ ID NO: 22008 - protein, 299 aa, Triticum aestivum
  misc_feature (252)..(252): Xaa can be any naturally occurring amino acid
  unsure (1)..(299): unsure at all Xaa locations
MAFHSSAAPIPLAPPPGPGAFHRAHRPAGAPRAGAPGRSLAAHSSPSPDVVVTREQGKNAKLVAALEKHNVHSLELPLIQHVEGPDADRLSAVLRDEKFDWITVTSPEAAAVFLEGWKAAGSPKVRIAVVGAGTARTFDEVLQSNDGSLEVAFSPSKALGKVLASELPRTSETASKVLYPASAKAGHEIQNGLSARGFEVTRLNTYSTVPVHDVDPQILKLALSAPVVAVASPSALRAWLNLMSRVDNWSKXVACIGETTASAAKKLGLERVYYPATPGLEGWVESILEALRAHKQPSK

SEQ ID NO: 22009 - protein, 1119 aa, Bacillus cereus E33L
MKNIMEKNIQQEKDKVKPVFYDPKGRRNIAFISFLCISIVSVSVVFYFFFQSIFSTPEIPNMNTAVQQDNKLVPINQKLSDQQLKKEEFKPNTETKDNKNLVNSPKDSKQRKEVYGFYVNWDENSTASLKENIDSLTTLVPEWYHLKADLTIRSEMKPEIVKLAEKNQVKIMPLLTNYTEEASGPDSGLIHKLLNSSNDVKTKLINDLVKQVEKNRFAGINIDFEAVPESDRENLTNFMKELTTVFHKHDLLVTQDVPANDKAFDYSVLAKIIDRMIVMMYDEHYGAGEPGPIASNKWFQHSLKELNIPSNKLVVAFGNYGYDWKVNSKEPAKSLTFSEVMAMAHNSDMNIQWDKMSGNPYFRYKTGDKEHTAWFLDGVTLYNQVKIAMDNNAKGVALWRLGAEDPTIWKVLKNPIEAQKNPDVLHKITSLDEVNYSGQGEILQIENEKQNGLRDFKVGKDGYLTDEVYQTLPSAYEVQRYGKPKGKQVVLTFDDGPDPKYTPEILDILKENKIKAAFFVLGENAQLNPSIVKRIYDEGHEIGNHTFKHPNVADTSLLRTKVELNTTQRLIQEITGHSTVLFRPPYEADANPDSSNEILPILRAQNMNYTMVAEKVDPEDWATPSTNELVKRALNPVYKGEGNIILLHDAGGNRTHTVEALPIIIKELKKHGYSFVTISDLMNKERDEIMPPVSSEGEQYLLYNKAVFSGAGYFKHILTTIFYIAIGLGIFRFLFLIYFAWKQKRKTLSRSIHSSYQPFVSVVIAAYNEEKVIAKTIRSILDSKYGEFEVIVVDDGSTDGTSKVMQETFYKHPKVRFIQKENGGKSSAMNLGFQQSRGEIIVTLDADTIIAQDAISLMVRHFEDQNVAAVSGNVKVGNRRNLLTTWQHVEYITGFNLERRAFDELNCITVVPGAIGAWRKKNVVESGYLSEDTLAEDTDLTITFLRQGHRIVYEEKAYAFTESPEDVKSLIKQRYRWSYGTLQCLWKHRKALCNSKHKTLGFIALPNMWLFQYVLQFIAPFADILMIMGLFSSDPLKVLGFYFVFFLMDLLASLFAFKLEEENPKPLVWLILQRFIYRQFMTYVVVKSIFSSIRGIAVGWNKLKRVGSVEHSTEHKEAS

SEQ ID NO: 22010 - protein, 174 aa, Bdellovibrio bacteriovorus HD100
MSVMQNNSEKSKWFLPGILGGLATTMKHLLKNLFNQKKMMTLNYPEEKYEYSPRFKGNHVLTVKKDGSLRCTACMLCATNCPAECIKITAAEHNDPTVEKFPISYEIDILRCVFCGFCEEACPVDAIRLGPEWQTPGVNGANFIYDINHLAYRPNLKGGILTHVDDEERHKAGI

SEQ ID NO: 22011 - protein, 508 aa, Rickettsia sibirica 246
MVNLKIVIVIIVLISSNVVLAKENSRSLKVAAQEENEFTEINSAPLKVSEAARYSFADIVEPLIPAVVNISTIEYVNSKSENAEKDPLQEKVNDFLEKLNIPLNLEEVDQTPKSVPLGSGFIIEPNGLIVTNYHVIANVDKINIKLADNTELSAKLIGNDTKTDLALLKIDSEEPLPFVEFGDSNDARVGDWVIAIGNPFGNLGGTVTSGIISSKGRDIDIDTDNIVDNFIQTDAAINNGNSGGPMFNLDQKVIGVNTAIFSPLGTNIGIGFAIPSNTAKPIIERLKKDGKVSRGRLGVTIQDLTEEISEGLGLKNTRGVLVAKVQEDGPGDKAGIKTGDIIIEFADIPVKNTKKLRVIIADAPIDQEVKVKILRDKKELELPIKITSDNEEVTKDSTEETNKKEITNKEENNLSITKNNITFGNLTEELRQKYTIPQDKMGIVITNIDEEESSFKIGDLITNINQKSIDDISKLEELYENAKKSDKQNILLLIERGSSNMFVPLQVM

SEQ ID NO: 22012 - protein, 291 aa, Saccharomyces cerevisiae
  misc_feature (1)..(1): Xaa can be any naturally occurring amino acid
  unsure (1)..(291): unsure at all Xaa locations
XVHVASVEKGRSYEDFQKVYNAIALKLREDDEYDNYIGYGPVLVRLAWHISGTWDKHDNTGGSYGGTYRFKKEFNDPSNAGLQNGFKFLEPIHKEFPWISSGDLFSLGGVTAVQEMQGPKIPWRCGRVDTPEDTTPDNGRLPDADKDAGYVRTFFQRLNMNDREVVALKGAHALGKTHLKNSGYEGPWGAANNVFTNEFYLNLLNEDWKLEKNDANNEQWDSKSGYMMLPTDYSLIQDPKYLSIVKEYANDQDKFFKDFSKAFEKLLENGITFPKDAPSPFIFKTLEEQGL

SEQ ID NO: 22013 - protein, 331 aa, Tripsacum dactyloides
MHASLASYAAAAMPALDLRPEIAHAHQPVMSPSHHGWDGNGAAAVPTPMPKRLDGKVAIVTGGARGIGEAIVRLFAKHGARVVIADIDDAAGEALAAALGPQVSFVRCDVSVEEDVRRAVDWALSRHGGRLDVYCNNAGVLGRQTRAAKSILSFDAGEFDRVLRVNALGAALGMKHAARAMAPRRAGSIVSVASVAGVLGGLGPHAYTASKHAIVGLTKNAACELGAHGVRVNCVSPFGVATPMLINAWRQGHDGAADAELDLDINVPSDQEVEKMEEVVRGLATLKGPTLRPRDIAEAVLFLASDEARYISGHNLVVDGGVTTSRNLIGL

SEQ ID NO: 22014 - protein, 291 aa, Saccharomyces cerevisiae
  misc_feature (1)..(1): Xaa can be any naturally occurring amino acid
  unsure (1)..(291): unsure at all Xaa locations
XVHVASVEKGRSYEDFQKVYNAIALKLREDDEYDNYIGYGPVLVRLAWHISGTWDKHDNTGGSYGGTYRFKKEFNDPSNAGLQNGFKFLEPIHKEFPWISSGDLFSLGGVTAVQEMQGPKIPWRCGRVDTPEDTTPDNGRLPDADKDAGYVRTFFQRLNMNDREVVALMGAHALGKTHLKNSGYEGPWGAANNVFTNEFYLNLLNEDWKLEKNDANNEQWDSKSGYMHLPTDYSLIQDPKYLSIVKEYANDQDKFFKDFSKAFEKLLENGITFPKDAPSPFIFKTLEEQGL

SEQ ID NO: 22015 - protein, 150 aa, Methanosarcina barkeri str. fusaro
MSDLANQRRLASKILECGLDRVWLNPEASEEIASAITREDIRGLIENGTIKAKPIKGVSRGRARALAAKRKYGHCKGQGSRKGKKGARTPKKEQWIKKIRALRRRLKELRADGTLDKSVYCRLYRKAKGGEYRSVAHLNSHLGSEKLLKK

SEQ ID NO: 22016 - protein, 329 aa, Tripsacum dactyloides
MHASLASYAAAAMPALDLRPEIAHAHQPVMSPSHHGWDGNGAAAVPTPMPKRLDGKVAIVTGGARGIGEAIVRLFAKHGARVVIADIDDAAGEALAAALGPQVSFVRCDVSVEEDVRRAVDWALSRHGGRLDVYCNNAGVLGRQTRAAKSILSFDAGEFDRVLRVNALGAALGMKHAARAMAPRRAGSIVSVASVAGVLGGLGPHAYTASKHAIVGLTKNAACELGAHGVRVNCVSPFGVATPMLINAWRQGHDGAADAELDLDINVPSDQEVEKMDAGAVVDINVPFKFLFSFTDGRYIFGFSKANDQASHRMLDTFSKKKIMKFLII

SEQ ID NO: 22017 - protein, 736 aa, Geobacillus kaustophilus HTA426
MKNQNQHNTSKCPYHGSVTSYNSNRTTNKDWWPNQLNLSILHQHDRKTNPHDEEFNYAEEFQKLDYWALKEDLRKLMTESQDWWPADYGHYGPLFIRMAWHSAGTYRIGDGRGGGSTGTQRFAPLNSWPDNANLDKARRLLWPIKKKYGNKISWADLMILAGNVAIESMGGKTIGFGGGREDVWHPEEDIYWGAEKEWLASERYSGDRELENPLAAVQMGLIYVNPEGPDGKPDPVAAARDIRETFRRMGMNDEETVALIAGGHTFGKAHGAGPASHVGPEPEAAPIEAQGLGWISSYGKGKGRDTITSGIEGAWTPTPTQWDNSYFRLLFEYEWKLTKSPAGAYQWEAVNLREEDLAPDAEDPNVKVPPMMMTTDLALRFDPEYEKIARRFYENPEEFADAFARAWFKLTHRDMGPKTRYLGPEVPKEDFIWQDPIPTVDYELSDAEIEEIKAKILNSGLTVSELVKTAWASASTFRNSDKRGGANGARIRLAPQKDWEVNEPERLAKVLSVYEDIQRELPKKVSIADLIVLGGSAAVEKAARDAGFDVKVPFIPGRGDATQEQTDVESFSVLEPFADGFRNYQKKEYSVGPEELLIDKAQLLGLTAPEMTVLVGGLRVLGANYRDLPHGVFTDRIGVLTNDFFVNLVDMNYEWVPTEGGIYEIRDRQTGEVRWTATRVDLIFGANSILRSYAEFYAQDDNREKFVRDFINAWVKVMNADRFDIHLKQAKESVTV

SEQ ID NO: 22018 - protein, 449 aa, Glycine max
MGSHQQEPWLLENGKPRVLTKETRHGRSAHRMSSTSLRKKSSRTLVSKVPCATLRNFLSNLQEVILGTKLSILIPAIPAAIVAECFGFGRPWIFILSLLGLTPLAERVSFITEQVAFYTGPTVGGLLNATCGNVTELIIAIFALSSNKIAVVKYSLLGSILSNLLLVLGTSLLCGGIANVGVEQKYDRRQADVNSLMLLLGLLCYLLPMLFKYSGASAALTVDPSLHLSRASSIVMLIAYVVYIVFQLWTHRELFEEEDDGKDGEDGSEEQAVIGLWSGIAWLVGMTVFIAVLSEYVVDTIEDASDSWGLSVSFLSIILLPIVGNAAEHAGAIIFAFKNKLDISLGVALGSATQIAMFVVPLCVIVAWIMGINMDMNFNLLETGSLALAIIVTGFTLQDGTSHYMKGLVLLLCYIVIGACFFVQRTPFNNQADVTNITLKPATNAVLSA

SEQ ID NO: 22019 - protein, 371 aa, Streptococcus pneumoniae TIGR4
MAIKTLKGDYHDGQSKKIRLSHASRVRTPSWYPHDMADSTRIMAFQGKAAKRAFTQIIETIAEGERVYLLVEQAYLSEAQSYLGDKVVYLDIPTNDAWARDTGPTILVNDKGKKLAVDWAFNAWGGTYDGLYQDYEEDDQVASRFAEALERPVYDAKPFVLEGGAIHSDGQGTILVTESCLLSPGRNPNLTKEEIENTLLESLGAEKVIWLPYGIYQDETNEHVDNVAAFVGPAELVLAWTDDENDPQYAMSKADLELLEQETDAKGCHFTIHKLPIPAVRQVVTEEDLPGYIYEEGEEKRYAGERLAASYVNFYIANKAVLVPQFEDVNDQVALDILSKCFPDRKVVGIPARDILLGGGNIHCITQQIPE

SEQ ID NO: 22020 - protein, 148 aa, Arachis hypogaea
MADPLTDEQISEFKEAFSLFDKDGDGCITTKELGTVMRSLGQNPTEAELQDMINEVDADGNGTIDFPEFLNLMARKMKDTDSEEELKEAFRVFDKDQNGFISAAELRHVMTNLGGKLTDEEVDEMIREADVDGDGQINYEEFVKVMMA

SEQ ID NO: 22021 - protein, 327 aa, Burkholderia pseudomallei K96243
MAHAIRFHETGGPEVLRREETQVGAPGPGEVRVRHAAVGLNFADIYFRTGLYPAKLPSGIGVEAAGIVTAVGGNVAGLAVGERVTYTGSPLGAYSTERVMPADSLIRLPDAIGFDTAAAMTMRGLTSAYLMRRIHAWQAGDTFLLHAAAGGVGLIVCQWAKLLGLNVIGTVSSDEKADIARAHGCDHVIVHRREDVAKRVRELTNGVGVAVVIDSVGKSTFAASLDSLKRRGLLVGVGTASGPFPPIDAMQLAIKGSLFFTRPALADYIADPAEKAALAGELFDHVAAGRIRIEINQRYELNDAVQAHRDLEAGRTTGSSIFVVDGD

SEQ ID NO: 22022 - protein, 330 aa, Oryza sativa
MANSRRPAAAATAPSPSPPASDLEVGFAKLQGEDFEYYMQTYSIVLGRHSRRRNQPVGVGVGVGVGGGGGGGGDAAADDVDVDLGILGGGMNVSRRHARIFYDFPRRRFALEVLGKNGCLVEGVLHEPGGEPVKLDSQDLLQMGDAQFYFLLPTRSVFATDAARRASAAARRAVPPPPSSSSDGDDGEEEREAAVAKRPRNGDAGSLAGRKSEKGSKGYRQSDNLQLLQLEEKDVISSTATVLSDLCGPQEWVPMDRLHEVMFEKYGDLWHHNRVRKYLTSEDWPKSETDGRPWHGLSLLLRKYPEHFVINIRMSGGRSIEFVSLVSLQP

SEQ ID NO: 22023 - protein, 369 aa, Oryza sativa
MGNCGTREENAVVAAHAQVQQLHLLQHPVKNAVAERKHTRISSDMSDPSTPRKIEDAKNISIYNDVIDFTLFELETITKSFRADYVLGEGGFGTVYKGYIDENVRVGLKSLPVAVKVLNKDGHQGHREWLTEVRFLGQLRHPNLVKLIGYCCEDDHRLLVYEFMFRGSLENHLFRSEDYTAKLSDFGLAKAGPEGDQTHVSTRVMGTYGYAAPEYVMTGHLTARSDVYSFGVVLLELLTGRKSIDKSRPSREHSLVDWALLKLNDKRRLLQIIDPKLEGQYSVRAAHKACSLAYYCLSQNPKARPLMSDVVETLEPLQGSGGSDGAVQSVLGSGLPSYRVNRRLTTNSVHCRAIPNPKCSPAVPACRVR

SEQ ID NO: 22024 - protein, 237 aa, Zea mays
MDHQMFDDPFGSSGISSLEADIFSAAAGSQLPSPPWPDFDDDYDIPDLSALPANAATSSGGGYGSGGSGGHRKLSHNAYERDRRKQLNDLYSSLRSLLPDADHTKKLSIPTTVSRVLKYIPELQKQVDNLERRKRELTNANCKPGVLNTSEIVTTPIVSATCLNDTEIMVQVSLHSNVAATALPLSKCIKVLEDAGLHLISSSTYSTFGNKTFYSLHLQVCMHVHSMVPAVSFNFFI

SEQ ID NO: 22025 - protein, 629 aa, Hypocrea lixii
MLARSVYTVTRSQITSTSYLPSLSSYSKFLQPKFTFSTMPPKGSKRETASPVGKANGVETKRVKHEANQDELHQPHPFAKDAEEHGIVLRRFYPHEMSTSRAYAYNSNEIERPMEGLVAALEETAGARKQAKVRHAVVHWFKMDLRHSDNRSLALASAKAKEAGVPLICVYIISPQDFEAHLTSPVRVDFMLRTLSVLKDDLAALDIPLHVETVDKRKDIPRRILELMEEWGSNHLFANMEYEVDELRRETRMIRQFAENNMSFEVVHDTCVVPPGELHSGTGKQYAVYTPWYRAWMAHIHENLDLLEIYDRPEKNPGATRRTFKTLFDCPIPDAPKNKQLNDEEKKRFHGLWPCGEHEAMSRLEKFCDEAVTSYHDRRNIPGDNGTSCLSVHLASGTISSRTCVRTARDRNKTKRLDGGHQGIHVWISEVAWRDFYKHVLVNWPYVCMNKPFKPEYANIEWSYNMDHFEAWCEGRTGFPIVDAAMRQLNHMGYMHNRCRMIVASFLSKDLLIDWRMGEKYFMEHLVDGDFASNNGGWGFSASVGVDPQPYFRVFNPLLQSEKFDPNGEYIRKWIPELKALSDKEIHDPYNRGAGTKAKKQGYPKQIVDHKGARERALSAYKDGLERGI

SEQ ID NO: 22026 - protein, 383 aa, Staphylococcus aureus subsp. aureus MRSA252
MNELEFVTKHRRHLHQHPELSLHEFETTAYIKAFLDSLNIKYDCPLETGVIAYLEGNGSHTIAYRADIDALPILEENDVPYRSQSDHVMHACGHDGHTTTLMLFVQRCKDMQDAGQLPQNVVFIFQPAEETGGGANRLIKAGAFDKYPIEAVFGIHVNPFADEGIAVIRDEEITASATEYRFFLTGLSSHVADKEQGHSCGEALQHVLTQISQIQQFHLNGLKRNIVHIGHFKAGEAINTVPSNGYLEGTIRTYDIDDLTIVKNQMHKIAESVKLLFNVDCEVKFAEGYPPTINSPKLRTQIEDALIKADLNVYDKPTPFLFGEDFSFYGQQLAPAYFVFIGTRNEDKGFVTGLHTSYLNFDEKVLINVVNFYENLLNNYKEV

SEQ ID NO: 22027 - protein, 221 aa, Pinus radiata
MVRGKTQMKRIENDTSRQVTFSKRRNGLLKKAYELSVLCDAEVGLIIFSPRGKLYEFASPSMEEILEKYKKRSKENGMAQTTKEQDTQYSKHSKQKLANMEEQIRILESTQRKMLGEGLESCSMAELNKLESQAERGLSHIRARKTEILVDQIECLKRKERLLSEENALLSRKWVDRQSVDGSGSTSSSIGLGSIEQIEVETQLVIRPPNAQDHCSVNSGH

SEQ ID NO: 22028 - protein, 511 aa, Rubrobacter xylanophilus DSM 9941
MDLGPRRRAHRARVGPRVVSRAIDRKKFLGLAGAGLGGLALGGCGVLSTDGRRRLPSPARASGTGRVREYALEAAPAGFEIAGREFSTWGYDGGVPGPELRLTEGDTLRVRLKNALPAGTTIHWHGLPVENPMDGVPDVTQPPVRSGEEFVYEFVVPTAGTYMYHSHVGLQLDRGLYGPLIVEPKREELSYDREYALLLDDWLDGVFGTPEDALAELRGAGGMMGGMGGMMGGPGGGPAMSGAVDHPYYLVNGRAAEDPASLAVRRGDRVRLRLMNPSSDTVFRFAAAGHRLTVTHADGLPVRPVTVDAVRIGMGERYDAILEANNPGVWQLAAVPEGKDGLARALLRYEESRGESPPPANARPPELGGRLLSYADLRDAGERSFPEDGLFSGPDRTHELTLSGDMGSYAWHIDGQRYPDADPLEVREGEWVRFNLQNHSMMWHPMHLHGHFFQVRNGTGRGPFKDTALVEPHMGELSFDLVANNPGEWFFHCHNAYHMETGMARLVSYGR

SEQ ID NO: 22029 - protein, 449 aa, Colwellia psychrerythraea 34H
MEILYQVEDKPPIGTSILLAAQHLLAALGAIITVPLVVGGVLNLPVEDIVVLVNAAMLVSGVVTIIQCKGVGPVGIRLPCVMGTSFTFVGVSIAIGFEHGVAGILGSALVASLVMIIGSFFMPMIRRFFPPIVTGTVVTLIGLSLIPVAVDWFAGGQVGQEGYASLPNLAIGLFVLTTVILLSIFGKGILSAAAVVIGMALGFMACVVLGLVDFKPVQDSPLFALPSPFHFGLTFPISGIIGMSIAYLVTIVESTGDFLALSNVTKTKLTGKKLSSGILCDGLGSALASLFSTTPFSSFSQNVGIVGMTGVASRYVVAITGAMLILAGLFPIIGALVVAIPLPVLGGAGLVMFAMIITAGVNILSHTKHTKRNGIIIAVSIGAGMAVTVRPELLSHLPDFLKIILASGITTGSVIALLLNAVLPDGDIIVETEEENPSNNEVESSPNLI

SEQ ID NO: 22030 - protein, 214 aa, Pinus radiata
MGRGRIRLRKIESATSRQVTFSKRKNGLLKKAYELSVLCDVELGLIVLSPRGKVHEFSSTCMQKMLERYEKCSEGSKTTSIAKEEDPKALKREIANMEERIEILERTQRKMLGEELASCALKDLNQLESQVERGLRNIRARKSEILVTQIEQLQRKERMFSEENNFLRKRIVDPHSVLTTPASGSGSLQRSEVETQLVMRPPSSNADFLFNSSH

SEQ ID NO: 22031 - protein, 740 aa, Colwellia psychrerythraea 34H
MFKSTLPIAAAISVALTSMVLPAKALAANEAKTNQFWWPDQLSLSPLRQHGAESNPYGEQFNYAKEFASLDLAMLKKDIQTTLTDSKSWWPADWGHYGPLMIRMAWHSAGVYRVHDGRGGASGGQQRFAPLNSWPDNVNLDKARRLLWPVKQKYGRKISWADLMVLSGNVALESMGFKTFGFAGGRTDDWEPDLVYWGPETAMLSDKRRDKKGKLKGPLAAVEMGLIYVNPEGPHGKPDPLLAANDIRMSFGRMAMNDEEIVALLAGGHTLGKAHGAKKPNGCVGAEPAAADIEAQGLGWKNKCGTGVGADTISSGLEGAWTVTPTQWSSNYLDNLMNFNWVLTKSPAGAKQWIPDNKAAANLVPDAHIPNKRHAPIMFTTDIALKEDPQFRKIVERFRADPTQFDLAFAKAWFKLTHRDMGPRARYVGAEVPSEVLMWQDPIPAINYQLITDKDIKQLKKQITNSGLTTSELVRTAWAAASSHRVTDMRGGANGARINLEPQNSWAVNNPKELGKVLAKLEGIQARFNKKSAKTKVSLADVIVLGGATAIENAAAKAGNRITVPFSPGRADASQAQTNVKSFNYLKPKADGFRNFYTDDSYSSPAEMLVDKANSLGLNVPEMTVLIGGMRALDANYDASSYGVLTNNPGVLTNDFFVNLLDMKTVWSKDKSNAGIYIGHDRASGTEKWQATPVDLIFGSSSELRAIAEVYASDDADKKFINDFTKAWVKVMQLDRFDLK

SEQ ID NO: 22032 - protein, 481 aa, Chlamydia muridarum Nigg
MIARTKIICTIGPATNTPEMLEKLLDAGMNVARLNFSHGTHESHGRTIAILKELREKRQVPLAIMLDTKGPEIRLGQVESPIKVKPGDRLTLTSKEILGSKEAGVTLYPSCVFPFVRERAPVLIDDGYIQAVVVNAQEHLIEIEFQNSGEIKSNKSLSIKDIDVALPFMTEKDITDLKFGVEQELDLIAASFVRCNEDIDSMRKVLENFGRPNMPIIAKIENHLGVQNFQEIAKASDGIMIARGDLGIELSIVEVPALQKFMARVSRETGRFCITATQMLESMIRNPLPTRAEVSDVANAIHDGTSAVMLSGETASGTYPIEAVKTMRSIIQETEKSFDYQAFFQLNDKNSALKVSPYLEAIGASGIQIAEKASAKAIIVYTQTGGSPMFLSKYRPYLPIIAVTPNRNVYYRLAVEWGVYPMLTSESNRTVWRHQACVYGVEKGILSNYDKILVFSRGAGMQDTNNLTLTTVNDVLSPSLE

SEQ ID NO: 22033 - protein, 1356 aa, Podospora anserina
MRLLERDDAGEIRPTKDLPSGKIPPYAILSHTWGPDEEEVSYKDLKDGRAVSKLGYNKIRFCADQAWRDGRKFFWVDTCCIDKSNSTELQEAINSMFRWYRDAAKCYVYLTDVSTDKRDADGDPSWKWAFQKCKWFTRGWTLQELIAPTSVEFFSREKARIGDRNSLERMIHDVTGIPLEALRGSPLSDFSVHDRMAWMKQRNTTREEDMAYSLFGIFDVHLPLIYGEGKEKALERLREKIGKDDGCLADLRVTDPRHDKKRIEAAKGGLLKDSYCWVLSNVQFQQWHDGDDQRLLWINGDPGKGKTMLLCGIIDELKKSTPPGLLSFFFCQATDSRINNATAVLRGLIYLLVSQQPALISHVRRPYDHAGKKMFEGPNVWIVLCEIFTSILQDPGLRMTYLIIDALDECVTDLPQLLELITRTSCTSSPIKWIVSSRNWPDIEEQLETATQKARLSLELNAESISTAVNAFIQNRIDQLAPKTKHDANMIGKIRDYLHSHANGTFLWVALVCQALADPKVKKRHILAKLQTFPRGLDSLYARMLEQIGHSEDAELCKQILAVAAAVRRPISLDELASLVEMPDDVSDDPESLEEIVKLCGSFLIIRERTVYFVHQSAKDFLLGTASDKASNKASQEAFELVFPTGIEDVSYIIFWRSLNVMSQKLRRDIYCLNAPGFLIDNVRVPDPDPLATVRYSCIYWIDHLRDLVSSTSSKWVHLLQDDGDIHRFLTTKYLYWLEALSLLRALPEGINAIRQLESLLGHTIRGRLIAIVRDGYRFALSYRMIIEKAPLQAYTSALVFAPTDSMIKKIFKKEEPGWISTISVVEAEWNACTQTLEGHGSSVLSVAFSADGQRVASGSDDKTIKIWDTASGTGTQTLEGHGGSVWSVAFSPDRERVASGSDDKTIKIWDAASGTCTQTLEGHGGRVQSVAFSPDGQRVASGSDDHTIKIWDAASGTCTQTLEGHGSSVLSVAFSPDGQRVASGSGDKTIKIWDTASGTCTQTLEGHGGSVWSVAFSPDGQRVASGSDDKTIKIWDTASGTCTQTLEGHGGWVQSVVFSPDGQRVASGSDDHTIKIWDAVSGTCTQTLEGHGDSVWSVAFSPDGQRVASGSIDGTIKIWDAASGTCTQTLEGHGGWVHSVAFSPDGQRVASGSIDGTIKIWDAASGTCTQTLEGHGGWVQSVAFSPDGQRVASGSSDKTIKIWDTASGTCTQTLEGHGGWVQSVAFSPDGQRVASGSSDNTIKIWDTASGTCTQTLNVGSTATCLSFDYTNAYINTNIGRIQIATATMESLNQLSSPVCYSYGLGQDHRWITCNNQNVLWLPPEYHTSAFTMQGRKIVLGSYSGRIIIFLFSRDV

SEQ ID NO: 22034 - protein, 223 aa, Pinus radiata
MVRGKTQMKRIENATSRQVTLSKRRNGLLKKAYELSVLCDAEVGLIVFSPSGKLYEFASTSMQKLLEKYEICSQECGTSESNKKQDPQCLKQEIENMEKRVRILQSTQRKMLGEGLALCSIKELNQLEGQVERGLNHVRATKTKVLLDEIEKLKQKEHVFREEKALLHKKSVNLRGANGCTIPSIGLTSIERVEVQTQLVMRPPHATEMDDNFMDVDNVPLSG

SEQ ID NO: 22035 - protein, 544 aa, ASPERGILLUS NIDULANS FGSC A4
MAPIPWGMLYVSVVGYSVLTSNLFTFFVLATALTALKIVYASFLYPEYLTPIKHIPTPPLTAQKRSWVRGNTDTYVVISPFEGMLNWTKSVPNNGLLRYYIIGNIEQVLVTTPKALSELLVQNAYDYQKPESIRISLARIAGEHGILLVEGQEHKRHRKNLMPAFSYRHIKDLYPTFWAKSVEMVKCIEKDLQDRRDTGDITVTVRPWASRATLDIIGLAGMDRDFGSLADPQNELAAQYHRILEDPPLWLKLLFAAAFVLGNEELVMALPVKRNRDIAEGAKYVRQVAQQLISEKRERIKHNPEKAEGGGGGKDILSVALNSGNFTDIELIDQMMTFLAAGHETTSSALQWSVYALCKHPDIQTRLRQEIRSNLPSVSSNDPKPITAEAVDSLPYLHAFCNEVLRFHPSVPITFRTTTRDTTLAGTLLPKGTQLTISPEVINHDPDLWGPDAHIFNPDRWLGPGRANTGGASSNYALMTFLHGPRSCIGQGFAKAELACLVAAMVGRFEMELADPGKKLAVRRTATISPVDGVVARLTPLDGW

SEQ ID NO: 22036 - protein, 183 aa, Triticum aestivum
  misc_feature (31)..(31): Xaa can be any naturally occurring amino acid
  unsure (1)..(183): unsure at all Xaa locations
MADQLSEEQIGEFKEAFSLFDKDGDGSITTXKELGTVMRSLGQNPTEAELQDMINEVDADGNGTIDFPEFLNLMARKMKDTDSEEELKEAFRVFDKDQNGFISAAELRQVMTNLGEKLSEEEVEEMVREADVDGDGQINYDEFVKVMMAKRREKRIEERRAPSAKKSVAGASGAKSGSKCTIL

SEQ ID NO: 22037 - protein, 225 aa, Triticum aestivum
RLNIISKLDQVNQVIGIDLLSQSLLPAIVELAEDRHWRVRLAIIEYIPLLASQLGVGFFDDKLGALCMQWLEDKVFSIREAAANNLKRLAEEFGPEWAMQHIIPQVLEKINNPHYLYRMTILQAISLLAPVMGAEITCQKLLPVVINSSKDRVPNIKFNVAKVLQSLVPILDQSVAEKTVKPCLVELSEDPDVDVRYYANQALQCLNTIKSRTRGVKSRFFRSYS

SEQ ID NO: 22038 - protein, 214 aa, Pinus radiata
MARGKTQMRKIESATSRQVTFSKRRNGLLKKAYEMSVLCDAQLGLIVFSPRGKVYEFSSTCMQKMLARYENFSEGSKATSTAKEQDVQGLKRQIANMEERIEILESMHRKMLGDELASCALKDLNELESQVERGLRNVRARKTEILVTEIEQLQRKEWILSEENAFLGKKFVHPHSVSKTPGSESGSIQNSEVETQLVMRPPCTNAHFLINSSH

SEQ ID NO: 22039 - protein, 292 aa, Burkholderia fungorum LB400
MGQWHPECPARLQAIEDQLIASRIDSLIERESAPLADEAALLRVHTQAHIDYIRSRSPPEGMAEIDPDTTMNPHTLQAALRAAGAAVAATDAVIEGRYDNAFCSVRPPGHHAEPARAMGFCFFNNIAIAARHALEVHGLGRVAIIDFDVHHGNGTEAAFSGDSRVLMCSFFQHPFYPFTGADNQAPNMCNVPLPARSKGMAVREAVDMLWLPRLHEFKPEMLFISAGFDAHREDDLGNMGLVEDDYAWITDQMREIAKRYSRGRIVSCLEGGYNLSALGRSVVAHMRSLAGI

SEQ ID NO: 22040 - protein, 309 aa, Oryza sativa
MVLPGSKESQNYDSNNQKVHPQPIDENMNQNMGSMDTMIGRIFNNISSLKSAYIQLQEAHTPYDPDKIQAADQLVIEELTKLSELKHAYREKNPKPVAATPQDARLLSEIQEQQNLLKTYEVMVKKFQSQIQTRDTEITHLQQQIDEAKLRKSKLEKKLKQRGLLNKESEESDDEDNYFSIELTPSLFTSAVDNAYQSIHDFSKPLINMMKAAGWDLDAAANAIEPAVVYTRRAHKKYAFESYICQRMFGGFQEESFSVKAANITVSNEAFFHQFLAVRAMDPLDVLSQNPDSVFGKFCRSKYLLLVHP

SEQ ID NO: 22041 - protein, 469 aa, Arabidopsis thaliana
  misc_feature (210)..(210): Xaa can be any naturally occurring amino acid
  unsure (1)..(469): unsure at all Xaa locations
MEESNRSSTVLFDKYNIGRLLGTGNFAKVYHGTEISTGDDVAIKVIKKDHVFKRRGMMEQIEREIAVMRLLRHPNVVELREVMATKKKIFFVMEYVNGGELFEMIDRDGKLPEDLARKYFQQLISAVDFCHSRGVFHRDIKPENLLLDGEGDLKVTDFGLSALMMPEGLGGRRGSSDDLLHTRCGTPAYVAPEVLRNKGYDGAMADIWSXGIVLYALLAGFLPFIDENVMTLYTKIFKAECEFPPWFSLESKELLSRLLVPDPEQRISMSEIKMIPWFRKNFTPSVAFSIDETIPSPPEPPTKKKKKDLNEKEDDGASPRSFNAFQFITSMSSGFDLSNLFEIKRKPKRMFTSKFPAKSVKERLETAAREMDMRVKHVKDCKMKLQRRTEGRKGRLSVTAEVFEVAPEVSVVEFCKTSGDTLEYYLFCEDDVRPALKDIVWSWQGDDDEDDVTTNDNVDTNDNKINNVS

SEQ ID NO: 22042 - protein, 264 aa, Oceanobacillus iheyensis HTE831
MELDSRKRMHLLEKALNYTRVGIIVTDPSIEDNPIVIANKGFLELTGYEEHEIIGKNCRFLQGKDTDNISIKQLRDAIQNKEPITIQIYNYKKDGTGFWNELSIDHMWDEQEGKYFFVGVQKDITNEKQNELLYEKSLKEIEKISTPIVPIMKDVSILPLIGTMNDTRIEALITSLSDYLENSDQHYLIIDLSGLFEMDTYTVSRFLKIHQFVSMMGKDLLVAGIRPDMAMKTLTIQDTWQGMRTFKDVKMAVEYIKQKEPEIN

SEQ ID NO: 22043 - protein, 308 aa, Lactobacillus acidophilus NCFM
MSSKISILGSINLDSTYHVDKIPLPGETIHVNKKTFAAGGKGANQAVAAKRSGATVSFIGAVGNDAAGKYMLNELEKEKINLSNVQIKDTAQTGTATVLLDENGQNSILVYAGANGLIDSSQINKAEDTIANSDYIIAQFETPISAIISAFTIAKKHGVTTILNPAPATTIDNKLLKVTNIIVPNETESAAITGINVTDEESMQRTARYFREKGVKVTIITLGSRGVYYSSPTENRFISAYKVNAVDTTGAGDTFIGAMTSVLTTDLLNISAAIDYGQQASSITVQGIGAQPSIPTKEKIKQVYRMSD

SEQ ID NO: 22044 - protein, 872 aa, Frankia sp. CcI3
MRRVRAGSSGGARWLGAESGAHRRDSADCRSSGKVGSPPVHTGKRRPPLSAPVKAATGGNRSQTFGPGVRPTDEGVAGGFVDIATICPLETWTGGAVGEPILAIDYGTCSASAALAVDGRIEPVKEPASGSASWPASVFVDGGSLIVGTLAERRKRIWPAAYRGEVKRDLARDSAVSLDGRSYPAHVLVTAVLSALKAEAEQQLGGAALSRAVVTIPASYDPAGPLRRTMIAAAEAAGFVDVDLLAEPVAAAWSPVVGVAPEPGSLMLVYDLGGGTFEGALVAVGEDGRHEMLSHSALHDCGGRELDQILFDEILGLYGPGLEPLLNPPGIGETFQTTANRTRHELLDFARAVKHQLSDIAVVEDVFSPAGLLVSMQRDRFAQLASPILARTMACCQHLLKSSGYGPDKLSGVLLVGGSSRIPVVTDILEGRLGVGTDWPGQQIYLPADPELAVVLGAAAWASSVSTRRTTAARPNPVLQPARWDIPGGRATMVRWLVEPGERFDASAVLARVRLTDGSLFDLAAEAPGSLIHTHAAPGTPVRDADWLATTLPSGPVPMGSAVPADLRGFERSSRPSHHVEVTARATLKGHERDVTSAAFSPDGKLLATTSKDGTRLWDVATGRTSVTLSGRKSLVVHGCAFSSDGKLLATTGSDKTARIWDVDAARQTVTLTGHRGPVYGCAFSPDGSLLATTSTDRTVRLWGSSTGKNLATLNGHRGSVYGCAFSPDGRLLVTAGAESTLLWNVTVGEIIMSLPGHTNFAGGCAFSPDGRLLATSGNEGTRLTDASSGTTVLTLPGSAQSCAFSPDGHLLATASTDDTAQLWDVATGSAIATLTGHSSTVMSCAFAPYGLLLATTSTDMTARLWDIIYTP

SEQ ID NO: 22045 - protein, 433 aa, Ralstonia eutropha JMP134
MASLGFQHMLVSYLGAIAVPMIVASALKMTPAQTTMLISTALFTSGIATLLQTVGFWKFGVRLPLMQGVAFSSVAPVIAIGSDPSLGFNGVCGAIIGAGVITMLLAPVIGRLKRFFPPVVSGCTITAVGLSLFPVSFHWFGGGRGAPDFGSPVFFAVGFGVVALILLINRHRSELVRNLAVMIGLLVGGAVAWMLGMGNFDEVSRAPWFTMVTPFAFGMPVFDIGAITTMVIVMVVQMVESMGLFVAVSEIVKRPITEQDATRGLRANGLASAIGGMFAAFPYIAFMENVGLVIVTGVRSRWVVATCGVMLCAVALVPKIGALFASIPPAALGGAAMVMFGVVVAAGIKTLGRVEYDRNPANLSVVAITLACAMMPVMLPSMLDKLPGFLQPFVHSSVIIACVVSVLLNLLLNGVPARDESEHPIHTDNIQEV

SEQ ID NO: 22046 - protein, 581 aa, Pisum sativum
MAAVTSSCSTAISASSKTLAKPVAASFAPTNLSFSKLSPQSIRARRSITVGSALGATKVSAPPATHPVSLDFETSVFKKERVNLAGHEEYIVRGGRDLFHLLPDAFKGIKQIGGIGWGSQGPAQAQNLRDSLVEAKSDIVVKVGLRKGSSSFNEAREAGFSEEKGTLGDIWETISGSDLGLLLISDSAQADNYEKIFSHLKPNSILGLSHGFLLGHLQSIGLDFPKNFSVIAVCPKGMGPSVRRLYVQGKEINGAGINSSFGVHQDVDGRATNVALGWSVALGSPFTFATTLEQEYKSDIFGERGILLGAVHGIVESLFRRYTENGMSEDLAYKNTVESITGVISKTISTQGMLAVYNALSEDGKKEFERAYSASFYPCMEILYECYEDVASGSEIRSVVLAGRRFYEKEGLPAFPMGKIDQTRMWKVGERVRSTRPAGDLGPLYPFTAGVFVAMMMAQIEVLRKKGHSYSEIINESVIESVDSLNPFMHARGVSFMVDNCSTTARLGSRKWAPRFDYILTQQALVAVDSGAPINQDLISNFVSDPVHGAIQVCAELRPTLDISVPAAADFVRPELRQCSN

SEQ ID NO: 22047 - protein, 171 aa, Arabidopsis thaliana
MASSSSTYRSSSSSDGGNNNPSDSVVTVDERKRKRMLSNRESARRSRMRKQKHVDDLTAQINQLSNDNRQILNSLTVTSQLYMKIQAENSVLTAQMEELSTRLQSLNEIVDLVQSNGAGFGVDQIDGCGFDDRTVGIDGYYDDMNMMSNVNHWGGSVYTNQPIMANDINMY

SEQ ID NO: 22048 - protein, 563 aa, Mycobacterium avium subsp. paratuberculosis K-10
MPVTDAATEPAYTVGDYLLDRLAELGVSEIFGVPGDYNLEFLDHIVAHPRLRWVGNANELNAGYAADGYGRLRGMSALVTTFGVGELSAANAVAGSYAEQVPVVHIVGGPSKDAQGTRRALHHSLGDGDFEHFFRVSREITCAQANLMPATARREIDRVLSEVREQKRPGYILLSTDVARFPTEPPEAALPRYTGGTSPRALAMFTEAAAALIGEHRITVLADLLVHRLQAIKELEALLAADVVPHATLMWGKSLLDESSPNFLGIYAGSASAPAVRTAIEEAPVLVTAGVVFTDMVSGFFSQRIDPARTIDVGQYQSSVAGEVFAPLEMGEALQALTAILTRRGVSSPPVASPPAEPLPPPPPREQPLTQKMVWDRVCTALTPGNVVLADQGTSFYGMADHRLPQGVTFIGQPLWGSIGYTLPAALGAAVAHPDRRTVLLIGDGAAQLTVQELGTFAREGLSPVIVVVNNDGYTVERAIHGETAPYNDIVGWKWTEVPNALGVTEHLAFRVQTYGELDDALTAAARHQDRMVLVEVVLPRLEIPRLLVELVRPTSPDGSPRR

SEQ ID NO: 22049 - protein, 277 aa, Lactobacillus acidophilus NCFM
MDILDLKKKAVELRKRTWELIYNHKNGHTGSDLSCTDILVALYYSVMNQNKDNFGQKDVDTYIQSKGHAVEIWYEVLADKGYIDRNDLEKRYSTFNSPYIGHPTTDVKGMEFHTGSLGHGLGLGVGVALAAKMYNSPKHTYVLMGDGEQAEGSIWEAAMSAGNYNLDNLTAIVDHNDLQISGTTDSVMRSNPLGDKYRAFGWDVQEVDGNDVGALVDVLTKPNDTNKPRMIIANTIKGKGITVAENRADWHHKIPTEIEYKEGLRELDAQMEALNND

SEQ ID NO: 22050 - protein, 336 aa, Pseudomonas stutzeri
MLPKLVITHRVHDEILQLLAPHCELMTNQTDSTLTREEILRRCRDAQAMMAFMPDRVDADFLQACPELRVVGCALKGFDNFDVDACTARGVWLTFVPDLLTVPTAELAIGLAVGLGRHLRAADAFVRSGEFQGWQPQFYGTGLDNATVGILGMGAIGLAMADRLQGWGATLQYHEAKALDTQTEQRLGLRQVACSELFASSDFILLALPLNADTQHLVNAELLALVRPGALLVNPCRGSVVDEAAVLAALERGQLGGYAADVFEMEDWARADRPRLIDPALLAHPNTLFTPHIGSAVRAVRLEIERCAAQNIIQVLAGARPINAANRLPKAEPAAC

SEQ ID NO: 22051 - protein, 402 aa, Burkholderia vietnamiensis G4
MLRRFWLFFAQAVTVLLALMFIVVTLKPQWLQRQGQLGKQLATPIVALREVAPGIGGGPATTSYAEAAQKAMPAVVNVFSSKDGSLPPDPRAKDPLFRYFFGDRNNARKQQDEPAANLGSGVIVSPEGYILTNQHVVDGADQIEVALADGRTATAKVIGSDPETDLAVLKINMTDLPTITLGRSDRSRVGDVVLAIGNPFGVGQTVTMGIISALGRNHLGINTFENFIQTDAPINPGNSGGALVDVNGNLLGINTAIYSRSGGSLGIGFAIPVSTARTVLESIITTGSVTRGWIGVEPQDVTPEIAESFGLQQKSGAIVAGVLQGGPADKAGIKPGDILVSVNGDDITDTTKLLNTVAQIKPGTATKVHVVRKGKEFDVNVVIGKRPPPPKQTVDEQDSDSE

SEQ ID NO: 22052 - protein, 492 aa, Methanosarcina barkeri str. fusaro
MTLRDTLEPFFNKLPAVASPEKHVHFKDKLWWTLGVLLLYFALANVPLFGMSQDSVDLFESYRAFFAGASGSLILLGIGPIVTASIVLQLLVGADIIKLDLSDPKDQSFFQGAQKFLVFVMIILEALPQLLGGYIQPDPGLASSLGVGLGVITFLLLIQIFIGGALILFMDEVVSKWGIGSGVGLFIVAGISQQIVTGIFNWQLDSSGLPVGLIPKWIYIAQNVGADYLLSGEGVLYMLVSGGILALLSTIVIFLLVVYVESTRIEIPLAHSAVRGARGRFPVKLIYASVLPMILVRALQANIQMIGIILASRGITFFGEFHGSTPLNGIMYYLAPIHSPYDWIPSLVRQSFSGYGAATPANWQIVLHVFTDATMLVVGGIIFALFWIETTGMGAKPTAQKIFNSGMQIPGFRRNISSIEKVTQRYIPKVTVIGGAFIGLLTLIASLLGTLGSTSGTGLLLAVSIVYRLYEDIASEQMMEMHPMIRSFFGEQ

SEQ ID NO: 22053 - protein, 288 aa, Desulfitobacterium hafniense DCB-2
MSDRLETALAKARLKTPENPLGMGLITYLMAGDPDSDTTLRRLTGLVKAGVDILELGVPFSDPIADGPVIQAAGLRALQQGMNLQKVLNLAARFRKENQTTPLLLMSYLNPLIHYGYDRFLSEACTAGVDGLILPDLPWRESTPFRQRAYELLQDHLAFIPMIAQTSRPAHIHGLAQEQKGFIYVLSRNGITGGDAEIPPQTLQFIDSLQTALSAPCYVGFGIQSPTQVHTLSQACQGVIVGSALVQKFAQLDACALPAHELVHREQDIYAWIGSLRKTSVREELACE

SEQ ID NO: 22054 - protein, 140 aa, Silicibacter pomeroyi DSS-3
MALERTFSIIKPDATRRNLTGKINAKFEEAGLRIVAQKRIHMTKEQAGVFYGVHAERPFYDELCEFMSSAPVVVQVLEGENAIAKNREVMGATNPADAAPGTIRAEFAESVGENSVHGSDAPETAAVEIAYFFSGIELVG

SEQ ID NO: 22055 - protein, 615 aa, Pneumocystis carinii
MAVNTENPGFCRSRLEELLKKRFFYCPSYEIYGGIGSFWFVYYGPPGMALEQNILNVWRKHFVYEENMLEIGTSIVTPHEVLETSGHVSKFRDWMCKDPSTGEVFRADHIIKEILLSRIKKRVESGLEGEKVEGGASGTKFDTLDESLSRIREYEDIISRIDGYDGEGLSRVIEEYDIRNPATNVRMEGPVGFNLMFATEIGPKGNMTGYLRPETAQGQFLNFNKLLEFNNGKMPFASVVVGKSFRNEISPRSGLLRMREFTMAEIEHYVDPLNKDHRRFNEVENVKMKFLTREIQMSGKEEVIEMKIGEAVARGILENTTLAYFLARIHLFLIRIGMNQEKLRFRQHMNNEMAHYASVCWDAELLTSYGWIECVGCADRAAYDLTVHSEKTKEKLVVRELLPKPMEVTEWVVNVDKKKIENLKFPSSLFTIEQVKKTISVREYIPNVIEPSFGIGRILYSLIEHSYWIRSDDVDRCVLSFPPIVAPVKCLLVPLSNNSAFDPIIDKLSFELRQLGISHKVDDSSAAIGRRYSRNDELGTPFGITVDFQTVNDGSLTLRERDTTRQIRASEKEILRVIKELSEGLISWDDVLKDFPIFNKQITDIPEITDLYIRE

SEQ ID NO: 22056 - protein, 370 aa, Chlamydophila pneumoniae AR39
MTTSDVIDFVTNDFLGFARSPTIYCEVSKRFQIHCQQFPHEKLGIRGSRLMVGPSSVIDDLESKIASYHGAPNAFIVNSGYMANLGLCHHVSRSTDVLLWDEEVHMSVVHSLSAISGQHHTFHHNNLEHLESLLQCYRISSKGRIFIFVSSVYSFRGTLAPLEQIIALSKKYHAHLIVDEAHAMGIFGDDGKGLCHALGYENFYAVLVTYGKALGTMGASLLTSSEVKYDLMQNSPPLRYSTSLSPHTLISIGTAYDFLASEGEIARKQVFKLKEHFHECFDSHAPGCVQPIFLPHTCLEEAISVLETTGIHVGVVAFAKHPFLRVNLHAYNTVDEVNLLAQVMKPYLEKSSHRVHINHEFHLWRELCQH

SEQ ID NO: 22057 - protein, 703 aa, Pneumocystis carinii
MAHNLSSQYFMNPGPAPAPPIKIPSYSSSNIYAGRCFDVSHTYKGSKGVLKAGWANVKEEGIKSWIWSKKYLVLTDKVLRVMKNESSTSPGLSIPLREIMNVSRAELKDYCFEILRDPGIGSGTKKSYFISLKSDNDLYSWMDEIYSRCPLMMVSNPTNFTHKVHVGFDPKSGGFTGLPEEWTRLLTASAITKEDYAKNPEAVIEVLQFYSDTQLREKEEFGEPSTLGPDLYNIENQDIKSLEQNKMTMEKHYVNNGFNSQYPVSSTSKGAVPLREWLKKMDIKDSEKMVPQRVPPALPSNLPTRLNTDMASFPHESDSFLTCGSSNVDKGFGVTAKKRQNVPLETLKHKQSQNNLAFISQAPTQPLPKIPTSSKNIPDIPTTFPETTMKQPNATKLPLSLSNARAMKQEPPSDEKVNDLTGSQVMERLRNVVSTNDPNPLYTKIKKVGQGASGSVYVARVAIKQMDIAHHPRRELIVNEILVMKESHHPNIVNFLDAYLAKNSELWVIMEYMEGGALTDIIDNNTLTEDQIAAISLEGLQHLHPTKIFHRDIKSDNVLLDFHGRVKITDFGFCAKLTEQKNKRATMVGTPYWMAPEVVKQKEYGAKVDIWSLGIMAIEMIETEPPYLNEEPLKALYLIATNGTPTLKKPDKLSKELKSFLAVCLCVDVKSRATAEELLEHDFLKKSCSLSNLSSLLAFKSGK

SEQ ID NO: 22058 - protein, 201 aa, Klebsiella aerogenes
MAQHDENVVWHAHPVTQQQREQHHGHRGVVLWFTGLSGSGKSTVAGALEEALHERGVSTYLLDGDNVRHGLCSDLGFSDEDRKENIRRVGEVARLMVDAGLVVLTAFISPHRAERQMVRERLGEGRFIEVFVDTPLAICEARDPKGLYKKARAGELRNFTGIDSVYEAPEKAEIHLDGEQLVTNLVHQLLDLLQQSDIIRS

SEQ ID NO: 22059 - protein, 566 aa, Pneumocystis carinii
MIGLYAHVNASKDHFDDVINASPPLEEPQEPPLRGTLYLLFLTLVLGGLQLTCKSRKIFILYYIREGTPYLLSLGLTKHYTSFVWIAAPLTGIIIQPLIGFFSDRSRSKFGRRRPFLVVGTLCVVISLIGLAYFKDIAFFFFSGHEKVAKNMTIIVSIIIVYLLDFSINIVQASSRALIIDMVPMVQQDLANAWASRMIGIFNVVGYLNGYLNLPKIAPALGNTEFKALSVIGSIVLIVCMAVTFFVAKEKRYFMESLFNFFKTIFSTIITLPSEILWICIIQFFAWIELISMVFKVSDSFLCKIFFGTTYVAEIYAEKYCNKYLKYPDHLYTKEKEYLLIEEATRYGSFAFCAFFYYFFIRNIFLSFIFFMDFWSFYFYFMHAFNHTSKINHFFFPLFVSGKKLFKYIFRLKFYNILQNINIQFLWTFGHFIFTLCMLSTILVKSITQATIIIALCGLSWAITLWAPFSLIAIQLSSNNQLHRSGTILGVHNIFITVPQVLSIIMVGIIFKLTGYKKFEDIIKCNDNMDYSFIWIFQISGISALIAMYLSFKIYTNDPSYERNKI

SEQ ID NO: 22060 - protein, 351 aa, Chlamydophila pneumoniae AR39
MKYSLNFKEIKIDDYERVIEVTCSKVRLHAIIAIHQTAVGPALGGVRASLYSSFEDACTDALRLARGMTYKAIISNTGTGGGKSVIILPQDAPSLTEDMLRAFGQAVNALEGTYICAEDLGVSINDISIVAEETPYVCGIADVSGDPSIYTAHGGFLCIKETAKYLWGSSSLRGKKIAIQGIGSVGRRLLQSLFFEGAELYVADVLERAVQDAARLYGATIVPTEEIHALECDIFSPCARGNVIRKDNLADLNCKAIVGVANNQLEDSSAGMMLHERGILYGPDYLVNAGGLLNVAAAIEGRVYAPKEVLLKVEELPIVLSKLYNQSKTTGKDLVALSDSFVEDKLLAYTS

SEQ ID NO: 22061 - protein, 232 aa, Vibrio parahaemolyticus RIMD 2210633
MNKYLAEAFGTFWLVLGGCGSAVLAAGFPDVGIGLLGVALAFGLTVLTMAFAIGHISGCHLNPAVTVGLWAGGRFDTKDVAPYIIAQVIGGLIAGGILYVIATGQAGFDVVGSGFAANGYGEHSPGQYSMLAALVSEIVMTMMFLIVIMGATDKRAPQGFAPIAIGLCLTLIHLISIPVTNTSVNPARSTAVAMYVGDWAVSQLWLFWVAPIVGGVLGAVIYKNLLGKESND

SEQ ID NO: 22062 - protein, 478 aa, Zea mays
  misc_feature (266)..(266): Xaa can be any naturally occurring amino acid
  unsure (1)..(478): unsure at all Xaa locations
MQFALALDTNSGPHQIRSCEGDGIDRLEKLSIGGRKQEKALRNRCFGGRVAATTQCILTSDACPETLVPVGGCYRLIDIPMSNCFNSGINKIFVMSQFNSTSLNRHIHRTYLEGGINFADGSVQVLAATQMPEEPAGWFQGTADSIRKFIWVLEDYYSHKSIDNIVILSGDQLYRMNYMELVQKHVEDDADITISCAPVDESRASKNGLVKIDHTGRVLQFFEKPKGADLNSMRVETNFLSYAIDDAQKYPYLASMGIFLEDINAXDALLDLLKSKYIQLHDFGSEILPRAVLDHSVQACIFTGYWEDVGTIKSFFDANLALTEQPSKFDFYDPKTPFFTAPRCLPPTQLDKCKMKDAFISDGCLLRECNIEHSVIGVCSRVSSGCELKDSVMMGADTYETEEEASKLLLAGKVPVGIGRNTKIRNCIIDMNARIGKNVVITNSKGIQEADHPEEGYYIRSGIVVILKNATINDGSVI

SEQ ID NO: 22063 - protein, 490 aa, Corynebacterium glutamicum ATCC 13032
MTINVSELLAKVPTGLLIGDSWVEASDGGTFDVENPATGETIATLASATSEDALAALDAACAVQAEWARMPARERSNILRRGFELVAERAEEFATLMTLEMGKPLAEARGEVTYGNEFLRWFSEEAVRLYGRYGTTPEGNLRMLTALKPVGPCLLITPWNFPLAMATRKVAPAIAAGCVMVLKPARLTPLTSQYFAQTMLDAGLPAGVLNVVSGASASAISNPIMEDDRLRKVSFTGSTPVGQQLLKKAADKVLRTSMELGGNAPFIVFEDADLDLAIEGAMGAKMRNIGEACTAANRFLVHESVADEFGRRFAARLEEQVLGNGLDEGVTVGPLVEEKARDSVASLVDAAVAEGATVLTGGKAGTGAGYFYEPTVLTGVSTDAAILNEEIFGPVAPIVTFQTEEEALRLANSTEYGLASYVFTQDTSRIFRVSDGLEFGLVGVNSGVISNAAAPFGGVKQSGMGREGGLEGIEEYTSVQYIGIRDPYAG

SEQ ID NO: 22064 - protein, 338 aa, Edwardsiella ictaluri
MAILVTGGAGYIGSHTVLALLSRGDEVVVLDNFVNASVQALARVEQICDRQPHLYRGDVRDRALLQQIFAQHVISDVIHFAGLKAVGESVEKPLEYYDNNVSGTLVLLEEMRRAGVQGFIFSSSATVYGDPESVPLTESSRTGGTTNPYGTSKLMVEQILQDVSRARPEMRITALRYFNPVGAHPSGLIGEDPNGIPNNLIPYVAQVAVGKLACLSIFGHDYPTQDGTGVRDYIHVMDLATGHLAALDRRDEGASYKVYNLGTGVGYSVLDIVAAFERCSGVTIPYRFAPRRAGDIAECWSNPALAAQELGWCAQYGLEAMMTDTWRWQQNNPNGYQD

SEQ ID NO: 22065 - protein, 376 aa, Streptococcus pneumoniae TIGR4
MNNRSETMKYKRIVFKVGTSSLTNEDGSLSRSKVKDITQQLAMLHEAGHELILVSSGAIAAGFGALGFKKRPTKIADKQASAAVGQGLLLEEYTTNLLLRQIVSAQILLTQDDFVDKRRYKNAHQALSVLLNRGAIPIINENDSVVIDELKVGDNDTLSAQVAAMVQADLLVFLTDVDGLYTGNPNSDPRAKRLERIETINREIIDMAGGAGSSNGTGGMLTKIKAATIATESGVPVYICSSLKSDSMIEAAEETEDGSYFVAQEKGLRTQKQWLAFYAQSQGSIWVDKGAAEALSQYGKSLLLSGIVEAEGVFSYGDIVTVFDKESGKSLGKGRVQFGASALEDMLRSQKAKGVLIYRDDWISITPEIQLLFTEF

SEQ ID NO: 22066 - protein, 571 aa, Geobacter metallireducens GS-15
METFKRLLRYSKPYGWRIAISMVASLCVGGTDAAIAWLVEPLLKKIFTEKDMTIFILLPVAVMIVFILRGVARFVQQYYISTAGQLAIQDIRNEVYQKHMGLPLRYFADNPTGVLMSRVMSDVGQMQSGVANVVTGLLRDGVTAIGLLGVIFYRNWQLALITFIVLPLTAVPAQKIGKRIKNLAKQSLGQMGEITSILQETFTGIKVVKAFRLERRFIDRFSQTNLGLYHYLRKSIKYESLHTPIMEIITSLGVAGVIWFGGSQVMHGRMSASEFFSFLTAMVMLYGPVKKLLSSYNTVQQAVGAAERVFEVIDQRADIEDPAEPVEMGPPQGSVELRNVSFRYNDEEVLRNVSLSAGRGEVVALVGPSGAGKTTIMSLIPRFYDVTGGAVLVDGVDVRQARLDDLLSHVALVDQETVLFNDTIANNIRLGNSDAPMEAVERAARAAFAHDFIMDMPEGYDTNIGDRGVRLSGGQRQRLCIARAILKDAPILLLDEATSALDTESEHMVQQALANLMKNRTTLVIAHRLSTVLHADRIVVIDRGEVVEVGTNDELLARGGLYRKLYDMQFS

SEQ ID NO: 22067 - protein, 416 aa, Vibrio vulnificus CMCP6
MDLITLGKAAKDAAFQLATASTAQKNKALAIIADELEANAADILAANSKDIELGRQAGLSEAMLDRLLLNESRLNGIANDVRNVISLTDPVGSEIDSKVLENGMQLSRRRVPLGVVGVIYEARPNVTIDIAALCLKTGNASILRGGKETFFSNMELVKVIQSALAKAGLPAASVQYIEKPDRELVTQLLKLDDYVDMIIPRGGAGLHKMCKENSTIPVIIGGFGISHIFVDETADLAKSVDVVENAKAQRPSACNALDTLLVHERIAEQFLPMLVAKLNGKVTFVVEPKAKAYMTKAEQVRDASDGDFDTEWLSYTLGVKVVADVQEAIDHMREHNASHSDAIMTNHLQNAELFINSAGSAAVYVNASTRFTDGAQFGLGAEVAVSTQKLHARGPMGLEELTSYKWVGKANYLSRA

SEQ ID NO: 22068 - protein, 420 aa, Streptococcus pneumoniae TIGR4 [sequence omitted]

SEQ ID NO: 22069 - protein, 489 aa, Pelargonium x hortorum
MVNMSSTTNQRTLLSKMATGDGHGENSPYFDGWKAYDNNPFHLTQNPQGVIQMGLAENQLSFELIEQWVLNNPQASICTAQGLQEFKDTAIFQDYHGLPEFRYAVANFMGKVRGNRVTFNPDRIVMSGGATGAHEMIAFCLADPGDAFLVPTPYYPGFDRDLRWRTGVQLIPVVCESENNFRITRSALEEAYERAQEDNIRVKGLLITNPSNPLGTILDRETLVSLVSFINEKNIHLVCDEIYAATVFSQPAFVSIAEVIEQENVSCNRDLIHIVYSLSKDMGFPGFRVGIVYSYNDAVVNCARKMSSFGLVSTQTQHLIASMLSDDEFVDTFIVESAKRLARRYTTFTRGLAQVNIGCLKSNGGLFIWMDLRRLLKEKTFEAEMALWRVIINEVKLNVSPGASFHCSEPGWFRVCFANMDDLTMQVALRRIITFALQNKEAAVLPAIKRQCWQNNLGRLSLSFRRFDDFTMSPMSPHSPIQSPLVRAT

SEQ ID NO: 22070 - protein, 476 aa, Campylobacter jejuni RM1221
MGKFVNNIDDFFKFCKQNEVLFVDFRFTDMIGTWHHITYNLHAINEETFQTGIPFDGSSIHGWQPIEKSDMILKPDAQSAFLDPFTADPTIIVFCDVYDIYKGQMYEKCPRSIAKKAMEHLKNSGIADTAYFGPENEFFVFDSVKIVDTAHCSKYEVDTEEGEWNDDREFTDSYNTGHRPRNKGGYFPVQPIDSLVDIRSEMVQTLEKVGLKTFVHHHEVAQGQAEIGVNFGTLVEAADNVQIYKYVVKMVAHLNGKTATFMPKPLYGDNGNGMHVHMSLWKNGVNLFYDKDGYSGLSQTAINYIGGILKNARSVAAFTNPSSNSYKRIVPGFEAPCILTYSCQNRSASCRVPYGIGKNSARIEIRFPDSTANPYLAFVSLLMAGLDGIKNKTIPVGPMDENLFDLTLDEIREKGIEQLPHTLRGSLEALIRHNSYLKPVMSDIFIDDYQHLKFETQVWPVEARPTAYEFKTCYSC

SEQ ID NO: 22071 - protein, 565 aa, Methanosarcina mazei Go1
MKGDNCKNPMDKNQLGEPLPSRNQTVGDTPELTTVAGAPVESNQDSMTSGRRGPLMLQDIWFLEKLAHFDREVIPERRMHAKGSGAFGTFTVTHDITSYTKAAIFSEIGKQTKMFARFSTVAGERGAADAERDIRGFALKFYTEEGNWDMVGNNTPVFFFRDPLKFPDLNHAIKRDPRTNMRSPNTNWDFWTSLPEALLQLTIIMGDRGLPSSFRHMHGFSSHAYSLINKNNERVWVRFHFRSQQGIRNLTDQEAVIVVGMDRESHQRDLYEAIEKGMFPKWKMYIQVMTEEQANSMKNNPFDLTKMWHKKDFPLMPVGEFELNKNPENYFADVEQAAFSPANVVPGISFSPDRMLQGRLFSYGDAHRYRLGVNHHQIPVNSPQGVKNYHSFHRDGQMRVDGNRGSQLHYEPNSYGNWKDQPQYALPVEKTGSTDILRYDFREDDSDYYTQPGELFRAMTPDQQQVLFENTARNMGDSTLQIKHRHIYNCYQADPKYGEGVAKALEIDISTVDLNLPARTSRKANYEANNKHPELNQPTMKKDSGREIDTNGDPYIEPENDPWLL

SEQ ID NO: 22072 - protein, 132 aa, Thermoplasma volcanium GSS1
MEVNRMNKTGIAHIYASQNNTIIHVTDPTGAETIAMVSGGMVVKNDRDQASPYAAMKAADMVSETLKEHEITDLIIKVRAPGGNKSKIPGPGAQAAIRALSRAGLKIVRIEEVTPIPHDGTKKKGGKRGRRV

SEQ ID NO: 22073 - protein, 149 aa, Streptococcus pneumoniae
QPNWINRDRFILSAGHGSMLLYALLHLSGFEDVSMDEIKSFRQWGSKTPGHPEFGHTAGIDATTGPLGQGISTATGFAQAERFLAAKYNREGYNIFDHYTYVICGDGDLMEGVSSEAASYAGLQKLDRLVVLYDSNDINLDGETKDSFT

SEQ ID NO: 22074 - protein, 487 aa, Ralstonia eutropha JMP134
MRRQRKAKIVATLGPASTDIAVIRQLFEAGADVFRLNFSHGTHEDHRARYDAVRQIEAETGRPIAVLADLQGPKLRIGVFAAGKVAVRAGDSFVLDSDPTPGDGTRVHLPHPELFHAAQPGQSLLIDDGKVRLAIESVASGSITTRVVNNGTLSDRKGVNVPDAVIPIPALTEKDRKDLDFALSLGADWIGLSFVQRPSDIVEAREIVGTRAGILSKIEKPAALQQLEEIVRVSDSVMVARGDLGVELPPERVPGVQKRILRVCRQLGKPVVIATQMLESMIDSPVPTRAEASDVASAIYEGADAVMLSAESANGRYPVPAVSMMNRIVTEVERDPLYRNLLDAQHETPLNTRQDAICAALREVTQIIGAVATVTYTSSGATALRAARERPCAPIVSITPNLEIARRLAIAWGIHSTVSPDVKSVDEMVEAATRAALVEGYAAPGDQITIAAGMPFGQGGTTNLLRVAEVGGNAVAGVESVRESATV

SEQ ID NO: 22075 - protein, 678 aa, Chlamydia muridarum Nigg
MRHSIYQLDSAVENVFRLAWTLRFSERKMLLLSRQSGSGGSFQLSCAGHELAGVVAAKSLIPGKDWAFPYYRDQGFPLGLGCDLSEIFASFLARTTQNHSDGRMMPYHYSHKKLRICCQSSVVGTQFLQAAGRAWAVKNSGKNEVVYVSGGDGSTSQGEFHEMLNFASLHQLPLVIVIQNNQWAISVPFADQCGADLVALGKSYSGLATYKVDGGDLSALTQTFDCAVSDARHHHIPALVIVDVVRLESHSNSDNQTKYRSEEELLYCQEQDPLVRLEKSLIDDFGVAQETIEQIKEELQETISKACELAESTPFHCKGATKHEVFAPYNVSLIDYENSLESASLQGSEPRVMRDAITEALVEEMHRDPGVVVFGEDVAGNKGGVFGVTRTLTERFGRNRCFNTPLAEATIIGTAIGMAFDGFHKPVAEIQFADYIWPGINQLFSEAASIYYRSAGEWEMPIVIRTPCGGYIQGGPYHSQNIEAFLAHCPGLKVAYPSNAADAKALLKAAIRDPNPVVFLEHKALYQRRAFSTTPVFSSDYVLPFGKARIVHSGTDLTIVSWGMSLVMSVEVAKDLLGLGVSVEVIDLRTIVPCDFATVCESVKKTGKLLVVHEASEFCGFGSELVALVAERAYRYLDAPIKRIGGRHSPIPYSKVLENEVLPQKEMIFQEAKSLAEF

SEQ ID NO: 22076 - protein, 1083 aa, ASPERGILLUS NIDULANS FGSC A4
MDGDELIASVYRKIEREKALIAAASNMRQSTDNPLVQQRVDANIRDGRKNIAYLEEKMKELQLRQMERESGSPTDKRLPPNPEDGPAPPPKDPLGYGDPTQHPQPGAGSMPSGAPFKDPRPFAPVPKARPNYTKLDLIKYDTPYLGPKIQLMLSQLEFKLSVEKQYKAGIEKMVRLYQDEGDRKSRTDAEGRRIESNQKIQLLKQALKRYEDLHVDIESTDTPDDESLSAPNLRKPLTGLLTMRIQAVQDVDHATSSRFSRGPETFVIVKVEDTIKARTKATRSDRWQDETFNLDIDKANEVELTVYDKAGDRPTPIGMLWLRISDIAEEMRRKKIETEINASGWVSADKMGPGIGPGQTTPAAPVGSSQYGASAGYSNPGPEGQTGATGGPLMIDAWFALEPVGRIHISMSFAKHSKDRRPFDIGLNRQGAVRQRKEEVHEKQGHKFVTQQFYNIMRCALCGDFLKYAAGMQCSDCKYTCHRKCYPKVVTKCISKANYETDPDEEKINHRIPHRFEGFSNISANWCCHCGYLLPFGRKNAKRCSECGLTCHAHCTHLVPDFCGMSMEAANQILETLIRHKNHNKSPSVSSGLSGKTLRPGGSQDAGHAYPKPVESPSSYGQRPPSAEAVSAAATSYIPPPQSPTSQRQPLPPRTSSSSPAAAAAAVATGRMPGRPVQPPAHAHYDPAAYASYQQGAMQQGYPPAQAMQKVNAPAQYGMHAPPPPQQQQQQMQAMQQQVAAKEDIPQQPKVRIGLDHFNFLAVLGKGNFGKVMLAETKATKKLYAIKVLKKEFIIENDEVESTKSEKRVFLIANKERHPFLLNLHACFQTETRVYFVMEYISGGDLMLHIQRGQFGLKRAQFYAAEVLLALKYFHENGVIYRDLKLDNILLTLDGHIKIGDYGLCKENMWYGSTTSTFCGTPEFMAPEILLDKKYGRAVDWWAFGVLIYQMLLQQSPFRGEDEDEIYDAILADEPLYPIHMPRDSVSILQKLLTREPELRLGSGPTDAQEVMSHAFFRNINWDDIYHKRVPPPFMPTISSATDTSNFDQEFTSVTPVLTPVQSVLSQAMQEEFRGFSYTADFA

SEQ ID NO: 22077 - protein, 304 aa, Rubrobacter xylanophilus DSM 9941
MPGFGEVERSAVRSREGAPAEACCSDPEPETPELLAGYLDRIGRWRLLTRDGEIELSRRAKKGDRKARQKLIEKNLRLVVSVAKKYRGYGLPFEDLIQEGNIGLMKAVEKFDPERGFRFSTYATWWIRQAVQRAVADKGRTIRVPVHMTEKIRKVSRTFNELSLELEREPTDEEIARRLEWDVEDVRLTISAMPDATSLDQPVSSEESASELGDFIEDERTSDTPDTVLKELESSQLKEAIERLPERARYVLVRRYGLDDREPATLAELGDELKISRERVRQLQREAERLLKAGIRRTSPRSIT

SEQ ID NO: 22078 - protein, 559 aa, Nostoc sp. PCC 7120
MRKLTRWAFPNLWRRSLTDQRSSQPQSHSIAFFSVLLALILTLLLWQIQRLNSIYPPFLAAVMVSSWYGGFNSGLLATFLSAVVCSYFLLHPFYSLAVSGFSVVGLLQFVLVGLLISSLNSALRQARSQAQMNARVAQQNYERLLQSQYNLRRSEERYRLLVEGVTNYAIFMLDSNANFTTWNIGAERILGYQEAEIIGQPFELIFAPEAIERGQPQQVLKQALTEGFSRENRWHIRKDGTFFWAHCLITPLRDENGNLRGFSKIMQDITERKQAEEEKEQLLLREQAARAEAEAANRSKDDFLAIVSHELRTPMTAIIGWAGMLQTGALDEARASLALETIERNANLQMQLIEDLLDISRIVRGELSLSIDLVDLVEVITDAIEVVQSLADNKGIQIKSRPDTSIDKIWGDSDRLLQVVLNLLTNAIKFTPNGGRIEVCLSKELGTGDWGLGNRGDETNVSCPIPHYAQIQVIDTGQGISADFLPHIFERFRQADSSHTRSNKGLGLGLAIARHLVELHGGTIQAQSQGIGQGATFTVKLPITEESRGVNTIQHNHHC

SEQ ID NO: 22079 - protein, 159 aa, Brassica napus
  misc_feature (150)..(150): Xaa can be any naturally occurring amino acid
  unsure (1)..(159): unsure at all Xaa locations
MASSTISCNASDLIPLLSGGANATATAAAAEFICSRFETVSGKFTDAGYAIDNTYLLFSAYLVFSMQLGFAMLCAGSVRAKNTMNIMLTNVIDAAAGGLFYYLFGFAFAYGAPSNGFIGKHFFGMSDFPKPTFDYPFFLYQWTFAIAAAXITSGSIAER

SEQ ID NO: 22080 - protein, 416 aa, Chlamydophila pneumoniae AR39
MSKKRVVVTGFGVVSCLGNEVDTFYDNLLAGVSGVRPITSFPCEDYATRFAGWIPEFNPEPYVDKKQARRVDPFITYAMVAAKKAIAMSRWDKDHLPSDPVRCGVIVGSGMGGLSTLDQGMERLLVIHKKLSPFFIPYIITNMAPALIAMDFGLMGPNYSISTACATGNYCIDAAYQHLVSGRADMIICGGTEAAVNRIGLEGFIANRALSERNDAPDQASRPWDRDRDGFVLGEGAGILVLETLESALRRDAPIFAEMLGSYVTCDAFHITAPRDDGEGITACVLGALNSAGIPKERVNYVNAHGTSTPLGDLSEVLAVKKAFGSHVRNLRMNSTKSLIGHCLGAAGGVEAVVAIQAILTGKLHPTINLDNPIAEIEDFDVVANKAQDWDIDVAMSNSFGFGGHNSTILFSRYVP

SEQ ID NO: 22081 - protein, 317 aa, Arabidopsis thaliana
  misc_feature (229)..(229): Xaa can be any naturally occurring amino acid
  unsure (1)..(317): unsure at all Xaa locations
MATLKVSDSVPAPSDDAEQLRTAFEGWGTNEDLIISILAHRSAEQRKVIRQAYHETYGEDLLKTLDKELSNDFERAILLWTLEPGERDALLANEATKRWTSSNQVLMEVACTRTSTQLLHARQAYHARYKKSLEEDVAHHTTGDFRKLLVSLVTSYRYEGDEVNMTLAKQEAKLVHEKIKDKHYNDEDVIRILSTRSKAQINATFNRYQDDHGEEILKSLEEGDDDDKXLALLRSTIQCLTRPELYFVDVLRSAINKTGTDEGALTRIVTTRAEIDLKVIGEEYQRRNSIPLEKAITKDTRGDYEKMLVALLGEDDA

SEQ ID NO: 22082 - protein, 308 aa, Debaryomyces hansenii CBS767
MDAKGILPEALGEILEKWVGPKPKLLYTICTGQNPTGSCISFERRKAIYELACKHDFIIVEDEPYYFLQMEEYTTDMKAREDRHVHGHDSFIKALVPSYISMDTEGRVIRLDSLSKTLAQGLRFGWIVAQANLLERFVRLHEMSINSPSGLTQSVTYGLLNKWGHSGYLDWLIGLRYEYTHKRDVAIDALNIHLPKEIISYVPPVAGMFFTVQFDATKHPKFKTDFNEDSLKVEDAVYKQALKQGCLMIPGSWFKTQSKTDPPQPEIPENHATKNTFFFRGTYVAVPLAELQKGLEKFGRAVRIEFGL

SEQ ID NO: 22083 - protein, 751 aa, Saccharomyces cerevisiae
MSQVNTSQGPVAQGRQRRLSSLSEFNDPFSNAEVYYGPPTDPRKQKQAKPAKINRTRTMSVFDNVSPFKKTGFGKLQQTRRGSEDDTYSSSQGNRRFFIEDVDKTLNELLAAEDTDKNYQITIEDTGPKVLKVGTANSYGYKHINIRGTYMLSNLLQELTIAKSFGRHQIFLDEARINENPVNRLSRLINTQFWNSLTRRVDLNNVGEIAKDTKIDTPGAKNPRIYVPYDCPEQYEFYVQASQMHPSLKLEVEYLPKKITAEYVKSVNDTPGLLALAMEEHFNPSTGEKTLIGYPYAVPGGRFNELYGWDSYMMALGLLEANKTDVARGMVEHFIFEINHYGKILNANRSYYLCRSQPPFLTEMALVVFKKLGGRSNPDAVDLLKRAFQASIKEYKTVWTASPRLDPETGLSRYHPNGLGIPPETESDHFDTVLLPYASKHGVTLDEFKQLYNDGKIKEPKLDEFFLHDRGVRESGHDTTYRFEGVCAYLATIDLNSLLYKYEIDIADFIKEFCDDKYEDPLDHSITTSAMWKEMAKIRQEKITKYMWDDESGFFFDYNTKIKHRTSYESATTFWALWAGLATKEQAQKMVEKALPKLEMLGGLAACTERSRGPISISRPIRQWDYPFGWAPHQILAWEGLRSYGYLTVTNRLAYRWLFMMTKAFVDYNGIVVEKYDVTRGTDPHRVEAEYGNQGADFKGAATEGFGWVNARYILGLKYMNSYERREIGACIPPISFFSSLRPQERNLYGL

SEQ ID NO: 22084 - protein, 443 aa, Zea mays
  misc_feature (136)..(136): Xaa can be any naturally occurring amino acid
  unsure (1)..(443): unsure at all Xaa locations
MEDAMAADGKSVLQGRYELGRVLGHGNFGRVHAARDLRTGRSVAVKVVAKDKLERAGMAEQIKREIAVMKMVSHPNIVELHEVMATRSKIYLALELVRGGELFSRIARAGRVREDVARCYFRQLVAAVDFCHGRGXFHRDLKLENLLLDEVGNLKVADFGLSALAGHARSDGLLHTACGTPSYVAPEVLGGKGYDGAKADLWSCGVILYVLLVGSLPFHEDNLMVMYRKMQRGEFLCPPWVSADARKLIGELLDPDPSTRITVARLVETPWYRKPLPVLPPLNLKEPTPDARRATSDKEEPEVLNAFHLISFSEGFDLSPLFDQGRGGGVGRSSAGGIRFVTREAASSVVSRLESLVTGRGANMRVTKSGSRGVRLEAVSRGRSGARLAVAAEIFSVAPSVLLVDVKKDGGDTMEYRSFCSEELRPALKDIVWASSQDTPGAA

SEQ ID NO: 22085 - protein, 398 aa, Candida albicans
MFLKNIFIGLAIALLVDATPTTTKRSAGFVALDFSVVKTPKASPVTNGQEGKTSKRQAVPVTLHNEQVTYAADITVGSNNQKLNVIVDTGSSDLWVPDVNVDCQVTYSDQTADFCKQKGTYDPSGSSASQDLNTPFKIGYGDGSSSQGTLYKDTVGFGGVSIKNQVLADVDSTSIDQGILGVGYKTNEAGGSYDNVPVTLKKQGVIAKNAYSLYLNSPDAATGQIIFGGVDNAKYSGSLIALPVTSDRELRISLGSVEVSGKTINTDNVDVLLDSGTTITYLQQDLADQIIKAFNGKLTQDSNGNSFYEVDCNLSGDVVFNFSKNAKISVPASEFAASLQGDDGQPYDKCQLLFDVNDANILGDNFLRSAYIVYDLDDNEISLAQVKYTSASSISALT

SEQ ID NO: 22086 - protein, 308 aa, Pseudomonas fluorescens Pf-5
MTSKLEQLKKITTVVADTGDFDAIARVKPVDATTNPSLLLKAAAIPGYADLLNACVNDCKGDVGLASDRFGVAVGQEILKVIPGRISTEVDARLSFDTEAMLKRAHRLIELYDKAGIGRDRVLIKIASTWEGIRAAEKLEREGIQTNLTLLFSFAQAVACAEAGVFLISPFVGRIYDWYKKATGNDYQGADDPGVQSVTRIYNYYKANDYKTVVMGASFRNLNQIEQLAGCDRLTISPDLIEKLAADTGKLERKLSPGKTGEARQSLNEAQFRWASNEDAMATEKLAEGIRQFARDQEKLEALLAAKL

SEQ ID NO: 22087 - protein, 534 aa, Pseudomonas syringae pv. tomato str. DC3000
MSENKTRVDNAATGDIQHQGKDIFFAAVETTRMPMIVTDPNRPDNPIIFSNRAFLEMTGYTAEEILGTNCRFLQGPDTDPAVVQSIRDAIAQRNDISAEIINYRKDGSSFWNALFISPVYNDAGDLIYFFASQLDISRRKDAEEALRQAQKMEALGQLTGGIAHDFNNLLQVMGGYIDLIGSAAEKPVIDVQRVQRSVYHAKSAVERASTLTKQLLAFARKQKLQGRVLNLNGLVSIVEPLIERTFGPEVAIETDLEPALKNCRIDPTQAEVALLNIFINARDALIGRENPKVFIETRNLLVDELANMSYDGLLPGRYVSIAVTDNGIGMPASIRDRVMDPFFTTKEEGKGSGLGLSMVYGFAKQSGGAARIYTEEGVGTTLRLYFPVDEAGLTNTESPQASDRRLGSSERILIVEDRPDVAELAKMVLDDYGYVSEIVLNAREALKKFESGNMYDLLFTDLIMPGGMNGVMLAREVRRRYPKVKVLLTTGYAESSIERTDIGGSEFDVVSKPCMPHDLARKVRQVLDGPNGIA

SEQ ID NO: 22088 - protein, 149 aa, Streptococcus pneumoniae
QPNWINRDRFILSAGHGSMLLYALLHLSGFEDVSMDEINSFRQWGSKTPGHPEFGHTAGIDATTGPLGQGISTATGFAQAERFLAAKYNREGYNIFDHYTYVICGDGDLMEGVSSEAASYAGLQKLDKLVVLYDSNDINLDGETKDSFT

SEQ ID NO: 22089 - protein, 270 aa, Sphingopyxis macrogoltabida
MGWLDGKVALITGGGAGIGRALVERFVAEGAKVGVLEVNAGRAEELAAVLGDSVCVVTGSVASFADNAAAVQRTVEKFGRLDTFVANAGVFDFFQPLAQYEGDQIGAAFDELMSVNVKGGLLGVRAALPELVRSRGSVIFTISNAGFYAGGGGPLYTASKHALVGLVKQLAHELAPKVRVNAVAPGGMKTELSGLSATGTSGQSLSQMDGLDTLLKDITPLQVSPMPEQYCGPYVLLASDDSVVTTGAIINTDGGFGVRGITGVRGGEGL

SEQ ID NO: 22090 - protein, 342 aa, Pseudomonas syringae pv. tomato str. DC3000
MILVTGGAGYIGAHITLQLLESGRDVVVLDNLCNSSRDALGRVERLGGRRLNFIHGDVRSKATLHRLFTRYPVEAVVHCAGLKAVGESVREPLRYFDTNVSGSVNLCQAMAEAGVFDLLFSSSATVYGDCERMPLDENCPLGLPTNPYGHSKLMAEHVMKSVAHSDPRWSIGLLRYFNPIGAHPSGLLGEVPCNTPNNLLPLLLQVANRLRPALHIFGNDYPTPDGTGVRDYLHVMDLADGHLKALDRIHSERGASVWNLGTGQGYSVLEVVRAFERISGKAVPLIYEPRRPGDVAACWSDPAKALRELQWSARLDLDSMLADAWRWQCMNPQGYAPTALVS

SEQ ID NO: 22091 - protein, 403 aa, Vibrio parahaemolyticus RIMD 2210633
MKRVVITGMGIVSSIGNNVEEVLASLKAGKSGITASEQFKEHGLRSQVWGDLKINPAEHIDRKQMRFMGDAAAYAYLSMQQAIEDAGLTEEQVSNDRTGIVAGSGGASALNQTVATDIMREKGVKRVGPYMVPRTMSSTVSACLATPFKIRGVNYSMSSACATSAHCIGHAMELIQLGKQDIVFAGGGEELDWSQTMMFDAMGALSTKYNDTPEKASRTYDADRDGFVISGGGGMLVIEELEHALARGAKIYGEIVGYGATSDGYDMVAPSGEGAVRCMKMAMQDVDSIDYVNTHGTSTPVGDVKELGAIQELFGDNSPAISATKAMTGHALGAAGVHEAIYSTLMLDNNFIAPSINIENLDEAAKGLDIVTEARDAELTTVMSNSFGFGGTNATLVIKKYQA

SEQ ID NO: 22092 - protein, 149 aa, Glycine max
FPYGGKPVEELMEKPLSWVAEKVHEFLEIGLTEEHFLGLVDWVEVHRPAPGLSRIYCGHGKEEGPSFVVSSGQRFPESKVDFGWGKPVFASYHFPWGGDSGYVMPMPSSTGNGDWLVYMHLLEAHLNFMEVRAPQIFWPFSRDYHFNRH

SEQ ID NO: 22093 - protein, 95 aa, Brassica napus
MGPRLEGPNLFLLLILGLVLNSLLLFCHGGRTSNYVRRLEATVDMPLDSDVFRVPPGYNAPQQVHITQGDVEGKAVIVSWVTQEAPGSDTVLYWK

SEQ ID NO: 22094 - protein, 563 aa, Pseudomonas fluorescens
MRPVRPVQNRLKETHMQDWQRSVIYQIYPKSFYSHGGQATGDLLGVVDKLDYLHWLGVDYLWLTPFLRSPQRDNGYDISDYYAIDPSYGTMADCELLITEASKRGIKLMLDIVVNHTSIEHPWFQAARSSLDNPYRDFYIWRDQPNNWESKFGGSAWEYEAQTGQYYLHLFDHTQADLNWDNPQVRAEVFKMMRFWRDKGVGGFRLDVINLISKPADFPDDHTDGRRFYTDGPNVHRYLQEMHREVFEGFDLINVGEMSSTSLEHCVRYSCPASRELSMTFNFHHLKVDYPNLQKWVRADFDFLELKRILSDWQVGMQAGDGWNALFWCNHDQPRVVSRFGDDGEYREPSAKMLATALHFLQGTPFVYQGEELGMTNPGFEHIEQYRDVETLNIYRLKRNAGVSEANAMASIMQKSRDNGRTPMQWNAGPNAGFSRAEPWIGVPANAAFINVEQQQQDPTSVLHYYRQLIALRRSEALIQDGVYRLLLPEHPHVWAYLREGQGERLLVVSHFYGGDCEVELPEGVLTHDTKQRWVIGNYEAGEHRYRRLRLRPYESFVLHLSD

SEQ ID NO: 22095 - protein, 417 aa, Thermococcus kodakarensis KOD1
MQEKLENKLAAQPLDFESFFSQKAMEMKASEVRELLKLVETSDVISLAGGLPAPETFPVDIIKEITMEVLSKHADKALQYGTTKGFTPLRLALARWMEKRYGIPMSKVEVMIVAGSQQALDLIGRVFIDPGDIVVVEAPTYLAALNAFKFYDPEFISIPLDDDGMKVDVLEEKLKKLKAEGKRIKFVYTVSTFQNPAGVTMSLERRKHLIELANEYDFLIVEDNPYSELRYSGEPIPPIKHFDDEGRVIYLGTFSKIFAPGFRLGWVSAHPHFIRKMEIAKQAVDLCANPFGQVIAWKYVEDGHLDRHIPRVIEFYKPRRDAMLEALEEYMPEGVRWTKPDGGMFIWVTLPEGIDTKLMMEKAVAKGVAYVPGEAFFAHREVKNTMRLNFTYVPEEKIREGVRRLAEVIEEEIKKLK

SEQ ID NO: 22096 - protein, 504 aa, Arabidopsis thaliana
MVVINSLRRLARTTQVHLHSKYATCMSGNSTSRRIFTTEAAPEKKNTVGSKGHDMLAPFTAGWQSADLDPLVIAKSEGSYVYDDTGKKYLDSLAGLWCTALGGNEPRLVSAAVEQLNTLPFYHSFWNRTTKPSLDLAKVLLEMFTANKMAKAFFTSGGSDANDTQVKLVWYYNNALGRPEKKKFIARKKSYHGSTLISASLSGLPPLHQNFDLPAPFVLHTDCPHYWRFHLPGETEEEFSTRLAKNLEDLIIKEGPETIGAFIAEPVMGAGGVIPPPATYFEKVQAVVKKYDILFIADEVICAFGRLGTMFGCDKYNIKPDLVTLAKALSSAYMPIGAILMSQEVADVINSHSSKLGVFSHGFTYSGHPVSCAVAIEALKIYKERNIPEYVAKVAPRFQDGVKAFASGSPIIGETRGTGLILGTEFVDNKSPNEPFPPEWGVGAFFGAECQKHGMLVRVAGDGILMSPPLIISPEEIDELISIYGKALKATEEKVKELKAQHKK

SEQ ID NO: 22097 - protein, 506 aa, GIBBERELLA ZEAE PH-1
MSRPRRRGHKDGGYGGQATTLSSVVNLLNTSFQVVGAGTLAMPSVMSHMGIMLGVILIIWSGLTAAFGLYLQSRCARYLERGTASFFALSQITYPNAAVIFDAAIAIKCFGVGVSYMIIIGDLMPGVVLGFLSNANSAPYLVDRNFWITAFMLLIIPLSFLRRLDSLKYTSIVALVSIGYLIVLVIYHFASDKHADPGSIRVIQWGGAIETLSALPVVVFAYTCHQNMFSILNELKDNSPRSVVGVIGTSIGSASSIYIVVAITGYLTFGNAVVGNIVSMYPTGAASTIGKAAIVVLVTFSVPLQVHPCRASLDAVLKWRPNRNSSNNGRTATPLLPASPPGDHGSTAPMSDLRFAVITTFILTFAYMTALSVTSLDRVLAFVGSTGSTSISFILPGLFYYKISNPDSTYHQRLVKEDDDIDEDSSTSDVEESAALAQSTTSVRSGVSVVSNASTRSNRNSWRWRRKWRWDLEHIEHHHLRRMALALAIYGAVVMSTWYWVALQYK

SEQ ID NO: 22098 - protein, 409 aa, Nostoc sp. PCC 7120
MKAVVFHGIGDIRLDNVPEPKIKEPTDAIIRLTSSAICGTDLHMIRGTFTGMKPGTILGHEGVGIVEELGSNVRNLQVGDRVVVPSTIACGYCSYCRSGYHAQCDNANPHGHNAGTAFFGGPEAAGPFDGLQAEYARIPYANAGLVKLPKEVTDDQAILLSDIFPTAYFGADIAEITPGDTVAIFGCGPVGQFAIVSARLFGAGRIIAVDTIPSRLEMARDLGAEVIDYNAEDPIEAIRELTGGIGVDRVIEAVGVDANAPDSGPAAKKARQEAQQFQQQLQQIAPETNPQNGNWHPGNAPSQALEWSIQALAKAGTLSIIGVYPPTHNFFPIGTAMNKNLTINMGNCNHRKYIPLLVDLVRNGTVDPTKVLTQVEPLMSVIDAYKAFDQRQPGWVKVELVPGAALANV

SEQ ID NO: 22099 - protein, 218 aa, GIBBERELLA ZEAE PH-1
MTTGAFSLDQLMELAGLAVSQAVYRLQPLESGRRVLVACGPGNNGGDGLVAARHLRQYGYNPTVFYPKRSKNDLYQRLAKQLEDLEVPFVDDFPSALKSTDHIIDAIFGFSFSGEVREPFPAVIQALQETKLPITSVDAPSSWDIENGPPKSGLGSSFMPTALISLTAPKPLVKHFKGRHFIGGRFVTPSIAKKFDFEVPEYKGIDQVVEVEVSEQKL

SEQ ID NO: 22100 - protein, 170 aa, Brassica napus
  misc_feature (77)..(77): Xaa can be any naturally occurring amino acid
  unsure (1)..(170): unsure at all Xaa locations
GLLRDNRFASIALSPNVSAQIFMGLMVNPPKPGDISYAKFTRESKGILESLRRRAKIMTDGFNSCKNVVCNFTKGAXMYSFPQIRLPPGALQAAKQAGKVPDVFYCLKLLEATGISTVPGSGFGQKEGVFHLRTTILPAEEEMPEIMDSFKKFNDAFMTQYDNNFGYSRM

SEQ ID NO: 22101 - protein, 177 aa, Triticum aestivum
  misc_feature (9)..(9): Xaa can be any naturally occurring amino acid
  unsure (1)..(177): unsure at all Xaa locations
MAPTVMVSXSATSVAPFQGLKSTAGPSPSAAAPTALASASVSNGGRIRCMQVWPIEGIKKFETLSYLPPFSTEALLKQVDYLIRSKWVPCLEFSKVGFIFREHNASPGYYDGRYWTMWKLPMFGCTDATQVINEVEEVKKEYPDAYVRIIGFDNMRQVQCVSFIAFKPPGCEESDKD

SEQ ID NO: 22102 - protein, 380 aa, Nocardia farcinica IFM 10152
MSHGGLLVAGLGRCGAGGARDRWLTPAAGGPVAAPRVVGVSERIPVLIVAGFLGAGKTTMLNHLLRDDSGTRIGVVVNDFGAVNIDAMLVAGQVDAMVSLGNGCVCCAIDVSELDEMFERLTQPQAGIDVIVVEASGLAEPGNLIRMVLGSENPRIRYGGLIEVVDAEQFPDSRARHPELAGHLRMADLVVLNKADRVEPGVLDRLRAEIAEHARGVPVYATAHGRIDPALLFDPPARERTPVAEQLSFDELWREHDHGDPGHRHLHDDYTSVSFTSDRDLHPRRLIGVLEDPPPGLFRAKGVLAFAGDHRKFTLHVVGRHIRLEPQSWRRDEARASSLVLIGAGLPADTALARLRDTVHAEPEPPDEQAMLGVWRYVPH

SEQ ID NO: 22103 - protein, 119 aa, Zea mays
MAKSSFKLEHPLERRQAEANRIREKYSDRIPVIVEKAGKSDIPDIDKKKYLVPADLTVGQFVYVVRKRIKLSAEKAIFIFVKNTLPPTAALMSAIYEENKDEDGFLYMTYSGENTFGLL

SEQ ID NO: 22104 - protein, 896 aa, Oryza sativa
MAPTAAVAGGGVEAEALLGLLQRVQSEALRAFGPNDFDPKLYVDLPLAADASAAAALASLPRAAPSRGEMEAYISRYFALAGSDLVAAADPPDFERDPPGFLPRVERAEARAWALEVHALWKDLTRRVAPAVAARPDRHTLLPLPGRVVVPGSRFREVYYWDSYWVVRGLLVSKMYETAKDIVLNLVYLVEKYGFVLNGARSYYTNRSQPPLLSSMVLDIYMATGDMAFVRRVFPSLLKEHSFWMSEVHNVAVMDNHGRDEEFASKLSTAAKEKFYHQVASTAETGWDFSSRWMRDSTDMTTLTTSCIIPVDLNTFILKMEQDIAFFAKLIGESTTSEIFSEASKARHNAIDSVLWNADMEQWLDYWLPTDGNCQGVYQWKSISQNRAIFASNFVPLWLNAQHSGLEQFVDEAKSVRVMRSLQKSGLLQPAGIATSLSNTGQQWDFPNGWAPLQHLIVEGLLRSGSGEARELAEDIATRWVRTNYDAYKATGAMHEKYDVVTCGKSGGGGEYKPQMQNVARLGSRLCLGKTMARGVGRCRRRSLPQTSRPQRVALMDAAAGRDPADAVESLSELALVPRRSRGEEPEPASEEGGAWPWSWAHGGAPAARRDVRAKGIVLQSAVANSPWMDQIRLYLNANANLCSWKIKGLEKGGFLGLEGGGGGLVGAGARRTKRVPVEPQGWRTVRREPPKTEKDGMGVLAVAQRETMVGDGWWRAHWQFPDTEVADTKDHPRGGQSKQSQGIQLVPLSLRHAIKRYLRDQDKAQMNLKVLLLSASFERTKGTCTELAATATGGVLIDDLRAPSGSEQQAARWKVRYAYGDIGLQYREYETVTYVASRMLAIYAACHRVLHEVRRRLSDVALAKVLDFSTPLEGFFHAFGLDDLFPGLDNRGTPW

SEQ ID NO: 22105 - protein, 1221 aa, Chlamydomonas reinhardtii
MTDSTYDFGAVRDDLTPLEDDCKLLGSLLDDCLRVEIGETMFKKIERIRALAQCASNLSIKGDAGASDMLSHRLAEELMNLDMDEAVPLTRACGHYLNLSGIAELHHGVRRDRATREPNPNSCDAVFARLITEGVDPEELYRAVSEQNVEVVLTAHPTQVNRRTLQYKHTRIAALLQQHDRSDLTAEERRNMVSELQREVAALWQTDELRRQKPTPLDEARGGLHIVEQSLWAAVPQYMRRLSAALKKHTGHDLPLQATPFRFGSWMGGDRDGNPNVTAKVTAHVTALARWMAADLYLREIDTLRFELSMNQCSAAVWKMARRIIAEGHTKRAGVVRAKAAAALHQTATDAASHGGSAASAAAAAAAGGDVVADGTSGGGAAAAAGPAAAAAADDAFTFSRLGRPRPERPSTDVRSVGVLAGGEGAAFPGGMILGTQPVSAHTAAEVSVPHELPGQDVEGGSEMDFNESRRASDAGDLGASQHPMLGGPSAGASAEPTAHGYTTTATAAAAAADGTQPEPEVPGTPSYADPGTPDRLGALPGPFTPGPTPFREAANAAMSTAASGGAGGGGGGGANRAASGLGGDPTFTRRSLMAQRLGTSSVQFARAHEHPGFHPYRIVLGHVRDRLAATRRRMEDLLSGREPAGEAHGGVGAGGGGGGGAAPWYESEDELAEPLMACYWSLWECGGGVIADGRLLDLIRRVYTFGMCLMKLDLRQESTRHAEALDAVTSYLGLGSYLEWSEDQKIEWLTKELQGRRPLIPADMPMSAEVREVLDTFKVAAHLGRDNLGAYVISMTKGASDVMAVELLQREARMQVGAEAGGRGGGGPEDGGSLRVVPLFETLEDLDAAEDVMTRLLTNPWYREHLRAVHGDAQEVMLGYSDSGKDAGRLAANWALYKCQERLVAITKANNVKLTLFHGRGGTVGRGGGPTHIAIQSQPPGSVEGTFRITEQGEMVQAKFGISGVALSQLETYTTAVLLATMRPPSPPRREEWRAVMEMLSRVSCESYRNIVHHSPLFLRYFKHATPEAELGNLYIGSRPARRRNKDASISTLRAIPWIFAWTQNRLILPSWLGIGAALTAAMTQGHLPTLQAMYREWPFFGSTVDLIEMILAKTDPRIAALYEEVLVNDPEEKKLGAELRERLQRCQGAILKVTGHENLLSNNPTLSKLISMRSPFVDPINILQVEVLRRLRQDPNNMRLRDALLISINGIAAGMRNTG

SEQ ID NO: 22106 - protein, 218 aa, Cytophaga hutchinsonii
MKFFIDTANLNEIREAQELGILDGVTTNPSLMAKEGISGKDNVFKHYKAICDIVDGDVSAEVIATDYKGIIEEGEELITIDPKIVVKVPMIKDGIKAIKYFSQKGIRTNCTLVFSAGQALLAAKAGATYVSPFIGRLDDISQDGMELIAQIVGIYRNYDYQTEVLAASVRHTMHLINCAEVGADVVTCPLNVITGLLNHPLTDSGLAKFLADHKKVNG

SEQ ID NO: 22107 - protein, 974 aa, Chlamydomonas reinhardtii
MQLSATSGRTSFRVSQDLRTGPANFLSGLRDDDSLLRQVFFSILRHHHPNLAAKVDVIYALSQAWCTSQSDNDFELMVKYVSDLKPEERILVASSFSHMLNLHNLTEEVNSSQIGRAVRLGEMDSPTRDTNHSLLKLTTTNGFTPQQVYDTLCSQTVELVLTAHPTQALRASLLKKYAIVRRELDTLHSKRMSEYEKIETLEAIRAAVQAAWRTDEIRRSKPTPQDEMRSGLSYFSTVIFDVVPVFHRRVDTALEKLGLPRLPLDRALFKFGSWMGGDRDGNPNVTAETTRDVVVLARLEAVNVYFRQVEGLMFDLSIWRCSPEMKELAERLAAAESRDAARVAEERKRRNYVDFWAPIPPTEPFRVVLAHMRDRLYNTRQVLHQCLIHTHMSVRGALEEAGAYVDIEDMARPLKLMYDSLMSTGDESVANARLLDLLRQIRTFGLCMMGLDVRQESTRHTEVMDAVTTYLGLGSYASWDEPKRLAFLLGELQGKRPLMPPGMDMSPEVKEVVRTLRILSELPGDSLGAYIISMAKTASDVLAVVLLQRETGVRPALRVVPLFETLDDLHNAPGTMTTLLGNDWYRGHINGVQECMIGYSDSGKDAGRLAAAWALYETQEKLVEVAAGCGVRLVLFHGRGGTVGRGGGPTHMAIRSQPSGTINGHLRVTVQGEIIEQQFGEKEVCFRTLDLYTSAVLEAALDPPPAPAQEWRDLMSLLATESCDMYRSVVYRTPEFYDYFMQSTAASELGRLNIGSRPSSRKSGGIETLRAIPWIFAWTQQRLHLPVWLGIGEALEAAIDKGYGPVLQDMYANWPFFTSTLDLVEMVLAKADSRLSAFYERTLVDSSLAPLGQRLRELLAKTQQNILIVVRKSVLLEGNTPSQMSTPNLDEKIRLRSPYVAPLNVLQALSLQGLRKFRDGGDTEYNPSDPEIIDLLSRDPHKKGEGAQHPFVSAMDDCLMITIKGIAAGMQNTG

SEQ ID NO: 22108 - protein, 447 aa, Corynebacterium efficiens
MTVDEQVSNYYDMLLKRNAGEPEFHQAVAEVLESLKIVLEKDPHYADYGLIQRLCEPERQLIFRVPWVDDNGQVHVNRGFRVQFNSALGPYKGGLRFHPSVNLGIVKFLGFEQIFKNSLTGLPIGGGKGGSDFDPKGKSELEIMRFCQSFMTELHRHIGEYRDVPAGDIGVGGREIGYLFGHYRRLANQHESGVLTGKGLTWGGSLVRTEATGFGTVYFVQEMIKAEGETLEGKKVIVSGSGNVATYAIQKVQELGAVVVGFSDSSGWVSTPNGVDVAKLREIKEVRRARVSSYADEVEGAEYHTDGSIWDLTADIALPCATQNELDGDNARTLADNGCRFVAEGANMPSTPEAIDVFRERGVLFGPGKAANAGGVATSALEMQQNASRDSWSFEYTDERLHRIMKNIFKSCADTAKEYGHEKNYVVGANIAGFKKVADAMLAQGVI

SEQ ID NO: 22109 - protein, 704 aa, Zea mays
MNLWTDDNASMMEAFMASADLPTFPWGAPAGGGNSSAAAASPPPQMPAAMAPGFNQDTLQQRLQAMIEGSRETWTYAIFWQSSLDSATGASLLGWGDGYYKGCDEDKRKQKPLTPSAQAEQEHRKRVLRELNSLISGAAAAPDEAVEEEVTDTEWFFLVSMTQSFLNGSGLPGQALFAGQPTWIASGLSSAPCERARQAYNFGLRTMVCFPVGTGVLELGSTDVVFKTAESMAKIRSLFGGGAGGGSWPPVQPQAPSSQQPAAGADHAETDPSMLWLADAPVMDIKDSLSHPSAEISVSKPPPHPPQIHFENGSTSTLTENPSPSVHAPPPPPAPAAPQQRQHQHQNQAHQGPFRRELNFSDFASTPSLAATPPFFKPESGEILSFGADSNARRNPSPVPPAATASLTTAPGSLFSQHTATMTAAAANDAKNNNKRSMEATSRASNTNHHPAATANEGMLSFSSAPTTRPSTGTGAPAKSESDHSDLDASVREVESSRVVAPPPEAEKRPRKRGRKPANGREEPLNHVEAERQRREKLNQRFYALRAVVPNVSKMDKASLLGDAISYINELRGKLTSLETDKETLQTQVEALKKERDARPPSHSAGLGGHDGGPRCHAVEIDAKILGLEAMIRVQCHKRNHPSARLMTALRELDLDVYHASVSVVKDLMIQQVAVKMASRVYTQDQLSAALYSRLAEPGSAMGR

SEQ ID NO: 22110 - protein, 167 aa, Solibacter usitatus Ellin6076
MANPIEEILGTAAAIAKGMGITFKEMMGPTVTDDYPDAPPKFEERFRGVHVLQRDVNGMEKCVACFLCAAACPSNCIYIEAAENTDKIRMSGGERYAKVYNIDYNRCIFCGYCVEACPTDAITHGHGFEAASYNTSTLVKRKEDMLVPVPPGAKPPSMADEVPAGAH

SEQ ID NO: 22111 - protein, 671 aa, Zea mays
MAAPSEDALRRALAARKAAVDAQAEALKALKVEAGAAARRLQQAVGAGAGGAAREELRQAVVNTLERKLFYIPSFKIYRGVAGLYDYGPPGCRVKANVLSFWRQHFVLEENMLEVDCPCVTPEVVLKASGHVEKFTDLMVKDEKTGTCYRADHLLKDFCKEKLEKDFALPQEKADEFKRILAILDDLSAEELGAKIKEYGIVAPDTKNPLSDPYPFNLMFQTSIGPTGLSVGYMRPETAQGIFVNFKDLYYYNGQKLPFAAAQIGQAFRNEISPRQGLLRVREFTLAEIEHFVDPEDKSHPKFVDVADLEFLMFPRELQLSGESANLMKLGEAVSKGTVNNETLGYFIGRVYLFLTSLGIDKGRLRFRQHLPNEMAHYAADCWDAEIECSYGWIECVGIADRSAYDLKAHTDKSGVPLVAHEKFSKPREVEKLVIVPSKKDLGLAFKGNQKMVLEALEAMSEKEAFEMKAELETKGETNFKVCTLGKDVVITKKMVSISMEKKLEHQRVFTPSVVEPSFGIGRIIYCLFEHSFYTRPSKSEEEQLNVFRFPPLVAPIKCTVFPLVKNQEFDDAAKVIAKALTTAGISHIIDTTAISIGRRYARTDEIGVPFAVTVDSATNVTIRERDSKEQVRVDIDEVAPVVKQLTEGQSTWTDVSAKYPAHVGPQSEQE

SEQ ID NO: 22112 - protein, 331 aa, Salmonella enterica subsp. enterica serovar Typhi Ty2
MTIKVGINGFGRIGRIVFRAAQKRSDIEIVAINDLLDAEYMAYMLKYDSTHGRFDGTVEVKDGHLIVNGKKIRVTAERDPANLKWDEVGVDVVAEATGIFLTDETARKHITAGAKKVVLTGPSKDNTPMFVKGANFDKYEGQDIVSNASCTTNCLAPLAKVINDNFGIIEGLMTTVHATTATQKTVDGPSHKDWRGGRGASQNIIPSSTGAAKAVGKVLPELNGKLTGMAFRVPTPNVSVVDLTVRLEKAATYEQIKAAVKAAAEGEMKGVLGYTEDDVVSTDFNGEVCTSVFDAKAGIALNDNFVKLVSWYDNETGYSNKVLDLIAHISK

SEQ ID NO: 22113 - protein, 244 aa, Zea mays
  misc_feature (24)..(24): Xaa can be any naturally occurring amino acid
  misc_feature (42)..(42): Xaa can be any naturally occurring amino acid
  misc_feature (65)..(65): Xaa can be any naturally occurring amino acid
  misc_feature (214)..(214): Xaa can be any naturally occurring amino acid
  unsure (1)..(244): unsure at all Xaa locations
MQIFVKTLTGKTITLEVESSDTIXDNVKAKIQDKEGIPSGPXRLIFAGKQLEDGRTLADYNIQKXESTLHLVLRLRGGMQIFVKTLTGKTITLEVESSGTIDNVKAKIQDKEGIPPDQQRLIFAGKQLEDGRTLADYNIQKESTLHLVLRLRGGMQIFVKTLTGKTITLEVESSDTIDNVKAKIQDKEGIPPDQQRLIFAGKQLEDGRTLADYXIQKESTLHLVLRLRGGMQIFVKTLPADITL

SEQ ID NO: 22114 - protein, 147 aa, Salmonella enterica subsp. enterica serovar Typhi Ty2
MSTFKVRCEQMANQPSAEELKKKLSEMQFYVTQDRGTEPPFTGRLLHNKRDGVYHCLVCDTPLFHSHTKYDSGCGWPSFYQPVSEEAIRYIDDFSHGMQRVEIRCGNCDAHLGHVFPDGPQPTGERYCVNSASLAFSDEKNGDQLKG

SEQ ID NO: 22115 - protein, 242 aa, Glycine max
MEFPNEAIPEGCSQKKTGRGKIGIKRIENTTNRQVTFCKRRNGLLKKAYELSVLCDAEVALVVFSSRGRLYEYANNSVRGTIDRYKKACAASTNPESVSEANTQFYQQEASKLKRQIRDIQNLNRHILGEALSSLSLKELKNLESRLEKGLSRVRSRKHETLFADIEFMQKREIELQNHNNFLRAKIAEHEKAQQRQQDMIPGNVCESTIPPQSYDRNFFPVNLIDSNNQYSNQDQTALQLV

SEQ ID NO: 22116 - protein, 354 aa, Pseudomonas syringae pv. tomato str. DC3000
MHPKNAWYVACTADEVADKPLGRQICNEKMVFYRDQNQQVVAVEDFCPHRGAPLSLGYVENGQLVCGYHGLVMGGDGKTASMPGQRVRGFPCNKTFAAIERYGFIWVWPGEREKADPALIHHLEWAVSDEWAYGGGLFHIQCDYRLMIDNLMDLTHETYVHASSIGQKEIDEAPPVTTVEGEEVITARHMENIMPPPFWKMALRGNNLADDVPVDRWQICRFTPPSHVLIEVGVAHAGKGGYHAPHEFKASSIVVDFITPETDTSIWYFWGMARNFKPADEQLTATIREGQHKIFSEDLEMLERQQLNLLQHPHRNLLKLNIDAGGVQSRKILERLIAAEQADTADQIPVAAVK

SEQ ID NO: 22117 - protein, 367 aa, Thermoanaerobacter tengcongensis MB4
MQYNFNKLVATAIISSFITSLIFIYIAPNFLWGKIIPIPYPPESGLKKEIVIPEREPPTVAEAVAKKATPAVVGITTLEFERKYYFLERAVEGVGSGFIVHPDGYIITNNHVVNENSRNIKVYLSNGNILPGKVMWTDPVLDLTILKVDAKNLPVIELGDSDRLSVGQTAIAIGNPLGLRFQRTVTLGIISALNRSLPITEDSKPKIMEDLIQTDASINPGNSGGPLMDSQGYAIGINTAKVTTAEGLGFAIPINIVKPILKKVIETGTFKPPYLGIVAYDREIASYITADVYIYEGIYVADIDPTGPAYKAGIRKGYIILEVDGKPVNTMTGLKCIIYEKKPGESIKVKYKTLTGKEGYVTIVLGK

SEQ ID NO: 22118 - protein, 457 aa, Bordetella bronchiseptica RB50
MSKSPEQMTPYDQFNIEVPEDHFPVEGMSARAAQALVLSDEWTDTNPMLNMSSFVTTFAEPEAVRIAEKNMYKNYIDHDMYPQLFAMEQRMVRWLHQLWNGPKDAEPYGTATVGSSEACMLAGLAHKWNWRQRREREGKDATRPNMVTGGNVQIVWKKFLRYFDVEPRIVPLKPGQYCLTAEDLDKYVDENTIAVVAIAGQTFTGEDDDIQGIHDWLDAYEKKTGVSVPMHIDGASGGFVNPFLYPDYKWDFRLPRVQSINASGHKYGLTPPGLGWVIFRERKVFNEDLVFYVNYLGGEMPTATLNFSRNSFQVAVQYYQFLRLGFDGFKRVMQRTLDNAIALRQHLVDSGYFTIMNDTQRIPVVAVTLDPKVKKFNEFDVSNKVRERGWVISAYTMPPDAESVRSLRVVVRPHINRNVALLLAEDIVKACKYLEQHGGTATPPALHDTHKSSPAKC

SEQ ID NO: 22119 - protein, 438 aa, Methylococcus capsulatus str. Bath
MFRAWASELFTIFWVVLVAVIAGRIAEDFGFALWVGTLLYLLHHLVHANRLYVWMRGGRSGRVPAGTGIWEEIYYLIHKLRRRNKRRKKQLIRMLEQFRTATSALPDATVVLGARDEIDWFNESACRLLGLRKSDLGQNIGNLVRYPKFAEHLKNSRDSATVCIPSPVDEAMQLEVRVVPYGEDSRLLIAQDVTQLRFMERVRSDFVANVSHELRTPLTVLKGYMETLNEAGQDLPPSAYRKMVQRMVEQTGRMQSLVDNLLSLTRLESGPPKPAAVVRVPALLERLCKEANVAEANEHTPVRLKLDSQVSLLGNETDLHSAFANLISNAIKYSRPSDTVTVRWSQEESGAARLDVEDTGPGIPKEHIPRLTERFYRVEIEGCRNKSGTGLGLAIVKHVMSRHDAELLIASELGRGSRFTCLFPSSRVVPGADRGDPE

SEQ ID NO: 22120 - protein, 256 aa, Bradyrhizobium japonicum USDA 110
MTSSRFDLRGKVAIVTGGNGGIGLGLAHGLADAGADIAVVGRNETKSAAAVADLRQRGVKAIAVTTDVTDQAAVAAMIDRVVKEFGRIDILINNAGMSIRKPPHELELDEWNKVIDTNLTSAFVCSKLAYPALKASGNGKVINIGSMMSIFGASFATAYAASKGGIVQYTRACANAWAPDNIQVNAILPGWIDTDLTRGARQQVSGLHERVLARTPAGRWGEIDDFAGIAVFLASPASNFVTGTAIPVDGGFSVMA

SEQ ID NO: 22121 - protein, 388 aa, Oryza sativa
MARTAEEKSRARGTALWRLLRPLAVLGPRMQRRREAAVPFRGQVRNTAAASLLLLLSLSHVPLYAGAGDADPDPLFWARPLLAAPRGTVMELGVAPVVTSWVVVRLLAALLFDSDSSTTVASCELLARCLAYVTNASRLVIGIAAALGMCGSGGAGNAALVVLQLFAGGVVVVLADLLHETGYGVEGVSAASLLIATNACERAVSHLFSPVKLRLAGAGPEFEGPLHLHSSGGGGGGFVVNLLGRWKDAGGGAAYPVGGLVYYVTPPSKLLVDPGLIHELLIHSVFVVASCTLLSMAWAEASRSSAREFRTRVIGTGYFVWDETSRRIDRVIAAAAAVGGFAVGGLAVYAGAVGAIGEAGPELLFAVLVIKNLAETFYAKSKLTTTYS

SEQ ID NO: 22122 - protein, 163 aa, Caulobacter crescentus CB15
MFQRITQAVKGAALLDFAGAFGLAMKYMVAPKKTVIYPNERNPQSPRFRGEHALRRYPSGEERCIACKLCEAICPAQAITIEAEPREDGSRRTTRYDIDMVKCIYCGLCQEACPVDAIVEGPNTEFATETREELYYDKERLLDNGDRWERLIAKNLELDAPYR

SEQ ID NO: 22123 - protein, 627 aa, Pseudomonas aeruginosa
MCGIAGFWNITGTLLGDNARVARQMAAAIHHRGPDESGIWYEAPRAPILVHARLAVLELSPAGSQPMHSDCGRYVLIYNGEIYNHLALRARLSEAGVTHSWRGGSDTETLLACFAQWGVESTLKLTVGMFALALWDRQEKTITLARDRMGEKPLYWGWQNGVLFFASELKALKEHPLFRGDIDRDALALFLRYGYVPAPYSIYKGIGKLRAGSYLVLSERSLNETCEPAAYWSANAAIEEALSNPFQGTDAEAVDLLESQLRTSISDQMVSDVPLGAFLSGGVDSSTVVALMQQQSSRPIRTFSIGFDEPGYDEAVYAKAVAEHIGTDHTELYVNSKDALDVIPSLPKIYCEPFGDSSQIPTLIVSGLARQQVTVALSGDGGDELFGGYNPYQFTPRVWRMLERFPHSMRRFASAFAQDLPLPDKLGKLRDVFASRTAEELFYRLNSHWRNHEYPVIGAKGHTALLDTPERWPRVDSFQHWMMAMDVQGYMPDDILVKVDRAAMANSLETRVPLIDHRVFELAWRMPLHMKIRNGKGKWLLREVLYRHVSRELIERPKKGFSVPVSDWLRGPLKEWAESLLDERRLQQEGYLDSRLIRRIWNDHLAGRRDHSRRLWSVLMFQAWLES

SEQ ID NO: 22124 - protein, 233 aa, Dianthus caryophyllus
MGRGRVELKRIENKINRQVTFAKRRNGLLKKAYELSVLCDAEVALIVFSNRGKLYEFCSTSCMNKTLERYQRCSYGSLETSQPSKETESSYQEYLKLKAKVDVLQRSHRNLLGEDLGELSTKELEQLEHQLDKSLRQIRSIKTQHMLDQLADLQKKEEMLFESNRALKTKLEESCASFRPNWDVRQPGDGFFEPLPLPCNNNLQIGYNEATQDQMNATTSAQNVHGFAQGWML

SEQ ID NO: 22125 - protein, 1000 aa, Methanosarcina acetivorans C2A
MCGLKKRLFIDCYEGESIEEIRGKKRADREETEVQEKSHLEEKLVRLEWQADSAVTGLITMDFDGTLSYVNPFFVRMWGYGSAEEPPGRQVSELWASPAEFLQAERECREKGEWIGELQARRRDGTFFYVHTSLSLIRNREGLPLGISGSFVDITRLKQVEEELRNRTLELSEAKARLDLALEATEMGTWDWDVLTNGMTWDDNLFRLVGISREEFLQTHDSLLELSNRILSPEDNRRMLEVMQAVADGKTDSYEFEHDVLRPDGTVRHFLVKGRAHRDSEGKLLRVTGTTTDITDQKIAEDALRRSEANLARSQAMAHLGSYSFDAHTGEIYWSEELKTIWDYDPGPNYSFETVISRIHPEDRKRILEALKNAGQGKHPFNSEYGILKPDGSIRYVHDQGEISLDGNGVPVRMFGTLQDITHRKLMEEQLLKAKEAAESANKAKGDFLANMSHEIRTPMNAVLGMLEMLLETSLTDEQREYLQLAHASAESLLSIIDDVLDFSKIEQNKLELEQISFELESLISHIINLLSGKAGSKGLKLAFHIEKDLPSTFIGDPVRLKQVLFNILGNAIKFTKKGEIALSVEVYMPSERNSGLSNSDFPEEVALLFKVKDTGIGIPPEKLSQIFDPFIQADASVTREYGGTGLGLAISSQLVELMEGRIWVESEVGKGCTFYFTVRVKRGESSENYGQGNNIPEESLLVCMEAKESYGNGITSGESLNVLFAEDHPINQKLILGLLEKKGHKLTLVTSGKDALDALSRRDFDAVLMDIQMPGMDGLEATRRIRDPSSGVRRHNIPIIAFTARALKEDREKCFEAGMNYYISKPLKKEKLLNILEDIRVGKNTREKTARERTVQDRIVQEKNIQERAATPLDLESIAFDFPEDQVFNLEEVLERTEGDEVLLKEMVKIFLGMAPELLDSINSALRKGEAEALRENAHILKSAAGSIGANRVFRVAYYLEQVGRRDRMELASDKFEEIKARFKELEPVLVRYLEKQIC

SEQ ID NO: 22126 - protein, 641 aa, GIBBERELLA ZEAE PH-1
MGFWKRLTEFLFVGGGYNDQFRFTSDHSLVDPVNSVVDVFDPSTVVGGSCNTPTNRSCWAPGLDIYTDYEEVIPEGEVRKFHLVVGNHQISPDGYLVERMLFNGSYPGPTLEGNWGDTFEITIHNNLTNFNGTSVHWHGIRQLNTNWMDGVSGVTECPIPPGETMTYRWKATQYGTSWYHSHFSLQYADGLLGAIKINGPSSMNYDYDLGPVLITDHFHKTAFSQVMLEYLGRPPAPDSILMNGNGTYYCCPKGNKNCDNNCVGKSKLTSFNFEKGKKYKMSLVNTGVSTHMTFWIDNHNFSVVATDFVPITPYNTSILNIAIGQRYDIIIEANATLHDSANSKRTNFWMHARDCNNGGARSNLGIIRYDAKNQKVPWTPPPDEKHLCYGCLDELGVNLKPIVKRTVPLAANVNYQNESFKVHLVGYPDDTAESSTLHKWVLKDSSFYLDWAEPSLSLVKVAYEKDWKHPKWPKGYEPVNLEYTNGSWVYFLIEGKFKESLHNMPGHPKIYKTQAPVAHPMHIHGHDFVVLASGDKEFDASTVKLNTNNPPRRDVALLPVNGYLVVAFQMNNPGVWLMHCHIAWHASGGLALQFVESPRQIGPQFQKSGILPHYSEQCNNWAAYYTMFNKNENATQEDSGI

SEQ ID NO: 22127 - protein, 332 aa, Arabidopsis thaliana
MDNSAPDSLSRSETAVTYDSPYPLYAMAFSSLRSSSGHRIAVGSFLEDYNNRIDILSFDSDSMTVKPLPNLSFEHPYPPTKLMFSPPSLRRPSSGDLLASSGDFLRLWEINEDSSTVEPISVLNNSKTSEFCAPLTSFDWNDVEPKRLGTCSIDTTCTIWDIEKSVVETQLIAHDKEVHDIAWGEARVFASVSADGSVRIFDLRDKEHSTIIYESPQPDTPLLRLAWNKQDLRYMATILMDSNKVVILDIRSPTMPVAELERHQASVNAIAWAPQSCKHICSGGDDTQALIWELPTVAGPNGIDPMSVYSAGSEINQLQWSSSQPDWIGCFC

SEQ ID NO: 22128 - protein, 548 aa, Anaplasma ovis
MANVVVTGEALDKSIREVVRILEDAVGCTAGPKGLTVAISKPYGSPEITKDGYKVMKSIKPEEPLAVAIANIITQSASQCNDKVGDGTTTCSILTAKVIEEVSKAKAAGADIISIKNGILKAKEAVLTALLSMKREVASEDEIAQVATISANGDKNIGSKIAQCVREVGKDGVITVEESKGFKDLEVERTDGMQFDRGYLSPYFVTNAEKMLVEFENPYIFLTEKKINLVQNILPVLENVARSGRPLLIIAEDVEGEALSTLVLNKLRGGLQVAAVKAPGFGDRRKDMLGDIAVIAGAKYVVNDELAVKVEDITLEDLGTAKTVRITKDTTTIIGSVDSNADSITSRISQIKSQIEVSSSDYDKEKLKERLAKLSGGVAVLKVGGSSEVEVKERKDRVGDALHATRAAVEEGVVPGGGAALLYTLASLDGVKGKNDDEQLGVNIIKRAVCAPIKRIIKNSGSEEAPCVIQHLLKQNDKELIFNVDTMNYANAFASGVMDPLKVVRIAFDLAVSLAAVFMTLNAVVVDVPNKEDAAGGAAGGMGGMGGF

SEQ ID NO: 22129 - protein, 413 aa, GIBBERELLA ZEAE PH-1
MAGSPVVTHTVEAAQAQTLGRAISSPLKNVTSQTSSSNGTPMPPVTSAPAPTSIPTTLDLAEQMNDEEKRKYVKGKKLGEGTYAVVFLGHLRSKPTTLVAIKKIKVQKEYDEGMAPDAVRELKHLQELSHPNIISLLSVFSSKDQNLNLVLEYLPLGDLEMLIRDTESVRYGAADIKTWMGMLTRAVWFCHENFVLHRDIKPNNLLIADDGEVKLADFGLARSFADPHQLMSSRVITRWYRPPELLFDAKHYSGAVDVWSVGAVFAELIMRAPYMPGNTDLDQVRLVCELVGTPTDDNWPGVTKLSGYAVPEKHPVRGKDWYEMRFGTVGSDGVDLLMKTLILDPKKRITARGMLEHPWWHSEPKPTRKQDLPRKGGTGADDKMGADLKRRPGVIDDDRGSKVARKLDFGGMN

SEQ ID NO: 22130 - protein, 539 aa, Cytophaga hutchinsonii
MSATKYIFVTGGVTSSLGKGIVAASLAKLLQARGFSVTIQKFDPYLNIDPGTLNPYEHGECYVTDDGAETDLDLGHYERFLGTPTSQGNNITTGRIYNTVITKERQGAFLGKTVQVVPHITDEIKRNIQLLGESGKYDIVITEIGGCVGDIESLPFLEAVRQFRWEMGPTDTLVIHLTLVPYLNAAKELKTKPTQHSVKLLSETGIHPDILVCRTEHPLPAELRKKVALFCNVNINSVIESIDAETIYDVPLLMKKEKLDERVLSKLKLSSKNEPDLESWKVFLGKLKNPLSEVNIALVGKYVELPDAYKSISEAFIHAGAMNECKVKIRWISSEQLQKDNLQHHLGFADGILVAPGFGERGLEGKIAAVEFARENNIPFFGICLGMQCAVIEFARNVLGLKDANSTEMNKDTANPVINMMESQKNVTMKGGTMRLGAYPCELTKGSKAHAIYGKSKIMERHRHRYEFNNKYLKQYEKEGMLATGINPETKLVEIVELRDHPFFIGSQFHPELKSTVENPHPIFVKFVKAANDFAKGKK

SEQ ID NO: 22131 - protein, 335 aa, Zea mays
MAPLGDGGAAAAAASNNLVVSFGEMLIDFVPDVAGLSLAESGGFVKAPGGAPANVACAIAKLGGSSAFVGKFGDDEFGHMLVNILKQNNVNSEGCLFDKHARTALAFVTLKHDGEREFMFYRNPSADMLLTEAELDLGLVRRARVFHYGSISLISEPCRSAHMAAMRAAKAAGVLCSYDPNVRLPLWPSPDAAREGILSIWKEADFIKVSDDEVAFLTRGDANDEKNVLSLWFDGLKLLVVTDGDKGCRYFTKDFKGSVPGFKVDTVDTTGAGDAFVGSLLVNVAKDDSIFHNEEKLREALKFSNACGAICTTKKGAIPALPTVATAQDLIAKAN

SEQ ID NO: 22132 - protein, 216 aa, Ophioglossum pedunculosum
SKRRNGLLKKAYELSVLCDAEVAVIVFSGTGKLSEFASSSMMRRILEKHRQVVEGSQSIKPTSQDVVEYWRHEATRLKHQLGVVQETQRHMLGESLETLTYRDLQKLESKLNGALNQVRGRKNQIISERLVYLQEKEDLLNAENIMMRAKLAEIMAGGVPLMSQSMQDPAARESFLNESSTQPNPPIMKNQNGEETNLQLGLELFPTTSFGDGAST

SEQ ID NO: 22133 - protein, 131 aa, Magnetococcus sp. MC-1
EGRHKPDYSRAVDLLTQAAIKEMVIPSLLPVLAPILVGVLLGPQALGGLLMGTIITGIFVAISMTTGGGAWDNAKKYIEDGHCGGKNSEAHKASVTGDTVGDPYKDTAGPAVNPMIKIANIVALMIVGMIV

SEQ ID NO: 22134 - protein, 427 aa, Escherichia coli K12
MADTKAKLTLNGDTAVELDVLKGTLGQDVIDIRTLGSKGVFTFDPGFTSTASCESKITFIDGDEGILLHRGFPIDQLATDSNYLEVCYILLNGEKPTQEQYDEFKTTVTRHTMIHEQITRLFHAFRRDSHPMAVMCGITGALAAFYHDSLDVNNPRHREIAAFRLLSKMPTMAAMCYKYSIGQPFVYPRNDLSYAGNFLNMMFSTPCEPYEVNPILERAMDRILILHADHEQNASTSTVRTAGSSGANPFACIAAGIASLWGPAHGGANEAALKMLEEISSVKHIPEFFRRAKDKNDSFRLMGFGHRVYKNYDPRATVMRETCHEVLKELGTKDDLLEVAMELENIALNDPYFIEKKLYPNVDFYSGIILKAMGIPSSMFTVIFAMARTVGWIAHWSEMHSDGMKIARPRQLYTGYEKRDFKSDIKR

SEQ ID NO: 22135 - protein, 335 aa, Methanosarcina barkeri str. fusaro
MAKIIYDNETTFDALKDKTIAIMGYGSQGHAHARNLHESGLNVIVGLRKSSSSWAKAENDGLKVMTVAEAAKAADVIMILLPDENQASVYYSEIAPNLEAGNALAFAHGFNIHYNQIVPPKDVDVFMAAPKGPGHIVRRTYTEGIGVPALIAVYQDATGNAREIALSYVKGIGATRAGVYETTFREETETDLFGEQVDLCGGLSSLIKTAFETLVEAGYQPEMAYFETCHEVKLIVDLIYEGGLERMWHSVSNTAEYGGMTVGPRIINDESREAMREALKRIQNGEFAKEFVLEGMVNHPVLKAMERQEKEHQLEVVGKQIRANIPWLNREIDDD

SEQ ID NO: 22136 - protein, 588 aa, Escherichia coli K12
MKLPVREFDAVVIGAGGAGIARALQISQSGQTCALLSKVFPTRSHTVSAQGGITVALGNTHEDNWEWHMYDTVKGSDYIGDQDAIEYMCKTGPEAILELEHMGLPFSRLDDGRIYQRPFGGQSKNFGGEQAARTAAAADRTGHALLHTLYQQNLKNHTTIFSEWYALDLVKNQDGAVVGCTALCIETGEVVYFKARATVLATGGAGRIYQSTTNAHINTGDGVGMAIRAGVPVQDMEMWQFHPTGIAGAGVLVTEGCRGEGGYLLNKHGERFMERYAPNAKDLAGRDVVARSIMIEIREGRGCDGPWGPHAKLKLDHLGKEVLESRLPGILELSRTFAHVDPVKEPIPVIPTCHYMMGGIPTKVTGQALTVNEKGEDVVVPGLFAVGEIACVSVHGANRLGGNSLLDLVVFGRAAGLHLQESIAEQGALRDASESDVEASLDRLNRWNNNRNGEDPVAIRKALQECMQHNFSVFREGDAMAKGLEQLKVIRERLKNARLDDTSSEFNTQRVECLELDNLMETAYATAVSANFRTESRGAHSRFDFPDRDDENWLCHSLYLPESESMTRRSVNMEPKLRPAFPPKIRTY

SEQ ID NO: 22137 - protein, 149 aa, Glycine max
MANQLTDEQISEFKEAFSLFDKDGDGCITTKELGTVMRSLGQNPTEAELQDMINEVDADGNGTIDFPEFLNLMARKMKDTDSEEELKEAFRVFDKDQNGFISAAELRHVMTNLGEKLTDEEVDEMIREADVDGDGQINYEEFVKVMMAK

SEQ ID NO: 22138 - protein, 563 aa, Solibacter usitatus Ellin6076
MALDDKYDGLQRLVQMGKEKGYVLYDEVSEVLPGDINGGNDLDDVLAGLDVAGIEILEEPKDFEKKIEESSEELIDLELPAGLGGEKINDPVRMYLREMGTVPLLTREGEVEIARRIERGQNTVLKSLFRAPLVVQEIIGMGEEVINDTLSARDVIQIADPMLTDEMVEEKRQEFARHTEEIARYYKKTLQCRQKLMAIPRGMKPKQYRRQLWEVARLIVRTARLCRAVKFQSPVIRHLIDRLRSAVEELRPVENDLAKTQRKLETWPAARAEAIKDLRKEQRSYGQKLQQMEEQYGASAAELRRTLEIITQAHQEAETAKKELIEANLRLVVSIAKRYTNRGLQFLDLIQEGNIGLMKAVDKFEYRRGYKFSTYATWWVRQAITRAIADQARTIRIPVHMIETINKLIRTSRQMVQELGREPSNEELAKRLQLPVSKVRKVLRVAQEPISLETPIGEEEESHLGDFIVDQNGISPSDAVINLNLREQTAQVLKTLTPREEKIIKMRFGLEDGSEHTLEEVGQNFAVTRERIRQIEAKALRKLRHPSRSHRLRAFLENGTRGV

SEQ ID NO: 22139 - protein, 917 aa, Pseudomonas syringae pv. tomato str. DC3000
MLTKLGIKGRELLLTILPASLMAAMLGGYFTWMQLSELQSQLLLRGEMIAQDLAPLSASALGRKDKVLLSRIATQTLEQPDVRAVSFLDVDRSPLAHAGPTMISPTPIGNSSQLLNSTGTDATRYLLPVFGNQRHLTSPIIPAEADTLMGWVDVEISHNGTLLRGYRSLFASLLLIFTGLAITAVVAVRLSRTINGPMSQIKQAVSQLKDGNLETRLPPLGSRELDELASGINRMAATLQNAQEELQMSIDQATEDVRQNLETIEIQNIELDLARKEALEASRIKSEFLANMSHEIRTPLNGILGFTHLLQKSELTPRQFDYLATIEKSADNLLSIINEILDFSKIEAGKLVLDNIPFNLRDLLQDTLTILAPAAHAKHLELVSLVYRDTPLALSGDPLRLRQILTNLVSNAIKFTREGTIVARAMLEDETEEHAQLRISVQDTGIGLSSQDVRALFQAFSQADNSLSRQPGGTGLGLVISKRLIEQMGGEIGVDSTPGEGSEFWISLKLPKAREDKEESLNLPLEGLRAAVLEHHDLARQALEHQLEDCGLHTVVFTNLENLLNGVTAAHETPAAIDLAVLGVTTLEISPERLRQHIWDLENLNCKVMVLCPTTEYALFQLAVHDVYTQLQAKPACTRKLQKALSELIAPRAIRADIAPPLSSRAPRVLCVDDNPANLLLVQTLLEDMGAEVMAVEGGYAAVNAVQQEAFDLVLMDVQMPGMDGRQATEAIRAWEAERGQSSLPIVALTAHAMANEKRSLLQSGMDDYLTKPISERQLAQVVLKWSGLALRNPAPERQNESLEAHVGPLVLDPEEGLRLAAGKADLAADMLAMLLASLDADREAIRVARASQDVQALIERIHRLHGATRYCGVPQLRTACQRAETLLKQDAPHTGDALDDLDKAIVRLETEARVTA

SEQ ID NO: 22140 - protein, 563 aa, Geobacillus kaustophilus HTA426
MSTTPWWKKAVVYQIYPKSFYDTNGDGIGDLPGVIEKLDYLQKLGVDVIWLTPIYASPQRDNGYDISDYFRIHHEYGTMDDFDRLLHEVHARGMKLVMDMVVNHTSTDHEWFQQARSSKTNPYRSFYIWRDPKPDGGAPNNWQSKFGGSAWEYDEQTGQYYLHLFDVTQADLNWENEELRRRIYDMMHFWLKKGVDGFRLDVINLLSKDQRFPDDDGSVPPGDGRRFYTDGPRIHEFLQEMNREVFSKYDVMTVGEMSSTTIDHCIRYTNPENHELNMTFNFHHLKVDYPNGEKWAVAPFDFLALKRILSEWQVRMYEGGGWNALFWCNHDQPRIVSRYGDDGTYWKESAKMLATTIHLMQGTPYIYQGEEIGMTDPKFTDIRDYRDVESLNMYRILREQGKSEQEVMEILQRKSRDNSRTPMQWDDSPHAGFTSGTPWIRVADNYRRINVKQALADRDSIFYHYKRLIELRKQYDLITTGRYELLLADDPHIFAYMRHGDGEKLLVVNNFYPIETTFTLPKEAGADGYTGELLLANYSDAPADFRRMQLRPYESVVYLLRRP

SEQ ID NO: 22141 - protein, 665 aa, Chlamydophila pneumoniae AR39
  misc_feature (76)..(76): Xaa can be any naturally occurring amino acid
  unsure (1)..(665): unsure at all Xaa locations
MINKELDIGILGKIAGAIKQISIESIQKASSGHPGLPLGCAELAAYLYGYVLRQNPRDPHWINRDRFVLSAGHGSXLLYSCLHLAGFDVSLEDLQEFRQLHSRTPGHPEYGETVGVEATTGPLGQGLGNAVGMALSMKMLESRFNRPGHEIFNGKIYCLAGDGCFMEGVSHEVCSFAGSLNLNNLVVIYDYNNVVLDGYLNEISVEDTKKRFEAYGWDVYEIDGYDFTHIHETFSSIKRGQERPVLVIAHTIIGHGSPKEGTNKAHGSPLGVEGTHETKQFWHLPEEKFFVPPAVKNFFAHKIQEDRKAQEQWLDEVRVWSKQFPELHEEFVALTSHKLPKNLESLVQSVEMPDSIAGRAASNKLIQVLVQHIPYLIGGSADLSSSDGTWIANEKVIHTYDFSGRNIKYGVREFGMATIMNGLAYSQVFRPFGGTFLVFSDYMRNAIRLAALSKLPVIYQFTHDSIFVGEDGPTHQPVEQLMSLRAIPGLYVIRPADANEVRGAWIAGLKHTGPTVIVLSRQALPTLPAAHRPFKDGVGRGAYIVLKESGEKPDYTLFATGSEVSLALSVAKELEHLDKQVRVVSFPCWELFEAQDVDYKQSIVGGDLGIRVSIEAGSALGWYKYIGSEGLAIAMDRFGYSGASDDVSEECGFTTEQILQRILSQ

SEQ ID NO: 22142 - protein, 447 aa, Salmonella enterica subsp. enterica serovar Typhi Ty2
MDQTCSLESFLNHVQKRDPHQTEFAQAVREVMTTLWPFLEQNPRYRHMSLLERLVEPERVIQFRVVWLDDKNQVQVNRAWRVQFNSAIGPYKGGMRFHPSVNLSILKFLGFEQTFKNALTTLPMGGGKGGSDFDPKGKSEGEVMRFCQALMTELYRHLGPDTDVPAGDIGVGGREVGFMAGMMRKLSNNSACVFTGKGLSFGGSLIRPEATGYGLVYFTEAMLKRHGLGFEGMRVAVSGSGNVAQYAIEKAMAFGARVVTASDSSGTVVDESGFTPEKLARLCEIKASRDGRVADYAREFGLTYLEGQQPWSVPVDIALPCATQNELDVDAARVLIANGVKAVAEGANMPTTIEATDLFLEAGVLFAPGKAANAGGVATSGLEMAQNAARLSWKAEKVDARLHHIMLDIHHACVKYGGDNKHTNYVQGANIAGFVKVADAMLAQGVI

SEQ ID NO: 22143 - protein, 577 aa, Thermoanaerobacter tengcongensis MB4
MVTILAMKSRFKSIQWKIILLYSLLILVAMEIIWIYLYKSLENYHLNNFDNYLEAQAKGISFTLKDNMDIKSLKSVINMYMGPNSNIKYVYILDSHGNILASSTGDTGKMMTPAIAKALSGEMGSELTKDYYSNSTIKSFAMPIYNSEGKVSGVVYLIGSLKGIYDTLWDVNLILASATLFALIITMILGYILSKTIADPIKEVTKYAQRMAEGDFDIKINVKSDDEIGKLGEMFNFLSSRLKETLNDIQGEKNKIEAIIKFMKDGVVAADANGNIIHYNEAAEKMLNKKLSLGMPVEEVLPLKEAENPIPMTCDNRVLMINAASVKINNQVEGYVYVMHDITEQHKLDQMRKEFVANVSHELRTPLATIKSYVETLLYNDVDTEYSKKFLRIIETETDRMTRLVKDLLLLSKMDSEENSLKLEPCDFNEIVKNVVNSLSIEATKKGHNVILNLSETLQKVNVDKDKVEQMAMNIINNAIKYTPEGGVIEISTAYDEEGVTFTVKDNGIGIPKEDLPRIFERFYRVDKARSRELGGTGLGLSIVKQIVELHKGKVKIESELGKGTVVTVQLPYSKNS

SEQ ID NO: 22144 - protein, 483 aa, Rhodopseudomonas palustris CGA009
MLMPSDPGLLAERCLIGGKWCGEPVDAVFNPATGERIGAVPRFGTDEAEEAVRAAEIAFRQWSKLLAKQRATMLRAWFDQIIANRDDLALLLTREQGKPLAEALGEIDYAASFVEFYAEEARRIYGETIPSHRADARTMVIRQPVGVVAAITPWNFPAAMITRKVAPALAAGCTVVIKPAPETPLTALALGVLAQRAGFPPGVLNIITGDAPAIGKAWTEHPTVRAISFTGSTEVGKILMRQAASTVKKVALELGGNAPFIVFDDADLDAAVEGVIASKFRNMGQTCVCANRIYAQDGIYDAFVEKLTAKVATLQVGNGVDAGVTQGPLITTEAIAKVERHVSDAVAKGAKVVLGGKRHKLGRTFFEPTVLAGVTTAMLITREETFGPVAPVYRFTDEADVIAQANDSPFGLASYFYARDLGRVFRVAEALESGMVGVNSALLGADVVPFGGVKQSGLGREGSRHGIEEYVETKYILLGGLDR

SEQ ID NO: 22145 - protein, 555 aa, Debaryomyces hansenii CBS767
MEPASKKTKLEELSKFGSKYYPYDIDNKTIISKYIKREDLKPINVLEAKLNDTRANRNNIDVGDSIAHLFLRDFRTIDNKGLSIASELATTTKTPLITFHIFCLEEFDAHSVSPFKLEYMLGSLDVLKKDLREMNIPLVSLQVEKRKDVPTKIAEFLEQNNTSHVFCNMEYEVDELRLLSKLVCFLLDKHISFNPVHDSCIVKPGELKTKSKGTQYAVFTPWYKAWCNYLKIEDAPFMEYPRPHANESFSDPNKLFDSEIPQVPESKRLTHDQQKEFDTCWKCGEHEAWLALSVFLESDKFKKYDESRNEISEESVSRMSCPISSGIISTRSIIRYILENKFVKKIDSGEQGTGWIRQIAWRDFYRHILCNWPYVCMFKPFLLEYDDLNWEYNSDHFYKWCQGKTGFPIVDAAMRQLNQTGYLHNRCRMIVASFLSKHLLIDWKYGEYYFMEHLIDGDFASNNGGWGFSSSTGVDPQPYFRIFNPWLQSERFDKKGTYIRTWVPELKDIQDEKGIHNPYEKGYGHIAEKNGYPKPIVDHKYCRERALNRFKDAKY

SEQ ID NO: 22146 - protein, 426 aa, Burkholderia mallei ATCC 23344
MPKSRARSAEAAQHLLFGVPLHWMRDWSTPFSLYVDHARGTHFTDIDGHRYADFCLGDTGAMFGHAPEPVARALAEQAARGYTTMLPSEDAAWVAAELARRFRLPYWQFALSASDANRFVLRWARAATGRKHIVVFNGCYHGTVDDVFVDLADGRPVQRDSLLGQAHDLSAYTRVVEFNDLAALEAALKDGEVACVLAEPALTNIGMVLPDAGFWREARALTRRHGTLLAIDETHTISSGPGGYALAHGLEPDLLVVGKPIGGGVPCAVYGFSASCAERAQHAKASAPPGHSGIGTTLTANMLAMRAIRATLADVMTDTAYAHMFDLAARLAAGLEQTIARRGLPWCVTRIGARTEFQFAPAPPRNGTIAGLQLDGELEHIVHLYLLNRGVLITPFHNMMLVCPQTSAEDVDRLVAAFDACLGELL

SEQ ID NO: 22147 - protein, 558 aa, Geobacillus kaustophilus HTA426
MIGKRMRHIGRYHEIAASLLRHGFGMIVDELGFSSFLSLPPRWKAEQGKKEGKTVGERLRLVLEELGPTFVKLGQIASTRPDLIPAPIISELEKLQDQVPPFPFADVRRIVEAEFGSSLETLFRSFEEMPLAAASLGQVHRAVLPSGQAVAVKVQRPHIAARVETDLEILQDLAVLAERRLDWAATYQLSEIVDELARSLRQELDYTVEARHAERFARQFAGDSSVYVPKVFWDYTTKTVLTMEYVEGIKLGEIERLKANGHSLKTIAERLAEATFQQMFEHGFFHGDPHPGNVFVLDDGTLSFIDFGLMGRLRPHVKHHLSSLIIALMRQNTDGVLGAIYGLGIVPDGVDEGKLRDDIDELREKYYRVPLGEISLGEAVEDLLSVAFRHGIRIPSDLTLLGKALLTVEGVVETLDPQFRIMDVAEPFGRKLMKERLRPDRVAETAWKRIFDYGEWLLRLPDSVKEWTKMMRHGKLRLEITAPDLETLLKKLDQITNRLSFSIVLLSLSIVLAGLMIASSLGRPSTLLWKIPAVEIGLGASAFLFGWLLYSIFRSGKF

SEQ ID NO: 22148 - protein, 591 aa, Burkholderia mallei ATCC 23344
MAAIKTSLPRRKFDVVIVGAGGSGMRASLQLSRAGLSVCVLSKVFPTRSHTVAAQGGIGASLGNMSEDNWHYHFYDTIKGSDWLGDQDAIEFMCREAPNVVYELEHFGMPFDRNADGTIYQRPFGGHTANYGEKPVQRACAAADRTGHALLHTLYQQNVAAKTQFFVEWMALDLIRDADGDVLGVTALEMETGDVYILEGKTTLFATGGAGRIFAASTNAFINTGDGLGMAARSGIALQDMEFWQFHPTGVAGAGVLITEGVRGEGGILRNANGERFMERYAPTLKDLAPRDFVSRSMDQEIKEGRGVGPNKDHVLLDLSHIGAETIMKRLPSIREIALKFANVDCIKEPIPVVPTIHYQMGGIPTNIHGQVVGTSRDHKEPINGFYAVGECSCVSVHGANRLGTNSLLDLVVFGRAAGNHIVEHVKNQRDHKPLPADAADFSLSRLAKLEKSTSGEYTQDIANDIRATMQKHAGVFRTSALLKEGVEQMAGLKERAAAVHLKDKSKVFNTARVEALELANLIEVARATMVSAEARKESRGAHAHSDYEHRDDENWLRHTLWYSEGDRLDYKPVQMKPLTVESVPPKARTF

SEQ ID NO: 22149 - protein, 250 aa, Fragaria x ananassa
MGKCYPTVTEEYKKAIDKAKRKLRGLIAEKNCAPLMLRLAWHSAGTYDVKTKTGGPFGTMKQSAELAHGANNGLDIAVRLLEPIKEQFPILSYADFYQLAGVVAVEVTGGPDVPFHPGREDKPEPPPEGRLPDAGKGSDHLREVFGKTMGLSDQDIVALSGGHTLGRAHKERSGFEGPWTPNPLIFDNSYFTVLLSGEKEGLLQLPTDKALLSDPVFRPLVEKYAADEDAFFADYALAHQRLSELGFAEA

SEQ ID NO: 22150 - protein, 670 aa, Cupriavidus necator
MNAPERIDSAARCANALRFLAADAVEQAKSGHPGAPMGMAEMAEVLWRRHLRHNPANPAWPDRDRFVLSNGHASMLQYALLHLTGYDLPMSQLRQFRQLHAATPGHPELGVTPGVETTTGPLGQGLANAVGMALAEKLLAATFNRPGFDIVDHHTYVFLGDGCLMEGLSHEACSLAGTLRLGKLICLYDDNGISIDGEVAGWFADDTPKRFAAYGWHVIADVDGHDAHALDAALHEAKAERDRPTLICCRTVIGKGAPAKAGGHDVHGAPLGAPEIAAMRTALGWEAEPFTVPADVADAWDARAQGAAREAEWEARFVSYCAAHPELAEEFVRRANGRLPEGFDAELMALLDAPSPLQGKIATRKASQLCLEALTPALPELLGGSADLTGSNLTNVKASVWVNHAGHGNYVSYGVREFGMAAAMNGIALHGGLIPYGGTFMTFSDYSRNAIRMAALMRLRVVHVLTHDSIGLGEDGPTHQPVEHAASLRLIPNNQVWRPCDGAETAYAWLAALRREDGPSCLVLSRQALMPFERNPAQRAEIARGGYVLRDVPAPRVVLIATGSEVEIAMRAALDLADAGIAARVVSMPCVELFYAQDVAYRDTVLPPGLPRVSVEAGGTWFWRGVVGEQGLALGIDTFGESAPAEALYQHFGLTPAHVAAAARVLLEEA

SEQ ID NO: 22151 - protein, 197 aa, Triticum aestivum
  misc_feature (173)..(173): Xaa can be any naturally occurring amino acid
  unsure (1)..(197): unsure at all Xaa locations
MEQYEVVEQIGRGAYGTAYLVHHKAEKKRYVMKKIRLTKQNDKFQRTAYQEMSLMASLSNPYIVEYKDGWVDEGTSVCIVTSYCEGGDMAQRIKKARGVLFSEERVCRWFTQLLLALDYLHCNRVLHRDLKCSNILLTKDNNIRLADFGLAKLLMEDLASSVVGTPNYMCPEXILADIPYGYKSDIWSLGELHYHFC

SEQ ID NO: 22152 - protein, 258 aa, Leifsonia xyli subsp. xyli str. CTCB07
MDNIGVDFLSELVGTAMLVLLGTGVVANVALIKNKGFNGGFLMVNIGWGIAVFSGVVVAYNSGAHLNPAVTLGLVANGATEFGNKDAHTLVDVSFATIALFILAQLIGAFIGAVFTWLAYKKHFDEEPEPANKLGVFSTGPAIRSYAWNLITEIIGTFVLVFVVIAFGHQPGNNVGLAALGALPVALLVIGIGASLGGPTGYAINPARDLGPRLAHAVLPIKGKGSSDWSYSWIPVVGPIVGGLLAGWLAIVLLPILM

SEQ ID NO: 22153 - protein, 291 aa, Saccharomyces cerevisiae
  misc_feature (1)..(1): Xaa can be any naturally occurring amino acid
  unsure (1)..(291): unsure at all Xaa locations
XVHVASVEKGRSYEDFQKVYNAIALKLREDDEYDNYIGYGPVLVRLAWHISGTWDKHDNTGGSYGGTYRFKKEFNDPSNAGLQNGFKFLEPIHKEFPWISSGDLFSLGGVTAVQEMQGPKIPWRCGRVDTPEDTTPDNGRLPDADKDAGYVRTFFQRLNMNDREVVALMGAGALGKTHLKNSGYEGPWGAANNVFTNEFYLNLLNEDWKLEKNDANNEQWDSKSGYMMLPTDYSLIQDPKYLSIVKEYANDQDKFFKDFSKAFEKLLENGITFPKDAPSPFIFKTLEEQGL

SEQ ID NO: 22154 - protein, 285 aa, Zea mays
MAKDIEAAAAHEGKDYSDPPPAPLVDAEELTKWSLYRAVIAEFVATLLFLYITVATVIGYKHQTDAAASGPDAACGGVGVLGIAWAFGGMIFILVYCTAGVSGGHINPAVTFGLFLARKVSLVRALLYIVAQCLGAICGVGLVKGFQSAFYVRYGGGANELSAGYSKGTGLAAEIIGTFVLVYTVFSATDPKRNARDSHVPVLAPLPIGFAVFMVHLATIPITGTGINPARSLGAAVIYNNDKAWDDHWIFWVGPFIGAAIAAAYHQYVLRASAAKLGSSASFSR

SEQ ID NO: 22155 - protein, 442 aa, Arabidopsis thaliana
MSSISTESSSNLSLLENGGGGSDKPTAETSRRVRRTVSASSLIRKRSDLKLISRVRWEFMRRILTNLQEVLLGTKLFILFPAVPLAVVAHRYDCPRAWVFALSLLGLTPLAERISFLTEQIAFHTGPTGLMNATCGNATEMIIAILAVGQRKMRIVKLSLLGSILSNLLFVLGTSLFLGGISNLRKHQSFDPGDMNSMLLYLALLCQTLPMIMRFTMEAEEYDGSDVVVLSRASSFVMLIAYLAFLIFHLFSSHLSPPPPPLPQREDVHDDDVSDKEEEGAVIGMWSAIFWLIIMTLLVALLSDYLVSTIQDAADSWGLSVGFIGIILLPIVGNAAEHAGAVIFAFRNKLDITLGIALGSATQIALFVVPVTVLVAWTMGIEMDLNFNLLETACFALSILVTSLVLQDGTSNYMKGLVLLLCYVVIAACFFVSNSPSSKLLF

SEQ ID NO: 22156 - protein, 405 aa, Burkholderia pseudomallei K96243
MPEFDMTEAFLCDAIRTPIGRYGGALAPARADDLGAVPLKALVERNRDVDWAAVDDVIYGCANQAGEDNRNVARMSLLLAGLPHAVPGATINRLCGSGMDAIGLAARAIKAGEASLMIAGGVESMSRAPFVTGKATSAFSRQAEIFDTTIGWRFVNPLMKQRYGVDSMPETAENVATDYRVSRADQDAFALRSQQKAARAQADGTLAQEIAPVTIAQKKGEPLVVARDEHPRETTLEALAKLKGVVRPDGTVTAGNASGVNDGACALLVASEAAARRHGLVPRARVLGIATAGVEPRVMGIGPAPATQKLLARLGMTLDQFDVIELNEAFASQGLAVLRLLGVADDDARVNPNGGAIALGHPLGASGARLVTTATYQLHRTGGRFALCTMCIGVGQGIAIAIERV

SEQ ID NO: 22157 - protein, 282 aa, Streptococcus agalactiae NEM316
MIEITWTVKYITEFIATAFLIILGNGAVANVDLKGTKGNNSGWIIIAIGYGLGVMMPALMFGNVSGNHINPAFTLGLAFSGLFPWAHVGQYILAQILGAMFGQLVVVMVYQPYFVKTENPNHVLGSFSTISALDDGQKSSRKAAYINGFLNEFVGSFVLFFGALALTKNYFGVELVGKLVQAGYDQTTAATRISPYVTGSLAVAHLGIGFLVMTLVASLGGPTGPALNPARDLGPRIVHRLLPKQILGQAKEDSKWWYAWVPVLAPIVASILAVALFKLLYL

SEQ ID NO: 22158 - protein, 344 aa, Zea mays
MGRAPCCEKVGLKRGRWTKEEDQILANYIAEHGEGSWRSLPKNAGLLRCGKSCRLRWINYLRADVKRGNISKEEEDVIIKLHATLGNRWSLIASHLPGRTDNEIKNYWNSHLSRQIHTYRRKYTAGPDTAPIAIAIAIDMSKLHSAERRRGGRTPGRSPKSATSSSSMTKSKQPDDPEPEPEAGGASSPRHSDGARSAVVDPDPDPNQPNSSSGSGSTGEGEDATGPWVLDPIELGDLWEAESEMDALMSIGGAAHDSATAEGFDAAQAQVDDLFDDMDWDNFAAHLWGEPEQQNDHSAQPQPQQAAEPQAAAAADVAAAGAEACDPDEHELEALETWLLSDSF

SEQ ID NO: 22159 - protein, 463 aa, Yersinia pestis CO92
MELPVKNKLKRGLTTRHIRFIALGSAIGTGLFYGSADAIRMAGPSVLLAYLIGGVVAFVIMRALGEMSVNNPQASSFSRYAQDCLGPMAGYITGWTYCFEILIVAIADVTAFGIYMGLWFPDVAHWVWVLSVVLIIGAVNMMSVKVFGELEFWFSFFKVATIIIMILAGIGIIVWGIGNGGQPTGIHNLWTNGGFFSNGFVGMLLSLQLVMFAYGGIEIIGITAGEAEDPKKSIPKAINSVPWRILVFYVGTLFVIMSIYPWNQVGTNGSPFVLTFQHMGITIAAGILNFVVITASVSAINSDVFGVGRMLNGMAEQGHAPKAFTAISKRGVPWVTVLVMMCAMLIAVYLNYIMPENVFLVIASLATFATVWVWIMILFSQIAFRRSLSKDQVKALDFPLRGGTFTSVLAIIFLVFIIGLIGWFPTTRISLYVGLVWIVLLLVGYYFKVKYQKKQATLIKNAD

SEQ ID NO: 22160 - protein, 301 aa, Glycine max
MAAPAPFSLSSDPFASKSATSTIFGPAALKKGNFEQTHFGIFTALRRNQGFTLKASMGPPGFTEKLNNNKLKTLADAEDGCDIFNDLKDRFLSFKKNKYLKNIEHFENLAKVQTPKFMVIACADSRVCPSNVLGFQPGEAFMIRNVANLVPTFESGPTETNAALEFAVNSLLVENILVIGHSCCGGIRALMGMQDDDVEKSFIKSWVIAGKNARKKAKAAASNLSFDEQCKHCEKESINHSLLNLLTYPWIEEKVANGELSIHGGYYDFTDCSFEKWTLDYRGTKLEENGKIAAKNKIFWC

SEQ ID NO: 22161 - protein, 593 aa, uncultured archaeon GZfos26E7
MIRVSPHQTMDKYEKIIGLAKRRGFLWNSFELYGGTAGFYDYGPLGAMLKRRIEDIWRKMYVIEEGFYEIETPTIGIAAIFDASGHTRGFSDPMVVCSGCDHAFRADHLIEGIVETPDALPASEIKRLIDEHGIECPQCGGVGTFGDVSSFNLMFKTTIGPGAERVGYLRPETAQGMFVDFEHLFRFYREKLPFGVTQIGKAYRNEISPRQGVIRLREFTQAEAEIFINPTDKNHPRFSMIEDTVLRYYPASHQRVSHPAYEDDGGIIELTTRDAVDRAIVAHEFLAYHLVLTHLFLVRVGIDPARLRFRQHQPDEMAHYAVDCWDAEVLTDRFGWVEIIGIADRSDYDLSSHAEHSKKDLSVLIEYDIPKQVERIVVKPDMSVIGPLYKGKAGKVRAALIGLGEEDLTGDEIKIEIDGEIVLIPRDMVKCETVIEDVRGERVIPHVIEPSFGIDRIIYAALEHSFSEEPVEGETRNVLHLPAEVAPVQVAVLPLLTREELITPSLAIVKTLRENGVFVSYDDSGTIGRRYRRNDEIGTPFSITIDYETLDDDTVTIRDRDSMAQIRVPVGELAETIRAMIRGGFSATTQSSQ

SEQ ID NO: 22162 - protein, 486 aa, Methanosarcina acetivorans C2A
MRDIGINGIKLPTEDCNDPECPFHGKLSVRGQILKGIVISDKMTKNIVMKRYREKWSYKYQRKQRVSSKIHAYSPPCMEAKIGDIITIAECRPLNKGSSFVVIENKSNINFVDNLLNVDDKWREELYVKDLKEMISLIQKEIKSLPSKSSELPIRLDQLANCQRNLYFISGDIKQLEDSVDNFSKSVSLTPINSSDKLIRLISLGKTQSFLYKTTNDVSSLDSAINAYGEAIETYNVLSTITNNYLPYFLTASKNLADLLIFEYEKNKNASDLKRAVYYYNEFLNSAPTGTSNTPIVLKRLSSAMKYYYTLNQDIDYLEKEINYIQKAVNITNSSSANLPGLLIDLGDSLNEYYECGKSKIPFDKLEKILIESRNSYMKAKGLISDDSINLLKIFNNIGNVSRELYIHTNEISYLKEAIDFWRKSIKSEDLNKQNYSSNNILRLNNLAVGLIDLYEVESDPKYLDESQKIWNRLKRELWTRKNYKS

SEQ ID NO: 22163 - protein, 536 aa, ASPERGILLUS NIDULANS FGSC A4
MKDEQGRPFIIVRDQGKKKRQHGTDAVKSHIVAAKTVASIVKTSLGPRGLDKILISPDGDITVTNDGATILSQMEITNNVAKLLVELSKSQDEEIGDGTTGVVVLAAAMLEQASDLIDKGIHPIRIADGYDAACEIAVAQLDKISDEIKFTKKDTANLLKVAKTSLGSKIVSKSHDQFAQIAVDAVLSVADLERKDVDFELIKVDGKVGGALEDSLLVKGVIVDKDFSHPQMPDEVTDAKLAILTCPFEPPKPKTKHKLDITSVEEFKRLQEYEKEKFTEMIQHLKDSGANLVICQWGFDDEANHLLLQNKLPAVRWVGGPEIELIAIATNGRIVPRFEDLSADKLGTAGRVREMTFGTTREKMLVIEECANSRAVTVFVRGSNKMIIDEAKRSLHDAICVVRNLVRDNRVVYGGGAAEIACSIAVEDAAVKSPGIEQYAMRAFADALDAVPLALAENSGLSPIETLAAIKSRQVKENNSRLGVDCMLTGNNDMREHFVIDPLIGKRQQLLLATQLCRMVLKINNVIISGDDQQEY

SEQ ID NO: 22164 - protein, 312 aa, ASPERGILLUS NIDULANS FGSC A4
MSKPGDYNAVRRDIAAQLKKPGYDDGSAGPVFVRLAWHSSGTYDAASDTGGSNGAGMRYEAEGGDPANAGLQHGRAFLEPVKEKHPWITYSDLWTLAGVVAIEEMGGPKIPWLPGRTDFVDDSKVPPRGRLPDGAQGADHLRFIFYRMGFNDQEIVALAGGHNLGRCHADRSGFQGPWVNNPTRFSNQFFKLLLNMEWKPKTLENGVSQFVYIDPEAEDHEEPLMMLPTDVALRDDPAFRPWVERYAKDKDLFFDHFSKAFAKLIELGIQRDASGKVTNTDNVKGGYHSAPKKSDEPTGPPRPHTAQRAAKL

SEQ ID NO: 22165 - protein, 265 aa, Cytophaga hutchinsonii
METTTKVSNRLTALFQNKSNNLLNIYFTAGYPTLHDTVTVLKALEKAGVDMVEIGMPYSDPVADGPVIQQSSLDAINNGMTIKTLLQQLKDIRKEVTIPILLMGYFNTVMQYGVEKFMKEISEIGIDGVILPDLPLDEYIEHYQSICESNNISNVSLITPNTSDERLLVIDNITQGFIYMVSTNSTTGNDAKKTEDNHDAYFSRIKNMGLKSPRMIGFNIKDHKTFTDACTYANGAIIGSAFVRLLAQSKHLERDILTFVSEIRK

SEQ ID NO: 22166 - protein, 173 aa, Triticum aestivum
  misc_feature (80)..(80): Xaa can be any naturally occurring amino acid
  misc_feature (103)..(103): Xaa can be any naturally occurring amino acid
  misc_feature (105)..(105): Xaa can be any naturally occurring amino acid
  misc_feature (107)..(107): Xaa can be any naturally occurring amino acid
  misc_feature (117)..(117): Xaa can be any naturally occurring amino acid
  misc_feature (132)..(132): Xaa can be any naturally occurring amino acid
  unsure (1)..(173): unsure at all Xaa locations
NNATSSGGSGSHRKMSHNAYERDRRKQLNEQYSSLRSLLPDDDHNKKMSIPTTVSRVIKYIPELQKEVDGLEKKKEELRXPATSKRHEAEHGPIVSATCLDDXEXMXKSASDTMAGXCHFKCIKVLESSSAXNPRFRFQNRFTSIFEPTNMTRRQTFLQRRTNKRGNRTYGCT

SEQ ID NO: 22167 - protein, 487 aa, Oceanobacillus iheyensis HTE831
MSNKRNTLTTASGAPVGDNQNSITAGHNGPTLLQDFHLLEKLAHFNRERIPERVVHAKGAGAHGYFEVTNDEISKYTKADFLSEKGKRTDMFIRFSTVAGEQGSADTVRDPRGFAVKFYTEEGNYDLVGNNTPIFFIRDAIKFPDFIHTQKRNPQTHLKDKDMVWDFWSLSPESLHQVTYLHSDRGLPATLRHMNGYGSHTFKWVNAEGEAFWVKYHFISEQGIKNLDPALADKIAGENPDYHTEDLFNAIEEGDHPAWKLYVQIMPYEDAKTYKWDPFDVTKIWSKKDYPRIEVGRMVLDRNPENYFAEVEQAAFSPGQFVPGIEASPDKMLQGRLFGYSDAHRYRLGANHHSIPVNRPKNEVNNYQRDGFMSVDGNGGNKPNYEPNSVNGPTEDSEAKINPFEIYGQADSVTYDSDDHYTQAGDLYRLMSADEKDRLVEAFVGHMTPVTKDEIKLRQIEHIYKADAEWGERVAQGLGLQVPESVK

SEQ ID NO: 22168 - protein, 189 aa, Zea mays
MISSPSPSPSSSRTSKGGSATPPSRASKWRSGAVRGVYGRRLLDALRATGGGQPRAVKAAADSALALTARGQTRWSRAILLAGAACSRRRVLVKAGGKVRRRRRPPPPVQARDKAAALKGKEGKVQERLRVLGRLVPGCRKLPTPALLEEAADYVAALQMQVSAMRALADALAAASSPADAEAEAEAER

SEQ ID NO: 22169 - protein, 196 aa, Arabidopsis thaliana
MSASRFIKCVTVGDGAVGKTCMLISYTSNTFPTDYVPTVFDNFSANVVVDGNTVNLGLWDTAGQEDYNRLRPLSYRGADVFILAFSLISKASYENVAKKWIPELRHYAPGVPIILVGTKLDLRDDKQFFIDHPGAVPITTNQGEELKKLIGSPIYIECSSKTQQNVKAVFDAAIKVVLQPPKQKKKKKNKNRCVFL

SEQ ID NO: 22170 - protein, 378 aa, Antarctic bacterium DS2-3R
TEPTIHKGLAGVTADVTAISKVNSDTNSLLYRGYPVQELAAKCSFEQVAYLLWNSELPNDSELKAFVNFERSHRKLDENVKGAIDLLSTACHPMDVARTAVSVLGANHARAQDSSPEANLEKAMSLLATFPSVVAYDQRRRRGEELIEPREDLDYSANFLWMTFGEEAAPEVVEAFNVSMILYAEHSFNASTFTARVITSTLADLHSAVTGAIGALKGPLHGGANEAVMHTFEEIGIRKDESLDEAATRSKAWMVDALAQKKKVMGFGHRVYKNGDSRVPTMKSALDAMIKHYDRPEMLGLYNGLEAAMEEAKQIKPNLDYPAGPTYNLMGFDTEMFTPLFIAARITGWTAHIMEQVADNALIRPLSEYNGPEQRQVP

SEQ ID NO: 22171 - protein, 242 aa, Salvia miltiorrhiza
HEAQLPIIHSSLKMSEELKYTSHEPAKPANEPCETATPVAVESTDRGLFGFGAKKEEETAISAEFEEKVKVCEEEKKEEAPEEKKHEGFIEKLRRSDSSSSSSDEEEVGEDGLKKKKKKKGLKEKVVEKVSGDKEEEEVKCVDTSVPVEKYDDVVPTQEHEEKKGFLDKIKDKLPGGKKTEEVVSAPPPPAPVAHEYGATPEAEGKEKKGFLDKIKEKLPGYHPKTDEEKEKEKEKEKEAAC

SEQ ID NO: 22172 - protein, 759 aa, Nicotiana tabacum
MEEAKERIRETFGKIELSPSSYDTAWVAMVPSRYSMNQPCFPQCLDWILENQREDGSWGLNPSHPLLVKDSLSSTLASLLALRKWRIGDNQVQRGLGFIETHGWAVDNKDQISPLGFEIIFPCMTNYAEKLNLDLPLDPNLVNMMLCERELTIERALKNEFEGNMANVEYFAEGLGESCHWKEMMLRQRHNGSLFDSPATTAAALIYHQYDEKCFGYLNSILKLHDNWVHTICPTKIHSNLFLVDALQNLGVDRYFKTEVKRVLDEIYRLWLEKNEEIFSDVAHCAMAFRLLRMNNYEVSSEELEGFVDQEHFFTTSSGKLMNHVAILELHRASQVAIHERKDHILDKISTWTRNFMEQKLLDKHIPDRSKKEMEFAMRKFYGTFDRVETRRYIESYKMDSFKILKAAYRSSGINNIDLLKFSEHDFNLCQTRHKEELQQMKRWFTDCKLEQVGLSQQYLYTSYFIIAAILFEPEYADARLAYAKYAIIITAVDDFFDCFICKEELQNIIELVERWEGYSTVGFRSERVRIFFLALYKMVEEIAAKAETKQGRCVKDHLINLWIDMLKCMLVELDLWKIKSTTPSIEEYLSVACVTIGVPCFVLTSLYLLGPKLSKDVIESSEVSALCNCTAAVARLINDIHSYKREQAESSTNMVSILITQSQGTISEEEAIRQIKEMMESKRRELLGMVLQNKESQLPQVCKDLFWTTINAAAYSIHTHGRWVSLPRGIQEPYQRCNLQTTQSIFPIICLKSFTICY

SEQ ID NO: 22173 - protein, 60 aa, Aegilops speltoides
TWKLYSERLMTLTGVYGFWKYVSNLERRETRRYLEMFYALKYRSLAAAVPLAVDGESSDN

SEQ ID NO: 22174 - protein, 481 aa, Triticum aestivum
  misc_feature (310)..(310): Xaa can be any naturally occurring amino acid
  misc_feature (381)..(381): Xaa can be any naturally occurring amino acid
  unsure (1)..(481): unsure at all Xaa locations
MAMAAASAGGEPVEPQSLKKLSLKSLRRSLDLFAPTHSLPFAPDAESKRIRVSCKVNAEYGAVKNLPTDQDRAQGKGAAAPSNALALLGTQDTKDAPREGTSNAIIPAPLMLPKAPESAVPGKNTTVLSIPGSSDRFSTSALMERLPSRWPKPVWHAPWKNYRVISGHLGWVRSIAFDPGNEWFCTGSADRTIKIWDLASGTLKLTLTGHIEQVRGLAVSQRHTYLFSAGDDKQVKCWDLEQNKVIRSYHGHLSGVYCLAPHPTIDVLLTGGRDSVCRVWDIRTKAHVSALTGHDNTVCSVFARPTDPQXVVTGSHDTTIKFWDLVAGKTMCTLTHHKKSVRAMALHPKEKSFASASADNIKKWSLPKGEFLHNMLSQQKXTILNAMAVNEDGVLATAGDNGSMWFWDWKSGHNFQQEQTIVQPGSLESEACIYALSYDNSGSRLVTCEADKTIKMWKEDLTATPETHPVNFKPPKDIRRY

SEQ ID NO: 22175 - protein, 250 aa, Fragaria x ananassa
MGKCYPTVSEEYKKAIDKAKRKLRGLIAEKNCAPLMLRLAWHSAGTYDVKTKTGGPFGTMKQPAELAHGANNGLDIAVRLLEPIKEQFPILSYADFYQLAGVVAVEVTGGPDVPFHPGREDKPEPPPEGRLPDAGKGSDHLREVFGKTMGLSDQDIVALSGGHTLGRAHKERSGFEGPWTPNPLIFDNSYFTVLLSGEKEGLLQLPTDKALLSDPVFRPLVEKYAADEDAFFADYALAHQRLSELGFAEA

SEQ ID NO: 22176 - protein, 466 aa, Oryza sativa
MVHEAINGHGHEVTVKVTSASTVAPALPVQEHRLPLSNLDLILPPMDVGVFFCYGAGEGSGGGGALLPAATLKAALAKVLVAYYPLAGEVVANTRGEGELLCSGRGVDFAEATAGDAVLRQLRLAVVDESAEKLVPKKKAGVMCVQVTKFKCGGAVVGCTFDHRVCDAYSFNMFLVAWAAAARGSSAAPAPSFDRSFLAPTSPAPPCPDALSDRLFVPVSCVPAPPSSAPEAAAAAVNRIFRVAAADVAALQAAAGPGRTKLEAFTAHLWQLHARAAASPPRHRRSCCMGVVVDGRTRLRRDGAMGAYFGNVLTIPYGAMSSGDLSAMPLADVAGDVHRWVAEAATRDHFRGLVDWVEQLRPEPSVARAYLGGDGGAEAAACVVSSGMRMPVGEVDFGRGRPAFASYHFPWPGGAGYVMPMPSARGDGDWVVYVHAAAEVVKAMEEEETTVFRALESDYVFGPVQQ

SEQ ID NO: 22177 - protein, 219 aa, Capsicum annuum
MADQYEHNKPSVEETTTGANVESTDRGLFDFLGKKEEEKPTHAHEEQAISSEFGEKVKVGEEEHKEEEKKKEEKKLHRSSSSSSSSSDEEEEVVGEDGQKIKKKKKKGLKDKMKDKISGDHKEEDKKTEDTSVPVEKYEETEEKKGFLDKIKDKLPGGGQKKTEEAAAPPSPPPPPAVAEHEAEGKEKKGFLDKIKEKLPGYHSKTEEEKEKEKEAASH

SEQ ID NO: 22178 - protein, 250 aa, Fragaria x ananassa
MGKCYPTVSEEYKKAIDKAKRKLRGLIAEKNCAPLMLRLAWHSAGTYDVKTKTGGPFGTMKQSAELAHGANNGLDIAVRLLEPIKEQFPILSYADFYQLAGVVAVEVTGGPDVPFHPGREDKPEPPPEGRLPDAGKGSDHLREVFGKTMGLSDQDIVALSGGHTLGRAHKERSGFEGPWTPNPLIFDNSYFTVLLSGEKEGLLQLPTDKALLSDPVFRPLVEKYAADEDAFFADYALAHQRLSELGFAEA

SEQ ID NO: 22179 - protein, 426 aa, Methylococcus capsulatus str. Bath
MLDSTTLFADACRFIPGGVNSPVRAFRGVGGTPVFVDRAEGPYVYGVDGKAYIDYVGSWGPMILGHAHPEVLTAVHAAVDRGLSYGAPTVAETAMAKTVCALMPSLDRVRMVSSGTEATMSAIRLARGYTGRDKIVKFEGCYHGHSDSLLVKAGSGALTLGAPSSPGVPANLAEHTLVLPYNDAAAVRDVFARHGAEIACIIVEPVAGNMNCVPPVPGFLETLRDVCDASGAVLIFDEVMTGFRVALGGAQAHYGICPDLTTLGKVIGGGMPVGAFGGRLDIMEQLAPVGQVYQAGTLSGNPVAMAAGLKTLELISQPKFFDELAEKTRHLAEGLRVRAEQAGIPLCVNWVGGMFGLFFTEQQGVSRFDQVMACDQERFRRFFHGMLEEGVYLAPSAFEAGFVSAAHDYQILDRTLTAAERVFAGL

SEQ ID NO: 22180 - protein, 335 aa, Burkholderia mallei ATCC 23344
MTDIQRDLVLVTGASGFVGSAVARAARRRGYRVRVLVRLTSPRTNVADLDAEIATGDMRDEASMRAALRGVRHLLHVAADYRLWAPDPLEIERANLEGAVATMRAALAEGVERIVYTSSVATLKVTPSGASADESSPLAAGQAIGVYKRSKVLAERAVERMIAEDGLPAVIVNPSTPIGPRDVKPTPTGRIIVEAALGKIPAFVDTGLNLVHVDDVAQGHLLALERGRVGERYILGGENLPLQAMLADIAQSTGRKPPTIALPRWPLYPIALGAEAVAKLTKREPFVTVDGLRMSKNKMYFTSAKAERELGYRARPYREGIRDALDWFRQAGYLR

SEQ ID NO: 22181 - protein, 483 aa, Xylella fastidiosa Dixon
MHSNSCHLSDMKNGFFAICIFIVLALLAGGNAIGAEAQVQTNPLPSEQITTELLMSEATPSDAVAIPKTTPTPVVDKGDVAWMLTSTLLVLLMALPGLALFYGGMLRSKNVLSMMVQIGVVFSLIAILWVVYGYSLAFADGDMFIGTFNKAFLYGVDTATLTDTFSKGFKLPEYLYVAFQLTFAGITGVLIVGAFAERVKFAAVLLFIFLWFSFGYLPLAHMVWSTPGFLLSKGALDFAGGTVVHINAGIAGLVGAYFVGKRIGFGQVAVKPHNVPMTFTGAALLWVGWFGFNAGSALEANSIAALAFINTMLATAAAILVWSLLEKMTKGKFSALGVASGMIAGLVGVTPAAGTVGPFGAIAIGAVAAVCCIWGITGLKRLLKVDDTLDVFGVHGIGGIVGAILTGVFTDKALGGQGYAEGMTMSNQVMIQAMGVGISVLWIGIVSLVGFLIVKLLFGLRVSEEAEREGLDITSHGESAYES

SEQ ID NO: 22182 - protein, 250 aa, Fragaria x ananassa
MGKCYPTVTEEYKKAIDKAKRKLRGLIAEKNCAPLMLRLAWHSAGTYDVKTKTGGPFGTMKQSAELAHGANNGLDIAVRLLEPIKEQFPILSYADFYQLAGVVAVEVTGGPDVPFHPGREDKPEPPPEGRLPDAGKGSDHLREVFGKTMGLSDQDIVALSGGHTLGRAHKERSGFEGPWTPNPLIFDNSYFTVLLSGEKEGLLQLPTDKALLSDPVFRPLVEKYAADEDAFFSDYALAHQRLSELGFAEA

SEQ ID NO: 22183 - protein, 600 aa, Leifsonia xyli subsp. xyli str. CTCB07
MTTDTTESTVIDGVHYHEFDIVIVGAGGAGMRAAIEAGPHAKVAVISKLYPTRSHTGAAQGGMAAALANVEEDSWEWHTFDTVKGGDYLVDQDAAEILAKEAIDAVIDLENMGLPFNRTPEGKIDQRRFGGHTRDHGKAPVRRACYAADRTGHMILQTLFQNCVKLGINFFNEFYVLDVIMNEVDGVDQPAGVVAYELATGELHVFHSKAIIFATGGFGKIFKTTSNAHTLTGDGVGIIWRKKLPLEDMEFFQFHPTGLAGLGILLTEGARGEGAILRNASGERFMERYAPTIKDLAPRDIVARCMVQEVAEGRGAGPHKDYVLLDCTHLCAEVLETKLPDITEFARTYLGVDPVVEPVPVMPTAHYAMGGIPTNVSAEVLRDNTTVVPGLYAAGECACVSVHGSNRLGTNSLLDINVFGKRAGTNAVEYAKTATAVPLPEDPAKNVRELIEGLRTSTGTERIAAIRKELQDEMDRNAQVFRTDESLEKVTGTIHTLRERYKNVVVQDKGKRYNTNLLEAVELGFLLDLAEVVVYSARNRKESRGGHMRDDFPKRDDENYMKHTMAYLTGDPHSADAADHITLDWKPVVVTRYQPMERKY

SEQ ID NO: 22184 - protein, 332 aa, Anabaena variabilis ATCC 29413
MTLPTETSSPKSSAMKTAPTATDLVRTYLREIGRVPLLSHEEEIRYGKQVQRSTTLQEVREELATQLGREPSIEEWAKAANINSADLLGAIADGEVAKRKMVEANLRLVVSVAKKYIKRNVDLLDLIQEGSIGMQRGVEKFDPTKGYRFSTYAYWWIRQAITRAIAEKARTIRLPIHITEKLNKIKKAQRQLSQRLGRAPTAGELANELELTPKQVREYLEKARLPLSLDLRLGDNYDTELGEMLEDPGASPEDFVMQSSLSNDLEVLMEQLTPQQKEVITLRFGLIDGQALTLARIGEILNISRERVRQIEREALTKLRKSKANMGEYLAS

SEQ ID NO: 22185 - protein, 550 aa, Rickettsia prowazekii str. Madrid E
MTTKLIKHGSKAREQMLEGIDILADAVKVTLGPKGRNVLIEQSFGAPKITKDGVTVAKSIELKDKIKNAGAQLLKSAATKAAEVAGDGTTTATVLARALAREGNKLVAAGYNPMDLKRGMDLAVNAVVEEIKRSSKKINSQEEIAQVGTISSNGDKEIGEKIAKAMEEVGKEGVITVEEAKNFSFDVEVVKGMMFDRGYLSPYFVTNSEKMVAELENPFILLFEKKLSNLQPMLPILEAVVQSQRPLLIIAEDVEGEALATLVVNRLRGGLKVAAVKAPGFGDRRKAMMEDIAILTKGELITEDLGMKLENVNIKNLGTAKRVTISKENTVIVDGNGDKKNIEDRVLQIKSQIAETTSDYDKEKLQERLAKLSGGVAVLKVGGATEVEVKERKDRVEDALAATRAAVEEGVVAGGGVTLLHASQTLTKLKVENKDQQAGIEIVIEALKDPLKQIVKNAGENGGVVVGKLLEHNDKNYGFNAQDMQYVDMIKAGIIDPAKVVRTALQDAASVASLIITTETLIVDEPSDKEEPMPMRGGMGGMGGMGGMDF

SEQ ID NO: 22186 - protein, 530 aa, Arabidopsis thaliana
MDLGVRVSGHETVSSPGQTELGSGFSNKQERSGFDGEDCWRSSKLSRTSTDGFSSSPASAKTLSFHQGIPLLRSTTINDPRKGQEHMLSFSSASGKSDVSPYLQYCRNSGYGLGGMMNTSNMHGNLLTGVKGPFSLTQWAELEQQALIYKYITANVPVPSSLLLSLKKSFFPYGSLPPNSFGWGSFHLGFSGGNMDPEPGRCRRTDGKKWRCSRDAVPDQKYCERHINRGRHRSRKPVEGQNGHNTNAAAAASAAAASTAAAVSKAAAGTSAVAMRGSDNNNSLAAAVGTQHHTNNQSTDSLANRVQNSRGASVFPATMNLQSKETHPKQSNNPFEFGLISSDSLLNPSHKQASYATSSKGFGSYLDFGNQAKHAGNHNNVDSWPEELKSDWTQLSMSIPMAPSSPVQDKLALSPLRLSREFDPAIHMGLGVNTEFLDPGKKTNNWIPISWGNNNSMGGPLGEVLNSTTNSPKFGSSPTGVLQKSTFGSLSNSSSASSTIIGDNNNKNGDGKDPLGPTTLMNTSATAPSL

SEQ ID NO: 22187 - protein, 212 aa, Haloarcula marismortui
MADQEIENAVSRALEDAPERNFRETVDLAVNLRDLDLNDPSNRVDESVVLPAGTGQETTIVVFAEGETALRAEEVADDVLDEDELEELGGDDDAAKDLADDTDFFIAEKGLMQDIGRYLGTVLGPRGKMPEPLDPDDDVVEVIERMKNTVQLRSGERRTFHTRVGAEDMSAENIADNIDVILRRLHADLEKGPLNIDTVYVKTTMGPAMEVA

SEQ ID NO: 22188 - protein, 95 aa, Rickettsia prowazekii str. Madrid E
MSFKPLHDRIAIKPIENEEKTKGGIIIPDTAKEKPMQGEIVAVGNGVLNKNGEIHPLELKVGDKVLYGKWAGTEIEIKGEKLIVMKESDVFGIIN

SEQ ID NO: 22189 - protein, 159 aa, Zea mays
MSLIRRGNAFDPFSLDLWDPFEGFFPFGSGGVRSLVPSLPRTSSETAAFAGARIDWKETPEAHVFKADVPGLRKEEVKVEVEDGNVLQISGERNKEHEEKNDRWHRVERSSGKFLRRFRLPDNAKADQIKASMENGVLTVTVPKEEAKKADVKNVQITG

SEQ ID NO: 22190 - protein, 227 aa, Drosera adelae
MENYSMIIKLLVWQSLAAMALCQSPGFDFFYFVQQWPGAYCDTSRGCCNPTSGKPPSDFGIHGLWPNYNSGGYPSNCDSSNPFDPSQIQDLLSQLQTQWPSLTCPSSDGTSFWTHEWNKHGTCSESVLTEHAYFAAALNLKSQANTLASLTNAGITPNNSFYNLSDVLAAIKQGTGHDAYVQCNTDENGNSQLYQIYICVDTTGANFIECPVAPNQNCPSSIEFPSF

SEQ ID NO: 22191 - protein, 413 aa, Thermococcus kodakarensis KOD1
MIKKAVIPIGGDATRLRPLTIETSKGLVRLLNKPILEHSILSLAKDGIEEVYLGVRGYVNYTTLFDYFREGYWLQKKYGLEKEIRIRYMPRYESTTNGDAVWYTMEYYGIKEPVVVIQGDNIYQLNIQDMYKWHRKKNAFMTIALQPVEDVTGFGVAKIDDDYRIEYFVEKPRPEQAPSNLANTGIYILSENFWEFLNEGWAKEMKETRRLDFGGDIIPALIEHGYEVYGYPMEGYWFDVGTPERYLNAAMYLLRHLSPEDMEAVEITHDVYMQGKSEMSEDLRRKFREMIKTGKLIVEGKVLLGRHISIGKGTALEDAVIDNYTIVGRNCEILHSVVMDRVKLGDNVRIVNSIIGRHVEIGNNVRIVNSVIGDNAVIEDNVRMYNVKIWPHEFVERGATLEHYTVRTGVPRR

SEQ ID NO: 22192 - protein, 487 aa, Haloarcula marismortui
MSWKDTAEPLLVRMPAVQRPEGHVPFKRKLTWTGGVLLLYFFLTNVKLFGLDIDASQQVFGRFSSILASGQGSIMQLGIGPIVTASIVLQLLGGADLLGLNTQDDPRDQILYQGLQKLLVLVMICLTGLPMVFAGGFLPADTAVANSLGIGTAGVQWLIFAQMFVGGVLILFMDEVISKWGVGSGIGLFIVAGVTQRLVGGLLTAPFLGNSEGIIYTWYLFITGERGTGPVLAADGLQTVLLQGELLGLFTTVLIFAVVVYAESVRVEIPLSNARVKGARGRFPVKLIYASVLPMILVRALQANIQFLGRILNAQLGSMPAFLGTYANGQPTGGLFYFLAPIQSRGDWMWWLEGTAQPVWQILTRVGIDLFVMLVGGAVFAVFWVETTDMGPEATAKQIHNSGMQIPGFRQNVGVIEKVLERYIPQVTVIGGALVGLLAVMANMLGTIGGVSGTGLLLTVSITYKLYEEIAEEQLMEMHPMMRQMFG

SEQ ID NO: 22193 - protein, 413 aa, Burkholderia fungorum LB400
MSMALQRVVVTGMGIVSCLGNTLDEVASALRAGRSRIQRIDAWRERGFASQVAGVASVAHEPPFERKLERFMGDTARFACHAARNAISDAGLDAAALRSPRAGTVIGSGVGTMSTYDAAMATAHARGVDKVPPYTVPHAMSSTASANVAQVFGLEGVSYSPSSACTTSALAIGQAMQLIQTGRQQIVLAGGSESLHDNMTLMFDAMGALSRRFNDTPQRASRPYDTERDGFVIASGGGVLVLESLEYALARGARIYAELTGFGDCTDSAGMVAPRAAGIARAMRGALHEAGKRPDYVNTHAPSTPLGDTEELRALSEVFGAAFDRRVPAFSSTKGMTGHPLGACGAHEAIYTLLMMRDGFIAGTAGIDTPEPAVDGMPLVRVTREARIDTAMSVSFGFGGSCASLVFEAWQGG

SEQ ID NO: 22194 - protein, 408 aa, Burkholderia fungorum LB400
MKRVVITGMGGVTALGDSWDVIETRLRSGVNAVRRMPEWDYFESLHTRLACPLPGFTMPAHYPRKKTRSMGPVSMYSVRASELALADAGLADDATIKDGRMGVAYGSSSGSVQPIRAFGTMLETGSMSDVTSNSYVQMMPHTTAVNVSLFWDLKGRIIPTSCACASGSQAIGYAYEAIQTGKQTLMLAGGAEELSGPAVAVFDTLYATSTRNDEPHLTPRPFDAARDGLVVGEGAATLVLEEYGHAVARGARIHAEIVGFGCNSDGAHMTQPTAETMALAMQLALRDAQLAPEAIAYVNAHGTSTDRGDIAESHATAQTFGAHMPISSLKSYVGHTLGACGALEAWWTIEMMKRNWYAPTLNLTRVDPACAPLDYIAGTGRQIDAEYVMSNNFAFGGINTSLIFRRVR

SEQ ID NO: 22195 - protein, 289 aa, Triticum aestivum
MSAGEIPASSAPGAPQFHVLAELPWPQPPDADDDYFLEKFQASVETLPAMLHKNYSLMRELDKSLQGVQLENEQRCQQEIEDIKHGLESGSITTYEPAKLKFSDEAIEEQKHCVRIADEKVALATQTYDLVDAHIQQLDQYMRKLEELRLEKEAAAAAAAAAADTAVAATSAAPAGAGSLRSAAADPAPKTGRAGERSRGGRKKAKVPTEMPTEIPIEQPAIDLELPVDPNEPTYCFCNQVSYGEMVACDNPDCKIEWFHFGCVGLKEQPRGKWYCLSCSAFQKKRKGR

SEQ ID NO: 22196 - protein, 518 aa, Lycopersicon esculentum
MDALCAGTAQSVAICNQESTFWGQKISGRRLINKGFGVRWCKSFTTQQRGRGVTSAVLTRDINKEMLPFENSMFEEQPTADPKAVASVILGGGVGTRLFPLTSRRAKPAVPIGGCYRLIDVPMSNCINSGIRKIFILTQFNSFSLNRHLARTYNFGNGVGFGDGFVEVLAATQTPGDAGKMWFQGTADAVRQFIWVFENQKNKNVEHIIILSGDHLYRMNYMDFVQKHIDANADITVSCVPMDDGRASDFGLMKIDETGRIIQFAEKPKGPALKVMQVDTSILGLSEQEASNFPYIASMGVYVFKTDVLLKLLKSAYPSCNDFGSEIIPSAVKDHNVQAYLFNDYWEDIGTVKSFFDANLALTKQPPKFDFNDPKTPFYTSARFLPPTKVDKSRIVDAIISHGGFLRECNIQHSIVGVRSRLDYGVEFKDTMMMGADYYQTESEIASLLAEGKVPIGVGPNTKIQKCIIDKNAKIGKDVVILNKQGVEEADRSAEGFYIRSGITVIMKNATIKDGTVI

SEQ ID NO: 22197 - protein, 481 aa, Arabidopsis thaliana
MESVPESVPSPNSNTPSIPPPVNSVPPFLSKTYDMVDDPLTNEVVSWSSGNNSFVVWSVPEFSKVLLPKYFKHNNFSSFVRQLNTYGFRKVDPDRWEFANEGFLRGRKQLLKSIVRRKPSHVQQNQQQTQVQSSSLGACVEVGKFGIEEEVERLKRDKNVLMQELVRLRQQQQATENQLQNVGQKVQVMEQRQQQMMSFLAKAVQSPGFLNQLVQQNNNDGNRQIPGSNKKRRLPVDEQENRGDNVANGLNRQIVRYQPSINEAAQNMLRQFLNTSTSPRYESVSNNPDSFLLGDVPSSTSVDNGNPSSRVSGVTLAEFSPNTVQSATNQVPEASLAHHPQAGLVQPNIGQSPAQGAAPADSWSPEFDLVGCETDSGECFDPIMAVLDESEGDAISPEGEGKMNELLEGVPKLPGIQDPFWEQFFSVELPAIADTDEILSGSVENNDLVMEQEPNEWTRNEQQMKYLTEQMGLLSSEAQRK

SEQ ID NO: 22198 - protein, 504 aa, Coprinopsis cinerea
QIVNSVDTMTLTNANVSPDGFTRAGILVNGVHGPLIRGGKNDNFELNVVNDLDNPTMLRPTSIHWHGLFQRGTNWADGADGVNQCPISPGHAFLYKFTPAGHAGTFWYHSHFGTQYCDGLRGPMVIYDDNDPHAALYDEDDENTIITLADWYHIPAPSIQGAAQPDATLINGKGRYVGGPAAELSIVNVEQGKKYRMRLISLSCDPNWQFSIDGHELTIIEVDGELTEPHTVDRLQIFTGQRYSFVLDANQPVDNYWIRAQPNKGRNGLAGTFANGVNSAILRYAGAANADPTTSANPNPAQLNEADLHALIDPAAPGIPTPGAADVNLRFQLGFSGGRFTINGTAYESPSVPTLLQIMSGAQSANDLLPAGSVYELPRNQVVELVVPAGVLGGPHPFHLHGHAFSVVRSAGSSTYNFVNPVKRDVVSLGVTGDEVTIRFVTDNPGPWFFHCHIEFHLMNGLAIVFAEDMANTVDANNPPVEWAQLCEIYDDLPPEATSIQTVV

SEQ ID NO: 22199 - protein, 516 aa, Lycopersicon esculentum
MSVATDVRFALLRNNPAALTGTNLKIVKFCNGELMGKKLKYTKFQLRSNVVKPHICMSLTTDIAGEAKLKDLEAKKEDARTVVAIILGGGGGTRLFPLTKRRAKPAVPIGGAYRLIDVPMSNCINSGINKVYILTQFNSASLNRHIARAYNFGNGVTFGDGYVEVLAATQTPGELGKRWFQGTADAVRQFHWLFEDARSKDIEDVLILSGDHLYRMDYLHFVQSHRQSGADITISSLPIDDSRASDFGLMKIDDTGRVMSFSEKPKGDDLKAMAVDTTVLGLSPEEAKEKPYIASMGVYVFKKDILLNLLRWRFPTVNDFGSEIIPASTKEFCVKAYYLFNDYWEDIGTIRSFFEANLALTEHPPRFSFYDATKPIYTSRRNLPPSAIDNSKIVDSIVSHGSFLTNCFVEHSVVGIRSRIGTNVHLKDTVMLGADYYETDAEIASQLAEGKVPLGIGENTRIKECIIDKNARIGKNVVIANSEGVQEADRSSEGFYIRSGITVILKNSTIPDGTVI

SEQ ID NO: 22200 - protein, 277 aa, Corynebacterium sp.
TVPSIVLNDGNSIPQLGYGVFKVPPADTQRAVEEALEVGYRHIDTAAIYGNEEGVGAAIAASGIARDDLFITTKLWNDRHDGDEPAAAIAESLAKLALDQVDLYLVHWPTPAADNYVHAWEKMIELRAAGLTRSIGVSNHLVPHLERIVAATGVVPAVNQIELHPAYQQREITDWAAAHDVKIESWGPLGQGKYDLFGAEPVTAAAAAHGKTPAQAVLRWHLQKGFVVFPKSVRRERLEENLDVFDFDLTDTEIAAIDAMDPGDGSGRVSAHPDEVD

SEQ ID NO: 22201 - protein, 515 aa, ASPERGILLUS NIDULANS FGSC A4
MVHLASIKKDDDFEPVVNRVDSIKLDTIEEDDYSATVYGTRFATQQLPHAEMPDREMPREVAYRMIKDELSLDGNPMLNLASFVTTYMEDEAEKLMAESFSKNFIDYEEYPQSAEIQNRCVNMIARLFNAPTDSDTDHPMGTSTVGSSEAIMLGTLAMKKRWQNKRKAEGKDYSRPNIVMNSAVQVCWEKAARYFDVEERYVYCTEERYVIDPQQAVDLVDENTIGICAILGTTYTGEYEDVKAINDLLVERGLDCPIHVDAASGGFVAPFIHPTLQWDFRLEKVVSINVSGHKYGLVYPGVGWVVWRSPEFLPKELIFNINYLGAEQASFTLNFSKGASHVIGQYYQMIRLGKRGYRSVMVNITRIADYLADQLEQLGFIIMSQRRGRGLPLVAFRLPADRADETFDEFAIAHQLRERGWIVPAYTMAPHSNNLKLMRVVVREDFSMSRCDQLLSDIKLALKSLREMDQAMLERYTQHVRSHTTKSHRAKHTHPHYKNETHSLQGRTGKTHGVC

SEQ ID NO: 22202 - protein, 153 aa, Helicosporidium sp. ex Simulium jonesii
MTRSCLALLVALLVVVSPVVWAQEDDVDETDVLVLTKENYSEVIKNNKYVMVEFYAPWCGHCKKLKPEYAGAATDLNKYEPKVVLAKLDADAEQDVARENDIKGYPTLIWFENGEKVEFSGNRRRADIVRWIKKRTGPPTVDLADVRGSRTPA

SEQ ID NO: 22203 - protein, 240 aa, Helicosporidium sp. ex Simulium jonesii
LAAGGRRAALQSSTTLSLSSTPPQPDHAEQAKAVVEFFGLVDDGEAGTQVVGFHATESGKYRFPFDELTLENLLSFAEQVEKGTAPRLLKSAAAPEEHTKNGLTTVVGSTFEQLVLDPSKDALLEVHAPWCGHCKKLEPIYAKLAKRFETVDSVVIAQMDGTGNEHPAAEFRSFPTLLWFPAGDEKKAVPYSGERTVSAFVKFLKKNAKTEFKLPKKSKKGKGKKEEADAEGDAEEHDEL

SEQ ID NO: 22204 - protein, 405 aa, Glycine max
MSENLMEKVSALGERLKIGGVEVGRKMSEGMSSMSFKLKEFFQPGPNQADKLVEDATSEALDEPEWALNLDLCDLVNTDKLNCVELVRGIKKRIILKSPRVQYLALVLLETLVKNCEKAFSEVAAERVLDEMVKLIDDPQTVVNNRNKALMMIEAWGESTGELRYLPVYEETYKSLRSRGIRFPGRDNESLAPIFTPPRSVSSAPEADVNLQQQFEHDIPEQFHHDVPVLSFTPEQTKEALDVARNSIELLSTVLSSSPQQDALQDDLTTTLVQQCRRSQTTVQRIVETAGDNEAVLFEALNVNDEIQKVLTKYEELKQPATTPLHPEPAMIPVAVEPDESPYHSKEDALIRKPAGSRTGVEGGSNDDMMDDLDEMIFGKKGGEASDGGHETKKQPSSKDDLISF

SEQ ID NO: 22205 - protein, 750 aa, Salmonella enterica subsp. enterica serovar Typhi Ty2
MSHNEKSPHQSPVHDTRESQPGLDSLAPSDGSHRPTPEPTPPGAQPTAPGSLKAPETANDKLTALDAFRKGSENYALTTNQGVRIADDQNSLRAGSRGPTLLEDFILREKITHFDHERIPERIVHARGSAAHGYFQPYKDLSDITKAAFLCDPQKITPVFVRFSTVQGGAGSADTVRDIRGFATKFYTEEGIFDLVGNNTPIFFIQDAHKFPDFVHAVKPEPHWAIPQGQSAHDTFWDYVSLQPETLHNVMWAISDRGIPRSYRTMEGFGIHTFRLINAQGKATFVRFHWKPLAGKASLVWDESQKLTGRDPDFHRRDLWEAIEAGDFPEYELGLQLIAEEDEFKFDFDLLDPTKLIPEELVPVQRVGKMVLNRNPDNFFAENEQAAFHPGHIVPGIDFTNDPLLQGRLFSYTDTQISRLGGPNFHEIPINRPTCPYHNFQRDGMHRMDIDTNPANYEPNSINDNWPRETPPAPKRGGFESYQERVDGNEIRERSPSFGEYYSHPRLFWLSQTPIEQQHIIDAFSFELGKVARAYIRERVVDQLAHIDVTLAQGVAHNLGFALTHEQTQIAPPPDVNGLKKDPALSLYAVPDGDVKGRVVAILLNDKVNAAELLTIFQALKAKGVHVKLLYSRMGEVTADDGSTLTIAATFAGAPSLTVDAVIVPCGNIADIESCGDARYYLLEAYKHLKPIALAGDARRFKALLNIDSQGEEGLVEADNVDHHFMDTLLTLMAAHRVWSRAGKINAIPA

SEQ ID NO: 22206 - protein, 237 aa, Solibacter usitatus Ellin6076
MGTFILILMGNGVVANVLLKKSKAEGAGWMVIATGWAFAVMTGIFTAVACGSADAHLNPAVTLGFAVSTGDYSKLAVYLPAQLLGAMCGALLVWLYFLPHWAVTEDRDIKLGCFATSPAISNFGSNLFSEAIGTFVLITVVAAITSKAVGNLGPAGALSPGFGPYLVGMLVWSIGLSLGGTTGYAINPARDLGPRIMHAILPVAGKGGSNWGYAPVPILGPMIGAALAGIFIKSAGF

SEQ ID NO: 22207 - protein, 508 aa, Yersinia pestis CO92
MSGKHSAETHHAAKKRWLDSHDTGYHKSMGLRHIQMIAIGGSIGTGLFLGTGARLQMAGPALALVYLVCGIFSFFILRALGELVLHRPTSGSFVSYAREFLGEKASYVAGWMYFLNWAMTGIVDITAVALYMHYWGTFSDVPQWLFALGALSIVATMNMIGVRWFAEMEFWFALIKVAAIALFLIVGVIFLGTGQSVAGHTTGIHLITDNGGFFPHGLLPALIMVQGVIFAFAGIELIGTAAGECKDPEKMLPKAINSVIWRIGLFYVGSVVLLVCLLPWHAYQAGQSPFVTFFSNLGVPYIGTIMNIVVLSAALSSLNSGLYSTGRILRSLSMGGSAPKFMSKMSPQSVPYAGILVTVGIYVLGVLLNYLVPSQVFEIVLNIASLGIISSWAFIIICQMKLRQAIKRGMAKPVSFKMPGAPVTSWLTLIFLAGVLVMMAFDYPNGTWTIASIPVLTLLLIAGWFSLRKRANEVAAAPIDVWSQEILFEEPDAQNVSPKELYEQKSVG

SEQ ID NO: 22208 - protein, 156 aa, Prunus dulcis
MDVRIAGLDSPLFSTLQHIMDFTDEPDKSFNAPTRTYVRDAKAMASTPADVKEYPNSYVFVVDMPGLKSGDIKVQVEDDNVLLITGERKREEEKEGAKYVRMERRVGKFMRKFVLPENANVEAISAVCQDGVLTVTVEKLPPPEPKKSKTIEVKIA

SEQ ID NO: 22209 - protein, 245 aa, Zea mays
  misc_feature (7)..(7): Xaa can be any naturally occurring amino acid
  misc_feature (225)..(225): Xaa can be any naturally occurring amino acid
  unsure (1)..(245): unsure at all Xaa locations
DKDYSFXLANQLGFAENKDFVELMRLYLTIHTDHEGGNVSAHTTHLVGSALSSPYLSLAAGLNGLAGPLHGLANQEVLVWLQKMKKAIGNDLSDQAIKDYLWSTLKAGQVVPGYGHAVLRKTDPRYVSQREFAQKHLPDDPMFKLVSQVYKIAPGVLTEHGKTKNPYPNVDAHSGVLLQYYGLTEQNYYTVLFGVSRALGVLPQLIIDRAVGAPIERPKSFSTEXLTPSWLAQSCKHVTATCSTV

SEQ ID NO: 22210 - protein, 462 aa, Corynebacterium glutamicum ATCC 13032
MSTDNFSPQVPSTVYLDYMEQGIAARKAEAESNASTKGESPDYPGQQVIWRLIQEAGESLRDELRTLAFTLHDHPEEAFEEVFATEEITKLLQNHGFEVQSGVYGVKTALETSFETPGYDPAQHPSIAILAEYDALPEIGHACGHNIIAAAGVGAFLAVTNMIKTAEVKGVDHLDFEGRIVLLGTPAEEGHSGKEYMIRNGAFDGIDASIMMHPFGFDLAEHVWVGRRTMTATFHGVSAHASSQPFMGKNALDAASLAYQGFGVLRQQMPPSDRLHAIITEGGNRPSIIPDTATMSLYVRSLLPEALKDISKRVDDVLDGAALMAGVGVEKQWDVHPASLPVRNNHVLARRWAKTQNLRGRTALSEGILPDTLAASTDFGNVSHLVPGIHPMVKISPENVALHTKEFAAYARTEEAIDAAVDAAIGLAQVAVDALADPQMLIDATLEFTNSGDVLKVGDYLA

SEQ ID NO: 22211 - protein, 366 aa, Mesembryanthemum crystallinum
LFHPEQLISGKEDAANNFARGHYTIGKEIVDLCLDRIRKLADNCTGLQGFLVFNAVGGGTGSGLGSLLLERLSVDYGKKSKLGFTIYPSPQISTSVVEPYNSVLSTHSLLEHTDVAVLLDNEAIYDICRRSLDIERPTYTNLNRLISHVISSLTASLTFDGALNVHVNEFQTNLVPYPGIHFMLSSYARVISAEKAYHEQLSVAEITTSAFEPSSMMAKCDPRHGKYMACCLMYRGDVVPKDVNAAVATIKTKRTIQFVDWCPTGFKCGINYQPPSVVPGGDLAKVQRAVCMISNSTSVAEVFSRIDHKFDLMYAKRAFVHWYVGEGMEEGEFSEAREDLAALEKDYEEVGAEGAEDDEGDDGDEY

SEQ ID NO: 22212 - protein, 662 aa, Colwellia psychrerythraea 34H
MSSRQELANAIRVLSMDAVQKAKSGHPGAPMGMADIAEVLWRDFLKHNPTDPNWADRDRFILSNGHGSMLIYSLLHLSGYDLSIEDLKEFRQLHSKTPGHPEYGYTPGVETTTGPLGAGIANAVGMAIAEKTLAAQFNREDHAIVDHFTYCFLGDGCLMEGISHESCSLAGTLGLGKLIAFWDDNGISIDGKVEGWFTDNTPARFESYGWHVICVDGHDPQAITHAIEEAKSVIDKPSMICCKTIIGFGSPNKSGTHDCHGAPLGDDEIAATREFLNWSHAPFDIPSDIYEQWDRKEKGQASQVSWNDKFAAYKAAHPGLASEYERRVIKGELPAEFEEKANAFIQQCHESSENIASRKASQNAIEAFGSVLPEMLGGSADLAGSNLTLWSGSKGIQEDAAGNYIFYGVREFGMSSIMNGISLHGGFVNYGATFMMFMEYARNAVRMSALMGIQNIFVYTHDSIGQGEDGPTHQPIEQLTNLRTTPNLTTWRPCDATESAVAWKAAVQSQKAPTALIFSRQGLPAMSRTQTQVSDIEKGAYILVDCAGTPDVILMATGSEVALAVNAATALTEQGKLVRVVSMPSTNVFDKQSSDYKEAILPFSVTKRVAIEAAHVDFWAKYVGLSGAVVGMTTFGESAPGNVLLEHFGFTVDNVVNTVNKL

SEQ ID NO: 22213 - protein, 434 aa, Blastocystis hominis
MGKEKPHINLVVIGHVVAGKSTTTGHLIYACGGIDKRTIERFEEGGQRIGKGSFKYAWVLAKMKAERERGITIDISLWKFETRKDFFTIIDAPGHRDFIKNMITGTSQADVAILVIASGAGEFEAGYSKNGQTREHALLANTLGVKQMIVCCNKMDDKSVNYSEARYKEIKNEMTSFLTKVGYAKVEERIPFIPISGFNGDNMIEHSANMPWYKGPTLLEALDNVHPPKRPVDKPLRLPLQDVYKIGGIGTVPVGRVETGVLKPGMTVTFAPVNVSTEVKSVEMHHESIPQALPGDNVGFNVNNVSVEDIHRGNVCGDAKNDPPCKTESDAQVIVMNHPSGIRPGYCPVVDCHTAHIACKFEKIMSEMDKRTGKVLRENPDIVKNGKSMMAQLVPSKPMCVETFSDYPPLGRFAVRDMRQTVAVGIIKSTVRAK

SEQ ID NO: 22214 - protein, 250 aa, Triticum aestivum
MTLTPRSTRLAPFQSVFYSPSPAATPVAVTPRRSNSHPAARLRLRCCCSAGDPAAMVKAIRVHELGGPEALRWEEVEVGEPGDGEIRIRNTAIGVNFIDVYFRKGVYPAPLPFTPGMEAVGVVTAVGPGLTGRKVGDVVAYAGKPMGSYAEEQIIPADVAVPVPPSVNHKTAAAIMLKGMTVHMLVRRIFKVETGHTVLVHAAAGGVGSLLCQWANALGCHCPLETGLQMERRKPSTLAHLLDGEVHPGD

SEQ ID NO: 22215 - protein, 575 aa, Pseudomonas fluorescens
MAEDAATVFESLSMIEREVNSDDQRWYIARLLPYRSSEDHIDGTVLTFIDITKRRLAEEELRLGEERMRLVAESTHDFAIIILDNQGLITDWNTGAQLIFGYTKDEVLGAYYDLIFAPEDRAGGVPESELLTAREHGRSDDERWHIRKDGERFFCSGEVTRLKGDSLQGYVKIARDLTGHKRMQDEQNQKLMETQTHSHLKDEFFAVMSHELKHPLNLIQLNAELLRRLPTTKAAAPALKAVNTICEAVSSQARIIDDLLDVRRLRTGKLKLKKQPVDLGRILQDIHTVVLSEGHRCQVTLQVPLPPQPPLMIDADATRLEQVIWNLVNNALKFTPANGLVQLIAQRVEDKAHVDVIDSGVGLAEEDQNKVFDLFGQAANQHGTHQRDGLGIGLSLVRQLVEAHGGSVSVQSKGLGQGCTFTVLLPLSHPNDSAPKQPASRGVERLAGIKVLLVDDSREVMEVLQLLLEMEGAQVEAFHDPLQALGNARNNSYDLIISDIGMPIMNGYELMQNLRQIAHLHHTPAIALTGYGASSDQKKSQHAGFDRHVSKPVAQDPLIDLIRELCSQGLRSAEH

SEQ ID NO: 22216 - protein, 546 aa, Mesembryanthemum crystallinum
MAKMETHSKPMSKKLARNLILLAISIIVLTTSSSNPNFSYYLAIFLPIIVYLVHSICFHRAQNSGTTPPGPLALPIFGNWLQVGNDLNHRCLAALAKTYGPMFLLKLGVRNLVVVSNPELACEVLHAHGVEFGSRPRNVVFDIFTGGGQDMVFTEYGDHWRKMRRIMTVPFFTNKVVNNYSPMWEDEMDKVVNDLNHNEKISIKAKHEGFVIRKRLQLMLYNIMYRMMFDEGFESMEDPMFIDATKFNSERSRLAQSFEYNYGDFIPFLRPFLRSYLSKCRDLQKSRLAFFNNYFVEKRRKIMAANGEHHKISCAIDHIIEAQMKGEINAENVLYIVENINVAAIETTLWSMEWALAELVNHPEIQKKIRHEIAMKLEGKPVTESNLEQLPYLQAVVKETLRLHTPIPLLVPHSNLEEAKLGGYTIPKNSKVVVNAWWLANNPEWWRDAEEFRPERFLEEEAGADAAVGGGKVDFRFVPFGVGRRSCPGIILALPILGLVIAKLVSNFEMKPPPGEEKIDVSEKGGQFSLHIAKHSTVVFHPIHAA

SEQ ID NO: 22217 - protein, 320 aa, Arabidopsis thaliana
MAHATFTSEGQNMESFRLLSGHKIPAVGLGTWRSGSQAAHAVVTAIVEGGYRHIDTAWEYGDQREVGQGIKRAMHAGLERRDLFVTSKLWCTELSPERVRPALQNTLKELQLEYLDLYLIHWPIRLREGASKPPKAGDVLDFDMEGVWREMENLSKDSLVRNIGVCNFTVTKLNKLLGFAELIPAVCQMEMHPGWRNDRILEFCKKNEIHAYSPLGSQEGGRDLIHDQTVDRIAKKLNKTPGQILVKWGLQRGTSVIPKSLNPERIKENIKVFDWVIPEQDFQALNSITDQKRVIDGEDLFVNKTEGPFRSVADLWDHED

SEQ ID NO: 22218 - protein, 112 aa, Haloarcula marismortui
MALGLNVQEPEETCADQNCPFHGELSVRGQTLNGEVASTDMEKTVVVEREYDVKVPKYDRFMKRRSRVPAHAPDCLDLAVGDTVTIAECRPLSKTKSHVVVGVVADEQDGDA

SEQ ID NO: 22219 - protein, 327 aa, Anabaena variabilis ATCC 29413
MPTVNTHTEDTNTKFTADMVRTYLREIGRVPLLTREQEIVYGKQVQQMMSLIDAKEALAKKLDREPSLPEWADHVQKSETEVKQTVTQGKRAKQKMIEANLRLVVAIAKKYQKRNMEFLDLIQEGTLGLERGVEKFDPMRGYKFSTYAYWWIRQAITRAIAQQGRTIRLPIHITEKLNKIKKVQRELAQTLGRSPSPAEIAKELELEPAQIREYLNMARQPVSLDVKVGDNQDTELQEMLEDEGPSPEYYTTQEFLRQDLNTLLAELTPQQREVVALRFGLLDGNELSLAKVGERLNLSRERVRQLEHQALAHLRRRRANVKEYVAS

SEQ ID NO: 22220 - protein, 300 aa, Mesembryanthemum crystallinum
NRCFDPSDLIIDTKPSSESLIHTTTVSPGDMQAENNSGWSSCASSSRVSGQLISFGNSDYFDDGKPKSNNKKEETAVVVHDDVGDHVHGGSNYTKYSQQNKVRNNSSKFGSIGLCSQEHVLAERKRREKMTQRFHALSALVPGLKKMDKASILGDAAKYLKQLEEQVKLLEEQTASRTVESVVLVKNSNVQDPNLDHGGNSSSNENSNSSLNNPLLEIEAGACNNNVLIRIHAQKDQDLVRKVLNEIENLHLTTLNFNTIPFGGYAMDITIVAQMDDDFELTIKDVVMHLRLALQQCSNT

SEQ ID NO: 22221 - protein, 689 aa, ASPERGILLUS NIDULANS FGSC A4
MATVVVQQPLRHTTPPPGTVAPALTLNRTSSPVPNKHIPVCPTGPSPVSSRTSSPAPKDDVVLPTSSPLHPPDAFPKISESPLLYSIEIEILVAAVDHCSSQPLPDPNLMFPWLHGLHPENHLQVGFFTNRRRSLRRTPKCWRGLTIVKVGGDLSTSRLKGAITPDAILAPSGLEFLATDPREGFSVRNFQIQTAKVAPLSDIVVYGEDGVTAKQLLEVASRIATAQHHWRLKHDHEQTLPSYNTFVVSCPFSDIERRAPNLVAVNSSGQLTNQVVDLCESTECCARIRSNKRLVQLERLEMCTMSRATEFAHNVWQGPTPDYLLQAGASGTPSADAFDLMIDANDLAGIPGPRYLANLAKRLAKEPQRMEFPSSGSLLTPSGESRDLDDLINTLRWIYYLANPEVVETDAEGDVSMDIPPRKTRRILIHCPDGYTESSLLVIAYTMFAEGISASEAWLRLHREKKRNFFAYPSDVAYLKNVQERILQESPANPPTYRVSDPQWFKYCDGSLPSRILPYMYLGNLSHANNPEMLWELGIRRVLSIGEAVTWSDSDIARMGAENLMHITKVQDNGIDPLTQEFDRCLEFIRKGKSDGAATLVHCRVGVSRSATICIAEVMASLNLSFPRAYCYVRARRLNVIIQPHLRFVYELLKWEELQQKKNKQPVKRELEWATVAREIALMNKPYSR

SEQ ID NO: 22222 - protein, 570 aa, ASPERGILLUS NIDULANS FGSC A4
MAQLWGWISVYCLLILSFTVRSLGQEQSAFCEHSSLARECWGQYNISTDYHAITPDTGVTREYWLVAENTTLAPDGYERQVLVFNGTLPGPLIEANWGDELVIHVTNGLEHNGTAIHWHGIWQRGTNQYDGVPGVTQCPISPGQTYTYRFRATQYGTTWYHSHFSLQLAEGLFGPLVIHGPASADYDVDLGSVFISDWYHKSAFILWEESTRYGGVPVRANAVPPTGLFNGSNVFGGGGRRSEMIVEKGKKYRLRLIDSSVDGWMKFSIDGHKLTVISADLVPIEPYETDAVILTSGQRYDVVFEANQKIGNYWTRVIYQTACNGLDIKDPDIRGILRYAGAEISDPTSSQWSSIRNSCGDEPYDKLVPYVKRTVGKAAGQENLNVGWYYDLPELYFHWTLNTKALTIDWGTPTNKLIYNNESVFPTEYNIYEVPNRDQWTYWVIQDVGLVNAYHPFHLHGHDFFILAQGRGLYTPLVKLNRDNPPRRDTATMAGNGFLVIAFESDNPGSWLMHCHIAWHASQSLALQFVERESEIGPLIEPVIGEIESDCKKWEKYHAESVYHQDDSGI

SEQ ID NO: 22223 - protein, 478 aa, Leifsonia xyli subsp. xyli str. CTCB07
MAYEFERKQRIAVLGGGPGGYEAAIAGAQLGADVTLIERSGVGGSAVITDVVPSKSLIATAEATNSIAEAADLGVQFFSRDASGKPVRPEIAVNLAAVNKRLMGLARQQSEDMRAELVRSGVRIVSGEGRLDGPGAVIVSTVRGDSGTDFDSVDADTIVVAVGARPRILSSAEPDGERILTWTQLYDLGAIPEHLVVVGSGVTGAEFASAYTALGSKVTLISSRDQVLPGEDADAASVIENVFKRNGMQVLSTSRAESVVRAGDGVVATLSDGRTVEGSHCLMAVGSIPNTAGIGMQEAGVQLTPSGHIRVNRVARTSIPNIYAAGDCSDLLPLASVASMQGRTAVFHAMGDAVNPIELRNVTSNIFTQPEIATVGWNQKQIEEGIAQGDIYKLPLKSNPRAKMLGIRDGFVKLFARTGSGTVIGGVIVAPRASELIFPLALAVEHRLTVDQVARAFTVYPSLSGSISDAARAMHIVL

SEQ ID NO: 22224 - protein, 467 aa, Burkholderia pseudomallei K96243
MEGSQTGLGTGLKQRHVTMLSIAGVIGAGLFVGSGHAIAEAGPAALIAYAIAGLLVVLVMRMLGEMAVAQPDSGSFSTYADRAIGHWAGFTIGWLYWWFWVLVIPIEATAAATILNAWFPGVATWIFALGITSVLTVTNLFSVKNYGEFEFWFALIKVVAIVVFLAIGGAAIVGLLPGSNVSGAARLVNAGGFMPNGVGAVLAAMLTTMFSFLGTEIVTIAAAESEHPERQIVRATNSVIWRISLFYLGSIFVVAALVPWNDALLPVHGSYQRAMELIGVPHAKGIIDVIVLVSVASCLNSALYTASRMIFSLSTRGDAPAFLRRTDASGTPRAAVLASTAFGFLTVIANYVMPEQVFGFLLATSGAIALLVYLVIAISQLRMRSTLDATGERLPLRMWCFPWLTWAVIVFICGVLVVMLLREDHRMEVGATAVLALAVVVASRMNRRARGGDEPTPAASRVSANLR

SEQ ID NO: 22225 - protein, 190 aa, Glomerella cingulata
MVVATIKCVVVGDGAVGKTCLLISYTTNKFPSEYVPTVFDNYAVTVMIGDEPYTLGLFDTAGQEDYDRLRPLSYPQTDVFLVCFSVTSPASFENVARSGSRGTSPLPGVLLIVAPVTERGSSVREKLSKQKMSPVRKEDGERMAKDLGAVKYVECSALTQFKLKDVFDEAIVAALEPPAPKKKSHKCLVL

SEQ ID NO: 22226 - protein, 469 aa, Glycine max
  misc_feature (109)..(109): Xaa can be any naturally occurring amino acid
  unsure (1)..(469): unsure at all Xaa locations
KELKYILDQIESTRSTIFGSASNIHSNAEKQAENVAPKVRKPYTITKQREKWTEEEHQKFLEALKLYGRGWRQIEEHIGTKTAVQIRSHAQKFFSKVVRESEVSDEGSXNQLNIPPPRPKRKPLHPYPRKSVNSFRGPTIPNETEISPSTNLLVAEKDTPSPTSVLSTVGSEAFGSQFSEQTNRCLSPNSCTTDIHSVSLSPVEKENDCMTSKESEEEEKASPASRPLSTVSNPKMCMKPEFSSKEIEDATDMPQTTSIKLFGRTVSMVGNQKSLKIDDDGKPITVKSDEVDDVENEKLGQSGESKQVDTQLSLGVVSGNWPITPDADGANVTSIEPPKENQCFSESAPDAFFPQWSLSQGLPPFYLRPCNQVLNPLPLRPSSLKVRTREEESCCTGSNTESVCDMENQGKNSDAVDSKFQKYHEEGAAPQKKPARGFVPYKRCLAERDGHSFIVAMEEREGQRARVCS

SEQ ID NO: 22227 - protein, 500 aa, Clostridium acetobutylicum ATCC 824
MRYLLGIDVGTSGTKTALFDECGNTIKTSTHEYELFQPQVGWAEQNPENWWTACVKGIREVIEKSKIDPLDIKGIGISGQMHGLVLIDKEYKVIRNSIIWCDQRTEKECTQITDTIGKEKLIRITGNPALTGFTLSKLLWVRNNEPDNYKRIYKVLLPKDYIRFKLTGVFAAEVSDASGTQMLDINTRNWSEELLDDLRIDKNILPDVYESVVVSGCVIEKASKETKLAVNTPVVGGAGDQAAGAIGNGIVREGLISTVIGTSGVVFAATDTPRFDSKGRVHTLCHAVPNKWHIMGVTQGAGLSLNWFKRTFCAKEILESKEAGINIYDLLTEKASQSKPGSNGIIYLPYLMGERTPHIDPNVKGAFLGISLINNHNDFVRSILEGVGFSLKNCLDIIENMKVNIEEIRVSGGGAESSIWRQILSDIFNYELTTVKASEGPALGVAILAGVGAGIYNSVEEACDKIVKGNEKVMPNANLIEVYSKVYEVYNSAYPKIKDI

SEQ ID NO: 22228 - protein, 152 aa, Methanosarcina barkeri str. fusaro
MKFPMKRTDRDMYSWDPFDEIRRMQNYMENMFRTFPALESRFGNEAFSPLTDVMEEDEKVVVTTDLPGVDREDVELNLRDNVLVISAGKGKEEEAEKEGYLRKERSFMRYYREIPLPDGVTEEGTTAQLKNGVLTVTLPKTKSVAGKRIEIE

SEQ ID NO: 22229 - protein, 232 aa, Mannheimia succiniciproducens MBEL55E
MNYITFPTAQAAVEKIAQEFVLYSQLDRPVHISLSGGSTPKLLFKTLATPPFNTKVRWENLHFWWGDDRMVVPSDPESNYGEVQKLLFDHIRIPVENIHRIRGEENPDQELARFSAELTACVPNLEFDWIILGMGSDGHTASLFPHQTNFADENVALIAKHPESGQIRISKSAKLIEQAKRITYLVTGSAKAEILKQIKTTPAEQLPYPAARIRAKNGITEWYLDADAAKLL

SEQ ID NO: 22230 - protein, 349 aa, Kluyveromyces delphensis
MAPLNVGIIGTGIFATDRHLPSYQEMPDKFKVVAAFNRTKSKAVAFGEKAGLSKDKVYDDLAGIVNDPEVQMLDMLLPAQFNLDTVKRAIEAGKPVLLEKPIAATMAQAREIVKLADSVDTPIGIAENWLYLPCIDVARPLLEKIGPIVAFTHNSTGPFVTQNKYLSTSWRQNPEHIGGFLSDGGVHQLALVTELVGEIASVSALTRQVRKESGTVDIVFSTVEMRNSDIIGTFTYGSAFGATDKSVFLKIYGKNGTVVVELSDKKKPVVKARFGSTAEEGSEEEIHSVPLDDTFGVNAEFLNFHDTIVKKDKNVFKSTPRVAFHHLACVAAFLESSEKNGDHVKVESI

SEQ ID NO: 22231 - protein, 765 aa, Arabidopsis thaliana
MASHIVGYPRMGPKRELKFALESFWDGKSTAEDLQKVSADLRSSIWKQMSAAGTKFIPSNTFAHYDQVLDTTAMLGAVPPRYGYTGGEIGLDVYFSMARGNASVPAMEMTKWFDTNYHYIVPELGPEVNFSYASHKAVNEYKEAKALGVDTVPVLVGPVSYLLLSKAAKGVDKSFELLSLLPKILPIYKEVITELKAAGATWIQLDEPVLVMDLEGQKLQAFTGAYAELESTLSGLNVLVETYFADIPAEAYKTLTSLKGVTAFGFDLVRGTKTLDLVKAGFPEGKYLFAGVVDGRNIWANDFAASLSTLQALEGIVGKDKLVVSTSCSLLHTAVDLINETKLDDEIKSWLAFAAQKVVEVNALAKALAGQKDEALFSANAAALASRRSSPRVTNEGVQKAAAALKGSDHRRATNVSARLDAQQKKLNLPILPTTTIGSFPQTVELRRVRREYKAKKVSEEDYVKAIKEEIKKVVDLQEELDIDVLVHGEPERNDMVEYFGEQLSGFAFTANGWVQSYGSRCVKPPVIYGDVSRPKAMTVFWSAMAQSMTSRPMKGMLTGPVTILNWSFVRNDQPRHETCYQIALAIKDEVEDLEKGGIGVIQIDEAALREGLPLRKSEHAFYLDWAVHSFRITNCGVQDSTQIHTHMCYSHFNDIIHSIIDMDADVITIENSRSDEKLLSVFREGVKYGAGIGPGVYDIHSPRIPSSEEIADRVNKMLAVLEQNILWVNPDCGLKTRKYTEVKPALKNMVDAAKLIRSQLASAK

SEQ ID NO: 22232 - protein, 935 aa, Neurospora crassa
MTRRDAEVKDRCDTGRESPSTDGTGKSIFHVKPPALAALRFLHLLHLALTCFASICCRFPTFRYNTFPKAFKAAYSSQQQAVTLSKPNRVYSGVSNGWTTRVCKRSISISRRMGKNRLPVSPWTVLMSGATAPRLQNVLSRPVLSSKRDAGRTSSHHLLKSLLLASRFAASTLVATTSSAGASRSTGTSSPDPGPTINKSQTNRNPSTYTSPPNSLSRTFSASNLLAWYRTLPSPYFNLSGHLDDLSSLIRPFLAFLDPSSLSSPYSMASTSYAFSTSSGSDFSTPRSSSPHSSASVASARSSHSSTFSAGKRLSMSSVRRTSASNPMSSVDLSTIEEALKMANLDTLKGYCQKTYGEVHQETTTEYISQEEARGYQVLNQPHWNKVADFRISPKGTSFTPEERVAKNLTGLIPHVMEDSEKQVERALKMIRTRQTDIDRYLYLSTIKSQNVDLFYRLLMDHAKEMMPLVYTPTIGDVCLQYSTLYTRPEALYISIKQRKSIRTILRNWPYPQPEICVVTDGSRILGLGDLGVNGVGIPIGKLALYTAAAGIHPDKTLPIVLDCGTANETNLKDPLYLGLRQKRIPVAEQQEFMDEFMEAAAEVFPDMVVQFEDFESEKAFNYLDRYRDQYKCFNDDIQGTGAVVLAGYIGAVNLSNVPIEEQRLVFMGAGSAGVGVAKQLVEYYTKRGLSEQQAKDKFWLVDTKGLVTKDRGDKLAEHKKYFARTDNNGHQFRTLEEVIEYVKPSALVGLTATHGVFTESVVRALKASVDAGGLGRRPILFPLSNPLTKAECTFKEAIDWTDGTVLFASGSPFSSYTTNGVTYHPNQGNNVYVFPGIGLGAILAKATRVTDDMIYTSAAALANSLNADEVKQGLIYPRIDRVREASVIVAREVMKSARREGVSTLPEEQWLEWEEWGDVDLERYIKQHIYDPKF

SEQ ID NO: 22233 - protein, 357 aa, Pisum sativum
MSSLSDLINFNLSDSTEKIIAEYIWVGGSGIDIRSKARTLPGPVSDPAKLPKWNYDGSSTNQAPGKDSEVILYPQAIFKDPFRRGNNILVICDVYTPAGEPLPTNKRYNAAKIFSHPDVAAEVPWYGIEQEYTLLQKDINWPLGWPIGGYPGKQGPYYCGIGADKAYGRDIVDAHYKACLFAGINISGINGEVMPGQWEFQVGPSVGISAGDEIWAARYILERITEIAGVVVSFDPKPIPGDWNGAGAHANFSTKSMRENGGYEVIKKAIEKLGLRHKEHIAAYGEGNERRLTGKHETADINVFSWGVANRGSSIRVGRDTEKDGKGYFEDRRPASNMDPYVVTSMIAETTILWKKP

SEQ ID NO: 22234 - protein, 145 aa, Vigna unguiculata
MVAFSDKQEGLVNGAYEAFKADIPKYSVVFYTTILEKAPAAKNLFSFLANGVDATNPKLTGHAEKLFGLVRDSAAQLRASGGVVADAALGAVHSQKAVNDAQFVVVKEALVKTLKEAVGDKWSDELGTAVELAYDELAAAIKKAY

SEQ ID NO: 22235 - protein, 228 aa, Chlamydophila pneumoniae AR39
MALLILLRHGQSVWNEKNLFSGWVDIPLSQQGIEEAFSAGRAIQNLPIDCIFTSTLVRSLMTALLAMTNHHSKKIPYIVHEDPKAKEMSRIYSAEEENNMIPLYQSSALNERMYGELQGKNKKQTAEQFGEERVKLWRRSYKTAPPQGESLYDTKQRTLPYFEKNILPQLQNGKNVFVSAHGNSLRSLIMDLEKLSEEEVLSLELPTGKPVVYQWKNHKIEKHPEFFG

SEQ ID NO: 22236 - protein, 540 aa, Lactococcus lactis subsp. lactis
MRAHEILNNPFLNKGTAFTMKERQELGLIGLLPPTVQTIEEQAEQTYEQYLTKPSDLEKRHFLMEIFNTNRTLFYYLFNKHIVEFNPVVYDPTIADTIENYSHLFVDPQYAAYLDINHPENITETLKNAAGDRDIRLIVVTDAEGILGIGDWGTQGVDISVGKLMIYTAAAGIDPASVLPVVIDAGTNRKELLEDHLYLGNHQERIYGDQYYSFVDQFVETAESIFPKLYLHWEDFGRSNAATILNNYKTKIPTFNDDIQGTGIVVLGGIFGSLDITGEKLTDQVYLCYGGGSAGAGIAGRVHAEMVSEGLSEEEAYKHFFMIDQQGLLFDDMDDLTPAQKPFAKKRADYKDAGDMTDLLNIVKTVKPTILVGTSTNPGAFTKEVVEAMCANTERPVIFPISNPTKKMEATAEQVIEWSDGKAFVATGVPSGTINYKGVDYQIGQANNSLIYPGLGLGMLASEAKLLTDEMIGAAAHSLSGLVDPGKPGAPVLPPFEFVADVSIKVAEAVAKKAQEQGLTESKETDMAKAVRDLKWYPEY

SEQ ID NO: 22237 - protein, 442 aa, Saccharomyces cerevisiae
MSRRVVITGLGCVTPLGRSLSESWGNLLSSKNGLTPITSLPNYNEDYKLREKSIPSTITVGKIPENFQNENSAINKLLFTSQDERRTSSFIKLALRTTYEALHNAGLLNPNDITINTSLCNLDHFGCLIGSGIGSIQDIYQTSLQFHNDNKRINPYFVPKILTNMAAGNVSIKFNLRGLSHSVSTACATGNNSIGDAFNFIRLGMQDICVAGASETSLHPLSLAGFIRAKSITTNGISRPFDTQRSGFVLGEGCGMIVMESLEHAQKRNANIISELVGYGLSSDACHITSPPADGNGAKRAIEMALKMARLEPTDVDYVNAHATSTLLGDKAECLAVASALLPGRSKSKPLYISSNKGAIGHLLGARGAVESIFTICSLKDDKMPHTLNLDNVLTLENNEADKLHFIRDKPIVGANPKYALCNSFGFGGVNTSLLFKKWEGS

SEQ ID NO: 22238 - protein, 542 aa, Pediococcus damnosus
MAKSPVEILNDPFLNKGTAFTKEERQSLGLVGLLPPYVQTLDEQAAQTYAQVESKTSSLEKRIFLMEIFNENRVLFYKLFSQHVVEFMPIVYDPTIADTIENYSELFVQPQNATFLSIDDPDSMKDSLKNAADGRDIRLIVVTDAEGILGIGDWGTNGVDISVGKLMVYTAAAGIDPSQVMPVALDTGTNNQDLLKDPMYLGNRHERVTGDRYYKFVDQFVNTAEDLFPKLYLHFEDFARDNDANILNTYKDKITTFNDDIQGTGIIVLAGILGALNISKQKMTDQVYLSFGAGTAGAGITKRIYDEFLQQGLSADEAKKHFYLVDKQGLLFDDDKTLTPEQKPFARSRSEFANADDLTTLEAAVKAIHPTILVGTSTQPGTFTESIVKEMAAHTDRPIIFPLSNPTKLAEAKAEDLIKWSDGKALVATGIPADDVEYNGVTYQIGQANNALVYPGLGLGVIASTAKVLNDEMISKAAHSLGGIVDGNKAGAAVLPPVSKLDQFSYTVAKAAAQSAVDQKLNQEPISDVDKAITDMKWEPKY

SEQ ID NO: 22239 - protein, 476 aa, Candida albicans SC5314
MNTEETLLITPVDNYDAIVNDTKDDDSTPKSELKHLTRSSFPLVVSFVLQYVFSITSVYAAGRLGAKELAACSLAICTFNITGLAVFQGMATSLDTFCSQAYGSGNKKMVGVYFQRATLLMLATMVPLMLVWWYSGSILNQLVPDPELVSMAQLFLRIHAFGVPGLILFESGKRFLQAQHLFQASTYVLVVALPFNLLLNWLLVWNPNTGMGYTGIPLSIGITYWVISLLMFGYVIFIDGIECWGGIDWEKASSNWKPMLSLAVPGVIMVISDFLAFEILTIFASRFGTEALAAQSIVSNVATLCFQVPFAFAVAISTRMGHFIGDGNIASAKILNDLTVIIGGSIGLLSFCLFYFGRHVLGEFFTSDKMVLEISSKLLILAGINQISDSLNVVGTGVLRGQGRQRIGSILNIISYYFLAIPLGYVLAFKFGMEMSGLWIGLTIGVFVLAVTQCTSICLSNWEKILEHSHRIHDSV

SEQ ID NO: 22240 - protein, 450 aa, Pisum sativum
MRQILHIQGGQCGNQIGAKFWEVVCAEHGIDPTGRYTGDSDLQLERIDVYYNEASGGRFVPRAVLMDLEPGTMDSIRSGPYGQIFRPDNFVFGQSGAGNNWAKGHYTEGAELIDSVLDVVRKEAENCDCLQGFQVCHSLGGGTGSGMGTLLISKIREEYPDRMMLTFSVFPSPKVSDTVVEPYNATLSVHQLVENADEVMVLDNEALYDICFRILKLSNPSFGDLNHLISATMSGVTCCLRFPGQLNSDLRKLAVNLIPFPRLHFFMVGFAPLTSRGSQQYRTLSVPELTQQMWDAKNMMCAADPRHGRYLTASAMFRGKMSTKEVDEQMMNVQNKNSSYFVEWIPNNVKSTVCDIPPTGLKMASTFIGNSTSIQEMFRRVSEQFTAMFRRKAFLHWYTGEGMDEMEFTEAESNMNDLVAEYQQYQDATADEDEYGEEEGDEEEYGQHDI

SEQ ID NO: 22241 - protein, 222 aa, Mesembryanthemum crystallinum
WLVDSKGLIVSSRKNSLQEFKKPWAHEHEPLGDLSSAVKAIKPTVLIGSSGVGRTFTKEVIEAMASFNEKPLIMALSNPTTQSECTAEEAYTWSKGRAIFASGSPFNSVEYEGKTFVPGQSNNAYIFPGFGLGLVISGAIRVHEDMLLAASEALAGQVTQENYDKGMIYPPFSNIRKISAAIAANVAAKAYDLGLATRLPRPENLVKYAENCMYSPVYRSFR

SEQ ID NO: 22242 - protein, 460 aa, Corynebacterium glutamicum ATCC 13032
MALVLGIDSSTQSCKALLVDAATGQVIDEGRASHPSGSEVDPRAWIAALDQATEGLLERADAVSIAGQQHGMVALDENDEIVRPALLWNDTRSAQAALDLNEEIGGDQAAVDATGSVYVASLTATKMRWMRDHEPENAARTASVMLPHDFLTWHLMGRGRKVTDHGDASGTGYYSTRDRAWRTDLAALALGHEVELPELLAPNAIAGTTPGGVKVAAGTGDNAAAALGLDLQPGDVSVSIGTSGVAGMTVQHSVHDPSGLVTGFADATGAYFPLACTLNGAPVLEFGRRILGVEWEEFDALALAAQPGSGGVTLQPYLEGERTPNRPAARGVLAGLNCATTREDFARATVEGLLLALDDAVTALVEATGVPVQRIQLIGGGARSQAVREIAPEIFGHEIVVPEPAEYVALGAARQAAWALSGEATPPQWPTPGSDPHRAPKNTELSTRYAKLRAATQGWY

SEQ ID NO: 22243 - protein, 52 aa, Anabaena variabilis ATCC 29413
MDLIRLLCAIFFPPLGVFLQVGIGKDFWINILLTLFGYIPGIVHAVWVIAKK

SEQ ID NO: 22244 - protein, 459 aa, Ralstonia eutropha JMP134
MTMIALGGVIGAGLFVGSGVVIKSAGPAAVLSFLITGLLVVLVMRMLGELACAMPGGGSFYEYAREAWSDRPAVGNLASFLTGWMYWYFWVIVVALEAVAGADLVRYWLPDVPNWTISLVLLVMLTLTNLISVKSFGEFEFWFASIKVAAIMVFLFVAGVYVLGLAPGAHGMNVANLTANGGFMPNGIVPVLTGAVAATGFYFGAEIVTIAAAETAEPQKAVARATNSVITRVLVFYVGSVLLVVCLVPWNATGIATPYVSALNVMGIPAAAQIMNAIVLTAVLSALNSGLYASSRMLFALTKRGDAPRSLARVSRNGVPTRAILVATLFGYGAVVMSYVSPDKVFAFLVNSYGTVAIFVYILIAVSQLRLRARLEREAPHLLKVRMWCYPYLTWLAIFGMLAIVVAMAFIPDQRTPLALGVASLGLLVSAYIVRHLFRRGVQQVVPLAEMPRPDLHEY

SEQ ID NO: 22245 - protein, 230 aa, Oryza sativa (japonica cultivar-group)
MYHHHHGGHGEVASLHLLSPPNPPFFGAAAHHHHHHHGLINMALPPQAYFVPAAPPPPFQEATAALAAGDDATAALAVFELERILEEAAAAGGGGGNGSPSSGSDGCCYGLQGVAPAAEEERRRRRMVSNRESARRSRMRKQRQLSELWAQVEHLRGANRRLLDELNRALRGCADVRRENSRLRDEKAELAGKLQLLLPRQPAPEKNAADDQSSCSSEPCKNSTTTTAAE

SEQ ID NO: 22246 - protein, 418 aa, Mesembryanthemum crystallinum
QAETLLERGIHPIRIAEGYEVASRIAVEELERIAHKFEFGEEPLIQTCMTTLSSKIVNRCKRSLAEIAVKAVLAVADLERKDVNLDLIKVEGKVGGKLEDTELIYGILVDKDMSHPQMPKHIEDAKIAILTCPFEPPKPKTKHKVEIDTVEKFETLRKQEQQYFDDMVQKCKDVGATLVICQWGFDDEANHLLMNRNLPAVRWVGGVELELIAIATGGRIVPRFQELTPEKLGPAGLVREKSFGTTKDRMLYIEHCANSRAVTIFIRGGNKMMVEETKRSIHDALCVARNLIRNNSIVYGGGSAEIACSLAVEAAADRYPGVEQYAIRAFADALDSVPMALAENSGLTPIETLSAVKSQQVKENNPCCGIDCNDVGTNDMREQNVFETLIGKKQQLLLATQVVKMILKIDDVISPSEY

SEQ ID NO: 22247 - protein, 776 aa, Zea mays
MESSSGEELEEEFPGHEWITPQSSINAAYQSQTEKGIRKICSDLLELKDAIENLSANRQSKFLAFLRISEEVVEAEQELIELQKHVSSQGILVQDLMSGVCRELDIWHKSSKEEDATKKDSETELDEILSDDTQDPRTIFLDKLDVLLAEHKMEEAVLALEAEEKKYLVADESGKESNADNTAFKTAMVKRKTILEDQLVRYCGQPSLSMNELRKCLSGLIKIGKSSLAHQVLLKAYGSRLQKSVEAFLPNCSIYTETYSATLSQLVFSAIAKAAKETNTLLGDSPMNTNRIIQWAEYEIETFARLVKENSPLPESVSALRSACICIETSLFHCSCLESQGLKFSKLLMVLLRPYIEEVLDLNFRRVRRKIVDGARNDDILLLTPQEASPLSGAVSPNVMLTSSGKKFMSIVNDVLDQILPMTIVHFGGAILNKFIQLFDRYVETLIKVLPGPSEDDNLLESKEPIELKAESDAQQLTLIGTAYTVADELLPAAVSKFFDIQAEKKGAGGSSEGLGPGSIYAMEYKEWKRNLQHSLDKLRDHFCRQYVLALIYLEGKSRLDAKMYLGRKDDDLLFDPDPLPSLPFQALFGRLQQLASVAGDVLLGKDKIQKVLLSRLTETVIMWLSNEQEFWDIFDDRSVQLQPSGLQQLILDMHFIVEIAVCGRFPYRPVQQLVSTIITRAVAAFSARGVDPQSVLPEDGWFVDTAKAAIHKLMLGVSGSESEPEPDAEEHIALHGEVSDSEESSGASTVGSEDSFASAKNDDLESPVYFTDPES

SEQ ID NO: 22248 - protein, 511 aa, Guillardia theta
MNEFKVNIIKRNINKITSLASVLKSSFGPYGFDKAIRDNDGSLIITNDGATILEKAKVKGLIRSMICEMSKSHDDETGDGTTGVVLLTSFLLEEAIKLIENGVHPIRIIEGYFYCCDFCVNHLEKISYGYENDSSLLNFLLNVSKTAINSKIINRSKDKLSEITLKSVLAVADIDRRDINFDFIKIEGKIGGSLENSMLINGIILEKEFSHCQMPKKIDDVRVCIVTEPLEPPKTKNKCEIQISDSESYKNLNSTEQIFFKQMISQIKKSGANLLICQWGFDDEGNHLLLRNKISAIRWVNGTEIELLSIQTGSSINSRYSEINSSTIGFCGKVTEKVIGNHENKMIIFENCARSNCVSILLRGGSDFVIQEAKRSIRDSMWAIRNMIKRCKVVSGGGSSEISCSLKLVEIFNDNNSLKNMVFKAYSLALKSITKTLAQNAGKNPLQTISIIEEYQIKQNNSNIGVGNLKNHVLDMKKQKIYETLLGKQQQFLAATQMACSILRIDEIINN

SEQ ID NO: 22249 - protein, 925 aa, ASPERGILLUS NIDULANS FGSC A4
MAPTAPPILDFSPFYGTDGAAKAKLVQQVRESCEYNGFFQITGHRIPRELQVRVMDAAKRFFALPLEEKMAIDKNLNSFNRGYELLRSQMLEVGTAPELKEGLYIGEEIGADHPYYINGRLNSGPNQWPATVPDAQEFRETSMEYYHAVYELAKDVLAVLALTLDVEESFFDPLTEGGVATMRMLHYPSQPKDEDEKLNRGIGAHTDFGCITLLLQDEVDGLQVLDAPSGQWLDVQPVLGAYVVNLGDLMMRMANDRYKSNIHRVINKSGRERYSIPFFFSGNPDHVCKCLPNCCKAGEQPKYPPITVEDMVRGAYKQSYGRAEAYKKELAEKAKAHKIEAASATAMHNEYEMDKFVFNTATAGLPWITKYRMDISYPVINAGGLKNIASQIIMEIELDKRENRPTDNVPPDDIGKIEVVDDAEMEQFYGSSTTDAYRLKSELVSQCMADIGMGRFQWKLFTVAGFGWIVDNFCSQGISAVQPPIQQEFSGIKQVSYSSVAYYVGMIIGASFWGISSDLIGRKPAFNSTLAIAGIFLCAAAGTSNFIAFSALWAVIGTAAGGNVVCDSMILLEFIPGSHQYLLTALSGWWNLGQLVVSLLAWVFLANFSCPTDATPDTCSRADNMGWRYTLITLGGLSLAFTFVRIFVFKMPETPRYLLSQGNDQAAVDAVNYVARQNGKPEPLTLSMLQAIDVRLGFTPNAEERLSTKDILKENMQEFRGEHYQALFATRKLSQHTALIWAVWLIIGIAYPLYFNFLPSYLATRFTQDSSLDLTYRNYCIQSAVGVVGPLSAAVLVNTFLGRRWMMGISSIVTGVFLFAYVGVKTPMSSLAFSCVTGLLANFANQLSEYAIMYAFTPESFPAPHRGTASGTAASLLRFGGLVASLIASETGFTTAPIYASAALWVGVGVLCFGLPFETHGHAAI

SEQ ID NO: 22250 - protein, 775 aa, Cytophaga hutchinsonii
MIAHNLGYPRIGDNRELKKACEQYWSGAITQQKLQDVAKAIRTNNWLTQKDAGLDLIPCNDFSFYDQVLDMSFMLGLIPERFSSLLQKKDLTELDIYFAMARGYQKDGYDITAMEMTKWFDTNYHYIVPEFRKDQKFSPISEKAIREYTEAKVVIGKAAKPVLLGPVSYLLAGKEKEAGFNRIELIENLLPVYTKLLATLQQNGAEWIQLDEPFLVMDLTVQERKTYETTYTALRNLFPSLKFIVATYFECTGTNIDIAAKLPVDALHLDLVRCPSQLSDILTPAFISSNTMLSLGVVDGRNVWKNDFSTSSTFITKAIAALGKERVMIAPSCSLLHVPCDLDNEKNGNVLTPEIKNWMAFAKQKLHEVAALKKLNRAPMQSEELRLLKANTESIENRAKSKLIHKQHVKARVKAVQPSDSQRKSLFKSRQQIQEKALQLPLMPTTTIGSFPQTDEVRANRAKYKKGDITLAQYEDFVKTEMTKAIEWQEKIGIDVLVHGEFERNDMVEYFGEQLKGYVFSENGWVQSYGSRCVKPPIIYGDIERTEPMTVAWTTLAQSLTKKYMKGMLTGPVTILQWSFVRDDQPRRDTCMQIAFAIRDEVVDLEAAGIKIIQIDEPAIREGLPLRRENWETYLNWAVECFRISASGVKDETQIHTHMCYSEFNDIIKNIAAMDADVITIETSRSQMELLDAFVDFNYPNEIGPGVYDIHSPRIPTTDEMADLLNKAMHVLPVRNIWVNPDCGLKTRRWPETEAALINMVAAAQKIRKEITTVV

SEQ ID NO: 22251 - protein, 333 aa, Enterococcus faecalis V583
MLKKQKIAIVNSSSFGQIFPEHLTRLEKIGTVKHFTVDSEIGGKELAERLQGYTIIIASVTPFFTKEFFEHKDELLLISRHGIGYNNIDLDAAKQHDTIVSIIPALVERDAVAENNVTNLLAVLRQTVAADASVKADQWEKRANFIGRTLFNKTVGVIGVGNTGSCVVETLRNGFRCDVLAYDPYKSATYLQSYGAKKVDLDTLLASADIICLCANLTEESYHMIGSAEIAKMKDGVYLSNSARGALIDEEAMIAGLQSGKIAGLGTDVLEEEPGRKNHPYLAFENVVMTPHTSAYTMECLQAMGEKCVQDVEDVVQGILPQRAVQEVSRYVS

SEQ ID NO: 22252 - protein, 228 aa, Zea mays
ITAGKGQRLGFGSDRGNYRGQIIGITSVSLLPVKSLDDFTLIAIWGFLEALVAALCMNVYVVGLNQIFDIEIDKVNKPTLPLASGEFSMPTAVLLVVAFLVMSISIGIRSKSAPLMCALLVCFLLGSAYSIDVPLLRWKRHAFLAAFCIIFVRAVVVQLAFFAHMQCLMVLFAATCSEEALGTYKVHRLCINILMTAYAAAILVGASSTNLYQKIVIVSDGIIFISRT

SEQ ID NO: 22253 - protein, 221 aa, Triticum aestivum
  misc_feature (30)..(30): Xaa can be any naturally occurring amino acid
  misc_feature (34)..(34): Xaa can be any naturally occurring amino acid
  misc_feature (178)..(178): Xaa can be any naturally occurring amino acid
  misc_feature (204)..(204): Xaa can be any naturally occurring amino acid
  unsure (1)..(221): unsure at all Xaa locations
MASPSVFAGIAQGPEDPILGVTVRDNKGSXPVRXNLGVGAYRTEEGKPMVLNVVRRAEQMLIQNESRVKEYLAITGLADFNKLSAKLIFGADSPAIQENRVATVQCLSGTGSLRVGGEFLARHYHERTIYIPQPTWGNHPKVFTLAGLTARSYRYYDPATWGLDFPGTLWKTSIKVPXGAIVLLHAWGHNPNCVDPTLEQWETXRQANGDQKHWLPFFDRA

SEQ ID NO: 22254 - protein, 422 aa, Streptomyces venezuelae
MTARRVVITGIEVLAPGGTGSKAFWNLLSEGRTATRGITFFDPTPFRSRVAAEIDFDPEAHGLSPQEIRRMDRAAQFAVVAARAVADSGIDLAAHDPYRVGVTVGSAVGATMGLDEEYRVVSDGGRLDLVDHAYAVPHLYDYMVPSSFSAEVAWAVGAEGPNTVVSTGCTSGLDSVGYARGELIREGSADVMIAGSSDAPISPITMACFDAIKATTNRYDDPAHASRPFDGTRNGFVLGEGAAVFVLEELESARARGAHIYAEIAGYATRSNAYHMTGLRPDGAEMAEAIRVALDEARMNPTEIDYINAHGSGTKQNDRHETAAFKKSLGDHAYRTPVSSIKSMVGHSLGAIGSIEIAASALAMEHNVVPPTGNLHTPDPECDLDYVRSCREQLTDSVLTVGSGFGGFQSAMVLARPERKIA

SEQ ID NO: 22255 - protein, 492 aa, Oryza sativa
MVLSKAVSESDMSVHSTFASRYVRASLPRYRMPENSIPKEAAYQIINDELMLDGNPRLNLASFVTTWMEPECDKLIMAAINKNYVDMDEYPVTTELQNRCVNMIAHLFHAPLGEDETAVGVGTVGSSEAIMLAGLAFKRRWQNKRKAEGKPFDKPNIITGANVQVCWEKFARYFEVELKEVKLRDGYYVMDPEKAVDMVDENTICVAAILGSTLNGEFEDVKLLNDLLDKKNKETGWETPIHVDAASGGFIAPFLYPELEWDFRLPWVKSINVSGHKYGLVYAGIGWCIWRNKEDLPEELIFHINYLGTDQPTFTLNFSKGSSQVIAQYYQLIRHGFEGYRNIMENCHENAMVLKEGLVKTGRFDIVSKDEGVPLVAFSLKDRSRHDEFEISDMLRRFGWIVPAYTMPPDAQHVTVLRVVIREEFSRTLAERLVLDIEKVMYQLDALPSRLMPPVPPAPLLVVAKKSELETQRSVTEAWKKFVLAKRTNGVC

SEQ ID NO: 22256 - protein, 156 aa, Yersinia pestis KIM
MLLLDVVFVDFIPCQRTAKMAKELNPTENIEKLSDIQRYVTQERGTEAPFTGKLLHNKRDGVYQCLCCHQPLFISESKFDSGCGWPSFYQPIDADSIRYIDDYSHNMHRIEIRCGNCDAHLGHVFPDGPQPTGERYCINSASLNFVDDQNGEQTAG

SEQ ID NO: 22257 - protein, 404 aa, Streptomyces venezuelae
MSASVVVTGLGVAAPNGLGREDFWASTLGGKSGIGPLTRFDPTGYPARLAGEVPGFAAEEHLPSRLLPQTDRMTRLALVAADWALADAGVRPEEQDDFDMGVVTASASGGFEFGQGELQKLWSQGSQYVSAYQSFAWFYAVNSGQISIRNGMKGPSGVVVSDQAGGLDAVAQARRQIRKGTRLIVSGGVDASLCPWGWVAHVASDRLSTSEEPARGYLPFDREAQGHVPGEGGAILVMEAAEAARERGARIYGEIAGYGSTFDPRPGSGREPGLRKAIELALADAGAAPGDIDVVFADAAAVPELDRVEAEALNAVFGTGAVPVTAPKTMTGRLYSGAAPLDLAAAFLAMDEGVIPPTVNVEPDAAYGLDLVVGGPRTAEVNTALVIARGHGGFNSAMVVRSAN

SEQ ID NO: 22258 - protein, 334 aa, Yersinia pestis KIM
MEYMTIKVGINGFGRIGRIVFRAAQERSDIEIVAINDLLDADYMAYMLKYDSTHGRFDGTVEVKDGHLVVNGKTIRVTAERDPANLKWNEVNVDVVAEATGLFLTDETARKHIAAGAKKVVLTGPSKDDTPMFVMGVNHKAYAGQEIVSNASCTTNCLAPLAKVINDKFGIVEALMTTVHATTATQKTVDGPSHKDWRGGRGASQNIIPSSTGAAKAVGKVIPELNGKLTGMAFRVPTPNVSVVDLTARLEKPASYKEICAAIKAASEGELKGVLGYTEDDVVSTDFNGEKLTSVFDAKAGIALNDNFVKLVSWYDNETGYSNKVLDLISHISK

SEQ ID NO: 22259 - protein, 417 aa, Solibacter usitatus Ellin6076
ARMGNVLAILLAGGAGERLYPLTRDIAKPAVPFGGAYRIIDFTLSNCINSDVRRILILTQYKSLELVRHIRDGWNILSPEMGEYVEVLPPMKRVHSDWYQGTADAVFQNFQSIEAESPEVTLILSADHIYKMNYREMIDWHRRHGADITLATLQAPPEEAPRFGVLEIDADYRVTGFEEKPQHGNPKRSQFDPNMVSVSMGVYVFNTEVLLRLLHEDAQDPNSSHDFGKDIIPRHLESTRVVAYDFRDINAKQSRYWRDVGTLDAFYEANMDLVSVTPEFNLYDQRWPIRTKATQQPPAKFVFAQEGRRMGLAVDSIVSAGCIVSGGRVLHCVLSPGVRVNSYCEVEYSILMPNVEVGRYSRIRRAIVSTGAKIPESSSIGFDVETDRANGYQVTEGGVTVVGNFEEGRTKALPYLA

SEQ ID NO: 22260 - protein, 183 aa, Salmonella enterica subsp. enterica serovar Typhi Ty2
MQNSLLNTHVTTIDGEVTTLEKYAGKVLLIVNVASRCGLTPQYEQLENIQKAWADQGFVVLGFPCNQFMGQEPGSEEEIKTYCASTWGVTFPMFSKIDVNGDARHPLYQKLIAAAPTAVAPEKSGFYERMVSKGRTPLYPDDILWNFEKFLVGRDGQVVQRFSPDMTPEDPIVMESIKIALAK

SEQ ID NO: 22261 - protein, 248 aa, Solibacter usitatus Ellin6076
MKKLVLIRHGESTWNKENRFTGWTDVDLSDEGRQQATEAAEVLKREGYVFDVAYTSVLKRAIRTLWTVLDGMDLMWIPVHRSWRLNERHYGALQGLNKAETAAKFGEDQVKIWRRSYDIPPPVLTADDPRFPGHDPRYQSLTKEELPLTECLKDTVARFLPLWHDTIAPAIRSGQRVIIAAHGNSLRALVKYLDGVSEADIVELNIPTGMPLVYELDDDLKPLNRYYLGDPEKVKAAMEAVAAQGKKK

SEQ ID NO: 22262 - protein, 339 aa, Triticum aestivum
  misc_feature (222)..(222): Xaa can be any naturally occurring amino acid
  misc_feature (239)..(239): Xaa can be any naturally occurring amino acid
  unsure (1)..(339): unsure at all Xaa locations
NKFVQKSRLVPVRNSRDIVDPRVRFITGGELFDKIIRHGRLSEADARKYFQQLIDGVDFCHSKGVYHRDLKPENLLLDSQGNLKISDFGLSAWPAQGAALLRTTCGTPNYVAPEIESAEYSFPAVFPSGAKSLIRRILDPSPDTRIRIEEIRKDEWFKKNYEPVRELENEEVNLDDVNAAFDDPEEDNQHTFDDEAGPLTLNAFDLIILSQGLTLSPLFDRXGQDFAKLQNRFLSRKPXANVILSSMEVVAQSMGFKTHIRNYKMRVEGPNANKTSHLTIMLQIFEVAPSIFMVELERSAGETSEYNKFVNNYCSKLDDIIWKVSAEKGKSRTSRLSKR

SEQ ID NO: 22263 - protein, 460 aa, Guillardia theta
MFFNLLIDSKFTISNNSIPFFFGNNSKHRCIHKNLVIYKKNIHISLLKIETKQLDEELTYMTSKKNFHELTEGEMFEVIKSFGIQGSASIENTEEDDFYQNNGLSKNIQKADDSVRWYLQLIGRVRLLRPDEEIQLAREISQLLHWEHVKISLRDKLRREPTNSEWTAACKVSDVRKFRSILHNARRAKERMVAANLRLVVSIAKRYVNRGMSLQDLIQEGSLGLIRAAEKFDSEKGFKFSTYATWWVKQAVTRAIADHSRTIRLPVHLYDTISAIRKTTRNLNIEIGRSPTEEEIAKRMDMSVEKLRNVLQSAQPTLSLERPLKNDDDTSQLSDFIEADQESPEEHVEKSMLRDDLENVINSLSPRERDVVRMRYGLDDGRIKTLEEIGQIFSVTRERVRQIEAKAIRKLRQPYRSSILRDYVASNSNEKSSAINTSYMTNSKQIIKGINNTRVLKKKF

SEQ ID NO: 22264 - protein, 163 aa, Brassica napus
  misc_feature (160)..(160): Xaa can be any naturally occurring amino acid
  unsure (1)..(163): unsure at all Xaa locations
VNGNVTETGHIIVTTIGGRNGQPKQTISYMAERVVGHGSFGVVFQAKCLETGETVAIKKVLQDRRYKNRELQTMRLLDHPNVVSLKHCFFSTTEKDELYLNLVLEYVPETVHRVIKHYNKLNQRMPIVYVKLYTYQIFRSLAYIHRCIGVCHRDIKPQNXKVA

SEQ ID NO: 22265 - protein, 433 aa, Lophopyrum elongatum
MQCFRFASWEKEREEELQGPARSQSALSNSSMSTDRDARRSGSECCSLTVSSEISVDSFGRYRQLSLPHRPNNDLRIFTFQELKSATRSFSRALMIGEGGFGCVYRGTIQSTLEPRRSLDVAIKQLGRKGLQGHKEWVTEVNFLGVVDHPNLVKLIGYCAEDDERGIQLLLVYEFMPHGSLADHLSTRSPKPASWAMRLRVALDTARGLKYLHEDSEFKIIFRDLKPSNILLDENWNAKLSDFGLARLGPQEGSHVSTAVVGTIGYAAPEYIHTGRLSSKNDIWSYGVVLYELLTGRRPLDRNRPRGEQNLVEWVKPYSSDTKKFETIMDPRLEGNYNLKSAARIASLANKCLVRHARYRPKMSEVLEMVQKIVDSSDLGTPERPLISHSKKLASDEKKRKGLNLKRRIADIKAGDGRWFRWHKWTPKLVRTQ

SEQ ID NO: 22266 - protein, 175 aa, uncultured archaeon GZfos26F9
MGKKPARKYTKVTGHAYVRRTYMGGVPGSKIALFDMGNLSMGMDFPVALSLVAKEACQIRHNALEAARIFANRYLVKEVGRNNFYLKIRPYPHHVLRENKIASGAGADRVSSGMRHAFGKAVSSAARVKPGQRILSVGVEAQNFDDAKEALRRASYKLPTPCRFIIDKGEELLGV

SEQ ID NO: 22267 - protein, 323 aa, Candida albicans SC5314
MIYYILAFFIFISLSIYATVIFFSHKPRKPFPSELTYKTNDSTDKSHPLPPRINTNSKFQDDGIDISLVIPCYNETQRLGKMLDEAIEYLEKNHQSKYEIIVVDDGSSDGTDEYALQKANEFKLPSHIMRVVQLKQNRGKGGAVTHGLLHSRGKYALFADADGATSFPDVAKLVNYLANANGQPSIAIGSRAHMVNTDAVVKRSFIRNFLMYGLHALVFVFGIRDVRDTQCGFKMFNFEAVKNIFPHMHTERWIFDVEVLLLGEIQKFNMKELPVNWQEIDGSKVDLARDSIAMAIDLVVTRLAYLLGVYKLDECGRINKKEQ

SEQ ID NO: 22268 - protein, 640 aa, ASPERGILLUS NIDULANS FGSC A4
MAGYHLPVDLKQFKKLQLDPNSKKLSDQQKKDLLHNIGIFRDAIVAFTATGAARGQAGHTGGPFDTAPEVCILLGFINANPDAFYDAIFDEAGHRVATQYLLAAIDGKIEPDHLLNYRDANSKLPGHPELGLTPGVKFSSGRLGHMWPLVNGIAMAHKDKKVFMLGSDGSQQEGNDAEAARIAVANNLNVKLFLDNNDVTIAGHPSVYQKGYELERTLTGHGMKVVRAQGEDIDSLYNAMVEVVSTDGPAAVVVDRKMAPGIEGIEGQTKAHDVVPVDIARKYLTKRGYSQESLAFYDQIKATSNTHQYLGSTKEKGGNRVIFGEAVNSVLDGLSKEEAARRVMVIDSDLEGSTGLKAIHQAHPEVYVSSGVMERGNFSAAAGFGFGSDGSRQGVFSTFCAFIEMLISEITMARLNGCSVLSHFSHSGVDEIADNTCHFGLNAFFADNGLMDAENTGLYFPADGEQMKAVVKKVFFTKGLRFIFSTRSKVPYILKENSDEKLFGGSYEFQPGKEEFIRKGKAGYVVSYGDMLYRSLDAVERLRKEGLDVGLINKPTLNVVDEDAIKEYGSSPFVVVVESLAQKTSLGSRLGSHLLDRGLTPKFRMMGAVKEGCGGLFEQINAQGMGPDDIVRVVKEVAQK

SEQ ID NO: 22269 - protein, 339 aa, Guillardia theta
MPTKIGINGFGRIGRLVTRAAFSNKKADCQVVAVNDPFIDLDYMVYMFKYDSTHGIWKGSCEKKGDKLVIDGCEITCFTERDPTAIKWAAAGAIYVVESTGVFTTIDKAQAHLSGGAKKVVISAPSADAPMFVMGVNNKAYDGTPTIVSNASCTTNCLAPLAKVVERNFGIVEGLMSTVHATTATQKTVDGPSGKDWRGGRGAAQNIIPSATGAAKAVGKVLPELNGKLTGMAFRVPTPDVSVVDLTVKLAKPASYQQICDAIKAATTDPEYCGVIAYTDDEVVSTDFLGNSYSSIFDAKAGIALNDTFVKLVSWYDNEWGYSNRVVDLIAHMATVDKF

SEQ ID NO: 22270 - protein, 339 aa, Pyrenomonas salina
MSIPIGINGFGRIGRLVTRAAFTNEGANCKVVAVNDPFIDLDYMVYMFKYDSTHGIWKGQVEKKGDKLVINGTEVTCFTERDPTAIKWGDAGAKYVVESTGVFTTIEKASAHVAGGAKKVVISAPSADAPMFVMGVNNKTYDGTPQIVSNASCTTNCLAPLAKVIDTNFGIVEGLMSTIHAITATQKTVDGPSGKDWRGGRGAAQNIIPASTGAAKAVGKVLPQLNGKLTGMSFRVPTPDVSVVDLTCKLAKPASYQAICDAVKKAESDPEYCGVIQYCDEEVVSTDFQGNSKSSIFDAKAGIALNETFVKLVSWYDNEWGYSNRVVDLIAHMQTVDKL

SEQ ID NO: 22271 - protein, 336 aa, Triticum aestivum
PRTRGAAFNKATADLLLGADNPVIKQGRVATLQSLSGTGSLRLAAAFIQRYFPDAKVLISSPTWGNHKNIFNDARVPWSEYRYYDPRTVGLDFEGMIADIQAAPEGSFVLLHGCAHNPTGIDPTPEQWEKLADVIEEKKHMPFFDVAYQGFASGSLDEDASSVRLFVKRGLEVFVAQSYSKNLGLYAERIGAINVICSAPEVADRVKSQLKRLARPMYSNPPIHGAKIVANVVGDPTMFGEWKEEMEQMAGRIKNVRQKLYDSLTAKDQSGKDWSFILSQIGMFSFTGLNRPQSDNMTDKWHIYMTKDGRISLAGLNLAKCEYLADAIIDSFHNVN

SEQ ID NO: 22272 - protein, 136 aa, Guillardia theta
MARTKQTARKTVGGDINSRISEKRAKSDNSKNIDLKKVHRYKPGTVALREIRKYQKSTNLLIRKLPFQRLVRELAQDYKSDLRFQNSAVLALQEASESYLVNLFEDTNLCAIHAKRVTIMPKDIYLARRIRGEMIF

SEQ ID NO: 22273 - protein, 660 aa, Glycine max
MKAFSVKVEEGREGKNGNLSVGPVYRNLLSENEFPPMDPDFSTTWDIFCVSVKNHPNNRMLGKRKIVDEKIGPYVWKTYKEVYDEVLHMSSALRASGAEPGTKIGIYGSNCPEWIVAMEACSAQSFVCVPLYDTLGPGAVNFIIDHAEVDFVFVQDKKVKELLNPECKSSKRLKAMVCFTSLTEEEKAKATAIGIKPYSWHDFLHLGKENPKSTFPPQAHDICTIMYTSGTSGDPKGVVLTNENVTALVRGMDLFMEQFEDKMTVDDVYLSFLPLAHILDRTIEEYFFRKGASVGYYHGDLNALRDDLMELKPTLFAGVPRVFEKVYEGIKKAVEELNPVRRTVFGMLYNYKLGWMKKGYKHRQASRLADLLAFRKVKARLGGRVRLIISGGAALSPEVEEFLRVTTCAFVCQGYGLTETCGPTTLGFPDEMCMLGTVGAVSIYNEIMLEEVPEMGYNPLETPPCGEICVRGKTVFTGYYKNPELTKEAIKDGWFHTGDIGEMLPNGVIKIIDRKKNLVKLSQGEYIALEHLENVYGVTPIVEDIWVYGNSFKSMLVAVVVPNEEVANKWAYSNGHIASFPILCSLDQLKKYVLSELKLTAERNKLRGFEHIKGVILEPQEFDMERDLVTATLKKKRNKLLKYYQVEIDELYQSLKGKKA

SEQ ID NO: 22274 - protein, 175 aa, Triticum aestivum
MAPAVMASSATSVAPFQGLKSTAGLPVSRRSSSAGLSSVSNGGRIRCMQVWPIEGIKKFETLSYLPPLSTEALLKQVDYLIRSKWVPCLEFSKVGFVFREHNSSPGYYDGRYWTMWKLPMFGCTDATQVLNEVEEVKKEYPDAYVRVIGFDNLRQVQCVSFIAFRPPGCEESGKA

SEQ ID NO: 22275 - protein, 344 aa, Saccharomyces cerevisiae
MSNTVLVSGASGFIALHILSQLLKQDYKVIGTVRSHEKEAKLLRQFQHNPNLTLEIVPDISHPNAFDKVLQKRGREIRYVLHTASPFHYDTTEYEKDLLIPALEGTKNILNSIKKYAADTVERVVVTSSCTAIITLAKMDDPSVVFTEESWNEATWESCQIDGINAYFASKKFAEKAAWEFTKENEDHIKFKLTTVNPSLLFGPQLFDEDVHGHLNTSCEMINGLIHTPVNASVPDFHSIFIDVRDVALAHLYAFQKENTAGKRLVVTNGKFGNQDILDILNEDFPQLRGLIPLGKPGTGDQVIDRGSTTDNSATRKILGFEFRSLHESVHDTAAQILKKENRL

SEQ ID NO: 22276 - protein, 397 aa, Solibacter usitatus Ellin6076
IQMGGVGGVGNLGGAPPLNTEHVITLFGKGFGLYGQHGMFLTQGGTYDVAVMVIFLFQMVFMDTALTIVTGSAAERWKFAAFLVSSFMLGAFIYPLFGNWAWGGGWLATLGTNFGLGKGYCDFAGSGVVHAVGGLTALALSIIVGPRLGKYNRNGKPNAIVGHDIVLVLTGCFILAFGWFGFNPGSTLGASGSGSLRIGSIAVNTMLAGMAGGFGAMFYMWMRYGKPDASMSGNGLLAGLVAITAPSGFVNTVGAVIIGLIAGVLVCLSVEFIDRVMRVDDPVGAISVHGVNGIWGVIAVGLFADGKSNYGGSWNGVNGSVTGLFYGDPSQLVAQLIGVSTLVGGVFVLSFVVNLAIDAVVGQRVSAKAELEGLDLPEMGQVGYPEFELKARTVGVQ

SEQ ID NO: 22277 - protein, 509 aa, Arabidopsis thaliana
MSSTKTIMETIYLILSLFFFFIFLSLKLLFGPRPRKLNLPPSPSRPFPIIGHLHLLKLPLHRRFLSLSESLNNAKIFSLSLGSRLVFVVSSHAVAEECFTKNDVVLANRPEFLVGKHIGYNSTTMVGAAYGDSWRNLRRIGTIEIFSSLRLNSFVSIRQDEIRRLIICLAKNSQHGFVKVEMKPLFMCLTINNIIRMVAGKRFYGDGTENDNEAKHVRQLIAEVVVSGGAGNAADYFPILRYVTNYEKHVKKLAGRVDEFLQSLVNEKRVEKVKGNTMIDHLLSLQETQPDYYTDVIIKGIILVMILAGTDTSAGTLEWAMSNLLNHPEVLRKAKTEIDDQIGVDRLVEEQDIVKLPYLQHIVSETLRLYPVAPMLLPHLASEDCIVDGYDVPRGTIILVNAWAIHRDPKLWEEPEKFKPERFEKKGEDKKLMPFGIGRRSCPGSGLAQRLVTLALGSLVQCFEWERVEEKYLDMRESEKGTTMRKATSLQAMCKARPIVHKVLDASCP

SEQ ID NO: 22278 - protein, 104 aa, Zea mays
MVSSLLMSFAPATVRVYATTKGTSGGAKEEKNPLDFVLGYLTKQDQFYETDPILKKVEEKGGTRSGTTGGRGTVRGGKSSAPVPVAPKKNDGGFAGLGGFFNKK

SEQ ID NO: 22279 - protein, 134 aa, Brassica napus
MGFEDQEEQKQSPKQSQSQMVFKFHFYVPHLHIHHHHNHHHVPKGCVAIMVGHEGDEEGLHRFVVPLMFLSHPLFLSLLKEAEQEYGFKHAGPITIPCRVDEFKHVQEIIDEETHRRHSHGHNYHHHHNHLPCM

SEQ ID NO: 22280 - protein, 481 aa, Thermosynechococcus elongatus BP-1
MKAMSKLKLKRARRQKRPLLNLDWQPNFRWRSPALVACIPLALIIVAVWGVAAQAQDKPLTPEDVQGVLNTIWVLVAAILVIFMNAGFGMLETGFCRQKNAVNILAKNLIVFALATLAYWAIGYSFMFGTEGNAFIGWGGFFLSSEDPATYGLNPFPKGLPISVAFLFQAAFAGTAATIVSGAVAERIKFVDFLIFSLLLTGISYPITGHWVWGGGLLSSIGFLGENVAFKDFAGSTVVHAVGGWSALMGAAFLGPRIGKYAADGTPQALPGHNMGFAMLGCLILWIGWFGFNPGSQLAADEAVPYIAVTTNLAAAAGGVAATITAWLAIGKPDLSMIINGILAGLVSITAGCAGVSYWSAVIIGTIGGVIVVYSVLFFDRIKIDDPVGATSVHLVCGTWGTLAVGLFDKELGLFSGYGVTQLIAQIIGILTIGGFTVLLTSIFWLALKQTLGIRVSEEEEIKGLDIGEHGMEAYSGFLKE

SEQ ID NO: 22281 - protein, 333 aa, Bacillus clausii KSM-K16
MTNKKHETLGLSDAEVVEMYKTMLLARRIDERMWLLNRAGKIPFVISCQGQEAAQVGAAFALNRDVDYVLPYYRDMGVVLAFGMSARDLMLSGFAKAEDPSSGGRQMPGHFGQKKNRIVTGSSPVTTQVPHAVGISLAGRLEGKNFVTLTTFGEGSSNQGDFHEGANFAGVHKLPVIFMCENNKYAISVPIEKQLACEHVADRAVGYGMPGVTVDGNDPLAVYEAVKTAADRARRGEGPSLIETVSYRLTPHSSDDDDRAYRSREEVAKAKEKDPLATFATYLLESGTIDATGMETLEEEVKQIVDEATDYAEKAAYAAPETAYLHVYSEEAN

SEQ ID NO: 22282 - protein, 257 aa, Streptomyces virginiae
MTDRQGLLTDRIALITGASSGIGAAQRGLFAREGAAVVVTARREERLAGLVDELRAQGARAAYVVADVTRSEDAVRAVEFTVERFGRLDAAFNKRRHGAGRTPLHLMDDPVYDDIMDTNVRGVFNCLRPEIAAMLASGAGGSIVNTSSTGGLVATPVAAPYVVSKHAVLGLTKGPAAEYGAHGIRVNAIAPGTTRSEMVADWFAQNPDAEELLHRATPQPRTAEPQEIAEAAAWLCSERASFVTGSTLVVDGGFTIL

SEQ ID NO: 22283 - protein, 398 aa, Pneumocystis carinii
MQSEAYQTNLQCSGETSHKLGIKEAKSTSKTSLIDQIPILTLSIPSRRSIPHIFDATRITDNSDNSHNENQDFKGILEENGSPDPFSYNRSYFTKIMLDEVWQRSAHSDEIIELEKLGEGISGSVSKCILKNTGTLFALKTILVDTNPEIQQQILRELSINRTCSSEYIVQYYGTFVDEASSNISMAMEYCAGGSLDRLYKKVRANGARIGEYPILKIAENALKGLNYLHTRKIIHRDIKPSNILMTLEGQAKLCDFGVSGELVSSMAKTFTGTSYYMAPERIKGETYSITSDIWSLGLTLMEISQNRFPFPPEGPPLVPIELLNYIVNISNFELVDEPDNKIKWSEDFKHFLKTCLERDGAKRPNSQRMLEHPWVMKHSIIKIDMAKWIKQILELPL

SEQ ID NO: 22284 - protein, 473 aa, Bacillus clausii KSM-K16
MAENYDLVIVGGGIGGYVSAIRAAQEGLKTALVEQALLGGTCLHKGCIPSKALLRSAEVLRTAKEASVFGVATGPVAFDFAGAQKRKQEIVDRLAQGVKALMSKGKIDVYEGRGRMLGPSIFSPSPGTISVDLANGDNQMLIGKNVILATGSVPRPLPHTPFDGKQILSSDDVLQLKELPASMVIVGGGVIGIEWASMLVDFGVSVTVVEASETILPTADQAVAAEMEKQLKARGVVFYTNAQLDEQTVATTSSGIKATVHQNQEEHTIEADKMLVAIGRVANVSDIGIDNTDIALAHGCIAVNEYGQTKESHIYAVGDCVGGLQLAHVAAHEGIAAVSHIIGKQVEPVDPLAVPSCVYSFPEAAQVGMTETQAREAGHAVKIGTFPFAMNGKALIHGEAGGFVKLIADKDTSDLLGVHIIGTHATDLISEAALAKFLDAADFELAETVHPHPTLAEAIGEAALAVDGYAIHK

SEQ ID NO: 22285 - protein, 365 aa, Bacillus clausii KSM-K16
MELFAKMVERDYEQVVVCQDKTSGLKAIIAIHDTTLGPALGGTRMWKYATEEEAIEDVLRLARGMTYKNAAAGLNLGGGKAVIIGDPRSDKNEEMFRAFGRYIQGLNGRYITAEDVGTTVEDMDMIHQETDYVTGISPAFGASGNPSPVTAYGVYVGMKAAAKEGFGSEDLAGKTIAVQGVGNVAYNLCKYLHKDGAELIVTDIHKPSVERAVADFGATAVDPTEIYSIKCDIFAPCALGGVINDDSLAKLKASVIAGAANNQLKEEKHGVRLQEMGIVYAPDYVINAGGVINVADELNGYNRDRAFKKVEGIYDNVARVFEIAKEENIPTFQAADRMAEQRIERVRYARGTFLQNEHHILSRKK

SEQ ID NO: 22286 - protein, 417 aa, Malus micromalus
MAAKESNSAAAAASSDGKIKRMLTHGGRYAQYNVFGNLFEVSSKYVPPIRPIGRGAYGIVCAAVNAEAREEVAIKKIGNAFDNRIDAKRTLREIKLLRHMDHENVIATKDIIRPPQKENFNDVYIVYELMDTDLHQIIRSNQPLNDDHCRYFLYQLLRGLKYVHSAGVLHRDLKPSNLFMNANCDLKIGDFGLARTTSETDFMTEYVVTRWYRAPELLLNCSEYTAAIDIWSVCCILGEIMTRKPLFPGKDYVHQLRLITELLGSPDDSSLGFLRSDNARRYVRELPQYPKRSFSLGFPNMSPSSIDLLEKMLIFDPNRRITVDEALSHPYLAPLHDINEEPVCPMPFNFDFEQPSFTEENIKELIWRESVRFNPESHFSMDHDIICCILLQTNLKTDCNDMFVDTVIVECVKGVDS

SEQ ID NO: 22287 - protein, 318 aa, Bradyrhizobium sp. BTAi1
MPSQADHWAHDHVFLGAQHERNERRTWFVVGLTLVMMAGEIAAGSLFGSMALLADGWHMGTHAAALGIAGLAYLFARRHARNSSFSFGTGKFGELAAFSSAIILLIIALQVAYESVIRLLRPEPIAYGEAIAVAILGLLINLLSAWLLADSHPHHHGHHHHAEHHHDHGDREHHHHHHDNNLRAAYLHVLADAATSLLAIAALLIGMYLGWAWADAAVGVVGSAVIASWAYGLIRDAGAVLLDVNADRRLEATIRARLEAGGDRVTDLHLWQVGPGHRAVVVSIVSKTPLAPAIYKKRLTDLHGLSHVTVEVEHGLHV

SEQ ID NO: 22288 - protein, 465 aa, Silicibacter sp. TM1040
MTTITNHLPTAELQALDAAHHMHPFTANGGLAQKGARIITRAKGVTLTDSEGHEILDAMAGLWCVNIGYGRDELAEVAARQMRELPYYNTFFQTTHVPVIALAAKIAELAPDNLNNVFFAGSGSEANDTNIRMVRHYWAMKGKPTKSVIISRKNAYHGSSVGSGSLGGMSAMHAQGGLPIPDIHHINQPNWWAEGGNTDPEDFGLQRAQELEKAILELGEDRVAAFIAEPVQGAGGVIVPPASYWPEIQRICDKYEILLIADEVICGFGRTGNWFGSETMGIRPDIMTIAKGLSSGYAPIGGSIVSDEVAAVIAQDEFNHGYTYSGHPVAAAVALENLRILEEENVLDHVRNVAAPYLKEKWEALTAHPLVGEAKIVGMMGSIALTPNKATRAAFEAEAGTVGFICRERCFANNLVMRHVGDRMIISPPLVITPEEIDTLIARATKSLDECYTELQAQGLLKSAA

SEQ ID NO: 22289 - protein, 251 aa, Thermococcus kodakarensis KOD1
MFEKGSLIPYLTAGDPSVEKTLEFLLAVEEFAGLIELGIPFSDPMADGKTIQESHYRALRNGFKLDDTFRILREFRRHSSTPVILMTYYNPVFRTGVKKFLGEAKASGADGILVVDLPVSHAGEFLDAAKEEGLKTVFLAAPNTPDERLREIDKASTGFVYLISLYGTTGARDRLPETAFEFVRRARKICNNKLAVGFGVSRREQVEELLKAGADGVVVGSALIELISRSENPVEELRRKVAELSGYSRAL

SEQ ID NO: 22290 - protein, 220 aa, Triticum aestivum
  misc_feature (167)..(167): Xaa can be any naturally occurring amino acid
  unsure (1)..(220): unsure at all Xaa locations
MGRPPCCDKEGVKKGPWTPEEDLVLVSYVQEHGPGNWRAVPTRTGLMRCSKSCRLRWTNYLRPGIKRGNFTDQEEKLIVHLQALLGNRWAAIASYLPERTDNDIKNYWNTHLKRKLQAGGDAAAKPAAQRPASSSKGQWERRLQTDINMARRALREALTTLDDIKPXSLSQCSPSAAGPYVLTTGNISRMLDGWASKGRSAGAAADSPSGSSASEGSYGS

SEQ ID NO: 22291 - protein, 361 aa, Exiguobacterium sp. 255-15
MAEKARSEAEILRLAKDELIALGHKNGELSHQKIEDKLSSFESMDAQQFEEFLQLLETEGIKVNNDGTGDDKEEADLNDLSVPPGVKINDPVRMYLKEIGRVDLLNAEDEVELAKRIEQNDEEAKKRLAEANLRLVVSIAKRYVGRGMLFLDLIQEGNMGLIKAVEKFDYTKGYKFSTYATWWIRQAITRAIADQARTIRIPVHMVETINKLIRVQRQLLQDLGREPTPEEISKEMEITPEKVREILKIAQEPVSLETPIGEEDDSHLGDFIEDQDATAPQDAAAYELLKEQLEDVLDTLTDREENVLRLRFGLDDGRTRTLEEVGKVFGVTRERIRQIEAKALRKLRHPSRSKRLKDFLD

SEQ ID NO: 22292 - protein, 493 aa, Mannheimia succiniciproducens MBEL55E
MSNYFNTLNLRQKLDQLGRCRFMERSEFADGCNFLKGKKIVIVGCGAQGLNQGLNMRDSGLDISYALRPEAITEKRASFQRATENGFKVGTYQELIPTADLVVNLTPDKQHSKVVADVMPLMKQGASFGYSHGFNIVEVGEQIREDITVVMVAPKCPGTEVREEYKRGFGVPTLIAVHPANDPKGEGMAIAKAWASATGGDRAGVLESSFVAEVKSDLMGEQTILCGMLQAGSIVCYDKLVADGKDPAYAGKLIQYGWETITEALKQGGITLMMDRLSNSAKIRAFELAEEIKEHLNFLYLKHMDDIISGEFSATMMADWANGDKDLFAWREATGKTAFENAPKADGIKISEQEYFDNGVVMVAMVKAGVEMAFDAMVASGIYEESAYYESLHELPLIANTIARKRLYEMNVVISDTAEYGNYLFSNVATPILAKEIVSQLKRGDLGEPTPAAEIDNVYLRDINDTIRNHPVELIGQELRGYMTDMKRISSQG

SEQ ID NO: 22293 - protein, 464 aa, Vibrio vulnificus YJ016
MNRVINRSKIFLTAVERGTMPATWSEQSEEDKPMTKSAELYQKAQQTIPGGVNSPVRAFNGVGGSPIFVERADGAFIFDADGKAYIDYVGSWGPMILGHNHAVIREAVIEAAQRGLSFGAPTEMEIKMAELVSELVPSMEQLRMVSSGTEATMSAIRLARGFTGRDKILKFEGCYHGHADSLLVKAGSGALTLGQPSSPGVPADFAKHTLTATFNDLDSVRELFAANKGEIACIIVEPVAGNMNCIPPVEGFHEGLREICDQEGALLIFDEVMTGFRVALGGAQAHYNIKPDLTTLGKVIGGGMPVGAFGGRKEVMQYIAPTGPVYQAGTLSGNPVAMAAGYACLTLLREEGNEKRLASKTKHLADGFKSLAAQHGIPLVVNQVGGMFGFFFTEQEQITCYEDVTKCDLERFKRFFHLMIDHGVYLAPSAFEASFTSLAHGSKEIEATLEAADRCFAILAAESK

SEQ ID NO: 22294 - protein, 318 aa, Triticum aestivum
  misc_feature (151)..(151): Xaa can be any naturally occurring amino acid
  misc_feature (157)..(157): Xaa can be any naturally occurring amino acid
  misc_feature (212)..(212): Xaa can be any naturally occurring amino acid
  misc_feature (268)..(268): Xaa can be any naturally occurring amino acid
  misc_feature (279)..(279): Xaa can be any naturally occurring amino acid
  misc_feature (289)..(289): Xaa can be any naturally occurring amino acid
  misc_feature (308)..(308): Xaa can be any naturally occurring amino acid
  misc_feature (313)..(313): Xaa can be any naturally occurring amino acid
  unsure (1)..(318): unsure at all Xaa locations
MCGILAVLGCADDTQGKRVRVLELSRRLKHRGPDWSGMHQVGDCYLSHQRLAIIDPASGDQPLYNEDKSIVVTVNGEIYNHEKLRAQLSSHTFRTGSDCEVIAHLYEELGRLHRLLMGFSSLVIHATQFLCRDAGSTPLWIAVEAKPLYIXWGIDGXSVGISSEVKGLNDDCGHFEIFPPGHLFSQQAGKASRDGDPPTLGSPEVIPSGAYXPTCSQEGFRKGLSPRGLMTDLPCGVLPSGGPGSSLVAAVTVRHLAGTKAAKRWGTXLHSFCVGLEGXPDLKAAKEVXNYLGTMPMSSPSCSDGIDXIEDVXYHPNI

SEQ ID NO: 22295 - protein, 135 aa, Fusobacterium nucleatum subsp. vincentii ATCC 49256
MKILLVSGFLGAGKTTFIKEMAKNINLEFVVLENEYADIGVDGDFLDEKNLNIWEMSEGCICCSMKGDFKSSIKRIYSEINPEYLIIEPTGVGMLSSIIENIREIDNNDIEILSPITLIDITSFNEYLEAFNNFM

SEQ ID NO: 22296 - protein, 750 aa, Chlamydomonas reinhardtii
MAGVPAPASQLTKVLAGLRHTFVVADATLPDCPLVYASEGFYAMTGYGPDEVLGHNCRFLQGEGTDPKEVQKIRDAIKKGEACSVRLLNYRKDGTPFWNLLTVTPIKTPDGRVSKFVGVQVDVTSKTEGKALADNSGVPLLVKYDHRLRDNVARTIVDDVTIAVEKAEGVEPGQASAVAAAAPLGAKGPRGTAPKSFPRVALDLATTVERIQQNFCISDPTLPDCPIVFASDAFLELTGYSREEVLGRNCRFLQGAGTDRGTVDQIRAAIKEGSELTVRILNYTKAGKAFWNMFTLAPMRDQDGHARFFVGVQVDVTAQSTSPDKAPVWNKTPEEEVAKAKMGAEAASLISSALQGMAAPTTANPWAAISGVIMRRKPHKADDKAYQALLQLQERDGKMKLMHFRRVKQLGAGDVGLVDLVQLQGSELKFAMKTLDKFEMQERNKVARVLTESAILAAVDHPFLATLYCTIQTDTHLHFVMEYCEGGELYGLLNSQPKKRLKEEHVRFYASEVLTALQYLHLLGYVYRDLKPENILLHHTGHVLLTDFDLSYSKGSTTPRIEKIGGAGAAGGSAPKSPKKSSSKSGGSSSGSALQLENYLLLAEPSARANSFVGTEEYLAPEVINAAGHGPAAVDWWSLGILIFELLYGTTPFRGARRDETFENIIKSPLKFPSKPAVSEECRDLIEKLLVKDVGARLGSRTGANEIKSHPWFKGINWALLRHQQPPYVPRRASKAAGGSSTGGAAFDNY

SEQ ID NO: 22297 - protein, 224 aa, Magnetospirillum magnetotacticum MS-1
MNSIFDAIFGSSGKTTMIAPEDALPGRQSPVLQAPRPHTVLGTSITGPWPEGTRVLYLAMGCFWGAEEIFWQVPGVVSTAVGYMGGTTPNPTYEEACTARTGHTETALVAYDPTKVSEEELLKIFWERHDPTQGYRQGNDVGTQYRSAVYWTTPEQGQAVRETAARYSAVLEAKGYDPVTTEMRPAAEAGPFYYAEDYHQQYLDKNPNGYRCHATTGVPFPSAA

SEQ ID NO: 22298 - protein, 203 aa, Poa pratensis
MNPEYDYLFKLLLIGDSGVGKSCLLLRFADDSYLESYISTIGVDFKIRTVEQDGKTMKLQIWDTAGQERFRTITSSYYRGAHGIIIVYDVTDQDSFNNVKQWLNEIDRYASDNVNKLLVGNKCDLTDKKVVSYETAKAFADEIGIPFMETSAKNALNVEQAFMAMSASIKDRMASQPAANNARPATVQIRGQPVEQKTSCCSS

SEQ ID NO: 22299 - protein, 203 aa, Poa pratensis
MNPEYDYLFKLLLIGDSGVGKSCLLLRFADDSYLESYISTIGVDFKIRTVEQDGKTMKLQIWDTAGQERFRTITSSYYRGAHGIIIVYDVTDQDSFNNVKQWLNEIDRYASDNVNKLLVGNKCDLTDKKVVSYETAKAFADEIGIPFMETSLKNALNVGQAFMAMSASIKDRMASQPAANNARPATVQIRGQPVEQKGSCCSS

SEQ ID NO: 22300 - protein, 428 aa, Staphylococcus aureus subsp. aureus Mu50
MRYTKSEEAMKVAETLMPGGVNSPVRAFKSVDTPAIFMDHGKGSKIYDIDGNEYIDYVLSWGPLILGHRDPQVISHLHEAIDKGTSFGASTLLENKLAQLVIDRVPSIEKVRMVSSGTEATLDTLRLARGYTGRNKIVKFEGCYHGHSDSLLIKAGSGVATLGLPDSPGVPEGIAKNTITVPYNDLDALKIAFEKFGDDIAGVIVEPVAGNMGVVPPIEGFLQGLRDITTEYGALLIFDEVMTGFRVGYHCAQGYFGVTPDLTCLGKVIGGGLPVGAFGGKKEIMDHIAPLGNIYQAGTLSGNPLAMTSGYETLSQLTPETYEYFNMLGDILEDGLKRVFAKHNVPITVNRAGSMIGYFLNEGPVTNFEQANKSDLKLFAEMYREMAKEGVFLPPSQFEGTFLSTAHTKEDIEKTIQAFDTALSRIVK

SEQ ID NO: 22301 - protein, 105 aa, Solibacter usitatus Ellin6076
MTSLKRENELVLKADLPDVDLKDIDVRVENQTLTIEGERKFEQTSNAKGYHRMERSYGRFVRSFAVPNTFDTEKINAAYKNGLLTVTLVKKEAAKPRQIKVEAAG

SEQ ID NO: 22302 - protein, 749 aa, Chlamydomonas reinhardtii
MAGVPAPASQLTKVLAGLRHTFVVADATLPDCPLVYASEGFYAMTGYGPDEVLGHNCRFLQGEGTDPKEVQKIRDAIKKGEACSVRLLNYRKDGTPFWNLLTVTPIKTPDGRVSKFVGVQVDVTSKTEGKALADNSGVPLLVKYDHRLRDNVARTIVDDVTIAVEKAEGVEPGQASAVAAAAPLGAKGPRGTAPKSFPRVALDLATTVERIQQNFCISDPTLPDCPIVFASDAFLELTGYSREEVLGRNCRFLQGAGTDRGTVDQIRAAIKEGSELTVRILNYTKAGKAFWNMFTLAPMRDQDGHARFFVGVQVDVTAQSTSPDKAPVWNKTPEEEVAKAKMGAEAASLISSALQGMAAPTTANPWAAISGVIMRRKPHKADDKAYQALLQLQERDGKMKLMHFRRVKQLGAGDVGLVDLVQLQGSELKFAMKTLDKFEMQERNKVARVLTESAILAAVDHPFLATLYCTIQTDTHLHFVMEYCDGGELYGLLNSQPKKRLKEEHVRFYASEVLTALQYLHLLGYVYRDLKPENILLHHTGHVLLTDFDLSYSKGSTTPRIEKIGGAGAAGGSAPKSPKKSSSKSGGSSSGSALQLENYLLLAEPSARANSFVGTEEYLAPEVINAAGHGPAVDWWSLGILIFELLYGTTPFRGARRDETFENIIKSPLKFPSKPAVSEECRDLIEKLLVKDVGARLGSRTGANEIKSHPWFKGINWALLRHQQPPYVPRRASKAAGGSSTGGAAFDNY

SEQ ID NO: 22303 - protein, 141 aa, Musa acuminata
MNGAIKVGAWGGNGGSAFDMGPAYRIISVKIFSGDVVDAVDVTFTYYGKTETRHFGGSGGTPHEIVLQEGEYLVGMKGEFGNYHGVVVVGKLGFSTNKKSYGPFGNTGGTPFSLPIAAGKISGFFGRGGDFIDAIGVYLEP

SEQ ID NO: 22304 - protein, 495 aa, Prosthecochloris aestuarii DSM 271
MNYDYDVTVIGGGAAGLTAAGVAASLGAKTALVEEKKLGGDCTWYGCIPSKTLLKAAKAAHTIRHAARFGIETHGEISINFETVMRRVHEVQQQIYQEADAPEIYEKMGVTVLYGKAAFVDEHTITIETGQSGISTLQSKNVIIATGSRPITPPIPGLEKVSYVTNEQLFSLKKQPRQLLILGAGPIGIEMGQAFCRLGSKVHVFDAEEHILPKDHPELTAILQKVLEQEGMTFHLQYRVTQVDEMDGIITVTAEEETTGRTIQLTGDALLVAAGRAANTENLNLEAAGVTTHKRGITVNQYCQTSRSHIYACGDVAGGMQFTHIAEHMAKIAAGTMLTHLPLQTDDRHIPWCSYTEPEIAHVGETEAELHARHAGHEVYRFPFNRIDRAITEDATEGWIRIYAAEFDGKIFGADILGAHAGELISEIGLAMRNGITLRQLSDTIHPYPSYALGNRRAADQWYVRKQSGTIVGLLQFFFGYQGQKPDTSDPDRIV

SEQ ID NO: 22305 - protein, 70 aa, Brassica napus
MSFKSLIQEMRGELGSISRKGFGFGRSRSQRVVQDSCVVPVDAFKQSCWATMPPELLRDVLVRIEASLLR

SEQ ID NO: 22306 - protein, 337 aa, Pseudomonas syringae pv. phaseolicola 1448A
MRPYPIKFVSIVIPVYNERQSLPELLRRTEAACKHLNHRFEIVLVDDGSRDDSAEILQQAAERSASPFVAVILNRNYGQHAAIMAGFEQCKGDVVITLDADLQNPPEEIPRLVALAEQGYDVVGTVRSNRQDSAWRRWPSKIINVAVQRSTGVAMSDYGCMLRAYRRTIVDAMLACRERSTFIPILANSFARHTTEVLVDHAEREHGDSKYSPMRLVNLMFDLITCMTTTPLRLLSIIGFSMALLGVLFAALLIILRLIFGAPWAGDGTFVLFAVLFVFTGGQFIGMGLLGEYLGRMYSDVRARPRFFIEKVVRSSSEVVSESVDSSVTPYMNKVAP

SEQ ID NO: 22307 - protein, 377 aa, uncultured archaeon GZfos26G2
MEDIFRFADELGPAKVIHVYEPSVGLKAVLVVDNVARGPAIGGLRIAPDVSAEECFRLARAMTLKNAAADLPHGGAKSVIYGDPKMPTKEKESLIRAFASSLREIQEYIFAPDMGTDEECMAWVKDEIGRVVGLPSDFGGIPLDEIGATGWGLSHATEVALEYCDFDMEGARVVVQGFGAVGKHTARFLTEKGAMLVGVADSRGTIYNPQGLDVLALIELKTAGKSVADYPDGKKLDRDAVINIECDVWIPAAQPDVIDENNVNLLKTKLVIEAANIPITEGAEKYLHENGVLYVPDFIANAGGVICAAMEYQGADQSAAFEAIEEKLCRNTRLVLEEAASRGILPREAAVDLAVQRLKKSMSYRRWSLFSSAPGFV

SEQ ID NO: 22308 - protein, 181 aa, Escherichia coli O157:H7 EDL933
MLKLLKTIMRAGTATVKYPFAPLEVSPGFRGKPDLMPSQCIACGACACACPTNALTIQTDDQQNSRTWQLYLGRCIYCGRCEEVCPTRAIQLTNNFELTVTNKADLYTRATFHLQRCSRCERPFAPQKTVALAAELLAQQQNAPQNREMLRAQASVCPECKQRATLINDDTDVPLVAKEQL

SEQ ID NO: 22309 - protein, 328 aa, Zea mays
RTLSLRLKVKIIRYAPCGEIVKHASVPYNLTEDNGWGLEIFEVKRCLEEARSAGLTVRAMVVINPGNPTGQVLSVTNQEEIVEFCRKEGLVILADEVYQENIYAENKKFHSFKKVARSLAYDENDLTLVSLHSVSMSYGESGRRGGYMEVSGVAANVKDQIYKVASLTLCPNIAGQILVSLAMDPPKLGDESFESFDKEKEQIRSSFCKRAKTLEKAFSGLEGVTCNKLEGALYLFPRLHLPSAAIRAADFEGVSPDIFYAHRLLDATGIAVVPGSGFHQASGTIHIRCTILPDERKIEAMVARLRAFHKAFMNEFRGSQQVMNDLRR

SEQ ID NO: 22310 - protein, 302 aa, Triticum aestivum
  misc_feature (125)..(125): Xaa can be any naturally occurring amino acid
  misc_feature (137)..(137): Xaa can be any naturally occurring amino acid
  misc_feature (147)..(147): Xaa can be any naturally occurring amino acid
  misc_feature (167)..(167): Xaa can be any naturally occurring amino acid
  misc_feature (173)..(173): Xaa can be any naturally occurring amino acid
  misc_feature (185)..(185): Xaa can be any naturally occurring amino acid
  misc_feature (210)..(210): Xaa can be any naturally occurring amino acid
  unsure (1)..(302): unsure at all Xaa locations
MGNASGREEDAAAPGEADAADVDVEDGGDDSSARGFPPYGGGANHVRRACSVGVVGASAGPGSPPGSPGRSLSPRMFVPQTPVPPLQRPADVTPVFDEILMNEQEEEFDGPPQKEIPAWFVWTLXGGKNVSVEGSWXDTWKSRKPMXKSGKDHSLLWILPSGVYRYXSVVDGXERRCFPDLPCEXEPMGHAVNLLDVHDFVPESVESVSXFEAPPSPESSYRFQSPEEKDFAKEPPALPSQLHLGVLNSQNSEEICARPQHIVLNHLFIEKGWGAHPLVALGVTHRFESKYVTVVLYKPIER

SEQ ID NO: 22311 - protein, 967 aa, Glycine max
MANRNLEKMASIDAQLRQLAPAKVSEDDKLIEYDALLLDRFLDILQDLHGEDLKETVQEVYELSAEYEGKHDPKKLEELGNLITSLDAGDSILVAKSFSHMLNLANLAEEVQISRRRRNKLKKGDFADENNATTESDIEETLKKLVFGLKKSPQEVFDALKNQTVDLVLTAHPTQSIRRSLLQKHGRIRNCLSQLYAKDITPDDKQELDEALQREIQAAFRTDEIRRTPPTPQDEMRAGMSYFHETIWNGVPRFLRRVDTALNNIGIKERVPYNAPLIQFSSWMGGDRDGNPRVTPEVTRDVCLLARMMAANLYYSQIEDLMFELSMWRCNDELRVRAEELHRSSKKDEVAKHYIEFWKKVPPNEPYRVVLGEVRDRLYQTRERSRHLLSNGYSDIPEEATFTNVEEFLESLELCYRSLCACGDRAIADGSLLDFMRQVSTFGLSLVRLDIRQESDRHTDVLDAITKHLEIGSYQEWSEEKRQEWLLSELSGKRPLFGPDLPQTEEIRDVLDTFHVIAELPPDNFGAYIISMATAPSDVLAVELLQRECHIKHPLRVVPLFEKLADLEAAPAALARLFSIDWYRNRINGKQEVMIGYSDSGKDAGRFSAAWQLYKAQEELINVAKKFGIKLTMFHGRGGTVGRGGGPTHLAILSQPPDTIHGSLRVTVQGEVIEQSFGEQHLCFRTLQRFTAATLEHGMHPPISPKPEWRALMDQMAVIATEEYRSIVFKEPRFVEYFRLATPELEYGRMNIGSRPAKRKPSGGIETLRAIPWIFAWTQTRFHLPVWLGFGAAFKEVIEKNVNNLNMLQEMYNQWPFFRVTLDLVEMVFAKGDPKIAGLNDRLLVSKDLWLFGDQLRNKYEETKKLLLQVAGHKEILEGDPYLKQRLRLRHAPITTLNIVQAYTLKRIRDPNYNVKVRPRISKESAEASKSADELIKLNPTSEYAPGLEDTLILTMKGIAAGMQNTG

SEQ ID NO: 22312 - protein, 328 aa, Bradyrhizobium sp. BTAi1
MGLLVDGQWHDVWYDTAASGGRFVRKDSSFRSFVTADGSPGPTGSGGFKAEPGRYHLYVSLACPWAHRTLIMRALKGLTEMISVSVVHWLMREQGWTFADGPAVVRDSINHAELLHQVYTAADPHYSGRVTVPVLWDKAQRTIVNNESSEIIRMLNTAFDGVGAAPGDYYPEPSRSEIDAINQRVYDTLNNGVYKCGFATTQAAYEEAIGPLFATLDWLEERLATRRFLLGDAMTEADIRLFTTLIRFDAVYVGHFKCNIRRIADYPHLSAYTRDLYQWPGVAATVNFEHIKRHYYESHRTINPTGIVPVGPLQDFTAAHGRERLSAS

SEQ ID NO: 22313 - protein, 429 aa, Zea mays
HNQSLPRSSHQPAAATVPDPDISFGFRPELGKEKLVGTVGFHERHVFLCYKGPEVWPSHVEAVYSDRLPRLLAAAIKARKPNLKKTIKFTICEGEDGTESSNGDVLIFPDMIRYKGLTHFDVDNFVEEVFVKDIDWLPGSPEPISGSYVFVCSHQRRDIRCGICGPALIKRFKEEINGLGLDGQVAVSACSHVGGHKYAGNVIIFSSDAKGEVVGHWYGYVVPDDVPVLLHKHIGQGEVVDRLWRGQMGLSEEQQKQALELRSMTNGGKESLEETETDGASCNPAATGGCCQGNGGFTRALEQQKQALELRSMTNGGKESLEETETDGASCNPAATGGCCQGNGSFTCCHPDLPKEKRDKSIAIEQNPKSCEENGMEGGGAGSKKGNSKTCPMPTWFETWERADTYAALAVVAAAAAVFISFRIYKNLN

SEQ ID NO: 22314 - protein, 466 aa, Glycine max
MAVSAITGARLTLGMSLSSSTRSRTVAMAVSIDPKTDNKLTLTKSEEAFAAAKELMPGGVNSPVRAFKSVGGQPIVIDSVKGSRMWDIDGNEYIDYVGSWGPAIIGHADDQVLAALGETMKKGTSFGAPCLLENTLAELVIDAVPSIEMVRFVNSGTEACMGALRLARAYTGREKIIKFEGCYHGHADPFLVKAGSGVATLGLPDSPGVPKAATFETLTAPYNDTEAIEKLFEANKGEIAAVFLEPVVGNAGFIVPKPDFHSFLRKITKENNTLLVFDEVMTGFRLSYGGAQEYFGITPDITTLGKIIGGGLPVGAYGGRRDIMEKVAPAGPMYQAGTLSGNPLAMTAGIETLQRIKEPGTYEYLDKITGELVEGIIEAGKRAGHAICGGHIRGMFGFFFTEGPVYNFADAKKSDTAKFARFFWGMLAEGVYLAPSQFEAGFTSLAHTSDDIKKTIAAAEKVFREI

SEQ ID NO: 22315 - protein, 577 aa, Solibacter usitatus Ellin6076
MRQSVIPIFVPVTKPRPLECRSYQTKCRGVAVLNSPMLNKGTAFTSKERKELGLTGLLPPEISTLGTQVKLAYIQYDRLPDTLAKNTYLTTLHAHNEVLFYRLFSEHLREMIPVLDDATLSLAAQRNHHECGQSRGVYLSIDHIDAMEEAFANLGADAGDIDLILTTDGEQVRGVGDAGMSGIERSLGKLAVYTAAGGINPNRAISVVLDVGTDRQDLLDDPTYIGNRHPRIRGKRYDAFLESYVTTTTRLFPHAMLHWENFAPGNGRRLLEKYGGQVCTFNDDMQGTGAITLAAAISAVRICGTPLRNQRVVILGAGTAGVGIADQICDAMAREGLSRQEAVRQFWFVDRQGLLTSNMTGQLRDHQVTFARPDVESRGWKQLHGGGIGLAEVVRQVKPTMLIGASSSSGSFTEPIIRQMAAHTARPIIFVLSTPPVRAEANPADLIAWTAGRALIATGSLFAPVTYRGLTYVVAQLNNAMVYPGLSLGAVVARARRISEGMFEAAAGAVSSLVTVRHPGASLLPHIDDLSSVSMTVAAAVAEAAVSEGLSRAPIDDIVQQVRDAMWQPEYHEIQAS

SEQ ID NO: 22316 - protein, 665 aa, Mannheimia succiniciproducens MBEL55E
MTDHKKLANAIRFLSMDAVQKAKSGHPGAPMGMADIAEVLWRGFMKHNPTNPKWADRDRFVLSNGHGSMLIYSLLHLTGYDLSIEDLKNFRQLHSKTPGHPEYGYAPGVETTTGPLGQGITNAVGMAIAEKTLAAQFNREGHDIVDHHTYVFLGDGCLMEGISHEACSLAGTLGLGKLIAFYDDNNISIDGHVDGWFSDNTKGRFEAYGWQVIDNIDGHNPEQIAAAVKLARAETEKPSIIICKTIIGYGSPNKSASHDCHGAPLGDEEIALTRKALNWEYAPFEIPADIYAAWDAKSAGQSAEAVWNEKFAAYEKAYPELAKEFKRRVNGELPANWAAESQAFIEKLQANPASIASRKASQNAIEAYAHILPEFLGGSADLASSNLTLWSGSKPIRAKQNVDGNYINYGVREFGMSAIMNGIALHGGFIPYGATFLMFYEYAHNAVRMAALMKQRSLFVYTHDSIGLGEDGPTHQPVEQTASLRLIPNLETWRPADQVESAIAWKAAVERKDGPSALIFTRQNLAQQDRTSEQLANVARGGYILKDCAGTPELILIATGSEVELAVKAAEALTAEGKAVRVVSMPSTNVFDKQDEAYRESVLPSSVTKRVAIEAQIADFWYKYVGLEGRIVGMNRFGESAPADQLFKLFGFTVENVVAKAKEIL

SEQ ID NO: 22317 - protein, 321 aa, Oryza sativa
IGFARYEKYHGYYGGKEEARKSNYTDMVNKYYDLATSFYEYGWGESFHFAHRWNGESLRESIKRHEHFLALQLGVKPGMKVLDVGCGIGGPLREIAKFSLASVTGLNNNEYQITRGKELNRVAGVSGTCDFVKADFMKMPFSDNTFDAVYAIEATCHAPDPVGCYKEIYRVLKPGQCFAVYEWCITDHYEPNNAHTRGSRMKSSLARGLPDIRSTQPCLQAAKDAGFEVIWDKDLAEDSPVPWYLPLDPSRFSLSSFRLTTVGRAITRTMVKALEYVGLAPQGSERVSNFLEKAAEGLVEGGKKEIFTPMYFFLVRKPISE

SEQ ID NO: 22318 - protein, 242 aa, Triticum aestivum
HYRTSLYKKAGWYRSGIPGISSTHASDLGFLTKARKYTFFKPKFIFYATYLSEKIGYWRYITIFRHLKANPEYQVYPIFKYFENWCQDENRHGDFFSALLKAQPQFLNDWKAKLWSRFFCLSVYITMYLNDCQRSAFYEGIGLNTKEFDMHVIYETNRTTARIFPAVPDVENPEFKRKLDRMVDINLKIISIGESNDMPLVKNLKRVPLIAQLVSEIIAAYLMPPIESGSVDFAEFEPKLVY

SEQ ID NO: 22319 - protein, 400 aa, Magnetospirillum magnetotacticum MS-1
MKYPTPPTVIPLDNILPDEPLLMMGAGPVPIPPKVAMANSLIINHLGDTMNAVIEQVKTMGRYVFQTNSPHVMGVAGPASAAMEMAIANLVEPGTRVLSICNGLFSKRLAEMATRVGGDVTILNAPDKRAVAAEEVEKLLKTGKFQIVTVVQGETSNTVWNRDLIEICRLGKQYGCLNIVDAVCTLSTMPMEMDEWMVDAIITGGQKGLSSIPGVSLIAFSEEAFTRISARNSPMAHWCLDARLAHQFWHNHSYHYTAPVSGILALHEALRLIGDETLPGRFRRHAQCSTALQRGVLAMGLKLLIEEDSRLNSVVGIELPETISADQVRHIMSQVHKVEISGAFGLPIVRIGQMGEQSRAPNLFRTLHALGSAMRAAGGKVDMPGGMAELERSLASEVRG

SEQ ID NO: 22320 - protein, 734 aa, Debaryomyces hansenii CBS767
MSIVPYNSSNEIVYHDPNHGILVLHDNQDNTLQLVSTANEGQNNKIDLVRSEDRSSGTRYGNNNPHSHIKCPSCGFAWSEHSNIGETSKRSKSDALNELMDSLKSGPDSRKAMMKNFPEGFMHHDYFKLLGKLPYNQKPRVRSASTLPENIFNQGYFKRFFKKVPPFMLGSGAHSQVYKVVHVLNDIKLGTYAVKRISIGDKIELLEQVLNEVLILYELSIQGANENNLIRYNHVWLELGDIQDLKTYFLPDKQKNSEFDNSIPYVFILQQYCDGGHLEDLIEKVFLRELHLSAKEQLDLERQRRRSVRKNSNQKLEDMDPESKENKKFWLGCIEIWKFFRDVAKGVHYLHLHGILHRDLKPSNCLLDNKYDNNPIDNRIYGCENELNGELSKLPKVLVSDFGEGQFINKHNIPADDVSIKDVNKDEDERRGNTGTLEFTAPELWLFSNFDPSLGSERQYFINEFTYESDIYSLGLILCWLCAGILPFSHMIKGELDPQLIRDKILEWYFDLNATKFHEWFVSSVQIKPGTNEFDESCVSDFEKLIYLMIKGDDSKEPENSPPNRLLSGDVIKFLEAMKWKRFIAENEIIQDNPEEETNKFGLIPAINPSQPEEAIDPDFIYQSDDITSEDDDVHDIASSEYDDDYSVQVPTRDAFISSAVTKSNIFNFCMILGYMLNILLFDIIEYNIFYTYKLMVKILVLVLFSTDLLLLESKFARVSCLILAFSLSMALAI

SEQ ID NO: 22321 - protein, 570 aa, Candida albicans SC5314
MSEHKWWKEAVVYQIWPASYKDSNGDGVGDIPGIISTLDYIASLGVTTVWLSPMYDSPQDDMGYDVSDYENVYSKYGTLQDMDRLIAGCHDRGLKLILDLVINHTSVEHKWFKESRSSKDNPKRDWYIWKPPRIDSNGNKHPPNNWGSYFSGSAWKYDELTGEYYLHLFAESQPDLNWENKECREAIYNSAIKFWLDKGVDGFRIDTAGMYSKYQHFKDVPVAFPDTEFQPCEIYHKNGPRIHEFHKEMAKVMEPYDTMTVGEVGHSTREQALKYVSAAEKEMNMMFLFDVVELGSDPRDRFRYNGFDLVDLKKAIKSQGEFAEGTDAWSTVFIENHDQARAISRFGNDSPEFRVLSGKAIAMLQCCLTGTLFIYQGQEIGMTNVPRSWPIEEYKDINTINYYRAFKEKYGKDADYKQKEEKLVDVINRLARDNARTPVQWSHQQYAGFSEVEPWMRVNDNYKEINVEDQDGDDHSLLNFYRKLLKLRGEYKDLFVYGEMKFLDFDDKKLFTFAKEAPGSPVAYIVINFSGEDVKFEPLIKGNYKLVLTNVDKDSKDALSPYEARMYVVD

SEQ ID NO: 22322 - protein, 189 aa, Zea mays
MQIFVKTLTGKTITLEVESSDTIDNVKAKIQDKEGIPPDQQRLIFAGKQLEDGRTLADYNIQKESTLHLVLRLRGGMQIFVKTLTGKTITLEVESSDTIDNVKAKIQDKEGIPPDQQRLIFAGKQLEDGRTLADYNIQKESTLHLVLRLRGGMQIFVKTLTGKTITLEVESSDTIDNVKAKIQDKEGIP

SEQ ID NO: 22323 - protein, 372 aa, Halobacterium sp. NRC-1
MDDGTIETFKAFRSQFNGDRGPYKGGIRYHPGVTRDEVKALSGWMVYKTAVADIPYGGGKGGIILDPEEYSDSELERITRAFATELRPFIGEDKDVPAPDVNTGQREMNWIKDTYETLEDTTAPGVITGKALENGGSEGRVNATGRSTMFAAREVFDYLDRDLSDATVAVQGYGNAGSVAAKLIADQGADVVAVSDSSGAVHNPDGLDTRAVKAFKTETGSVSGYEGATEELSNEALLTMDVDLLVPAALENAIDEDLAHDVDADVVVEAANGPLTPDADDVLTERGVTVVPDILANAGGVTVSYFEWVQNRQRFQWTEDRVNEELEAIITDAFDAMTDAHEDAGTPNLRTAAYVVAVQRVVDAYEGSGSWP

SEQ ID NO: 22324 - protein, 380 aa, Halobacterium sp. NRC-1
MNFSTRVTSVEPSATLAVSTLASELEADGVDVVDLSVGEPDFDTPESIVDAGKAAMDAGHTGYAPSNGVPELRDAIAEKLQGDGLDYEAGNVIVTPGAKQALYETFQAVVDEGDEVALLDPAWVSYEAMAKLAGGELNRVDLAPHDFQLEPALDDLADAVSDDTELLVVNSPSNPTGAVYSRAAMEGVRDLAVDHDITVISDEIYQRVNYGPAHVSLAGLDGMFERTVTINGFSKAYSMTGWRLGYLAGPEALVDQAGKVQSHSVSSAANFIQRAGVEAIRHTDDAIDEMVAAFESRRDLLVDLFAEHGTDVSTPDGAFYLMLPVADDDQAWCQDALKDAHVATVPGSAFGAPGYARLSYAASTDRLEAAVDRLAAEGYL

SEQ ID NO: 22325 - protein, 273 aa, Candida albicans SC5314
MVAESSSIDNTPNDVEAQRPVYEPKYDDSVNVSPLKNHMIAFLGEFFGTFIFLWVAFVIAQIANQDPTIPDKGSDPMQLIMISFGFGFGVMMGVFMFFRVSGGNLNPAVTLTLVLAQAVPPIRGLFMMVAQMIAGMAAAGAASAMTPGPIAFTNGLGGGASKARGVFLEAFGTCILCLTVLMMAVEKSRATFMAPFVIGISLFLGHLICVYYTGAGLNPARSFGPCVAARSFPVYHWIYWVGPILGSVIAFAIWKIFKILKYETCNPGQDSDA

SEQ ID NO: 22326 - protein, 161 aa, Trema orientalis
MSSSEVDKVFTEEQEALVVKSWAVMKKNSAELGLKFFLKIFEIAPSANNLFSYLKDSPIPLEQNPKLKPHAMTVFVMTCESAVQFRKAGKVTVRESNLKRIGAIHFKNGVVHEHFETRFALLETIKEAVPEMWSPEMKNAWGEAYDQLVAAIKFEVKPSST

SEQ ID NO: 22327 - protein, 433 aa, Picrophilus torridus DSM 9790
MKYLVVTSRGPFSHEKKGKNETIENNVGGVATALKMLLSKNGGTWVCWGSGSLDINYKSENFSNYVIKRIILNSTEKKKFYDEYSNGTLWPVFHYFRDRTTFYKDAFRYYLEVNRKFAREVIENIDDDTVIWIHDYQLAMLPGILRESNVKNKIIFTWHIPWVSPEFFSIIPESREIIKSISSSNYITFHIDNYRENFINSQRFLLGSSTPSRVYSIPLGIDTKFFSPKNAKKINNIKAKIIFSIDRLDYTKGLTLRVLAIEDLLTEHPELLKKFVYIMNVTPSRTTVSEYINMKKELEMSVGRVNGRFGTIDWRPIIYMYRKIRDKTLLSYYKSADVALITPLIDGLNLVSKEFVATTENGVLIISRFAGASKELSSAITVNPYNIKETANAIIKALSMDVNERNNMISKLKNTVVKRDIKWWYRRITALPR

SEQ ID NO: 22328 - protein, 444 aa, Lycopersicon esculentum
MAQSNSKPPMSSQNFGVGAVSHVRSLSQSSIFSNSCLPPLSPFPPSEPGMVSGRSSLKDISMEEADVNSQGVGVVSSFTRDGLPPRKGHRRSNSDVPLGFSAMIQSSPQLMPISGQKVLGRAVSLGDSNGKIDERKPKGEVTDELLFSYMNLENIETLNGSGTKDRDKDSIVSGTKVTGSESSNNEAESVMKGNNVSIQPTNLREGTKRSADANIAPAARHFRSLSMDSAIGNFHYGDESPNLPTSLMMRSGQLSPSNSGNESSSKHNLDFGNSEFSEAEMKKIMADERLAEIAVLDPKRAKRILANRLSAARSKERKTRYISELEHKVQKLQTETTTLSTQVTILQKNFVEISSLNSELKFRIQAMEQQAQLRDALHEALTAEVQRLKLAAGEHREEGRLPNNMTQQTPVKHNIFQMQRQQPSQMQQLSVGKASAASATPASA

SEQ ID NO: 22329 - protein, 239 aa, Streptomyces coelicolor A3(2)
ETEAALHEAHRDNHTHRDVNGGWLRPAVFGAMDGLVSNLALMTGVAGGTASQQTVVISGLAGLAAGAFSMAAGEYTSVASQRELVEAELDVERRELRKHPADEEAELAALYEARGVEPELAREVARQLSADPEQALEIHAREELGIDPSDLPSPTVAAVSSFGSFALGALLPVLPFLLGAGALWPAVLLALAGLFLCGAVVAKVTARSWWYSGLRQLALGGAAAGVTYLLGSLFGTAVG

SEQ ID NO: 22330 - protein, 318 aa, Streptococcus agalactiae NEM316
MDKKKILVTGIVPKEGLRKLMDRFDVTYSEDRPFSRDYVLEHLSEYDGWLLMGQKGDKEMIDAGENLQIISLNAVGFDHVDTAYAKEKGIIVSNSPQAVRVPTAEMTFALILAASKRLAFYDSIVRSGEWIDPSEQRYQGLTLQGSTLGIYGMGRIGLTVANFAKAFGMTVVYNDVYRLPEDKEKELGVTYLEFDQLIKTADVITIHAPALPSTIHKFNKDVFAKMKNRSYLINAARGPIVSEEALIEALKEGEIAGAGLDVFENEPQVSEGLRSLDNVIMSPHAGTGTIEGRRTLAEEAADNIIAFFDGKPQNIVNK

SEQ ID NO: 22331 - protein, 363 aa, Triticum aestivum
MFVFCLCTRCRICRVSSFPVLLLFMFIHLSYFFLVLLLILGQFFFTRYEKYHGYYGGKEESRKSNYTDMVNKYYDLATSFYEYGWGESFHFAHRWNGESLRESIKRHEHFLALQLELKPGMKVLDVGCGIGGPLREIARFSSTSVTGLNNNDYQITRGKALNRSVGLGATCDFVKADFMKMPFSDNTFDAVYAIEATCHAPDPVGCYKEIYRVLKPGQCFAVYEWCITDHYDPNNATHKRIKDEIELGNGLPDIRSTRQCLQAVKDAGFEVIWDKDLAEDSPLPWYLPLDPSRFSLSSFRLTTVGRIITRNMVKVLEYVGLAPEGSQRVSSFLEKAAEGLVEGGKKEIFTPVYFFVVRKPLSE

SEQ ID NO: 22332 - protein, 149 aa, Morus alba
GFVGSWLVMRLLERGYTVRATVRDPANVKKVKHLLELPKAKSNLTLWKADLADEGSFNEAIKGCTGVFHVATPMDFDSKDPENEVIKPAVAGMLDIMKACLDAKVKRLVFTSSAGTVDAGPQGKSFSTNPIGVTLNFCRTVKMTRLDVF

SEQ ID NO: 22333 - protein, 215 aa, Streptococcus agalactiae NEM316
MKYFLDTADVSEIRRLNRLGIVDGVTTNPTIISREGRDFKEVINEICQIVDGPVSAEVTGLTCDEMVTEAREIAKWSPNVVVKIPMTEEGLAAVSQLSKEGIKTNVTLIFTVAQGLSAMKAGATFISPFVGRLEDIGTDAYALIRDLRHIIDFYGFQSEIIAASIRGLAHVEGVAKCGAHIATIPDKTFASLFTHPLTDKGIETFLKDWDSFKKK

SEQ ID NO: 22334 - protein, 347 aa, Guillardia theta
MKLLLYDDLKTLFNYKIKKKNNTIVHFLYLLYENVHESLNINNTRNFLWCFMIKFSVEIKKRIKFDYKSCHINFYSFFDNLLEAGNVLNFEKLILNILFNFRKIQFLYIPFTNVMKVQTEINKNMRKILIDWIIDVHHKFKLLSKTLFLTINIIDRFLCLKKIGKQKLQLLGITSMFIASKYEEIYAPEIRDFIYICDNAYSKEDIIKMEQLICFVLRFKFNLPSPQSFLSLWMKILCLKLDSIFFSNKCLELCLIEINTLRYNFEIISLSCIFLSLKFSGNISLKILMNIFRIDSKKNFSLVKSCGLIGSLLLLYQSSYCGQNHLHFKYSSNKHKEFMSRRFHIYF

SEQ ID NO: 22335 - protein, 381 aa, Propionibacterium acnes KPA171202
MTETICADEGGTDPFVLPARQHPVNRPDPAMVRILDEQGRLTTHPDFPVDLVDDDLVKALEMMVMTRRLDVEATALQRHGELGLWPPLLGQEATQAGAWLALREGDQVFPTYREQGLAHAMGVSLADILGAWDGTSHCGWDTVATHFSAYPVMIGSGTLHAVGYAMGVQRDVEAGGGPAAVLDFHGDGAMSEGDTNEAYVFAASMNAPVVFVCVNNQWAISEPTTVQSPTSLFRRATGFGIPAVQVDGNDVIAMMAVLRSALEYARSGKGPVFVEAWTYRMGAHTTTDDPTRYRTAEEESTWGKTDPIVRLRTYLQNRGIINQVWLDGLAEREDAFGAEVRAAVHENATPVMADLMADVYAEPTPDVLADAEEIASWEEDK

SEQ ID NO: 22336 - protein, 414 aa, Vibrio vulnificus YJ016
MERYIMELTTTVSELRYALDTFFFLISGALVMWMAAGFAMLEAGLVRSKNTTEILTKNFCLYAIACTTYLVVGYNIMYVDNSEGGWLPSIGALIGSQAEGADHSLESDFFFQVVFVATAMSVVSGAVAERMKLWSFLLFSAILTAFIYPVEGYWTWGGGFLSAAGFSDFAGSGIVHMAGASAALAGVLLLGARKGKYGKNGEVYPIPGSNMPLATLGTFILWFGWFGFNGGSQLMVSDFENATAVGQIFLNTNAAAAAGAITALFVCKTTWGKADLTMILNGALAGLVAITADPLSPSPLYSVAIGAVAGALVVFSIVGLDKLKIDDPVGAISVHGVCGFFGLMVVPISNGDASFLSQLFGAVVIFAWVFGASLAVWAVLKATIGIRVSEEEEMEGMDMHDCGVGAYPEFVTVK

SEQ ID NO: 22337 - protein, 487 aa, Aspergillus oryzae
MQKSWLVLLVACLGLQGTTALTLHRRDLPAVVSLDIKRNNAVDPVARDRMRRKRDKTVEQNLDNEETLYFCNITLGTPKQSLRLVLDTGSSDLWCNAANSTLCSSRDQPCNASGSYDPSSSSSYAYTSSDFNISYADGTGAAGDYVTDTIHIGGATVKDFQFGVGYSSSSAEGVLGIGYTTNEVQVGRLGKSAYANLPQAMVKNGLIQSNAYSLWLNDLGADTGSILFGGVNTEKYHGELQTLPIQTVNGVYSEFIIALTGVSLSSASSHHNYSSSDALPAAVLLDSGSSLTYLPNSIVQDIYDDLGVTYESSSGVGYVPCSLAQQNINVTYTFSSPIITVGIDELVLDAGDLRFRNGARACIFGIVPAGDSTAVLGDTFLRSAYVVYDLSNNEISLANTKFNSTKDNILEIGTGDDSVPGATQVSNPVTSVVADGSGARIGGPTGEIFTDIPSATSSGGAAAPAGPTDVPKHLVLGAAAIGYVLAF

SEQ ID NO: 22338 - protein, 167 aa, Cicer arietinum
MAEQASKSIYDFTVKDIRGNDVSLSEYSGKVLLIVNVASQCGLTQTNYKELNVIYDKYKNQGFEILAFPCNQFRGQEPGSSEEIQNVVCTRFKAEFPIFDKVEVNGKNAEPLYKFLKGQQGGIFGDGIKWNFTKFLVNKQGKVVDRYAPTTAPLKIEKDIEKLIKSS

SEQ ID NO: 22339 - protein, 310 aa, Arabidopsis thaliana
MNGEGKVVCVTGASGYIASWIVKLLLLRGYTVRATVRNPSASERLKLFKSDLLEEGSFDQAIEGCDGVFHTASPVSLTVTDPQALLQTEMIDPAVNGTLNVLRTCAKVSSVKRVIVTSSTAATLSINPNDVVDETVFTDLSVYLAMKAWYGYSKTLAEETAWRFAKENGIDLVVMNPGNVIGPVLQPTLNYSVEVIVDLINGKNPSNSFYYRFMDVRDVSLAHIKAFEVPSASGRYILADPDVTMKDIQKLLHELFPDLCRVDKDNENEVGEMAYKVCVDKLKSLGIEFTPIKESLKDTVVSLKERCLLI

SEQ ID NO: 22340 - protein, 2018 aa, Geobacillus stearothermophilus
MVKGRWRKYVAYFSIFLLFAQLFSFSAIVRANESVQSPVVNGNDVTFRYVGTGEEQSVLLAGSFNDWQTDGEKKIELTKESDHIWSVTKTLPDGTYMYKFVVDGNWMTDPLNNNKADDGYGGKNSVVVVGQPAQQQERVVTLVGNLQNELGHEKEWDPAATATVMKHEGNGLYTFTGVLPAGTYEYKIAINGSWDENYGAGGRNGGNISFTLEKETEVTFYYHDSTHAIADSTWYTPIPKEKQPRLVGTILPAIGYEKEVDGWTPETSSAFLVDNNFDFIYTFTARVPKGNYEFKVTLGNSWDENYPQDNAKLNVLEETTITFFFNAKTKELYTDYSPTGSDGNVQKDRLKHNTWDSLYRQPFGAVKAGTEVTLRLAAKKGDVTKANVYVKNTTTGTAKLYAMSKVGVIGDDEYWEATFTPEEKGLYGYKFIAMDGAAKAEYGEDTQEGQWGRAADKNVELFQLTVYDPNYKTPDWMKQAVVYQIFPDRFFNGNPNNDKVKKYARGNEPIEHREWSELPDNPRMKATPGYDGDGIWSNDFFGGDIAGIEQKLDYLQSLGVNTIYLNPIAHAPSNHKYDAHDYKAIDPMFGTPEEFESFVQAVASRGMHLILDGVFNHVSDDSIYFDRYGKYPTVGAYEYWSAVYDLMNDKGLSEEEARVQVEQKFKDEGQQFSPYGFHLWFNIENEKVNGAYKYQAWWGFDSLPEFKSISGTKVPYASELNNEQLANYIFYEQDSVAKSWITRGASGWRLDVANEVDTEFWREFRKELLQGDYDRGPTLKSGQQPLILGEIWDDASKYFLGDQYDSVMNYRFRGAVLDFLRNGKAEEIDARLTAIREDYPEEAFYALMNLIGSHDTARAVFLLGNGTDSYERAELDPNYNEQLGKKRLKLAAILQMGYPGAPTIYYGDEAGVTGSKDPDDRRTYPWGSEDTELIAHYQKVGTVRTEHQDVLAKGTIETVYAKGDVYVFARQYGKDVALIAINRGNSAQTVQLDVSSIIPNGTSFVDELHGEYEVTVSNGKVQLNIPAFDGRMLFGKVTVNMPNEVTNVQATAGVGQVTLTWEGDAPTYRIYQSTLKGAGYTLVKETNEKEAVIGGLKNGTAYYFAVTAVDENGNESAKVETNRVVPHYPLDEQHIVHVDIVSDDVLDLAKAIVVEAKVRIDDVTKHGLADGLQAVLQVKRPNHEKWENVQAAYERQDGEDNVFRASFIPLASGTYTYRYGFTTNLGDSWVYTEEKTFTLAANEADQQAPAKGIQLVQPDVESGQVNLSWSFVERDDHDAYMVVIERDGQVIYTTTTISTSFTDYDVENGKTYTYVVKLYDRAGNVVESNAVEVTPNIVMVQVTFKVRAPSYTPLDTRITIPNSLNGWNTGAWEMTRGGAVTSDWEFTTELQEGETIIYKYVKGASWDQEGLADHTRDDQTDDDVSYYGYGAIGTDLKITVQNQGNNKMIIQDYILRWIDMPVVIEEVKKDGDRVTIKGNAIKGGVLTINKERVTIHDDMSFTYTFTPNANQKEVAIHIEPSEESKANIFKNDGGAIAKNTKNYVLNIETKQLREGVLTEQPDSGTTPGSGTTPGSGTTPGSGTTPGSGTTPGSGTTPGSGTTPGSGTTPGSGTTPEKGAVVVEPKVEVKERDGKVVEKVAAVSSNDIATIVNELSNEKKQVVISTGSLVKDVATKVDVPASLFVQAANKQSDATIVSASEQAVYKLPAKEVKQAVDQVAKQLGTTVDQVSISIEMKVKDAPQLPVKTLSDAVQFHVVAKANGKEQAIDRFTQYVEREIALKQPVQPNRAVVVRVNDDGSLTPVPTTFVDQKAVAKSLTNSTYVVVEGTTTFADIVQHWAKPYIDSLAAKQLVRGVTETAYRPNEPMTRAQFAVLLVRALALPSETYDGRFADVKGTEWFNQHGELAAAVKYGVIQGKTPSTFAPNEPITRAQAAVMIERALNLSFVNFDKAAKDQTKKLADFRDANQLPAWSKQAIEAIYQAGIVQGHPDGTFAPAGRMTRAEMAKVLAEFLAKAKLM

SEQ ID NO: 22341 - protein, 486 aa, Aspergillus oryzae
MMRGASLLPVALAALSCVDALSLHRRDTPATVELPIERRQHAGGLQKRDSTLNLPLINYYDSFYILNLTLGTPAQQFAVALDTGSSDLWVNVANSSYCSSRTNPCKPFGLYDPDASSTYKNLGVEFNATYGDGTNAYGYYATDELGLGDVNVDDMQFGVAESTTITQGIVGVAYDTLTNEASHEGKTYVNLPQALVNSGAIKSPAYSLWLNDPQASRGSILFGGVNKAKYKGELQTIPIVRTLRGYSYLAVTLTGVSVEQGKESEDYSSRLPIVVLLDSGTSLTYLPDSLVDELYKTFNATFLEDDGLAYVDCELMKKDYTVNFDFSGATIAVGISELVLKAVAEDFPLGTCAFGVVPSGDSQDAMYILGDTFLRSAYVVYDLGNNEISLANTNFSPGDDDILEIGTGTSAVPGATPVESPVTSATVASATDIVHTVMVGGTKATATDSNSGAAETSSSSGIAALPTSNTRHLLSGLAGAGLLLAL

SEQ ID NO: 22342 - protein, 412 aa, Legionella pneumophila subsp. pneumophila str. Philadelphia 1
MNSRRVVITGMGMLTPVGLNVEETWRSILAGVSGVGLVEDFDTTEYPTKIWAKVKNFNVENHMPIKDARKMDVFTQYGMAAADEAMLDSGLKIDEVLSRRIGVAVGAGIGGIQTITNNQDKLVAGGPRKVSPFFIPAGIINMVAGQISIKHNLKGPNISVVTACTTGTHNIGLAGRIIAYGDADVMICGGAEMTTTPLCLAGFSAVRSLSKRNDEPEKASRPWDKDRDGFVMGEGAGVLVLEEYEHAKARGAKIYAELVGFGMSGDAYHITAPDEDADGASRAMEAAIQDAGIDPRQVDYINAHGTSTYLNDLNETKAIKRVFQNHAYDLAVSSTKSMTGHLLGAAGAVEAIISILAIRDQVAPPTINLDNPDEGCDLNYVAHVPQSRTINYVLSNSLGFGGTNGSLLFKRI

SEQ ID NO: 22343 - protein, 63 aa, Pfiesteria piscicida
MRGILVDWLVEVHLKYKLKAETLYLTVNLIDRYLEVQQVVHGELQLVGVTAMLIASKYEEIYP

SEQ ID NO: 22344 - protein, 362 aa, Amycolatopsis orientalis
MNLRISGPTPLPPRVRAALSTDMISHRSTAFRDIVAEVLAGLTPVFGDPATILPFTCSGTGGLEAAVVNTVRPGQRVVVVSIGYFGTRMAEIARMAGLDIEVIEVPWGQAADPGELQAVLRRLRDVAAVLVTHNETSTGVLNPLPELCRVVRESSDALLIVDVVSSVGATPVRMRDWGIDVAVGVSQKALMSPPGLALLGVSSRALTAAAANPARRYYFDFTAMARAVEENTTTYTPAIPVFHALQTALRMISVEGWDRVLARHQRLSEQCRSGLADLGLAFAADQPYASPTVTSFFVPADMRASDVRERMAVEHKVQVASGRAKWKDSVLRIGHMGYVNENDVAHVLAALGAVLDRAGGSS

SEQ ID NO: 22345 - protein, 148 aa, Triticum aestivum
ADQLTDEQIAEFKEAFSLFDKDGDGCITTKELGTVMRSLGQNPTEAELQDMINEVDADGNGTIDFPEFLNLMARKMKDTDSEEELKEAFRVFDKDQDGFISAAELRHVMTNLGEKLTDEEVDEMIREADVDGDGQINYEEFVKVMMAK

SEQ ID NO: 22346 - protein, 663 aa, Candida albicans SC5314
MFRILKPSIRTLPFVSKSTIRNVYTKTNTFPKFPTSHRAVFGISIGALASITVYNQHIDNDVHALDTSVHTLTPSKTSETFEMGLYESSQKEEYNQYYGYRETKKKHPSWIIRTFYYLRFAIEDYLVDPMFTFVRFIELSCIFVPVLLISPICWFGRRHRSESGNLVRTGATLWYRYLRWSAEVAGASFIKLGQWAASRTDIFPEEMCNELGSLHSNAKAHSLELTKKIISKSFGNLPFDEIFDEFKEKPLGVGAIAQVYLGKLSPKVLERAKKDEDKLVKQLKLQAEDKQEQFFENIVVTEHLDSNEFVAIKVLHPNVELKINRDLKIMKFFANVINIIPTMEWLSLPDEVEQFSILMRLQLDLRIEALNLAKFRENFKSRLDIHFPKPYLNFTTRDVLVEEYIHAIPLSKLLSLSENYGKNLSKEVSDKGLDAFLKMLILDNFVHADLHPGNMMVRFYKNELYRHKKEYKIVKTSNETETNKITNELLKLGDNTNAWCEKLSELYEQGYHAEICFLDVGLVTELNKEDRINFIDLFRALSEFDGYRAGELMAERSRTPETVLNKEIFALKVEKLVDRMKQRTFTLGNISIGDLLDQVLGMVRNHHVRMEGDFVTVVVAILLLEGIGRQLDPNLDLFARFVYALLFGFPTEEMELFSLFLVQ

SEQ ID NO: 22347 - protein, 63 aa, Cryptoperidiniopsis sp. CCMP1828
MRGILADWLVEVHLKFKLVPETLYLTVNIIDRFLQIHKVSRPKLQLVGVTSLLIASKYEEIYP

SEQ ID NO: 22348 - protein, 368 aa, Streptococcus pyogenes MGAS8232
MEHKWKLWLFIVGVVLLIGGASVLIQKGQAKAFSQGKPQIPAKKVKSTKVDPNAPVDQKVIYLAGGCFWGVEEYFSQVDGVLDAVSGYANGRGDTTNYQLIHQTGHAETVEVAYDTNRISLKELLLHFFRIIDPTSLNKQGNDRGSQYRTGIYYTDKADLAIIDEVFKEKAKDYKKKIVVEKAPLKHFIKAEDYHQDYLKKNPNGYCHIDINQATYPVIDESKYPKPSATEIKEKLSADEYRVTQKNETEKAFSNRYWDSFDAGIYVDVVTGEPLFSSKDKFESGCGWPSFSRPISPDVVRYKEDKSFNMTRTEVRSRSGNSHLGHVFTDGPKDQGGLRYCINSLSITFIPKADMEAKGYGYLLSSVE

SEQ ID NO: 22349 - protein, 412 aa, Zea mays
MDVLPVGSERESQTDSHPLLMEHAIGIPRHDVASTSTPHRDNNDGMDQLPRDSESSSGTTDASYSPNAPLARRDDNRLRRQQSLNSGFWISIELAVNLSQIIAAICVLSVSKNEHPHAPLFEWVIGYTIGCIATLPHLYWRYLQRNQLATVQGSNQNYVPDNSFESSSFTGISPPPVSEAGVVTVSNGVLRNNVVITNPRAQAFADHFKMALDCFFAVWFVVGNVWVFGGHSSAHDAPNLYRLCIAFLTFSCIGYAMPFILCALICCCLPCIISLMGFREDLDENRGATSDAINALGTYRFRSKKPRNGEANEGGGGVFAPGTDKERAVSAEDAVCCICLARYVDNDDLRLLPCGHFFHKDCVDKWLKINALCPLCKAEIDVVPRTAPPAIGFGRRDSHRRVGNDIESQRLP

SEQ ID NO: 22350 - protein, 153 aa, Halobacterium sp. NRC-1
MIGLLKSMATTMKHALSGDTFTVEYPEEAPEVSARFRGVHKFSQERCIWCRQCENVCPNDTIQIVTDNQRNGEQYNLHVGQCIYCRLCEEVCPVDAILLTENFEFTGDTKHDLVFNKEQLKNVPWYNDIDPVASREPDRGAWIGDGEGEVDYQ

SEQ ID NO: 22351 - protein, 342 aa, Pseudomonas syringae pv. phaseolicola 1448A
MILVTGGAGYIGAHVALELLEDGHDVVVLDNLCNSSRETLSRVETLSGRQVDFIHGDVRSKATLNRLFARHPVNAVVHCAGLKAVGESVREPLRYFETNVSGSVNLCQAMAQAGVFNLLFSSSATVYGDCEQMPLDENCPLGLPTNPYGHSKMMAEHVMKSVARSDPRWSIGLLRYFNPIGAHSSGLLGESPCNTPNNLLPFLLQVANRRRPALHIFGTDYPTPDGTGVRDYLHVVDLAEGHLKALDRIRSEQGVSVWNLGTGQGYSVLEVVHAFERISGKTVPLIFEPRRAGDIAVCWSDPGKALRELDWRARFNLDSMLTDAWRWQCMNPQGYMPTALVS

SEQ ID NO: 22352 - protein, 646 aa, Xanthomonas oryzae pv. oryzae KACC10331
MCGLAGLLLASPRLHGEQLDALVRPMGAALRHRGPDDAGTWCDAQAGVALAHQRLSILDLSPLGHQPMRSADGRYVLAYNGEVYNFAQLRAALSALGHRFRGHSDTEVLLAAVVEWGLDETLTRCNGMFAIALWDERDNCLFLARDRVGKKPLYYGWAGDTLVFGSELKALWQHPDFDNGVDRNALTLLLRLGYIPAPACIHAHTFKLMPGRVLRMDAQAVAAGAAAHRADQAQQPFWNAREAMQRALAAPFTGSDAQAEEQLDSVLRDAVALRMVADVPVGVFLSGGTDSSIVTAMMQAQSAQPVHTFSIGFEGSHHDEAPLAREVATHLHTDHTELYVSGADALAVVPCLPDMFDEPFADASQVPTALVARLARGGVTVALSGDGGDELFFGYGRYQRALRNWRMHGLVPGPLRRLMAVAARRNGESSRTGGLAALVAEAGARGIGDIYRNRISRWRDPAAVVPGATEPDSFYSLADPLHGSGTPADAMMLADFAAYLPDDLLCKVDRTTMAVGLEARAPLLDWRVAEFAWSLPLSLKYRDGMSKYLLKRVLCRYLPDTMVYRGKRGFGAPVSAWLRGDLHGWADDLLAHGALQREGVFAADTVAGLWRDFNGGERKWHTHLWTVLMFQAWQAHWREQRAAITR

SEQ ID NO: 22353 - protein, 266 aa, Bordetella parapertussis 12822
MSTAGVAVITGGASGIGAACARRFAAQGMAVAILDVAREAGEALAAELGAQGAPARFYACDVADAAAVQACADAVSAELGETALLVTSAALIPNTESVLDMDLAEHDRMWRVNYHGTVHACRSFGRILRARRAGHIVTLGSINSRNALPLPAYNPGKAALARLTELLAQELGRHGVRVNSVAPTYVMTPALQARIDAGQRDLAAMMSVHALDALPTPADIADAVAFLCSPQARLITGVLLPVDAGWASGVSYRTYAGGMPPQSHGA

SEQ ID NO: 22354 - protein, 311 aa, Zea mays
  misc_feature (58)..(58): Xaa can be any naturally occurring amino acid
  unsure (1)..(311): unsure at all Xaa locations
MATYFVLNTGAKIPSVGLGTWQADNGLVGDAVYAAVKAGYRHIDCAQAYNNEKEVGLXLRRVLDEGIVKREDLFITSKLWNINHAAEDVPVALNGTLKDLQTDYVDLYLMHWPVRMKKGAGFGPHAVVPSDIPATWAAMEELYDAGKARAIGVSNFSSKKLADLLAVARVRPAVDQVECHPVWRQGRLRAFCASQGIHLSAYSPLGSPGTATVKAGAVLEHPAVVSAAETLGKTPAQVALRWGVQMGHSVLPKSTDEGRIRANLDVFGWSLPEDLLAKFSEIEQERLIRAGFFVDPDSVFKSIEEFWDGEI

SEQ ID NO: 22355 - protein, 131 aa, Edwardsiella tarda
VTAINRGDYPKWDLYIQVLKPADLKNFDFDPLDATKVWPDVPERKIGEMVLNKNPDNVFQETEQVAMAPSNLIPGIEPSEDKLLQGRLFAYADTQFYRIGANGLSLPINKPHSVVNNGNQDGQLNSGHTLD

SEQ ID NO: 22356 - protein, 608 aa, Arabidopsis thaliana
MGGLIDLNVMETEEDETQTQTPSSASGSVSPTSSSSASVSVVSSNSAGGGVCLELWHACAGPLISLPKRGSLVLYFPQGHLEQAPDFSAAIYGLPPHVFCRILDVKLHAETTTDEVYAQVSLLPESEDIERKVREGIIDVDGGEEDYEVLKRSNTPHMFCKTLTASDTSTHGGFSVPRRAAEDCFPPLDYSQPRPSQELLARDLHGLEWRFRHIYRGQPRRHLLTTGWSAFVNKKKLVSGDAVLFLRGDDGKLRLGVRRASQIEGTAALSAQYNQNMNHNNFSEVAHAISTHSVFSISYNPKASWSNFIIPAPKFLKVVDYPFCIGMRFKARVESEDASERRSPGIISGISDLDPIRWPGSKWRCLLVRWDDIVANGHQQRVSPWEIEPSGSISNSGSFVTTGPKRSRIGFSSGKPDIPVSEGIRATDFEESLRFQRVLQGQEIFPGFINTCSDGGAGARRGRFKGTEFGDSYGFHKVLQGQETVPAYSITDHRQQHGLSQRNIWCGPFQNFSTRILPPSVSSSPSSVLFTNSNSPNGRLEDHHGGSGRCRLFGFPLTDETTAVASATAVPCVEGNSMKGASAVQSNHHHSQGRDIYAMRDMLLDIAL

SEQ ID NO: 22357 - protein, 515 aa, Paenibacillus polymyxa
MLTMFASSAMAEQDMNGHKPPNSAGSGVFYEIYINSFYDSNGDGHGDLKGITQKLDYLNDGNPRSGKDLQVSGLWLMPLNPSPSYHKYDVTDYYQVDPQYGNLNDFRTLTKEAKRKGVKVIIDLVINHSSSEHPWFKEASANPQSKYHDYYVWADENTNLDEKGSWGQQVWHKNPNGEGYFYGTFWSGMPDLNFDNPKVRKEMIKVGKYWLQQGADGFRLDAAMHIFKGQTKDGADKNITWWNEFRSEMEKINPNVYLAGEVWDKPETIAPYYESLHSLFNFDLGGTILNSVKNGRDQGIATFSEKTLKLYKSYNKAALDAPFLSNHDQTRVMSELGGDVRKAKLAASILLTLPGQPFLYYGEEIGMKGEKPDEYLREPMRWYKGEGLGQTKWEEPKYNKGEVSVEAQLRDNDSLLESYRTLIRLREEHEALRSDSLEPIQAGSASVTAYERSSGKETLYVYHNLSGEPVTIQMKDRDKEKRKVVFSTSKDAKVRKETVTIPAYSSLITQEDRKS

SEQ ID NO: 22358 - protein, 175 aa, Guillardia theta
MSSHKYHYQNPWTLWYDSSSNNVISYEWNQLLIRISTFDNLEDFLFLLTNIAYLTDLPLGSSYHVFKNNIEPSWEDESNKNGGKWILLLPKNSCCNINKIWEKSLSFTVFYENCNLINGIVGSVKKNHLRISIWTSKSEAKNDQINLGKNWYFFLKNYFDDFHFKIEYSPHKSFN

SEQ ID NO: 22359 - protein, 561 aa, Pseudomonas putida
MTHLKITGMTCDSCAAHVKEALEKVPGVQSAIVSYAKGAAQLALDPGTAPDALTAAVAGLGYKAMLADAPPTDNRTGLFDKVRGWMGAADKGSGGERPLQVAVIGSGGAAMAAALKAVEQGAQVTLIERGTIGGTCVNVGCVPSKIMIRAAHIAHLRRESPFDGGMPPTPPTILRERLLAQQQARVEELRHAKYEGILDGNSAITVRHGEARFKDDRDLSVSLNEGGERVVMFDRCLVATGASPAMPPIPGLKESPYWTSTEALVSDTIPERLAVIGSSVVALELAQAFARLGSQVTILARSTLFFREDPAIGEAVTAAFRAEGIKVLEHTQASQVAHVDGEFVLTTGQGEVRADKLLVATGRTPNTRSLALEAAGVAVNAQGAIVIDKGMRTSSPNIYAAGDCTDQPQFVYVAAAAGTRAAINMTGGDATLDLDAMPAVVFTDPQVATVGYSEAEAQRIGLQTDSRTLTLDNVPRALANFDTRGFIKLVAEAGSGRILGVQAVTPEAGEIIQTAAIAIRARMTVQDLANQLFTYLTMVEGLKLVAQTFSKDVTQLSCCAG

SEQ ID NO: 22360 - protein, 333 aa, Xanthomonas campestris pv. vesicatoria str. 85-10
MSNDTQPKIAIIGYGSQGRAHALNLRDSGFDVTVGLRAGGPTEAKAQADGFIVVAPSEAVKSADLVAILTPDMVQKKLYEEVIAPNMKQGACLLFAHGLNVHFDMIKPRADLDVVLVAPKGPGALVRREYEIGRGVPCIYAVYQDTSGKAEQFALTYAGGLGGARANIIKTTFKEETETDLFGEQAVLCGGASSLVQAGFEVLVEAGYQPEIAYYEVLHELKLIVDLFYEGGITRMLEFVSETAQYGDYVSGPRVIDAGTKARMKDVLTDIQNGTFTKNWVAEYDAGLPNYNKFKQADLEHPIEEVGKKLRAKMVWLNGQQQAAAAPANQQAA

SEQ ID NO: 22361 - protein, 581 aa, Nicotiana tabacum
MGNTCVGPSISKNGLFQSVSAAMWRTRAPDDSGSTTNGDSARGETTESGKDPDLVVQNKPPEQITMPKSEQKEEEPAKKEEGPVKPKKPVEMKRVGSAGLRTDSVLQKKTGNLKEFFSIGKKLGQGQFGTTFKCVEKATGKEYACKSIAKRKLLTDDDVEDVRREVQIMHHLAGHPNVISIKGAYEDAVAVHVVMEYCAGGELFDRIIQRGHYTERKAAELTRTIVGVLETCHSLGVMHRDLKPENFLFVNQKEDSLLKTIDFGLSIFFKPGDRFNDVVGSPYYVAPEVLKKRYGPEADVWSAGVIVYILLSGVPPFWAENEQGIFEEVLHGDLDFSSDPWPSISEDAKDLVRRMLVRDPKKRLTAHEVLCHRWVQVDGVAPDKPLDSAVLSRMKQFSAMNKLKKMALRVIAESLSEEEIAGLKEMFRMIDTDNSGQITFEELKVGLKRVGANLKESEIYDLMQAADVDNSGTIDYGEFIAATLHFNKIEREDHLFAAFSYFDKDGSGYITADELQQACEEFGIGDVHLEDMIRDADQDNDGRIDYNEFVAMMQKGNPVIGGGKKGLEHSFSTGFREALRL

SEQ ID NO: 22362 - protein, 554 aa, Staphylococcus aureus subsp. aureus Mu50
MMKFHHRLMLLISSILIISFVTLGIIIHASITYVLSEKHEQALATDARSYIYLVQDNEIDKVKEIVKQQNIDLLITKHDKKVFSSGKLKAIPNSDSYIQKRDVFIFNKKVNGYHVWIKGYNNDITEMHWTLWKYLILTCLVVLICLYFASRSFKRTLIRPIQEVTYATQLLANGYYHIRVPESNVVETKALFVSTNDLARRLQKLNNEQKIQSNRLKTTIENIPSAILMIDRNGKIVVANKAYYEQFNISHNIEQVGYHGYVNTEIEQLILESFKVEKPIYEQLEVAINQVHAKYFDISCVPILTRSQKSLQGILVVMHDITNLKQLENLRREFVANVSHELKTPITSIKGFAETLIDGAKNDAESLDMFLNIILKESNRIESLVTDLLDLSHIEQHTELDTDYMNLSDLTRRIIDNMMTQANQKNISIHTDIEKDVIVKAQESKIAQVITNLLTNAINYSYEDGDINVRVYRDDFRVIFEVQDFGIGIKLEDQQRIFERFYRVDKARSRDSGGTGLGLSITKHIVEAHQGNIEVNSQVGKGSTFKVILKDYKE

SEQ ID NO: 22363 - protein, 465 aa, Shewanella sp. MR-4
MTVLSVSRALSTSSVATSFAPYSRSLGVSSSKLTKSLLASIVTLSLMGAGVSTAYAAQPDAAKLAAGVEQKVIDWRRDLHQHPELSNREFRTSKIIEKHLKSLGLEVQTGIAHTGVVGILKGGKPGPLIAIRADMDALPVTEVVDVPFASKATDTYRGQTVGVMHACGHDTHVAMLMGVAENLAKVKDSLAGDVMFIFQPAEEGAPDGEEGGAELMLKQGLFAKRKPDQVFGMHVTSSMPSGMIGVRSGPAMASEDSFTIKVKGRQTHGSRPWNGVDPIVAAAQIITNVQTIVSRQVDITKAPAVVSFGAVNGGIRSNIIPDEVELIGTIRTFDQPMRADIKVRLAEIAELSAKTLGATATTEIHQGYPVVVNNPELVASMRPVLASVVGDKMLIEPGLITGAEDFSFYALESPGMFFFLGVTPKGTDPETAASNHSPAFYVDESALKVGVEAMTKVALTALKAQ

SEQ ID NO: 22364 - protein, 332 aa, Synechococcus elongatus PCC 6301
MAGATILVTGGAGYIGSHTVRALQAQGYQPIVLDNLSNGQRAIAAEVLQVPLIVGDTRDRLLLDRLFAEHPIQAVIHFAASIEVGESVRDPGNFYANNVSGSLTLLQAMVAAGCQQLVFSSTCATYGLPQVIPIPEDHPQAPINPYGRSKWMVEQFLQDFQAAYGLRSVIFRYFNAAGADPKGDLGEAHDPETHLIPLVLQAAAGQRPSIQVYGTDYPTSDGTCIRDYIHVCDLADAHVRGLTYLADGGATTAFNLGNGNGFSVKEVIATAERVTQRSIPVQLSDRRPGDAIALVGSSDKARQILGWEPQFPSLETMIQHAWQWQQRCDRPS

SEQ ID NO: 22365 - protein, 127 aa, Picrophilus torridus DSM 9790
MNKTGIAHIYASQNNTIILVTDPTGAETIAKSSGGMVVKNDRDEASPYAAMRAADMVSEKLREREITDLIIRVRAPGGSKSKIPGPGAQSAIRALSRAGFKILRIEEVTPIPHDGTKKKGGRRGRRV

SEQ ID NO: 22366 - protein, 454 aa, Ralstonia solanacearum
MLPPSPVIDVRAWLDRQRFSAFQWSVVLLCFFVVAIDGFDTACVGFIAPALAQDWHIGPAVLGTVFSAGLAGLMVGALIFGPLADRIGRKQTLLFTVGAFGLASVLSAFAPSVGALVALRFLTGLGLGGAMPNAIALTSEYCPERRRAFLTTVMFCGFTLGSGFGGIVAAQLVPEFGWRSVLLFGGVIPLLLLPVMVFALPESVRYLVAKGGQSAAVGRLLNRIAPVQVTPDTRFVLHETAAKGAPGSPVRQLFLPAFRTGTLLLWSVFFMSLLIVYLMTNWLPTLIHSGGVALALASRIAVMYQLGGTVGALVIGRMMDRYPATVVLCCTYGLGAGFLVLTGVSQGTMLAIAVTGVGFCISGSQIGANAFAAQFYPTASRVTGISWALGIGRLGSVCGALIGGVLLAANIGFQLLFLLVAVPAAIASLAIFLCGAQARHVETQGALPAVTEGA

SEQ ID NO: 22367 - protein, 222 aa, Vibrio vulnificus CMCP6
MPEIKQLFENNSKWSEEIKSHQPEYFSKLEEGQNPGFLWIGCSDSRVPAERLTGLYSGELFVHRNVANQVIHTDLNCLSVVQYAVDVLKVKHIIICGHYGCGGVNAAIENPRLGLINNWLLHIRDLYLKHRNWLGELPKEKWGDKLCEINVAEQVYNLGNSTIMESAWERGQDVEIHGVVYGIGDGLLQDIGVRCYSRESLEVNYQAAMAKILNSDVMKFHE

SEQ ID NO: 22368 - protein, 503 aa, Arabidopsis thaliana
GLTKQNQTSTMSLMFSSPVVTPALGSFTFSSRPRSNYIVMSAVRSNSASTCPILTKFQKDCATPTPYLRNVANAIADDMRDGLAVEGGGDLEMILTFVDALPSGNEEGLFYALDLGGTNFRVRSVQLGGKKERVLATESEQISISQKLMIGTSEELFGFIASKLANFVAKEKPGRFLLEEGRKRELGFTFSFPVKQTSIDSGTLSKWTKGFKVSGMEGKNVVACLNEAMEAHGLDMRVSALVNDGVGTLAGARYWDEDVMVGVILGTGTNACYVEQKHAIPKLRSKSSSGTTIINTEWGGFSKILPQTIFDLEMDETSLNPGEHLYEKMISGMYLGEIVRRVLLHMCETSDLFGHFAPAKLSTPLALRTEHLCKMQEDNTDDLRDVGSILYDFLDVEANMNARRRVVEVCDTVVKRGGRLAGAGIVAILEKIEKDTKRMGSGKRTVVAMDGALYEKYPQYRQYMQDALVELLGHKLASHVAIKHTKDVSGLGAALLAATNSIY

SEQ ID NO: 22369 - protein, 330 aa, Lactococcus lactis
MEVLMTVLVLGGAGYVGSHAVDMLLKRGYDVAVVDNLVTGHRESVPANVRFYEGDVRDHAFLASVFEKENIEGIMHFCAYSLVGESMQKPLMYFNNNVGGAQVILETMEEFGVKHIVFSSTAATFGIPEKSPISEKTPQKPINPYGESKLIMEKMMKWQSQATDMTYVALRYFNVAGAKDDGSIGEAHKNETHLIPIILQTALGQREFITIYGDDYHTPDGTCIRDYIDMEDLIEAHIKALEYLKAGGQSDQFNLGSSKGYSNLEVLETARKVTGKEIPSQMGERRAGDPDELVADSTKAGEILGWKAQNDLEHIITNAWKWHQSHPKGY

SEQ ID NO: 22370 - protein, 819 aa, Prosthecochloris aestuarii DSM 271
MLSRTKASMKKHACRTTSHGLAEAILLSFPTQAYRQAGNHSRIRMLTHTLGYPRLGAFREIKKACEGYWKGALDEKALRSASLEEKHRRWRAQQEAGMDLVACNDFSLYDHVQDMSFMLGVIPERYKPLCQNVSDLDLYFAMCRGYQEAGYDVTAMEMTKWFDTNYHYIVPEFTRNQDFHYYSRKCVEDFLEATSFCVKKPKVVLVGPISYLLLGKEKTDDFHRLDLINTLLPVYMAVLEDLHHAGCTWVQFDEPFLVTDLDDRTRKLYAEVYGVLRQHFPDVHFLLAAYFDGFGDNLQTAMSLPVDTLHLDVVNGLYDLPSVFRDVPPDMNISLGVVDGRNIWINDVNESLGILGLAVRELGHDRVMVSSSCSLLHVPYDVRNEPDGGTLPDFLGPWLAFARQKLDEIRLLADLMEDEVSADAFYGLAEHLKQLEKRKYSKFLRNSEVRAALDALAGEPVGRRQSIAERRVLQQEWLQLPVLPTTMIGSLPQTAELRSLRKRYRDGSLSAEDYGAGVRVLITNAIRWQESIGLDVLVHGEFERTDMVEFFGEHLDGVAFTGNGWVQSYGTRAVKPPIIYADVSRKKPMTVELARFAQGLSERPVKGMLTGPGTILKWSFVRNDQPLSDTAMQVALALREEVMDLELAGIEIIQIDEPGIREGLPLKKADRESYLEWAVRAFLVCSGGVGPATQIHTHMCYADYADILDALIRMDADVLTIETARSDMEVLSEFAAAGYPGQLGPGIYDIHSPRIPSVRELNTQLEKVLLHFAPRQIWVNPDCGLKTREWDEVVPAVENMVTAARKARHQVKKRALEEG

SEQ ID NO: 22371 - protein, 277 aa, Glycine max
  misc_feature (165)..(165): Xaa can be any naturally occurring amino acid
  misc_feature (188)..(188): Xaa can be any naturally occurring amino acid
  misc_feature (226)..(226): Xaa can be any naturally occurring amino acid
  unsure (1)..(277): unsure at all Xaa locations
MAKLHFALSFTLLLLLCNASAAPSTTLPAKIVSGFLSNAVPAFTKWVWSLKAPTKTAIGAKSMMKFESGYTVETVFDGSKLGIEPYAVEVLPNGELLILDSANSNIYRISSSLSLNSRPKLVAGSAEGYSGHVDGRFREARMNHPKGITVDNRRNIYAADIMNMXIRKISDSGVTTIAGGKWSRGGGXHIDDPSEEAKFPNELDVVYVGSSCSLLVIDRGNQAIRXIQLHFDDCAYQCENGFTLGIAMLVGAAFFGYMLALLQRRLGTIVASQDVSA

SEQ ID NO: 22372 - protein, 936 aa, Saccharomyces cerevisiae
MDGEMAIIESSNHVGTSSPTTETQFTIDSSALKDQETKESITNSPTSEVPIETKLPKSSDIVTEEKHPQNTTTDIENEVENPVTDDNGNLKLELPDNLDNADFSKLLEFDAKNDEALFNSNELLSHTMDPVNNIDLTHDHSREVSSKEDINIEPVNPDEDEREKTQDNTAAVKTEGIRNSEDTSIQKDEPTADAIYTDVHKLSVNKDTETLPTLVDEKNNMLHMRNNSITPIMFQQHELVGQPPQNTVTENNSTDAETTQRKLSEPIDASLPLPNEQPTIFAYARLDFQSFTFYVQTLHAIIGRRSENDFSHKVDVNLGPSKSISRRHAQIFYNFGTGRFELSIIGKNGAFVDDIFVEKGNTVPLRNKTKIQIGQIPFQFILPEQERNDDSKSPENADIAESEINTRNLKKNEPKSKKKITTGAKPKKAQTKPAVKKEKKPPKIPKKVYTLEEIPVEYRTKPTVSYSAMLTTCIRKYSTAKGMSLSEIYAGIRELFPYYKYCPDGWQSSVRHNLSLNKSFRKVSKEGKGWLWGLDEEYIAERERQKKKQSEIAVAKAQAAQLKLEQQQHKLQQVPQRGKKDIVSQRSNVNARKQNISQTLAANRAASNRKNTASDNQRTMKYLQEQLVILTRDRKGLSKQVIAAILTQALAMTINQVTQAAKNKGITGNPLTALMDKNPQHLNLILAAAVNAATAKVTKGEVKQLVNPETTAAAALAAKAQHSKPIRQPIVQTPHVPDRPPSQLSASASSHPNNYLHDKQPGSFDPSSLSRFFQPRQNARATSSVAATSVPAAASQNVDAQPKPKPAQDNDLESESGTSSSSSSSSESGSESDSGSDDGSASGSGDNSSTSSESESESDSGSEVDEKNNKNEKIDSESIKNNESKDDIPSKDENSSNDNREISKTDEEGHDSKRRKVSEDINEGITEVNVSLEEKL

SEQ ID NO: 22373 - protein, 143 aa, Corynebacterium diphtheriae
MYQQLGREATNEELAEESGIEESKIEMLLRQSRDPVSLDMPVGADEEAPLGDFIEDSEATDAESAVVASLRHSDIRTVLDTLEQREQDVIRLRYGLDDGVPRTLDQIGRQFGLSRERVRQIEREVMSKLRDGARAEKLRAYAQ

SEQ ID NO: 22374 - protein, 170 aa, Triticum aestivum
  misc_feature (90)..(90): Xaa can be any naturally occurring amino acid
  misc_feature (100)..(100): Xaa can be any naturally occurring amino acid
  misc_feature (143)..(143): Xaa can be any naturally occurring amino acid
  unsure (1)..(170): unsure at all Xaa locations
MGQAWGNLQDRLQGRRWKEHQVRKITDKVFDRLTEDAQKRDKEALRFEEVYIAVLCVYNDINKYLPGPHHDPPSKEKLRAMMEEYDVNLXGLLDREEFAXFIRKLTADSLCSISVKLLITLVAAPALAMATNRATEGRPGVGXVVPRCQRALLRITWALCCSITASVTPL

SEQ ID NO: 22375 - protein, 419 aa, Halobacterium sp. NRC-1
MALVLPNQSTETGQWVEIRWQRSPWKRLLRKSYSRRGRSSAHVRTGVPVTETIHRAPDDTYRVLDENGELVDGAEVPDLTDDELVEMYRYMKLARRFDERAVSLQRQGRIGTYPPLSGQEGAQIASAMALADDDWIVPSYREHGASLVRGLPLKDTLLYWMGDERGNAIPAEENIFTVAVPIASQIPHATGMGWASQLKDESDTAFMCYFGDGATSEGDFHEGLNFAGVYDTPNVFFCNNNQWAISVPREQQTATDTLAQKAAAYGFEGVQVDGMDPLAVYQVAHDAIEKAKDPDEDEMRPTLIEAVQYRFGAHTTADDPSVYREESEVEAWKDKDPIPRLETFLVETDRLDDAAIESIEADIEDAVADAIEAAEETPRPDPASMFENVYAEMPQRLEQQLEYFQSIRDEYGDEALLED

SEQ ID NO: 22376 - protein, 535 aa, Triticum aestivum
MALAFDEYGRPFIILREQEKKSRLQGLDAQKANIAAGKSVARILRTSLGPKGMDKMLQSPDGDVTITNDGATILELMDVDNQIAKLMVELSRSQDYDIGDGTTGVVVLAGSLLEQAEKLLERGIHPIRIAEGYEMASRIAVDHLESISTKYEFSATDIEPLVQTCMTTLSSKIVSRCKRALAEIAVKAVLAVADLERKDVNLDLIKVEGKVGGKLEDTELVQGIIVDKDMSHPQMPKRIEDAHIAILTCPFEPPKPKTKHKVDIDTVEKFQTLRGQEQKYFDDMVQKCKDVGATLVICQWGFDDEANHLLMQRELPAVRWVGGVELELIAIATGGRIVPRFQELTTEKLGKAGLVREKSFGTTKDRMLYIEKCANSKAVTIFIRGGNKMMIEETKRSIHDALCVARNLIINNSIVYGGGSAEISCSIAVDAAADRHPGVEQYAIRAFADALDAIPLALAENSGLPPIDTLTVVKSQHVKENNSRCGIDCNDVGTNDMKEQNVFETLIGKQQQILLATQVVKMILKIDDVITPSEY

SEQ ID NO: 22377 - protein, 328 aa, Corynebacterium diphtheriae
MKLLVTGGAGYVGSVCSTVLLEQGHEVTIVDNLTTGNRDAVPLGATFVEGDIKDVAENVLSSDSFDAVLHFAARSLVGESVEKPDEYWQHNMVTTLALLDAMKRNNVRNIVFSSTAATYGEPETVPITEDAPTHPTNPYGATKLSIDYAITSYAHAYGFAATSLRYFNVAGAYGLVGENREIETHLIPLVLQVALGHRDKIFMFGDDWPTEDGTPIRDYIHIRDLADAHILALQSNVEGSHRIFNLGSGEGYSVKQVIDTCREVTGHPIPAEVAPRRAGDPAVLIASSAKAQSELGWKPQRTDLHTIVSDAWAFTSQLGDKAHSASRG

SEQ ID NO: 22378 - protein, 126 aa, Brassica napus
RKKLLRAQTEREILQSLVHPFLPTLYTHFETEKFSCLVMEFCPGGDLHTLRQRQPGKHFSEQAVKFYIAESLLAIEYLHMLGIVYRDLKPENVLVREDGHIMLSDFDLSLRCLVSPTLVKSTAIES

SEQ ID NO: 22379 - protein, 392 aa, Shewanella sp. ANA-3
MSKATLNTDTVHRVGFLDKASLHIPILRILQADGTTYETAVLPVIDEALATKIYDTCVFTRVLDERMLGAQRQGRISFYMTCTGEEAAIVGSVAALDQEDVILAQYREHAALRYRGFTTEQFMNQMFSNEKDLGKGRQMPIHYGCAALNYQTISSPLATQIPQATGVGYSLKMQGKRNVAVCYFGEGAASEGDFHAGLNMAAVLKCPVIFFCRNNGYAISTPTEEQFAGNGIASRGVGYGMHTIRVDGNDMLAVLAATQQARAYAIEHNAPVLIEAMTYRLGAHSSSDDPSGYRSKEEEAKWQQHDPVKRFKLWLINKGWLAEADDAQRYEKYREEVLAAVKVAEKLPIPMLDEIIEDVYDKPTPALKKQLSELKEHIKKYPQSYPKSAGRL

SEQ ID NO: 22380 - protein, 772 aa, Magnetospirillum gryphiswaldense
MTMFNGDVEDGGRSNVSCGKDLKRYLMLMGVVALVVLFGAFIYRQSSGGLRLGAMMEQMTGARGAVNVPAQHGAPSAVVDPAMSVPARARVAPPSAAGAIATFPPVVDFGPAPVVSGGPFTGVVTLLRNSVVSVTASSSGGQVMPDPLGLVNPDGLPRFANPTTRSVENIGTGVIVRNDGFIVTNYHVVRGANSVYVTVKDDVGSIRYSGEIVKMDEALDLALLKITPKVQLTAAVLGDSDAVNVADEVIAIGTPFGLDMTVSRGIISAKRKTMVIEGMTHSNLLQTDAAINQGNSGGPLVAANGTVVGINTAIYTPNGAFAGIGFAVPSNQARLFALDEVGWLPTSTAEGPAMGLVAMQRPMGVGVGAAGPVIAAGTPSPHVDGRQNMDCSNCHDIIPAGNGFQAPMMPVAAPVPPPPIPANAVSPHTDGRQNMTCNTCHQFVGGAAAGPIAFGQPMMPIAAPQQPAPAIRANAANPHTDGRQNMNCASCHQIIGSVGAAPIAAPGAGGAYRFSQPPGSLAINIQGPRGGQGAVAGSGGSRASLLGAALTPLTQRLGLQANLPAGRGVFVNGVTPNTPAASAGLRPGDVILKVDGRPVHQPEEVAAIMAEMPNGRSVRIGVLRAGDVSNMSLVTGPSGLAAAVVQAPTAPVVMAGGAPTVPGVQPVIPKVPTEFNWLGMEIETFMAPQPVVGMPGATPVAGGGKGAQVAEVLAGSRAAVAGLQANDLIIEVNNRPVTSPARLDAAIKAATAAGQQILLKVHRNGQEFWIVL

SEQ ID NO: 22381 - protein, 474 aa, Halobacterium sp. NRC-1
MVVGDISTGTDVAVVGAGPGGYVAAIRAGQLGLDVTLVEKDAYGGTCLNYGCIPSKAMITASGVAHEAGHAEEMGVYADPDVDVAEMVDWKDGVVDQLTGGVEKLCKANGVNLIEGRAEFAGSDKLRVVHGGDGQGSETIEYEHAIVSTGSRPIEVPGFDFGDDPVLDSRQALAMAELPSSMVIVGGGYIGMELSTVFAKLGVDVTVVEMLDGILPQYGDDIARPVRQRAEELGIDFHFGLAADSWTDTDDGIVVTAADEDGEETEFETEKVLVAVGRQPVTDTLNLDAVGLEPNDDGRLETDHEARTDVENVFAIGDVAPGPMLAHKASKEGEVAAEVIAGEPAALDYQAVPAAVFTDPEIGTVGLTEDDAAAQGFDPVVGTFPFNASGRALTTGHDDGFVEVVADEESGFLLGAQIVGPEASELVAELGLAIEMGATLEDVASTIHTHPTLSEATMEAAEHALGHAVHTLNR

SEQ ID NO: 22382 - protein, 458 aa, Arabidopsis thaliana
MAATRQLRTLQSQPENKVCVDCAQKNPQWASVSYGIFMCLECSGKHRGLGVHISFVRSVTMDSWSAIQIKKMEAGGNERLNKFFAQYGIAKETDIISKYNSNAASVYRDRIQALAEGRPWNDPPVVKEANKKPPLAQGGYGNNNNNNNGGWDSWDNDDSYKSDMRRNQSANDFRASGNREGAHVKSKSSEDIYTRSQLEASAAGKESFFARRMAENESKPEGLPPSQGGKYVGFGSSSAPPPRNNQQDDVFSVVSQGFGRLSLVAASAAQSAASVVQTGTKEFTSKVKEGGYDHKVSETVNVVANKITEIGHRTWGIMKGVMAMATQKVEEFTKEGSTSWNQQSENEGNGYYQNFGNGNKAANSSVGGGRPQSSSTSGHYNNSQNSNSWDSWGENENKKTEAVAPKGSSASNDDDGWTGWDDHDAKDDGFDGHYQSAGDKKSAGHNGKSDPLDWWRFL

SEQ ID NO: 22383 - protein, 159 aa, Shewanella sp. ANA-3
MALATFGAGCFWGVEYFFRQVNGVTNATCGYMGGNNEATTYEEVKKGKTGHAEVVQVEFDPAIVSYDELLDVFWKNHNPTTLNMQGGDIGTQYRSTIFFHDREQKATAEASKLAFARSGRWGLRHIVTEIVPLQQFHVAEEYHQNYIDKNNLPSCHLEY

SEQ ID NO: 22384 - protein, 470 aa, Corynebacterium efficiens YS-314
METFVSRNNILAARDASDLVIESGDLPQPGGTDKKFEREIVASDNNKAVLHYPGGEFEMGIKQATEGNSGVILGKMLSETGLVTFDPGYVSTGSTESKITYIDGDAGILRYRGYDIADLAENATFNEVSYLLIKGELPTPEELHKFNDEIRHHTLLDEDFKSQFNVFPRDAHPMATLASSVNILSTYYQDQLDPLDEAQLDKATVRLMAKVPMLAAYAHRARKGAPYMYPDNSLNARENFLRMMFGYPTEPYEVDPIMVKALDKLLILHADHEQNCSTSTVRMIGSAQANMFVSIAGGINALSGPLHGGANQAVLEMLEEIAANGGDATDFMNRVKNKEKGVRLMGFGHRVYKNYDPRAAIVKDTAHEILEHLGGDPLLDLALKLEEIALNDDYFISRKLYPNVDFYTGLIYRAMGFPTDFFTVLFAIGRLPGWIAHYREQLADPGAKINRPRQIYTGETARKIIPREER

SEQ ID NO: 22385 - protein, 578 aa, Nicotiana tabacum
MGNTCVGPSISKNGIFQSVSAAMWRSRSPDDTASTTNGESARIETPISVKEPDSPLPVQEPPEQMTMPKSEKKEEEKEQPKKPKKPAEMKRVSSAGLRTDSVLQKKTGNLKEFFSIGKKLGQGQFGTTFKCVEKATGKEYACKSIAKRKLLTDDDVEDVRREVQIMHHLAGHPHVISIKGAYEDAVAVHVVMEFCAGGELFDRIIQRGHYTERKAAELTRTIVGVVEACHSLGVMHRDLKPENFLFVDQKEDSLLKAIDFGLSIFFKPGDRFTDVVGSPYYVAPEVLRKRYGPEADVWSAGVIIYILLSGVPPFWAENEQGIFEQVLHGDLDFTSDPWPSISEDAKDLMRRMLVRDPRRRLTAHEVLCHPWVQVDGVAPDKPLDSAVLSRMKQFSAMNKLKKMALRVIAESLSEEEIAGLKEMFKMIDTDNSGQITFEELKDGLKRFGSNLKESEIYDLMQAADVDNSGTIDYGEFIAATLHMNKIERQDHLFAAFCYFDKDGSGYITADELQQACEEFGIGDVRMEEMIREADQDNDGRIDYNEFVAMMQKGNPVLGGGKKGLEHSFSIGFREAVKL

SEQ ID NO: 22386 - protein, 198 aa, Oryza sativa (japonica cultivar-group)
MKRFAFEDSDMARVLMLMSSHGQQEQALALPVPVQLPLAAARGDRAPERAFVCKTCNRVFPSFQALGGHRASHKKPRLDGDGDFSLSKPRLHGCSICGLEFAIGQALGGHMRRHRAMTGGMPRAIVVDKKPDVVDVHVHGHDDDGGIKRGGLWLDLNHPPCDDAGDDDVECGHNAAGAGITFHQFLDTGAMAVDCVGY

SEQ ID NO: 22387 - protein, 150 aa, Schizosaccharomyces pombe
MQIFVKTLTGKTITLEVESSDTIDNVKSKIQDKEGIPPDQQRLIFAGKQLEDGRTLSDYNIQKESTLHLVLRLRGGGKKRKKKTYTTPKKIKHKHKKVELAVLKYYKVEDDGSVKRLRRECPNCGASTFMANHKDRLYCGRCHLTLKLEA

SEQ ID NO: 22388 - protein, 168 aa, Oryza sativa (japonica cultivar-group)
MEVATNTATRSPVKLMLVLTLSPASKVIAKGGGGVKRVHLDGGAFQCRTCGRRFSTFQALGGHRTSHKRPRVRADGLDLLLGARPGKLGAGGASTPVVHRCDMCGKVFATGQALGGHMRRHRPLVSRNGTMSTTWTAAAAATTMSGSSSEERDDDDDDVHNYNFIHFL

SEQ ID NO: 22389 - protein, 284 aa, Corynebacterium efficiens YS-314
MSPTPSPTLSLSDGSEIPQIGLGTWQMHGEEAYRTVREAIGMGYRHIDTAKLYDNEVEVGRAVTDAIRSGEVTRDELFITSKVWNDDQGREQAARAFQASLARLGLDYLDLYLVHWPCPRKGLYNETFEAVARIQGLGQVQSIGVANFYAGVLEDLVVTTGIVPAVNQVELHPGFSQAPLRALHDRLGVVTTAWAPLARGGVLSHPVIKGIAGRYGVPASAVVLRWLVQLGVVAIPKSSDPGRLRSNLDVHGFQLSVEEVERITALDEGPGMGRLFHDPEEFPA

SEQ ID NO: 22390 - protein, 603 aa, Oryza sativa
MELALVGNPSNGVAKPSCNSVGSLPVVSSNAVIHPPVTSAARATLGRHLARRLVQIGATDVFAVPGDFNLTLLDYLIAEPGLKLIACCNELNAGYAADGYARALVGAFVTFTVGGLSVLNAIAGAYSENLPVICIVGGPNSNDYGTNRILHHTIGLPDFSQELRCFQTITCYQAVINNLDDAHEQIDTAIATALRESKPVYISVGCNLAGLSHPTFSREPVPLFISPRLSNKANLEYAVEAAADFLNKAVKPVMVGGPKIRVAKAKKAFAGIAESSGYPFAVMPSAKGLVPEHHPRFIGTYWGAVSTTFCAEIVESADAYLFAGPIFNDYSSVGYSLLLKREKAVIVQPDRVVVGNGPAFGCILMTEFLDALAKRLDRNTTAYDNYRRIFIPDREPPNGQPDEPLRVNILFKHIKEMLSGDTAVIAETGDSWFNCQKLRLPEGCGYEFQMQYGSIGWSVGATLGYAQAAKDKRVISCIGDGSFQMTAQDVSTMLRCGQKSIIFLINNGGYTIEVEIHDGPYNVIKNWDYTGLIDAIHNSDGNCWTKKVRTEEELIEAIATATGAKKDCLCFIEIIVHKDDTSKELLEWGSRVSAANSRPPNPQ

SEQ ID NO: 22391 - protein, 581 aa, Nicotiana benthamiana
MGNTCVGPSISKIGLFQSVSAAMWRTRMPDDSGSTTNGDSARGETAESSKDPNLVVPSKPPEQITMPKSDQKEEEPAKKEEGPEKPKKPVQMKRVGSAGLRTDSVLQKKTGNLKEFFSIGKKLGQGQFGTTFKCVEKATGKEYACKSIAKRKLLTDDDVEDVRREIQIMHHLAGHPNVISIKGAYEDAVAVHVVMEYCAGGELFDRIIQRGHYTERKAAELTRTIVGVLEACHSLGVMHRDLKPENFLFVNQKEDSLLKTIDFGLSIFFKPGDRFNDVVGSPYYVAPEVLKKRYGPEADVWSAGVIVYILLSGVPPLWAENEQGIFEEVLHGDLDFSSDPWPSISEDAKDLVRRMLVRDPKKRLTAHEVLCHRWVQVDGVAPDKPLDSAVPSRMEQFSAMNKLKKMALRVIAESLSEEEIAGLKEMFRMIDTDNSGQITFEELKVGLKRVGANLKESEIYDLMQAADVDNSGTIDYGEFIAATLHFNKIEREDHLFAAFSYFDKDCSGYITADELQQACEEFGIGDVHLEDMIRDADQDNDGRIDYNEFVAMMQKGNPVIGGGKKGLEHSFSTGFREALRL

SEQ ID NO: 22392 - protein, 542 aa, Kineococcus radiotolerans SRS30216
MSKIIAFDEEARRGLERGMNQLADAVKVTLGPKGRNVVLEKKWGAPTITNDGVSIAKEIELEDPYEKIGAELVKEVAKKTDDVAGDGTTTATVLAQALVREGLRNVAAGANPMGLKRGIEKAVEAVTEQLLGAAKEVTTKEQIAATAGISAGDASIGELIAEALDKVGKEGVITVEESNTFGLELELTEGMRFDKGYISPYFVTDAERQETELEDPYILILNSKISTVKDLLPLLEKVMQSGKPLVIVAEDVEGEALATLVVNKIRGTFKSVAVKAPGFGDRRKAMLGDIAILTGGQVISEEVGLKLDTADLDLLGRARKVVVTKDETTIVEGAGDADAIAGRVGQIRAEIERSDSDYDREKLQERLAKLAGGVAVIKAGAATEVELKERKHRIEDAVRNAKAAVEEGIVAGGGVALIQAGVLAFEKLELVGDEATGANIVKVAIEAPLKQIAINAGLEGGVVAEKVRNLPTGHGLNAATGEYVDLLGAGINDPVKVTRSALQNAASIAALFLTTEAVIADKPEKAAAAPAGGDGGMGGMDF

SEQ ID NO: 22393 - protein, 299 aa, Oryza sativa (japonica cultivar-group)
MTRACCEACANLKAAFLVAVVFLGLSTAVTMVFAREVALDPVAAAKRNEGEASGLLAVFKGMKNLPVGMPSVLIVTGLTWLSWFPFILFDTDWMGREIYHGRPDGSPAEVTAFQEGVRQGAFGLLLNSIVLGISSFLIEPMCRRLGARAVWVMSSAVVCVAMAAVSVLSAWSLGDFGGSVQDAARAPAEEGGVRASALALFVFLGLPFAVLCSVPFAVTAQLAASRGGGQGLCTGVLNISIVVPQMAIALGAGPWDELFGEGNIPAFAMASVFAAAAAAAGVVLLPKVSVRSVSMAGGH

SEQ ID NO: 22394 - protein, 236 aa, Vibrio vulnificus YJ016
MYSDARIFREVRRNMPEIKQLFENNSKWSEEIKSHQPEYFSKLEEGQNPGFLWIGCSDSRVPAERLTGLYSGELFVHRNVANQVIHTDLNCLSVVQYAVDVLKVKHIIICGHYGCGGVNAAIENPRLGLINNWLLHIRDLYLKHRNWLGELPKEKWGDKLCEINVAEQVYNLGNSTIMESAWERGQDVEIHGVVYGIGDGRLQDIGVRCYSRESLEVNYQAAMAKILNSDVMKFHE

SEQ ID NO: 22395 - protein, 423 aa, Legionella pneumophila subsp. pneumophila str. Philadelphia 1
MTQKTAKLSIDGQETIDLPIYTPTLGNDVIDITQLGSHGVFTFDQGFLSTASCESKITYIDGDKGILLYRGYPIEQLAEKKDFLDVSYLLLNGELPNKEEKKAFVSLINNHTMVHQQMYQFLNGFRRDAHPMAIMVGIVGALSAFYHESMDLNNAQDRFISAIRLVAKMPTLAAMSYKYSIGMPYMYPKNKMSYAENFLHMMFGVPSEDTTPDPVLVRAMDTIFILHADHEQNASTSTVRLAGSTGANPFACISAGIGALWGPAHGGANEACLNMLKEIGDVSRIDHYIKRAKDKNDPFRLMGFGHRVYKSYDPRAKVMRKTCYDVLEAVGAKDAPLFKLAMELERIALEDEYFIEKKLYPNVDFYSGLTLSAIGIPTNMFTVIFALARTVGWMSHWMEMVATKSRIGRPRQLYTGEKIRDVK

SEQ ID NO: 22396 - protein, 317 aa, Arabidopsis thaliana
MGLQELDPLAQLSLPPGFRFYPTDEELMVEYLCRKAAGHDFSLQLIAEIDLYKFDPWVLPSKALFGEKEWYFFSPRDRKYPNGSRPNRVAGSGYWKATGTDKVISTEGRRVGIKKALVFYIGKAPKGTKTNWIMHEYRLIEPSRRNGSTNLDDWVLCRIYKKQTSAQKQAYNNLMTSGREYSNNGSSTSSSSHQYDDVLESLHEIDNRSLGFAAGSSNALPHSHRPVLTNHKTGFQGLAREPSFDWANLIGQNSVPELGLSHNVPSIRYGDGGTQQQTEGIPRFNNNSDVSANQGFSVDPVNGFGYSGQQSSGFGFI

SEQ ID NO: 22397 - protein, 1037 aa, Zea mays
MAPQTRPSVQTRFLLDTMVGKDRTNQENWSRVFASFDVITNGLVAVEKAHHQLMAQVELAALVAENVAMERTELYHKVEETGKVVAQMRLEIERQLGDFTVGLEGDDYFTIYKIPESIWVSSAAMHLEFSGAQWWKCYKLQHGMVGWQGFVAAVTSKFGANAYPRALRRLMSLRQTDSLDSYISEFEKVRAILLAQIQPEVLDRNKFKGQKQTTTAKFQGFPNKMENKGGYQASDLAKERQVREYRKLNGLCYACGDKFEPGHLAKCTKRNQIQLNAVALTGTASGNSMRIISTVGKQAMVMLIDSGSSSDFISEHMVQKLGLAVAVCPSASVKMADGNCIVSDKLGKEEGDKAREVQQLLHEYEDIFAVPKQLPPSRPHDHHIPLIPGSVPVNVKPYRYSSFHKDEIGKQVVSMLEAGLSTQLWLVRILEVKPHIIKRLFWWKGLKADVASFIKQCNTCQQAKVERVHYPGLLQPLPIPQGAWQDLTMDFIEGLPKSEGYNSILVVVDRFSKSLVTDNIVKVFTSNFWKALFQALGTKLALTTAYHPQSDGQSERNSVVSRPCPKLAFKFFGPFKVLQKVGSVAYKLELPAAAQIHPVFHVSQLNPYTPSYQPVFSDLSQIVDLSSVEVYPVKTVEHRLVRKGSHSVVQVKVAWSNLPDDALTWEDFEVLKRRFPNVIDWGQLNPGRGKDVSTVVVIREKLAELYESEQQWSKAAQMLSGIDLDSGIRMLDDTNKLSKCVQIARLYLEDDDAVNAEAFINKASFLVTNSHQEVLNLQYKVCYARILDLKRRFLEAALRYYDISQIEQRKIGDEEIDENALEQALSAAVTCTILAGAGPQRSRVLATLYKVVQQIPINLDVYGFSGKYGLTEIIASGLSWVVSDLVQCQPDERCSKLKIYPILQKVYLERILRKPEIDAFAEELRPHQKALLPDKSTVLDRAMIEHNLLSASKLYTNISFDELGTLLGIDPRKAEKIASRMIYEDRMRGSIDQVEAVIHFDDDTEELQQWDQQIAGLCQALNDILDSMSSKGITIPV

SEQ ID NO: 22398 - protein, 475 aa, Vibrio vulnificus YJ016
MSKEIKAQVVVLGAGPAGYSAAFRCADLGLDTVLIERYNTLGGVCLNVGCIPSKALLHVAKVIEEAKALAEHGIVFGEPQTDIDKIRLWKEKVINQLTGGLGGMAKMRKVNVVNGFGKFTGPNTIEVEGEDGKTVVNFDNAIVAAGSRPIKLPFIPHEDPRIWDSTDALELKEVPGKLLIMGGGIIGLEMGTVYHSLGSQIDVVEMFDQVIPAADKDIVKVYTKRISKKFNLMLETKVTAVEAKEDGIYVSMEGKKAPAEAERYDAVLVAIGRVPNGKLIDGEKAGLEIDERGFINVDKQMRTNVPHIFAIGDIVGQPMLAHKGVHEGHVAAEVISGKKHYFDPKVIPSIAYTEPEVAWVGKTEKEAKAEGINYEVATFPWAASGRAIASDCADGMTKLIFDKETHRVIGGAIVGTNGGELLGEIGLAIEMGCDAEDIALTIHAHPTLHESVGLAAEVFEGTITDLPNAKAKKKK

SEQ ID NO: 22399 - protein, 187 aa, Arabidopsis thaliana
MHTWKNQIFSDSQFVLLFMGKNCSIIFPEPHLFISHVFIIHLNVLFLVKKINKNNLRFVGSTSGQSQLVCSGCRNLLMYPVGATSVCCAVCNAVTAVPPPGTEMAQLVCGGCHTLLMYIRGATSVQCSCCHTVNLALEANQVAHVNCGNCMMLLMYQYGARSVKCAVCNFVTSVGGSTSTTDSKFNN

SEQ ID NO: 22400 - protein, 383 aa, Campylobacter jejuni subsp. jejuni NCTC 11168
MNLIPEILDLQGEFEKIRHQIHENPELGFDELCTAKLVAQKLKEFGYEVYEEIGKTGVVGVLKKGNSDKKIGLRADMDALPLQECTNLPYKSKKENVMHACGHDGHTTSLLLAAKYLASQNFNGALNLYFQPAEEGLGGAKAMIEDGLFEKFDSDYVFGWHNMPFGSDKKFYLKKGAMMASSDSYSIEVIGRGGHGSAPEKAKDPIYAASLLIVALQSIVSRNVDPQNSAVVSIGAFNAGHAFNIIPDIATIKMSVRALDNETRKLTEEKIYKICKGIAQANDIEIKINKNVVAPVTMNNDEAVDFASEVAKELFGEKNCEFNHRPLMASEDFGFFCEMKKCAYAFLENENDIYLHNSSYVFNDKLLARAASYYAKLALKYLK

SEQ ID NO: 22401 - protein, 409 aa, Oryza sativa (japonica cultivar-group)
MALHAAPPPPPPFTAGRLPTTSRRPCFSAGRIFRCSLPAAAARPRNAAFLAPLRTSSAARSGSQALPKGWDTAAGVVEIDGTPGTSSSPHVVCFGELLIDFVPTVNGVSLAEASAFKKAPGGAPANVAVGIARLGGSSAFIGKVGDDEFGYMLADILKENNVNNQGLLFDAHARTALAFVTLRNDGEREFMFYRNPSADMLLEEKELDLDLIRKAKIFHHGSISLITEPCKTAHIAAAKAAKDAGVLISYDPNLRLPLWSSADDARDGILSIWETADVIKISEEEVSFLTKGEDPYDDSVIKKLMHPNLKLLLVTEGPEGCRYYSKEFNGRVGGLKVNAVDTTGAGDAFVAGILSQLSVDFSLLQDEGRLKEALKFANVCGALTVTERGAIPALPTRQQVVDALTKVVA

SEQ ID NO: 22402 - protein, 354 aa, Triticum aestivum
MASLADLVNLDLSDCTDKIIVEYLWVGGSGIDIRSKARTVNGPITDASQLPKWNYDGSSTGQAPGEDSEVILYPQAIFKDPFRRGDNLLVMCDCYTPQGVPIPTNKRHNAAKIFNTPKVAAEETWYGIEQEYTLLQKDVNWPLGWPIGGYPGPQGPYYCAAGADKAFGRDIVDAHYKACLYAGINISGINGEVMPGQWEFQVGPSVGIAASDQLWVARYILERITEVAGVVLSLDPKPIPGDWNGAGAHTNYSTKSMREAGGYEVIKTAIEKLGKRHAQHIAAYGEGNERRLTGHHETADINTFKWGVADRGASVRVGRDTEKDGKGYFEDRRPASNMDPYVVTSMIAETTLLL

SEQ ID NO: 22403 - protein, 363 aa, Arabidopsis thaliana
MGSTAETQLTPVQVTDDEAALFAMQLASASVLPMALKSALELDLLEIMAKNGSPMSPTEIASKLPTKNPEAPVMLDRILRLLTSYSVLTCSNRKLSGDGVERIYGLGPVCKYLTKNEDGVSIAALCLMNQDKVLMESWYHLKDAILDGGIPFNKAYGMSAFEYHGTDPRFNKVFNNGMSNHSTITMKKILETYKGFEGLTSLVDVGGGIGATLKMIVSKYPNLKGINFDLPHVIEDAPSHPGIEHVGGDMFVSVPKGDAIFMKWICHDWSDEHCVKFLKNCYESLPEDGKVILAECILPETPDSSLSTKQVVHVDCIMLAHNPGGKERTEKEFEALAKASGFKGIKVVCDAFGVNLIELLKKL

SEQ ID NO: 22404 - protein, 139 aa, Triticum aestivum
  misc_feature (57)..(57): Xaa can be any naturally occurring amino acid
  misc_feature (74)..(74): Xaa can be any naturally occurring amino acid
  misc_feature (80)..(80): Xaa can be any naturally occurring amino acid
  misc_feature (84)..(84): Xaa can be any naturally occurring amino acid
  misc_feature (101)..(101): Xaa can be any naturally occurring amino acid
  misc_feature (104)..(104): Xaa can be any naturally occurring amino acid
  misc_feature (131)..(131): Xaa can be any naturally occurring amino acid
  misc_feature (135)..(135): Xaa can be any naturally occurring amino acid
  unsure (1)..(139): unsure at all Xaa locations
ADLIAEHEIWAAVHPLAKNEAFNCSNGDVFKWKQLWPMLADRFGVEWAGYEGEDNRXVLADAMAGKEPVWAEIXRENELXATEXQEIANWWFVDAMFNVEXEHXDSMNKSKEHGFLGFRNTANSFNAWIDXMKVXKIVP

SEQ ID NO: 22405 - protein, 455 aa, Yarrowia lipolytica CLIB122
MHIKISTDFAIQNLHCTTMIRPLLRLCGQRTAATPFVSFFRPPKKPLSGISFARHYSPTKKPPSEVPTPTPGNYLVPITGPPGDTPRDTDLLIKSLTHKSLLPENNLVRCTVFDSDGNVTVASGEFKRTELLNKHGLLPRDLRKLDTGVNSIVPTILVRDNSILINLLHIRALIKADKVLLFDVFGSTDSKTQSLFMYDLGHKLKKSNKTMGSLPYEMRALEAIFISVIAALDAEMKVHTTVINGILSELEQDIDREKLRHLLIQSKKLSAFLQKATLIRDVIDELLDTDEDLAGLYLTEKKAGHPRAIDDHSEVEMLLETYYKHCDEIVQTVGNLVSNIRNTEEIVNIILDANRNALMHLDLKFQIGALGLAGGTFIASLYGMNLKNFIEESYWGFLGVTGVASLLTVWIIAHFLKSLRQVQRVTMTSDKKKAMKKKDTVAEKRRNHLRNWLTK

SEQ ID NO: 22406 - protein, 388 aa, Ganoderma lucidum
HWHGFFQKGTNWADGPAFINQCPIASGHSFLYDFQVPDQAGTFWYHSHLSTQYCDGLRGPFVVYDPKDPLKGLYDVDNDSTVITLSDWYHVAARLGPSFPLGSDSTLINGLGRSTTNATAGLAVINVTQGKRYRFRLVSLSCDPNYTFSIDGHEHVPIIEADGIATQPVTANAIQIFSAQRYSFVLTANQTIGNYWIRANPSFGNIGFTNGINSAILRYSGADPIEPTTAQQTTQNLLNEVDLHPFPGRATQGGTDVAINMVFNFNGSNFFINNASFTPPTVPVLLQILSGAQAAQGLLPSGSVYTLPINKSIELTFPATVNAPGAPHPFHLHGHSFAVVRSAGSTEYNYNNPVWRDVVSTGTPAAGDNVTIRFQTDNPGPWFLHCHI

SEQ ID NO: 22407 - protein, 111 aa, Saccharomyces naganishii
SHTIVELIENGYNCVIVDNLCNSSYESVARLEVLCKTHIPFYHVDLCDREPMEGIFKENKIDSVIHFAGLKAVGESTEIPLKYYHNNILGTLVLLEMMQRYDVEKLVFSSS

SEQ ID NO: 22408 - protein, 459 aa, Rubrivivax gelatinosus PM1
MVVVSNRIGDPRKAAAGGLAVALGDALSESGGLWFGWSGKVVAGGARGEGDLHLQPSGKVTLATLDLGSDDHAAYYAGYSNRVLWPVFHYRLDLAQFDDGYFEGYQRVNRLFARKLSTLLKPDDIIWVHDYHLIPLAAELRALGCRQRIGFFLHIPMPPPLVMAAIPAHDMLMRSLFAYDLIGLQSEADVAHFARYVEMEAGAERLGRDQYRAFGQQVCARAFPIGIDVDEFQALAQTPESIETRETLRSQYPLRQLLIGVDRLDYSKGLPQRLRAFHRLLADYPENRNSATLIQVATPTREGVESYEDIRRELEGLSGQINGEYGELDWMPVRYIHRTLARRRLPGLYRAGRVALVTPLRDGMNLVAKEFVAAQDAADPGVLVLSRFAGAAEQMRAALLVNPYDIGATAGAVQRALRMPLSERVERHQALLAGVREHDVHRWRREFLQALQAAERAPG

SEQ ID NO: 22409 - protein, 605 aa, Rhodospirillum rubrum
MSEYRYPAVNYETCGNLLAMFLAQAERFGERPFLWSKSEGGYAPWSWASVHDQVIALANAMIDQGLAPGDRVVLASENRPDWTIADLAILAAGAIPVPAYATHTEADHLHVLDNVEAAMAIVSTPLVAERFLRAAARAKRRPLVVMMDFDDAVVVPAGLTVLAWNAMMAEGEGRGVPAVVHRIQTDDLASIIHTSGTGGTPKGVMLAHRSILHNCHGAFKLLETIGLEEEVFLSFLPLCHSYEHTTGLFFPISLGAQVYFAEGAETLAANMVEAKPTIMTAVPRLYEMMRARILRAVEKEGGLKEKMFREAVDLGRRRMDDPASLGVKDKLTDAALDKLVRHAVKARFGGRLKAMISGGGPLNPDVGYFFRALGIPVLQGYGLTETAPVVSCNMPKKVKMNTVGPALYGVDIRIASDGEILVKGPLVMDGYWNDPESTRAVLDPDGWLHTGDVGTLDEDGFIQITDRKKDLIVNSGGHNISPQRVEGILGLEPEIGVGVVFGDRMPHLVALIVPEKEFLARWSKETGKPADLALVYEDADLRQAIGKAVERANAKLGTVEKIRKFALLPEPMSVENDQLTHSMKARRHVLRDRYGALIAGLYSGA

SEQ ID NO: 22410 - protein, 480 aa, Bordetella parapertussis 12822
MPVLRRTKIVATLGPATSTPERLDGLIRAGMDVARLNFSHGSAQDHRERVRLVRELAAEQGRFVALMGDLQGPKIRIARFTDQQVTLQAGQPFTLSRSHSKEAGDATIVGIDYPELVQDCRPGDELLLDDGRVVLVVDSVGAEEVHTTVTVGGPLSNNKGINRRGGGLSAPSLTDKDRTDIKLAAEMELDYVAVSFPRYGADIDEARALLRAAGSQAWIIAKIERAEAVADDDALDALIRASDGVMVARGDLGVEVGDAELVGIQKRIIQHARTLNKVVITATQMMESMVASPMPTRAEVSDVANAVLDYTDAVMLSAESASGQYPIEAVAAMARVCLGAEKHPTTTHSHHRLGETFTRCDETIALAAMYAANHFPGVKAIIALTESGHTPLIMSRIRSGVPIYCYSPHGPTQRRAALFRGVYTVPFAPAEYDPADLSNAAIDELKKRGRVAAGDWVILTKGDFYRDSGGTNGLKILKVE

SEQ ID NO: 22411 - protein, 452 aa, Rhodospirillum rubrum
MTESNSLGGRFRRYARVSTAMGGIAARAAGEKYLGFKGDRARMASDLREALGGLKGPLMKVAQIMSTIPDALPQEFTAELTQLQADAPRMGWPFVKRRMTAELGPNWLGRFASFDHDAVAAASLGQVHRAIHLDGRALACKLQYPDMDSTVEADLSQLKIIIGLYRRYDGAIDPTEIHAEITERLREELDYAREARNMRLYRHMLRDEAGVHVPEPIADLSTKRLLTMTWLQGERLLTFINHSPEERNHLAYNMFRAWYVPFYDYGVIHGDPHLGNYTVREDFSVNLLDFGTIRVFRPVFVQGVIDLYIALRDNDQERAVHAYDCWGFRDLSKDTIAVLNQWAKFIYGPLLEDRVRNIQEDLPMGGNQGRQVAEKVHQDLKAIGGVTPPREFVLMDRAAIGLGSVFWHLKAEINWFQMFHELIDNFDVDALARRQTEALTGVGLVPSDLGVG

SEQ ID NO: 22412 - protein, 464 aa, Thermus thermophilus HB8
MTPMKTYDLIVIGTGPGGYHAAIRAAQLGLKVLAVEAGEVGGVCLNVGCIPTKALLHAAETLHHLKVAEGFGLKAKPELDLKKLGGWRDQVVKKLTGGVGTLLKGNGVELLRGFARLVGPKEVEVGGERYGAKSLILATGSEPLELKGFPFGEDVWDSTRALKVEEGLPKRLLVIGGGAVGLELGQVYRRLGAEVTLIEYMPEILPQGDPETAALLRRALEKEGIRVRTKTKAVGYEKKKDGLHVRLEPAEGGEGEEVVVDKVLVAVGRKPRTEGLGLEKAGVKVDERGFIRVNARMETSVPGVYAIGDAARPPLLAHKAMREGLIAAENAAGKDSAFDYQVPSVVYTSPEWAGVGLTEEEAKRAGYKVKVGKFPLAASGRALTLGGAEGMVKVVGDEETDLLLGVFIVGPQAGELIAEAALALEMGATLTDLALTVHPHPTLSESLMEAAEAFHKQAIHILNR

SEQ ID NO: 22413 - protein, 181 aa, Zea mays
MVVTVAATGSDTAEPLHSTTFASRYVRDQLPRYRMPEGSIPKEAAYQIISDELMLDGNPRLNLASFVTTWMEPECGKLMMDSVNKNYVDMDEYPVTTELQNRCVNMIAHLFNAPIGEDETAIGVSTVGSSEAIMLAGLAFKRKWANKMKEQGKPCDKPNIVTGANVQVCWEKFARYFEVEL

SEQ ID NO: 22414 - protein, 601 aa, Schizosaccharomyces pombe
MSESIQDQDHEKTTIIEKTRRFVLSIFTKDFWIGDYDYSFLLPAIPFTKQKPKSPPFFSLNAKVPVLLALLLGFQHALAMVGGVTSPPRIIAASANLTTEQTNYLVSAGLISSGIMTLIQIARVHIPKTKYYIGTGMLSVLGISFTSVSVAPKVLSQMYENGYCPKDENGTKLPCPDGYGAFLATACVCSLLEIFMSFIPPRILKRLFPPIVTGPVVLLIGTSLISSGLNDWAGGEGSCTGRPTEAEAPGYSLCPSDTSPHALGWGSAQFIGLGFSVFATIIIIERFGPPLMKTTSVVLGLVVGMIISAATGYWDHSIIDAAPVVTFNWVHTFRLRIYGPAVLPMLALYIVNMMEAIGDIGATSDVSMLEVDGPAFDARVQGGILGDGLASLIASLMTTTPLTTFAQNNGVISLTKCANRRAGFFCAVILFFMGLFAKFAAVFVAIPSPVLGGMTTFLFSSVAVSGIAIISQIPFNRRNRFILTASMTLGMGAILVPDWFTYFFEYSGPNKALVGFLDAITLVMENGFAIGAFISIFLNLILPYEFDPDLTNDSPGLSTTNGVNNGIVEVRGIDPNDSLSNTDTEYANENKKDEVDVDKVV

SEQ ID NO: 22415 - protein, 411 aa, Xylella fastidiosa Ann-1
MNRRVVVTGMGMVSPLGNDLTTSWDGIVHGRSGVAPIVQIDASKFSTQIAGEIKGFDPMKFVSAKDAKKMDSFIYYGIGAAFMALDDAGLEINEINAERVGALIGSGIGGVFGIEEQTIKLYEGGARKISPFYVPATIINMLPGQLSILKGLKGPTFSAVSACATSNHSIGMAMRMIQYGDADVMLAGGSERASSPTAIGGFCAMRAMSTRNDDPTGASRPWDKGRDGFVLGDGAGILVLEEYEYAKARGARIYAELAGFGATSDAFHMTMPVEDGEGAARCMRIALQDAKVTPEQIDHLNAHGTSTPLGDLCETNAIKTVLGDHAYKVMVSSTKSMTGHLLGAAGGVEAIFSVMALHTGIVPPTINLEEPDEGCDLDYVPHVAREAKLDVVVSNGFGFGGTNGTLVFKRI

SEQ ID NO: 22416 - protein, 922 aa, Pisum sativum
MEYGGGIVDDGGVFGTMVGGDQGDIIEELLGEGCWIEASENNMMAMQQTASPPQQHYIGNNIPIGMGEGDHFNHHQVDQESGFVVGKRWWIGPRGSQGPSTSVKERLVVAVGYLKEYTKNSSNNVLIQIWVPALRRRSAIHYLQQDSSSSVPVSVNPNMNVHVRFFRSHEYPRHQQQQQQYGSLLALPVFERGSGTCLGVIEFVIANQNLINYRPQLDHLSNALEAVDFRSSHNMNIQPAVKVIFEELYEAAVNEIVEVLASVCKTHNLPLALTWAPCIQQQGGGKGTTGGGGCSVSVTVPTDQMNNNNHMMMSCISTVDSACYVGDMEVLGFQEACSEYHLFNGQGIVGTAFTTTKPCFAIDITAFSKAEYPLAHHADMFGLHAAVAIPLRSVYTGSAADFVLEFFLPKDCRDTEQQKQMLNSLSLVVQQACRSLHLHVVMEDDNANHHEDQDQFTFPTTTNNYMPSSASDAATTASLSQVDAASGCSTKDTTSSSCSWIAHMMEAQNKGKGVSVSLEYLQEPKEEFKVTTCNWEREGNSVFSEFGQVIQHDQSSNSRASVEAGEESGGGGTGGGRRSSSSSSGRKSGDKRRTKAEKTISLPVLRQYFAGSLKDAAKSIGGCPTTLKRICRQHGITRWPSRKIKKVGHSLKKLQLVIDSVQGAEGAIQIGSFYASFPELSTAAAHGGGGGGDHINNNSFYNSHGDLVTNLKSPPSACSQTHAAGNKSIINGDHHHHHHQHLVMTENLAAPSAVDALMQHASTINIQDYQQLQEDHDTKQLLLHFNNNNNNSNNQTLPPRPTVTWNNNNSSSSGLLERGAFRVKATFADEKIRFSLQAVWCFRDLQLEIARRFNLNDMNNLVLKYLDDEGEWVVLACDSDLEECKDLHTSSHTRTIRLSLFQASPLNNLANSFRNNSSSPSS

SEQ ID NO: 22417 - protein, 75 aa, Brassica napus
  misc_feature (73)..(73): Xaa can be any naturally occurring amino acid
  unsure (1)..(75): unsure at all Xaa locations
MRPILMKGHERPLTYLKYNRDGDLLFSCAKDHTPTVWYADHGDRLGTYRGHNGAVWSCDVSRHSTRLITGSAXQT

SEQ ID NO: 22418 - protein, 924 aa, Pisum sativum
MEYGGGIVDDGGVFGTMVGGDQGDIIEELLGEGCWIEASENNMMAMQQTASPPQQHYIGNNIPIGMGEGDHFNHHQVDQESGFVVGKRWWIGPRGSQGPSTSVKERLVVAVGYLKEYTKNSSNNVLIQIWVPALRRRSAIHYLQQDSSSSVPVSVNPNMNVHVRFFRSHEYPRHQQQQQQYGSLLALPVFERGSGTCLGVIEFVIANQNLINYRPQLDHLSNALEAVDFRSSHNMNIQPAVKVVFEELYEAAVNEIVEVLASVCKTHNLPLALTWAPCIQQQGGGKGTTGGGGCSVSVTVPTDQMNNNNHMMMSCISTVDSACYVGDMEVLGFQEACSEYHLFNGQGIVGTAFTTTKPCFAIDITAFSKAEYPLAHHADMFGLHAAVAIPLRSVYTGSAADFVLEFFLPKDCRDTEQQKQMLNSLSLVVQQACRSLHLHVVMEDDNANHHEDQDQFTFPTTTNNYMPSSASDAATTASLSQVDAASGCSTKDTTSSSCSWIAHMMEAQNKGKGVSVSLEYLQEPKEEFKVTTCNWEREGNSVFSEFGQVIQHDQSSNSRASVEAGEESGGGGTGGGRRSSSSSSGRKSGDKRRTKAEKTISLPVLRQYFAGSLKDAAKSIGGPTTLKRICRQHGITRWPSRKIKKVGHSLKKLQLVIDSVQGAEGAIQIGSFYASFPELSTAAAHGGGGGGGDHINNNSFYNSHGDLVTNLKSPPSACSQTHAAGNKSIINGDHHHHHHHQHLVMTENLAAPSAVDALMQHASTINIQDYQQLQEDHDTKQLLLHFNNNNNNNSNNQTLPPRPTVTWNNNNSSSSGLLERGAFRVKATFADEKIRFSLQAVWCFRDLQLEIARRFNLNDMNNLVLKYLDDEGEWVVLACDSDLEECKDLHTSSHTRTIRLSLFQASPLNNLANSFRNNSSSPSS

SEQ ID NO: 22419 - protein, 238 aa, Glycine max
MKIQCDVCERAPATVICCADEAALCAKCDVEVHAANKLASKHQRLLLQCLSSKLPRCDICQDKPAFIFCVEDRALFCQDCDEPIHSAGSLSANHQRFLATGIRVASSSNCTKDNEKSHLEPPTRNAQQVSAKIPPQQVPSFTSSWAVDDLLELTAFESPEKESLQFGELEWLTDVGIFGEQFAQEALAAAEVPQLPVTHNSSSVASYRTSKSYMSHKKPRIEVLNDDDDEYFTVPDLG

SEQ ID NO: 22420 - protein, 454 aa, Haemophilus influenzae R2866
MTMITPVQAILASNQHFLDRQDVMESNVRSYPRKLPFAYAKAQGCWVTDVEGNEYLDFLAGAGTLALGHNHPILMQAIKDVLDSGLPLHTLDLTTPLKDAFSEELLSFFPKDKYILQFTGPSGADANEAAIKLAKTYTGRGNIIAFSGGFHGMTQGALALTGNLGAKNAVENLMPGVQFMPYPHEYRCPFGIGGEAGAKAVEHYFENFIEDVESGVVKPAAVILEAIQGEGGVVPAPISFLQKVREVTQKHGILMIVDEVQAGFCRSGRMFAFEHAGIEPDIIVMSKAVGGSLPLAVLAIRKEFDAWQPAGHTGTFRGNQLAMATGYASLKIMRDENLAQNAQERGEYLTNALRELSKEYPCIGNVRGRGLMMGIDIVDERQSKDATGAYPRDCELAAAIQKACFKNKLLLERGGRGGNVVRVLCAVNINQNECEEFIKRFKQSVADALKVVRS

SEQ ID NO: 22421 - protein, 237 aa, Brassica napus
MSKLQSEAVREAISSMITHCKETKPRKFTETIELQIGLKNYDPQKDKRFSGSVKLPHIPRPKMKICMLGDAQHVEEAEKIGLESMDVEALKKLNKNKKLVKKLAKKFHAFLASESVIKQIPRLLGPGLNKAGKFPTLVSHQESLEAKVNETKATVKFQLKKVLCMGVAVGNLGMEEKQIFQNVQMSVNFLVSLLKKNWQNVRCLYLKSTMGPPTPCFLRCFLSQSFSHGVSSGSKEN

SEQ ID NO: 22422 - protein, 921 aa, Pisum sativum
MEYGGGIVDDGGVFGTMVGGDQGDIIEELLGEGCWIEASENNMMAMQQTASPPQQHYIGNNIPIGMGEGDHFNHHQVDQESGFVVGKRWWIGPRGSQGPSTSVKERLVVAVGYLKEYTKNSSNNVLIQIWVPALRRRSAIHYLQQDSSSSVPVSVNPNMNVHVRFFRSHEYPRHQQQQQQYGSLLALPVFERGSGTCLGVIEFVIANQNLINYRPQLDHLSNALEAVDFRSSHNMNIQPAVKVFEELYEAAVNEIVEVLASVCKTHNLPLALTWAPCIQQQGGGKGTTGGGGCSVSVTVPTDQMNNNNHMMMSCISTVDSACYVGDMEVLGFQEACSEYHLFNGQGIVGTAFTTTKPCFAIDITAFSKAEYPLAHHADMFGLHAAVAIPLRSVYTGSAADFVLEFFLPKDCRDTEQQKQMLNSLSLVVQQACRSLHLHVVMEDDNANHHEDQDQFTFPTTTNNYMPSSASDVATTASLSQVDAASGCSTKDTTSSSCSWIAHMMEAQNKGKGVSVSLEYLQEPKEEFKVTTCNWEREGNSVFSEFGQVIQHDQSSNSRASVEAGEESGGGGTGGGRRSSSSSSGRKSGDKRRTKAEKTISLPVLRQYFAGSLKDAAKSIGVCPTTLKRICRQHGITRWPSRKIKKVGHSLKKLQLVIDSVQGAEGAIQIGSFYASFPELSTAAAHGGGGGGDHINNNSFYNSHGDLVTNLKSPPSACSQTHAAGNKSIVNGDHHHHHHQHLVMTENLAAPSAVDALMQHASTINIQDYQQLQEDHDTKQLLLHFNNNNNNSNNQTLPPRPTVTWNNNNSSSSGLLERGAFRVKATFADEKIRFSLQAVWCFRDLQLEIARRFNLNDMNNLVLKYLDDEGEWVVLACDSDLEECKDLHTSSHTRTIRLSLFQASPLNNLANSFRNNSSSPSS

SEQ ID NO: 22423 - protein, 273 aa, Propionibacterium acnes KPA171202
MSVPSITLNDGVAIPQLGFGTWKVPANEAEKAVSAALEAGFRHIDTAAIYGNEEGVGRALADSGLDRKDLFVTTKLWNSSHHADDARKAIETSLTKLGLDHVDLYLIHWPAPVKYGDAYIEAWNALQDFKSEGLTRSIGVSNFKTEHLDAIEGATPSVDQIEMHPSFNQATFRAELAERGINPEAWSPLGQSKDLDNPVLTDISKATGKTPAQVVIRWHLQIGNVVFPKSVTPSRIAENFDVFDFELSDEQIAAIDGLDHGNRLGGDPSTADF

SEQ ID NO: 22424 - protein, 924 aa, Pisum sativum
MEYGGGIVDDGGVFGTMVGGDQGDIIEELLGEGCWIEASENNMMAMQQTASPPQQHYIGNNIPIGMGEGDHFNHHQVDQESGFVVGKRWWIGPRGSQGPSTSVKERLVVAVGYLKEYTKNSSNNVLIQIWVPALRRRSAIHYLQQDSSSSVPVSVNPNMNVHVRFFRSHEYPRHQQQQQQYGSLLALPVFERGSGTCLGVIEFVIANQNLINYRPQLDHLSNALEAVDFRSSHNMNIQPAVKVFEELYEAAVNEIVEVLASVCKTHNLPLALTWAPCIQQQGGGKGTTGGGGCSVSVTVPTDQMNNNNHMMMSCISTVDSACYVGDMEVLGFQEACSEYHLFNGQGIVGTAFTTTKPCFAIDITAFSKAEYPLAHHADMFGLHAAVAIPLRSVYTGSAADFVLEFFLPKDCRDTEQQKQMLNSLSLVVQQACRSLHLHVVMEDDNANHHEDQDQFTFPTTTNNYMPSSASDAATTASLSQVDAASGCSTKDTTSSSCSWIAHMMEAQNKGKGVSVSLEYLQEPKEEFKVTTCNWEREGNSVFSEFGQVIQHDQSSNSRASVEAGEESGGGGTGGGRRSSSSSSGRKSGDKRRTKAEKTISLPVLRQYFAGSLKDAAKSIGVCPTTLKRICRQHGITRWPSRKIKKVGHSLKKLQLVIDSVQGAEGAIQIGSFYASFPELSTAAAHGGGGGGGDHINNNSFYNSHGDLVTNLKSPPSACSQTHAAGNKSIINGDHHHHHHHQHLVMTENLAAPSAVDALMQHASTINIQDYQQLQEDHDTKQLLLHFNNNNNNNSNNQTLPPRPTVTWNNNNSSSSGLLERGAFRVKATFADEKIRFSLQAVWCFRDLQLEIARRFNLNDMNNLVLKYLDDEGEWVVLACDSDLEECKDLHTSSHTRTIRLSLFQASPLNNLANSFRNNSSSPSS

SEQ ID NO: 22425 - protein, 445 aa, Bacteroides fragilis YCH46
MNIEKIMSSLEAKHPGESEYLQAVKEVLLSIEDIYNQHPEFEKSKIIERLVEPDRIFTFRVTWVDDKGEVQTNLGYRVQFNNAIGPYKGGIRFHASVNLSILKFLGFEQTFKNALTTLPMGGGKGGSDFSPRGKSDAEIMRFCQAFMLELWRHLGPDMDVPAGDIGVGGREVGYMFGMYKKLTREFTGTFTGKGLEFGGSLIRPEATGFGGLYFVNQMLQTKGIDIKGKTVAISGFGNVAWGAATKATELGAKVVTISGPDGYIYDPNGISGEKIDYMLELRASGNDIVAPYADEFPGSTFVAGKRPWEVKADIALPCATQNELNGEDAKNLIDNNVLCVGEISNMGCTPEAIDLFIEHKTMYAPGKAVNAGGVATSGLEMSQNAMHLSWSAAEVDEKLHSIMHGIHAQCVKYGTEPDGYINYVKGANIAGFMKVAHAMMGQGII

SEQ ID NO: 22426 - protein, 305 aa, Phytophthora arecae
HYTEGAELIDSVLDVVRKEAESCDCLQGFQITHSLGGGTGSGMGTLLISKIREEYPDRIMCTYSVCPSPKVSDTVVEPYNATLSVHQLVENADEVMCLDNEALYDICFRTLKLTTPTYGDLNHLVCAAMSGITTCLRFPGQLNSDLRKLAVNLIPFPRLHFFMIGFAPLTSRGSQQYRALTVPELTQQQFDAKNMMCAADPRHGRYLTAACMFRGRMSTKEVDEQMLNVQNKNSSYFVEWIPNNIKASVCDIPPKGLKMSTTFIGNSTAIQEMFKRVSEQFTAMFRRKAFLHWYTGEGMDEMEFT

SEQ ID NO: 22427 - protein, 394 aa, Staphylococcus epidermidis RP62A
MHNKQKILDFIENNKYDYVEISHRIHERPELGNEEIFASRTLIDQLRANRFEIETDIAGHATGFIATYDSDMTGPVIGFLAEYDALPGLGHACGHNIIGTASVLAAVALKEVVDEIGGKVVVLGCPAEEGGENGSAKASYVKAGVIDEIDVALMIHPGNETYRTINTLAVDVLDIKFYGRSAHASENADEALNALDAMISYINGIAQLRQHIKKGQRVHGVILDGGKAANIIPDFTHARFYTRATSRRELDVLTEKVNQIARGAAIQTGCDFEFGPIQNGVNEFIKAPKLDDLFEKYATELGEEVIDDDFGYGSTDTGNVSHVVPTIHPHIKIGSRNLVGHTHRFREAAASLQGDQALIRGAKILALMGLELIENKPLLDEIIEEHTHIKGHVK

SEQ ID NO: 22428 - protein, 380 aa, Oryza sativa (japonica cultivar-group)
MAAAGWPLSSSVADLLPASLSLTLLLASLVHPLPPSAPFLLRLLALLIPSPRPSRAQVVVVVLAAAAFFFEHIRKIGCTHSLERTEVSAAFFEDPNSLNKVRCPSIYDPAEKYISLIIPAYNEEHRLPEALTETLNYLKQRSAVEKSFTYEVLIVDDGSTDHTSKVAFEFVRKHKIDNVRVLLLGRNHGKGEAVRKGMLHSRGELLLMLDADGATKVTDLEKLEAQVRALAKKAESSLAPSSSPSQRLSDAEIAVFGSRAHLEKQALATRKWYRNFLMKGFHLVVLLTAGPGIRDTQCGFKMFTRAAARKLFTNIRLKRWCFDVELVYLCKHLRIPMAEVSVNWTEIPGSKVRMTSILHMVFELLLIKVGYGLSIWKIYS

SEQ ID NO: 22429 - protein, 674 aa, Cryptococcus neoformans var. neoformans JEC21
MPDTPPHKHHYTSLRSLMHSPDPGNPAKRDSLTPRQPRPSRNSSSSRSRERRLDPPRKADKDKGRLSTWKLMCLTVSMGGSQIAWTVELGYGTPYLLSLGLSEQLTSLVWLAGPISGLIAQPLIGAISDSSHSRYRRRYWIVTSTMLLVFSGLGLAFTEPIAKALVDLIGGGQGDWDPKTIRLVKNTAIGIAVFSFYCLDFALNALQASLRNLVLDITPGEQLATANAWHGRFNHVGNIVGFTMGFLNLSHVPIIRLVGGGQFRKVCIVALVLLVMTVWITCWTQEEKETDSIFGERRSKIRDVVGTIYEAVLHLPKPIRRVCIVQIAAFMGWFPYLFYSTTYVAEVMAKELHHKPDIDRATRAGSLALLIYSFVAIIAGTLLPYLAARDRRLLKPTSEKLRDGEIEIENEDEEDEEHVEMERIREMVQQWKAEAAREGRPLKLPTMPFMLRNIWTAGLVIFGCLMMSTFFITKVWQATVMIALVGICWAIACWVPFAIIMEFLKELDDKPPPRISDGRPRPTHARTASTPLGWRSHPTSPAGRASPDERTPLARSYSTADLDGANEMEYTGQGPVAGGTIMGIHNLAIVFPQFIIAVVASIIFKLADTQPDIQPTSPEIGGPHGQDKNGVAWVLRFGGLMAFVGALVSRKVPPTKTEKAMRRRLADMREESAE

SEQ ID NO: 22430 - protein, 640 aa, Arabidopsis thaliana
MTMMMSDLPNDLVEEILSRVPITSLGAVRSTCKRWNGLSKDRIVCKGDANQQFTGFTRYVNESTVCSMRLDLNEIQNEDVELVELSINKINKFIELELFQVYYSDGLLLLVTDEVDSKLVVWNPYLGQTRLIQCRDTEHFKYRYALGYDNNRNHKILMYNRKNCEIYDFKSDSWRVLDIIPDLHTNIYVRDMSIKGNTYFFYRGEKIGEGLAGCLLSFDFTRERFVSCLPLPFQIAKFDDNVALSSVREEHLVVLFNNWEESEMEIWVTTKIEPNAVSWSNFLTFTHFRIKFLVTSFFIDQEKKLAVVFGRSLSKQMRCNIAYVIGDNGYLRILDFGVTFIPSNLPVSYAPSLVKITQGQELSVIEEKKRSRLLASLVYTSNNLLGLMSWVSFSMQFHMDCGRDSARDHDRERSKNPDFHLKTTMMISDLPEDMVEEILSRVSIISLGALRWNDLSKARVICKAEARQQFAGFMIKGSKEVSNTRLVVWNPYLGKIWSIQHRSAYHSENRYTLGYDNNRKPQNLEEQLAVLLHNWGAFAMEIWVTTNIEPNAKKHAVIFDSSLSCGSVACIIGETGNLRTVDLGVAAVPYRQLPVCSYAPSLEQINQGQELPLIGLTQIFMEQHKYWVSTFLDNLITKYG

SEQ ID NO: 22431 - protein, 436 aa, Oryza sativa (japonica cultivar-group)
MEALSRTERVGGGGGAMVEVAFASSAGSSAAAPRRLRGELVVRDAIPYAGVAPPPPALPLPQPQLQPQVQATTSGGGGGGKISPAVLFIIVILAVVFFISGLLHLLVRLLMKKQHRRGGGGGAAAGVSRSAAGDDAGGGGDAALQRQLQQLFHLHDSGLDQAFIDALPVFAYREIVVGGGGDGDKEPFDCAVCLCEFDAEDRLRLLPLCGHAFHLHCIDTWLLSNSTCPLCRGVLFVPGLTENNPMFDFDEGLEEGRLSEDCDNGFGYPGHKATEGMQTPGTEKRVFPVRLGKFKNVGTQGAVEGGGIGNANGAVLRREEGESSSSSLDARRCFSMGTYQYVLGTSELRVSLQPDRIRNGGGGVTRARPTGLSSVNAEIMEGKKICARNKGESFSVSKIWQWSNLKGKLPTGSDECSEAGSLPWMKRGGIGDTSNM

SEQ ID NO: 22432 - protein, 94 aa, Geobacillus stearothermophilus
VLKPLGDRVVIEIVETEEKTASGIVLPDTAKEKPQEGKVVAVGKGRVLDNGQRVAPEVEVGDRIIFSKYAGTEVKYDGKEYLILRESDILAVIG

SEQ ID NO: 22433 - protein, 539 aa, Geobacillus stearothermophilus
MAKEIKFSEEARRAMLRGVDKLADAVKVTLGPKGRNVVLEKKFGSPLITNDGVTIAKEIELEDPFENMGAKLVVEVASKTNDVAGDGTTTATVLAQAMIREGLKNVTAGANPMGIRKGIEKAVAVAVEELKAISKPIQGKESIAQVAAISAADEEVGQLIAEAMERVGNDGVITLEESKGFTTELDVVEGMQFDRGYASPYMITDTEKMEAVLENPYILITDKKISNIQDLLPILEQVVQQGKPLLIIAEDVEGEALATLVVNKLRGTFTAVAVKAPGFGDRRKAMLEDIAILTGGEVISEELGRELKSTTIASLGRASKVVVTKENTTIVEGAGDSDRIKARINQIRAQLEETTSEFDREKLQERLAKLAGGVAVIKVGAATETELKERKLRIEDALDSTRAAVEEGIVAGGGTALMNVYSKVAAIEAEGDEATGVKIVLRAIEEPVRQIAQNAGLEGSVIVERLKTEKPGIGFNAATGEWVNMIEAGIVDPTKVTRSALQNAASVAAMFLTTEAVVADKPEENKGGNNGMPDMGGMM

SEQ ID NO: 22434 - protein, 622 aa, Campylobacter jejuni subsp. jejuni NCTC 11168
MNAKTQEAELEELFQENAKDYITYEKLVKYLTKQPSASTTKKVQALMKKHKVQLFSAAEIAQMKNIEDAKRLQEEKQKLQDTSLENEFDLANENDLLEWSRSDSPVRMYLREMGQIALLNKDEEIEISKKIELGEDIIIDAFCSVPYLIDFILDYKEPLINRERRVKELFKSFDDEEKSDDKLDELDIDEDEENETELESDEENTKKNSKKEDERTLKVIEKFKALEKAKKDWLKTSKDKESGDELLDKLSIAFKKNILKEKLMDLGPTSKLISEIVKSMETALKSDEEFDKELKRLEYRLPMFSDELKKRHADILKDITKLSKEEITERALETTMVSTYMEIKKLFQTKEASEKSFDLEKSRLKEILEQIKRGKKISDEAKGRMAKSNLRLVVSIAKRYTNRGLPFLDLIQEGNIGLMKAVDKFEYKRGYKFSTYATWWIRQAISRAIADQARTIRIPIHMIETINQINKIIREHLQKDGKEPDVSVIAKEVGLSVDKVKQVIKITKEPISLEAPIGNEDDGKFGDFVEDRNSLSPMDHILKDDLKEQIDEVLDQLNDREKAVIRMRFGLMDDESDRTLEEIGKELNVTRERVRQIESSAIKKLKHPKVGRKLKNYIEGWK

SEQ ID NO: 22435 - protein, 409 aa, Vibrio vulnificus CMCP6
MELTTTVSELRYALDTFFFLISGALVMWMAAGFAMLEAGLVRSKNTTEILTKNFCLYAIACTTYLVVGYNIMYVDNSEGGWLPSIGALIGSQAEGADHSLESDFFFQVVFVATAMSVVSGAVAERMKLWSFLLFSAILTAFIYPVEGYWTWGGGFLSAAGFSDFAGSGIVHMAGAAAALAGVLLLGARKGKYGKNGEVYPIPGSNMPLATLGTFILWFGWFGFNGGSQLMVSDFENATAVGQIFLNTNAAAAAGAITALLVCKTTWGKADLTMILNGALAGLVAITADPLSPSPLYAVAIGAVAGALVVFSIVGLDKLKIDDPVGAISVHGVCGFFGLMVVPISNGDASFLSQLFGAAVIFAWVFGASLAVWAVLKATIGIRVSEDEEMEGMDMHDCGVGAYPEFVTVK

SEQ ID NO: 22436 - protein, 496 aa, Oryza sativa; identical to SEQ ID NO: 1045

SEQ ID NO: 22437 - protein, 432 aa, Candida glabrata CBS138
MSLKNYKHDEDDGELPPLVTGRESNLAEILGKVRNDGGHNLVSADKVDRSNKQVEVPLSSNSGIQTEKKRIPVTIITGYLGSGKSTLLEKIALKGSDRKIAVILNEFGDSSEIEKAMTIQNGDSKYQEWLDLGNGCLCCSLKNIGVKAIEDMIERSPGSIDYILLETSGIADPAPIAKMFWQDEGLNSSVYIDGIITVLDAEHIVKCLDDVSPDAHWYNQSVVKEENLTIAYFQIAMADRILLNKVDKIEGKRVSISDIEARIKDINGVAPIYHTQYGEVSLDKLLDLHAYEGTDLNLDGSFKDRILQNEKVMHDHRMGTVTLSFRPLKTEQEFENFKRNFLQKLLWKNFGLSDDDEIKNLSKLSDDWEIERSKGLVLVADSTYVIQGVRDTFDIFTGHSDDTISDCKLVLIGKYLDKDSIQKLLLRVIDSK

SEQ ID NO: 22438 - protein, 487 aa, Triticum aestivum
  misc_feature (299)..(299): Xaa can be any naturally occurring amino acid
  misc_feature (370)..(370): Xaa can be any naturally occurring amino acid
  misc_feature (385)..(385): Xaa can be any naturally occurring amino acid
  unsure (1)..(487): unsure at all Xaa locations
MATPQIYRKTLLPVLLLLAAAALYPAAADGDEVLALTESTFEKEVGQDRGALVEFYAPWCGHCKKLAPEYEKLAASFKKAKSVLIAKVDCDEHKSVCSKYGVSGYPTIQWFPKLSWEPKKYEHQRTSLALTGGWYLSGIPGISSTHASEVLALTESTFEKEVGQDRGALVEFYAPWCGHCKKLAPEYEKLAASFKKAKSVLIAKVDCDEHKSVCSKYGVSGYPTIQWFPKGSLEPKKYEGQRTAEALTEYVNSEAATNVKIAAVPSSVVVLTEETFDSVVLDETKDVLVEFYAPWCGHXKSLAPIYEKVASVFKQDEGVVIANLDADKYTSLAEKYGVSGFPTLKFFPEGYKKRVKSYETARELDDLVKXSLNGEMGTSRDSKGXQLTSEAGLVASLDALVKEFHSAADDKRKEILSKIEEEAAKLSGPAVKHGKIYVNVAKKILQKGSDYTKKETERLHRLLEKSISPSKADEFAIKKNILSAFSS

SEQ ID NO: 22439 - protein, 504 aa, Rhodospirillum rubrum
MLDRTASNGAGSAGRLRRALAPALVAFSLAIAPFSAQAREIPESFADLAEGLLPAVVNISTTQTIDADRGPEMPQFPPGSPFEEFFKDFFERHGGPGGGVQPKTPRRATSLGSGFIVDAAGYIVTNNHVIQDADEITVILHDDTAIKAELVGKDEKTDVALLRIKTDKPLTAVPWGNSEAARVGDWVMAIGNPFGLGGTVTAGIISAKTRDINAGPYDSFIQTDAAINKGNSGGPLFNMHGEVIGINTAIFSPSGGSIGIGFSVPSNLAHQVIDDIKKFGRTRRGWIGVRIQSVTDEIAEGLGLEKSAGALIAAVTPGGPAAAAGLKVGDVIVSFDGRPVPDMRTLPRIVAETEIGKDAAIGVWREGKRQDLKMKVGELEVAEDEGLLNEPETSGVTDSQGGTAVATIGLTVTKLDDRLRSQFGFDAASEGVVVTDVTNESDAQEKGLEPGTLIVKINQTEVASPEDVVKAVAKAKDEGRKTVLLLVELRGTRTFIPVKMADKK

SEQ ID NO: 22440 - protein, 262 aa, Pinus pinaster
HADFIITSTYQEIAGSKDTVGQHESHTAFTLPGLYRVVHRIDVFDPKSNIVSPGADMQIYFPYTEKQHRLTALHGAIEELLFNPEQTDEHMCVLNDPKKPIIFSMARLDRVKNMTGLVEWFAKNKRLRELVNLVVVAGDIDPSKSMDREEVAEIEKMHELIKKYNLNGQFRWICAQKNRVRNGELYRYICDTKGAFVQPAIYEAFGLTVVEAMTCGLPTFATCNGWSGGNNVNGVRIPNDPYHGICKSPHCLTFSRDAGRFP

SEQ ID NO: 22441 - protein, 569 aa, Wolbachia endosymbiont of Drosophila ananassae
MRSNIRQLFYYIKPNLSYFVIAFIAVLFSALTILLFGRGLSNIIDSGTEHDFTTKLLVAILIVLAISLTAFTRLYFIGIGSEKVIARIRYDLYSSITDLQPSFFENTGVQDVISALITDTSVLQSIINSSLLTILRNFVILIGSVAMLLYTNIQLTAYAAAIIPILLIIVTSLGKKVRSHARFAQDKLSELASFSEENFRSIVTIKSFVLEENEKTRFKEYLNSVSKSYVKLVLLRAILVTLVITCVIGSLVVLLFFGIKEVLSNNITIGELSSFVVYSALAAGAINNLSDNISDLQRGLGIVERLFEFKNMKSSIVDPDDPIKICSVQKGISFNGVTFFYESQSDKPALNNVSFSIEAGQAVSIVGPSGSGKSTILKLLLRFHDPNKGSITIDGHNIKSIALNDLRSLFGLVPQDHMIFSCSIIENILYGKPGAEYEEVRQAAIGAYAMEFIDKLPDKFDTFVGKRGLKLSEGQKQRIIIARAILKNPQVLILDEATSALDYKSENLVQKALSELMQNRTTIVITHRLSTALKTDKIIVINHGKVEEVGTHDSLISKDGLYAKLAKIQ

SEQ ID NO: 22442 - protein, 349 aa, Triticum aestivum
MKKPGKLALPSQDSTIGKFLTQSGTFKDGDLLVNKDGLRIVPQSEEGEAPPIKPLDNNHQLSIDDLDSIKVIGKGNSGTVQLVRHKWTGQFFALKVIQLNIQESIRKQMAQELKISLFTQCQYVVTCYQCFYVNGVISIALEYMDGGSLADFLKAVRTVPEAYLAAICKQVLKGLMYLHHEKRVIHRDLKPSNILINHRGEVKISDFGVSAIISSSSAQRDTFTGTFNYMAPERISGQKHGHLSDIWSLGLVMLECATGNFPYPPRESFYELLEAVVDQPSPSAPSDQFSPEFCSFISACIQKNAADRSSAQTLSAHPFLSMYDDLNIDLSDYFTTAGSPLATFKQIAL

SEQ ID NO: 22443 - protein, 805 aa, Solanum tuberosum
MAERVLTRVHSLRERVDATLAAHRNEILLFLSRIESHGKGILKPHELLAEFDAIRQDDKNKLNEHAFEELLKSTQEAIVLPPWVALAIRLRPGVWEYIRVNVNALVVEELSVPEYLQFKEELVDGASNGNFVLELDFEPFTASFPKPTLTKSIGNGVEFLNRHLSAKMFHDKESMTPLLEFLRAHHYKGKTMMLNDRIQNSNTLQNVLRKAEEYLIMLPPETPYFEFEHKFQEIGLEKGWGDTAERVLEMVCMLLDLLEAPDSCTLEKFLGRIPMVFNVVILSPHGYFAQENVLGYPDTGGQVVYILDQVPALEREMLKRIKEQGLDIIPRILIVTRLLPDAVGTTCGQRIEKVYGAEHSHILRVPFRTEKGIVRKWISRFEVWPYMETFIEDVAKEISAELQAKPDLIIGNYSEGNLAASLLAHKLGVTQCTIAHALEKTKYPDSDIYWKKFDEKYHFSSQFTADLIAMNHTDFIITSTFQEIAGSKDTVGQYESHMAFTMPGLYRVVHGINVFDPKFNIVSPGADINLYFSYSETEKRLTAFHPEIDELLYSDVENDEHLCVLKDRTKPILFTMARLDRVKNLTGLVEWYAKNPRLRGLVNLVVVGGDRRKESKDLEEQAEMKKMYELIETHNLNGQFRWISSQMNRVRNGELYRYIADTKGAFVQPAFYEAFGLTVVEAMTCGLPTFATNHGGPAEIIVHGKSGFHIDPYHGEQAADLLADFFEKCKKDPSHWETISMGGLKRIEEKYTWQIYSESLLTLAAVYGFWKHVSKLDRLEIRRYLEMFYALKYRKMAEAVPLAAE

SEQ ID NO: 22444 - protein, 251 aa, Arabidopsis thaliana; identical to SEQ ID NO: 1445

SEQ ID NO: 22445 - protein, 385 aa, Staphylococcus aureus subsp. aureus Mu50
MYYHQPLLLTPGPTPVPDAIMREIQAPMVGHRSKDFEDIAQQAFQGLKPIFGSQNDVLILTSSGTSVLEASMLNIVNPEDHFVVIVSGAFGNRFKQIAQTYYKNVHIYDVTWGEAVDVKDFINYLSTLDVEVKAVFSQYCETSTTVLHPIHELGNAINQFNSNIYFVVDGVSCIGAVDVDINKDKIDVLVSGSQKAIMLPPGLAFVAYSHRAKERFKEVTTPKFYLDLNKYISSQADNSTPFTPNVSLFRGVNAYVETVKAEGFNHVIARHYAIRNALRSALKALDLTLLVNDKDASPTVTAFKPNTNEVKIIKDELKNRFKITIAGGQGHLKGQILRIGHMGKISPFDILSVVSALEIILTEHRKVNYIGKGISKYMEVIHEAI

SEQ ID NO: 22446 - protein, 638 aa, Yarrowia lipolytica CLIB122
MNLEELDKKAKYVFDTKDRVAEKFFESLPPKTRGLMKFLFSPDHDYDSAIEHFDDTSSTDDIQLTHAEIVRRVWSKKQLIFGWICMLIMSLVSTIQASAFPSYIVYASSEFSQMGALASVQIVQACIFLVSRALSGKLADNFGRFEAMIISVICLTIGNGLYMGSHNIVTYFAALAFYSIGDIGTQMLYEIFAADTCDLKDRTFFQTITLFANLFTPWVAGPLVASVLKTSTWQWGMGMWAIITPCCAIPFLSTLLYFRIKAYRMGLRIRRGDPNRTWFQNTITGIIRMDLPGLVFLCAGLILFFVPISFCVGTDDWKMPQNIAMITCGTFFLYVAFPLWEFFGTKHPFLKFSLMKKRLVTVPGLIILLYYMAYATYHPYFQVWLLLAKGLPQARATNLNMAMFVALTGTTLVFSPLMRWRAKLKSVIVWGTILYFIGMGLTYEFRKPEKPLNTMILAQIFEGVGAGLLVIPIMVYIQVVCKQSDTAAAITIYYFFNSCGTILGNVISAAVYRNHFPNVLRKTGLFAEPEVKAIFGSIYVGLSYKVGTPQRAAIGATLNSVIRSLLIGPLIFCAIMFCLAITNADINLNTAQRMKEESEHVKGDDSQSSDQGVVIETAYEEKSPIYDEKKVTEVVNKA

SEQ ID NO: 22447 - protein, 961 aa, Saccharum spontaneum
MASERHHSIDAQLRALAPDKVSEELIQYDALLADRFLDILQDLHGPSLREFVQECYEVSADYEGKKDTSKLGELGTKLTGLAPADAILVASSILHMLNLANLAEEVELAHRRRNSKLKHGDFSDEGSATTESDIEETLKRLVSLGKTPEEVFEALKNQSVDLVFTAHPTQSARRSLLQKNARIRNCLTQLSAKDVTDEDKKELDEALQREIQAAFRTDEIRRAQPTPQDEMRYGMSYIHETVWKGVPKFLRRVDTALKNIGINERLPYNVPLIKFCSWMGGDRDGNPRVTPEVTRDVCLLSRMMAANLYIDQVEDLMFELSMWRCNDELRARAEEVQSTPASKKVTKYYIEFWKQIPPNEPYRVILGAVRDKLYNTRERARHLLATGFSDISVDSVFTNIEEFLEPLELCYKSLCDCGDKAIADGSLLDLLRQVFTFGLSLVKLDIRQESERHTDVIDAITTYLGIGSYRSWPEDKRMEWLVSELKGKRPLLPPDLPMTEEIADVIGAMHVLAELPSDSFGPYIISMCTAPSDVLAVELLQRECGIRQTLPVVPLFERLADLQAAPASVERLFSTDWYFDHIKGKQQVMVGYSDSGKDAGRLSAAWQLYVAQEEMAKVAKKYGVKLTLFHGRGGTVGRGGGPTHLAILSQPPDTINGSIRVTVQGEVIEFMFGEDHLCFQSLQRFTAATLEHGMHPPVSPKPEWRKLMEEMAVVATEEYRSVVVKEPRFVEYFRSATPETEYGKMNIGSRPAKRKPGGGITTLRAIPWIFSWTQTRFHLPVWLGVGAAFKWAIDKDIKNFQKLKEMYNEWPFFRVTLDLLEMVFAKGDPGIAGLYDLLLVADDLKPFGKQLRDKYMETEKLLLQIAGHKDILEGDPYLKQGLRLRNPYITTLNVLQAYTLKRIRDPSFKVTPQPPLSKEFADENKPAGLVKLNPASEYPPGLEDTLILTMKGIAAGMQNTG

SEQ ID NO: 22448 - protein, 539 aa, Glycine max
MLEGRSCVVPRLFPSSCQADDKWPFMTYLPDLDIKNGKRPLDPDGEEEPQSRKANRRVDSHHQGKTTQFLFQQQSCHADDSVVPQMDWDWRKGCESLSNWQRVEKTEAFSAQLLDEREPHCTGDSLVVSTDLQSNKQEEDQSEDSSDSGVQQSNEQQMEQEVEGDLLDASDQQPLEDQEEHHGGDSSDSSSLLPCMNWDNSIACLSHCSRSDYGSLASLNRSFWNTIRSGELYRWRRLNGIIEHWIYFSCALLEWEAYDPIRERWMHLPRMASNECFMCSDKESLAVGTELLVFGREMRSHVIYRYSLLTNSWTSGMRMNAPRCLFGSASLGEIAILAGGCDLDGHIMDSAELYNSENQTWVLLPSMNKPRKMCSGVFMDGKFYVIGGIGGKDSKLLTCGEEYNLQTRTWTEIPNMSPGRSARGAEMPATAEAPPLVAVVNNELYAADYADTEVKKYDKERRVWVTIGRLPERAVSMNGWGLAFRACGDMLIVISGPRTHGEGFIELNSWVPSEGPPQWNLLARKRSGNFVYNCAVMGC

SEQ ID NO: 22449 - protein, 444 aa, Microbotryum violaceum
MREIVSLQAGQCGNQIGTKFWEVVSEEHGIDGSGQYTGTTDLQLERINVYYNEAGTGKYVPRAVLVDLEPGTMDVIQGGPLGGLFRPDNFVFGQSGAGNNWAKGHYTEGAELVDQVLDVVRKEAEGTDCLQGFQLTHSLGGGTGSGMGTLLVSKIREEFPDRMMATFSVVPSPKVSDTVVEPYNAVLSVHQLVENSDETFCIDNEALYDICFRTLKLSAPTHGDLNGLVSIVMSGITTCLRFPGQLNSDLRKLAVNMVPFPRLHFFTVGFAPLTARGSSQYRAVTVAELTAQMFDAKNMMAASDPRHGRYLTVAAYFRGKVSMKEVEDQMVSIQQKNSQYFVEWIPNNVQSAHCEVAPRGLKMSVTFIGNNTSIQELFKRVGDHFDVMFRRRAFLHWYTGEGMDEMEFSEASANMHDLIAEYTQYQEAGVDDEEEVAYAEEPQE

SEQ ID NO: 22450 - protein, 92 aa, Thermotoga neapolitana
MMKVIPLGERLLIKPIKEEKKTEGGIVLPDSAKEKPMKAEVVAVGKIEDEEKFDIKVGDKVIFSKYAGTEIKIDDEDYIIIDVNDILAKIEE

SEQ ID NO: 22451 - protein, 533 aa, Oryza sativa (japonica cultivar-group)
MAGGGAAPPPKQEELQPHQVKDQLPSVSYCITSPPPWPEAVILGFQHYIVMLGTSVIIPSALVPQMGGGNEEKARVIQTLLFVAGINTLCQSFFGTRLPAVMGGSYTIVAPTISIILAGRYSNEADPHEKFLRTMRGTQGALIIASTIQIILGFSGLWRNVVRLLSPLSAVPLISLAGFGLYELGFPGVAKCVEIGLPEIILLLVFSQYLPHVIHVAKPVFDRFAVIFTIAIVWLYAYILTASGAYKNARPKTQVHCRVDRSGIISGAPWIRVPFPFQWGAPTFDAGESFAMMMASFVALVESTGTFIAVSRYASATMIPPSVLGRGIGWQGIGTLIGAFFGTANGTAVSVENAGLLALTHVGSRRVVQISAGFMIFFSILGKFGAIFASIPLPIFAALYCIFFAYIGACGLSFLQFCNLNSFRTKFIVGFSFFMGLSVPQYFNEYTSVAGYGPVHTGARWFNDMINVPFASKPFVAGLIAYFLDNTIQRRDNGVRRDRGYHWWDKFRSFKTDTRSEEFYSLPFNLNKFFPSV

SEQ ID NO: 22452 - protein, 538 aa, Thermotoga neapolitana
MPKLLKFNEEARRALERGVDKVANAVKITLGPKGRNVVIEKSWGSPTITNDGVSIAKEIELEDKFENLGAQLVKEVASKTNDVAGDGTTTATVLAQAMIKEGLKNVAAGANPILLKRGIDKAVERAVEEIKKLSKKLSGREDIAHVAAISANSPEIGELIAEAMDKVGEDGVITVEDSKTLETYVEFTEGMQFDRGYISPYFVTDAEKMEVVLKEPSILITDRKLSAVKPLIPILEKVAQTGKPLLVIAEDVEGEALTTLVLNKLKGTLQSCAVKAPGFGERRKAMLQDIAILTGGQVASEELGINLEDLTLEDLGRADLVRVKKDETIIIGGKGDPEAIKKRIAQIKAQIEETTSEYEKETLQERMAKLAGGVAVIKVGAATETELKEKKHRIEDALSATRAAVEEGIVPGGGVTLLRSRKAVEKLLEELDGDEKIGAQIVYKALSAPIRQIAENAGYDGAVIIEKILASDDPAYGFDALRGEFGNMFEKGIIDPAKVTRSALQNAASIAGMLLTTEVLVVEKPEEKKETPSLPEEY

SEQ ID NO: 22453 - protein, 396 aa, Pseudomonas syringae pv. syringae B728a
MSFDLRTRLDARRAAHLYRQRPLLQSPQGPQVIVDGQPLLAFCNNDYMGLANHPEVIAAWQAGAERWGVGGGASHLVIGHSAPHHELEEALAELTGRPRALLFSNGYMANLGAVTALVGQGDTVLEDRLNHASLLDAGLLSGARFSRYLHNDVSSLEARLEKSVGDTLVVTDGVFSMDGDIADLPALARSAKAKGAWLMVDDAHGFGPLGANGAGIVEHFGLSMDDVPVLVGTLGKSFGTSGAFVAGSEELIETLIQFARPYIYTTSQPPALACATLKSLQLLRTEHWRREHLTRLIQQFRRGAEQIGLQLMDSFTPIQPIMIGDAGRALHLSQLLRERGLLVTAIRPPTVPAGSARLRVTLSAAHSEADVQLLLNTLEQCYPLLDASHSSEPVHA

SEQ ID NO: 22454 - protein, 444 aa, Microbotryum violaceum
MREIVSLQAGQCGNQIGTKFWEVVSEEHGIDGSGQYTGTTDLQLERINVYYNEAGTGKYVPRAVLVDLEPGTMDVIQGGPLGGLFRPDNFVFGQSGAGNNWAKGHYTEGAELVDQVLDVVRKEAEGTDCLQGFQLTHSLGGGTGSGMGTLLVSKIREEFPDRMMATFSVVPSPKVSDTVVEPYNAVLSVHQLVENSDETFCIDNEALYDICFRTLKLSAPTHGDLNGLVSIVMSGITTCLRFPGQLNSHLRKLAVNMVPFRRLHFFTVGFAPLTARGSSQYRAVTVAELTAQMFDAKNMMAASDPRHGRYLTVAAYFRGKVSMKEVEDQMVSIQQKNSQYFVEWIPNNVQSAHCEVAPRGLKMSVTFIGNNTSIQELFKRVGDHFDVMFRRRAFLHWYTGEGMDEMEFSEASANMHDLIAEYTQYQEAGVDDEEEVAYEEEPQE

SEQ ID NO: 22455 - protein, 451 aa, Cryptococcus neoformans var. neoformans JEC21
MTSLNFKVAPAVQATEAPPIPKAQAWGCQYVPSPSAPLLDLSQGVPRAAPHPNVLAALSKVASDPQAARYGPILGEPGLRQALAEEIKVQYHVSGQGVTFEDVAITTGCNMAFLSLLMTLCPPGKSSVLLPLPAYFNHTMSLSLQDVKPVYVLCEPDNMLKASLPSARSYLASLRKGNGDRREPRMIVLVSPSNPTGTVYTNEEIKQWYDLAREYKVALVLDETYRDFVEGESGQRGLPHRLFEEPDWRSTLVSLGSFSKGYRIPGHRLGSIIASPELLQHITTICDCMQICPPRPPQIALTPLLPSLRPDLFAASSQLSHRRHLFETTVNAIPGWEVISSGGFFAYVQFPEDYIYASSILGLKRKKLGSEDVARVLALRCGVVTLPGSFFMPPLADDEQWDDILNGETLRQDKWLRFAVANVEDDVILSLGPRLKLMNKIMGVDNEGVAS

SEQ ID NO: 22456 - protein, 554 aa, Ralstonia solanacearum
MTKFVFVTGGVVSSLGKGIAAASLAAILESRGLKVTLLKLDPYINVDPGTMSPFQHGEVFVTEDGAETDLDLGHYERFVSAKMRKANNFTTGQIYESVIRKERRGEYLGKTVQVIPHITNEIQAFIERGAKASHDGKADVAIVEIGGTVGDIESLPFLEAARQMSLRLGRNQAAFVHLTLVPFIASAGELKTKPTQHSVQKLREIGVQPTALLCRADRPIPDDERAKISLFANMPQDAVISVWDVDTIYKIPQMLNEQGLDRIICEELRIDAPPADLSMWSRMVHTLENPQHEITIGMVGKYVDLTESYKSLIEALRHAGLHTSTRVNIEYIDSEELESGHTQVLESLDAILVPGGFGKRGTEGKIRAIQYAREKTVPYLGICLGMQLAVIEFARHVAGMQDANSTEFNLETEHPVVALITEWQDRDGRVEKRSADSDLGGTMRLGAQRVPVQTGTKASQIYGAEVNERHRHRYEVNNHYVPQLEKSGMIISARTPSENLPEMMELPGAMHPWFVGVQFHPEFTSTPRDGHPLFKAYVEAALAHRQRQAQRAVA

SEQ ID NO: 22457 - protein, 348 aa, Candida albicans SC5314
MSQPINLAIVGTGIFATDNHLPTIQKIPGLKPYAAYNRTKSKAETFAEKANIASDKVYDSLEEIFEDKDVEFVDALLPVQFNVDAVKLAVKNNKPICFEKPIAANLDQAKEIVKLSESTDLPILVLENWAYLKAIDILKNEILPKIGDVVAFTYNATGPFNDANKYLATGWRLKPEHIGGFLSDGGVHQLALLTEVLGDVESVSGLTQQLKEQSGTDDVLFSTLKTAKGAIGTFTYGSAFGATDKSTFFKIFGTNGSATYDWSPSLPKPQITYATGATSGQASSKTTIEIDEVNTIEEEFKNFKDAVANKDKKLVKVPPRKAFHHLAIVAAALESSKNNGSNVKVETP

SEQ ID NO: 22458 - protein, 384 aa, Xanthomonas oryzae pv. oryzae KACC10331
MSAEKYFLMTPGPLALSDEVKSQMHFDMGSRDKSFRIITALMRNLMINLVEGQDSHSVVPIQGSGTYGIEAALATFISQSDKPLVCINGIYGERILKILQLRGISAISINAPADKPLSIIDIARYLCKDRSITHICFVHCETTTGVINPLDEIVKLAKRYGVFTIVDAMSSFGAMDISVKSTPFDILITSSNKCIEGPPGISLVIASLALLTRKMTTPVNSFVLDVQAQWKSFEQTGEWRSTPPTHVIQACTKALELLSCEGVKNRRRRYCIVREDIITSTRQYAKPLLSAMARSPVCLALTAKGVIDTEEDFDEFYCHLVNYNLYIYSKFHIQTQSFRIGCIGAIEPKWILTMETAFRDFFEDRKRRLTGAKFSNSAIAGGAV

SEQ ID NO: 22459 - protein, 408 aa, Oryza sativa
MQASSAAAAAACSAIKPAAHQHTVQVQEDKRGSEFRARFGTRKLSWGGKLSVENSALHQCQRQALSLTRSIRRQKRQHSPVLQVRCYAIAGDQHESIATEFEEICKEVPQKLGAFYRFCRPHTIFGTIIGITSVSLLPMRSLDDFTMKALWGFLEALSSSLCMNIYVVGLNQLYDIQIDKVNKPSLPLASGEFSVATGAVLVLTSLIMSIAIGIRSKSAPLLCALFISFFLGSAYSVDAPLLRWKRNAFLAASCILFVRAVLVQLAFFAHMQQHVLKRPLAPTKSVVFATLFMCCFSSVIALFKDIPDIDGDRHFGVESLSVRLGPERVYWLCINILLTAYGAAILAGASSTNLCQMIITVFGHGLLAFALWQRAQHCDVENKAWITSFYMFIWKLFYAEYFLIPFVQ

SEQ ID NO: 22460 - protein, 487 aa, Oryza sativa
PAGASAPPPKNFSPISRGSRRRIESSRVLKMQIFVKTLTGKTITLEVESSDTIDNVKAKIQDKEGIPPDQQRLIFAGKQLEDGRTLADYNIQKESTLHLVLRLRGGMQIFVKTLTGKTITLEVESSDTIDNVKAKIQDKEGIPPDQQRLIFAGKQLEDGRTLADYNIQKESTLHLVLRLRGGMQIFVKTLTGKTITLEVESSDTIDNVKAKIQDKEGIPPDQQRLIFAGKQLEDGRTLADYNIQKESTLHLVLRLRGGMQIFVKTLTGKTITLEVESSDTIDNVKAKIQDKEGIPPDQQRLIFAGKQLEDGRTLADYNIQKESTLHLVLRLRGGMQIFVKTLTGKTITLEVESSDTIDNVKAKIQDKEGIPPDQQRLIFAGKQLEDGRTLADYNIQKESTLHLVLRLRGGMQIFVKTLTGKTITLEVESSDTIDNVKAKIQDKEGIPPDQQRLIFAGKQLEDGRTLADYNIQKESTLHLVLRLRGGQ

SEQ ID NO: 22461 - protein, 289 aa, Zea mays
RLAREWPSDIEAAAHEGKDYSDPPPAPLVDAEELTKWSLYRAVIAEFVATLLFLYITVATVIGYKHQTDAAASGPDAACGGVGVLGIAWAFGGMIFILVYCTAGVSGGHINPAVTFGLFLARKVSLVRALLYIVAQCLGAICGVGLVKGFQSAFYVRYGGGANELSAGYSKGTGLAAEIIGTFVLVYTVFSATDPKRNARDSHVPVLAPLPIGFAVFMVHLATIPITGTGINPARSLGAAVIYNNDKAWDDHWIFWVGPFIGAAIAAAYHQYVLRASAAKLGSSASFSR

SEQ ID NO: 22462 - protein, 445 aa, Vibrio vulnificus CMCP6
MPATWSEQSEEDKPMTKSAELYQKAQQTIPGGVNSPVRAFNGVGGSPIFVERADGAFIFDADGKAYIDYVGSWGPMILGHNHAVIREAVIEAAQRGLSFGAPTEMEIKMAELVSELVPSMEQLRMVSSGTEATMSAIRLARGFTGRDKILKFEGCYHGHADSLLVKAGSGALTLGQPSSPGVPADFAKHTLTATFNDLDSVRELFAANKGEIACIIVEPVAGNMNCIPPVEGFHEGLREICDQEGALLIFDEVMTGFRVALGGAQAHYNIKPDLTTLGKVIGGGMPVGAFGGRKEVMQYIAPTGPVYQAGTLSGNPVAMAAGYACLTLLREEGNEKRLASKTKHLADGFKSLAAQHGIPLVVNQVGGMFGFFFTEQEQITCYEDVTKCDIERFKRFFHLMIDHGVYLAPSAFEASFTSLAHGSKEIEATLEAADRCFAILAAESK

SEQ ID NO: 22463 - protein, 333 aa, Pseudomonas fluorescens PfO-1
MGLLVDGRWQDKWYESSKDGAFQREQAQRRNWVTRNGEPGPSGEGGFAAEAGRYHLYVSLACPWAHRTLILRKLKGLESLIDVSVVSWLMLENGWTFDQNLGSTGDKLDHFDFMHQRYTADTADYTGRVTVPVLWDKKLKRIVSNESAEIIRMFNSAFDDLTGNDLDFYPAPLRGEIDALNERIYPAVNNGVYRAGFATSQNAYEEAFDDVFAELDHLEQVLDANRYLTGEYLTEADVRLFTTLIRFDAVYHGHFKCNLRRISDYPNLSNWLREMYQWPGVAETVDFQHIKNHYYGSHKTINPTGVVPKGPKQDFTVAHDRDRLGGKGVWRRG

SEQ ID NO: 22464 - protein, 338 aa, Vibrio sp. Ex25
MKVLVTGGMGYIGSHTCIQMIEAGMTPVILDNLYNSKSTVLERIEKVCGVKPTFIQADIRDKSTMVEVLKSHDIEAVIHFAGLKAVGESVAKPLEYYDNNVNGTLVLVDAMREAGVKSLVFSSSATVYGDPASVPITEDFPTSATNPYGRSKLMVEECLTDFQKANPDWSITLLRYFNPVGSHPTGELGEDPQGIPNNLMPFVSQVAVGRREFLSVFGSDYPTKDGTGVRDYIHVMDLSDGHVAALEKVGNKAGLHVYNLGTGNGYSVLEMVKAFETASGKDVPYQLVERRPGDIAECWADPSKAMNELGWKASRTLEEMTGDTWRWQSNNPQGYPDA

SEQ ID NO: 22465 - protein, 191 aa, Zea mays
VPAAGRIAFRRPWNTPQPEALRLRLRLRARGVRREDGGGVRTEEQEQTAPRTFYDLLGISADGSPDDVRASYRRLALKYHPDVSPPGAAAENTRRFIEVQEAYETLSDPSRRSSYDRALARGVCRLAFSGRRSQSHHAYYHHQEQGERSGWRRSWEDQIAELKRRSVAKDSEENLSWGARMRRRAEASAAE

SEQ ID NO: 22466 - protein, 441 aa, Xanthomonas campestris pv. vesicatoria str. 85-10
MSSTVPKLSFARILALNAGFFGVQYSFGLQQSNMSPIYNYLGADHANLPYLWLAGPITGLVLQPFVGAWSDRSVTRWGRRMPYMVLGALVCSLCLLAMPFSTALWMAVCLLWVLDAANNVAMEPYRALVSDVLAPPQRPLGYLTQSAFTGLAQTLAYLTPPLLVWMGMNQDAANAHHIPYVTIAAFVIGAGFSAGSILLTARSVREPAIAPAEIARIRQRGAGLGATVREIGSALREMPPTMRQLAPVMLFQWYAIFCYWQYIVLSLSTTLFGTTDPTSHGFREAGLVNGQIGGFYNFVAFLAAFAMVPVVRRFGPKYTHAACLVAAGIGMWLLPGIENRWLMLLPMIGIGLAWASMMGNPYLMLADSIPSERTGVYMGLFNLFIVLPMLIQIVTLPLYYEHVLHGDPRNVVRLAGALMLAAAAAMLCVRGRKQGTSPAGA

SEQ ID NO: 22467 - protein, 673 aa, Xanthomonas campestris pv. vesicatoria str. 85-10
MASSARARLPAVPPASACVTTFKDPAPGPARRPLMSTSPIDSTALRAAFAAPLDPQRADVLLSRYDQHASRLLDALHALYGQRADYASWLAQWLGEIGTIARQRPQALQALDSTRHAGWFGEQHMLGYSAYADRFAGTLQGVAERVPYLQELGVRYLHLLPFLRARAGDNDGGFAVSDYGQVAPSLGTNDDLIALTTRLREAGISLCADFVLNHTADDHAWAQAARAGDARYLDYYHHFADRSLPDRYEATLGQVFPHTAPGNFTWVDDTAQWMWTTFYPYQWDLNWSNPAVFGDMALAMLRLANLGVEAFRLDSTAYLWKRIGTDCMNQPEAHTLLVALRAVTDIVAPAVVMKAEAIVPMTQLPPYFGSGTDQGHECHLAYHSSLMAAGWSALALQRGDILHNVIAHSPPLPRHCAWLSYVRCHDDIGWNVLQHEASGNAAQPPFSLRDVARFYANAVPGSYARGESFQSSGDGVHGTNGMAAALAGIQAAQEAGDAAALAVAVDRLVLLYAIALAMPGVPLIYMGDELAMVNDPGYRDDPLRQHEGRWLHRPAMDWQLAAQRHDANSLSGKVYRRLRGLIRKRTALTALAADQALGSIALNDARVFALTRGESFIALHNFSDQPLDVELAAVGVDGWTLLAIDDAVDAAAVSDDVSIVLPPYGVRWLQRKG

SEQ ID NO: 22468 - protein, 179 aa, Zea mays
  misc_feature (98)..(98): Xaa can be any naturally occurring amino acid
  unsure (1)..(179): unsure at all Xaa locations
MAKQGAKKMKDENKKRLDLLLRIILISNVIYIVVRMAIMHSSFTWKHWIGLMVTSAAYFLPYKQLASMAKPVYSDNGELLDGGFDLSTGGVCESHFAXYLYDVIYITVFVQLMSIISEKFWWTYLVIPAFAGYKISGLLRGAFFSGGSEGEVEDEKTRKKREKMEKKASRGKMIKTRTR

SEQ ID NO: 22469 - protein, 423 aa, Xanthomonas campestris pv. vesicatoria str. 85-10
MSTAPQKPLAIRERLSEVRYEIRGELARRARELEAQGRKLIKLNIGNPGAFGFRAPEHLQRAIADDMGRTDPYTHQQGLPEAREAVATAYSRRQHPDAHPDRIFIGNGVSELIDLSLRALLNPGDEVLVPSPDYPLWSAATILNDGRPVYYRCAPENGFQPDPVEIETLVSSRTRAIVLINPNNPSGASYSRELLERIVAIATKHNLLLMVDEIYDQVLYDDAAFVPVAPLAGAHPCITFSGLSKVHRACGWRVGWALLSGDQARINDLRNAMDLLGALRLCANVPGQYAIDAAVNGPDTISALCAPGGRLYETRRAVIEACAASEHLQLVAPAGALYAFPAVVGAAARNFDDHAFALDLMNEEGVLVVPGSSFNVPYRHHFRVTLMPEAGVMRDVFARIDRALARRAEAITKVVPLKPRNVA

SEQ ID NO: 22470 - protein, 483 aa, Arabidopsis thaliana
MTMMMSDLPNDLVEEILSRVPITSLGAVRSTCKRWNGLSKDRIVCKGDANQQFTGFTRYVNESTVCSMRLDLNEIQNEDVELVELSINKINKFIELELFQVYYSDGLLLLVTDEVDSKIVVWNPYLGQTRLIQCRDTEHFKYRYALGYDNNRNHKILMYNRKNCEIYDFKSDSWKVLDIIPDLHTNIYVRDMSIKGNTYFFYRGEKIGEGLAGCLLSFDFTRERFVSCLPLPFQIAKFDDNVALSSVREEHLVVLFNNWEESEMEIWVTTKIEPNAVSWSNFLTFTHFRIKFLVTSFFIDQEKKLAVVFGRSLSKQMRCNIAYVIGDNGYLRILDFGVTFIPSNLPVSYAPSLVKITQGQELSVIEEKKRSRLLASLVYIGSFFIDQEKKHAVIFDSSLSCGSVACIIGETGNLRTVDLGVAAVPYRQLPVCSYAPSLEQINQGQELPLIGQKKISRLSTSLIYIMLFVSFITFILFFDSVFF

SEQ ID NO: 22471 - protein, 475 aa, Shewanella sp. MR-4
MSNEIKTQVVVLGAGPAGYSAAFRAADLGLETVIVERFSTLGGVCLNVGCIPSKALLHVAKVIEEAKAVAAHGVVFGEPTIDLDKLRSFKQKVISQLTGGLGGMSKMRKVNVVNGFGKFTGPNSLEVTAQDGTVTVVKFDQAIIAAGSRPIKLPFIPHEDPRIWDSTDALELKEVPGKLLVMGGGIIGLEMGTVYSSLGSEIDVVEMFDQVIPAADKDVVRVFTKQIKKKFNLILETKVTAVEAREDGIYVSMEGKSAPAEPVRYDAVLVAIGRTPNGKLIDAEKAGVKIDERGFINVDKQLRTNVPHIYAIGDIVGQPMLAHKGVHEGHVAAEVIAGMKHYFDPKVIPSIAYTDPEVAWVGLTEKEAKEQGIAYETATFPWAASGRAIASDCSEGMTKLIFDKDTHRVIGGAIVGVNGGELLGEIGLAIEMGCDAEDLALTIHAHPTLHESVGLAAEIYEGSITDLPNPKAKKK

SEQ ID NO: 22472 - protein, 281 aa, Glycine max
HKDPCFSLPWKQDCFPIFSESSPLYHTSNKPEPLTPEEEKDLQLAIQRFHELCHKCVQVNIPLLVDAEHTSVQPAIDYFTYSSAILHNKGDNPIVFGTMQTYLKDAKERLLLAAEAADNMGIPMGFKLVRGAYMSSETKLAESLGYSSPIHDTIEDTHKCFNDCSSFMLEKVANGPGGVVLATHNVESGKLAAAKAHELGVGKVNHKLEFAQLHGMSEALSFGLSNAGFQVSKYMPFGPVETVMPYLLRRAEENRGMLAASGFDRQLMRKELGRRLKAAVF

SEQ ID NO: 22473 - protein, 206 aa, Thermoanaerobacter tengcongensis MB4
MISVIVPAYNEGKNIGRVLSVLEKIDVIDEIIVVNDGSTDNTEEEAKKYKVKVINLEKNQGKGKALKEGVLNAKGDIIVMLDADLIGFTEKHFYSLVMPVVKDEADMTVGIFSGGRKSTDLAQKIAPFLSGQRAIKKKFLEDIKEMEISKFGVEVALNRYAKKNNLRVVTVPLENMTHVMKEEKLGFVKGFAARMKMYFEILRMWV

SEQ ID NO: 22474 - protein, 444 aa, Microbotryum violaceum
MREIVSLQAGQCGNQIGTKFWEVVSEEHGIDGTGQYTGTSDLQLERINVYYNETGTGKYVPRAVLVDLEPGTMDVIQGGPLGGLFRPDNFVFGQSGAGNNWAKGHYTEGAELVDQVLDVVRKEAEGTDCLQGFQLTHSLGGGTGSGMGTLLVSKIREEFPDRMMATFSVVPSPKVSDTVVEPYNAVLSVHQLVENSDETFCIDNEALYDICFRTLKLSAPTHGDLNGLVSIVMSGITTCLRFPGQLNSDLRKLAVNMVPFPRLHFFTVGFAPLTARGSSQYRAVTVAELTAQMFDAKNMMAASDPRHGRYLTVAAYFRGKVSMKEVEDQMVSIQQKDSQYFVEWIPNNVQSAHCEVAPRGLKMSVTFIGNNTSIQELFKRVGDHFDVMFRRRAFLHWYTGEGMDEMEFSEASANMHDLIAEYTQYQEAGVDDEEEVAYEEEPQE

SEQ ID NO: 22475 - protein, 283 aa, Physcomitrella patens
MGRGKIEIKKIENTTSRQVTFSKRRGGLLKKAHELAVLCDAEVALVIFSSTGKLFEYASSGSMRDIIERYKKSPNGAMKSGASTDFLGREVLKLQEQVERLKSSQRRMLGEDLSALKVPDLLQLEQQLDLGASRVRARKNQLILEEIEGLQKKEQELMVANEDLRKKIADAEAVARANLSEARPESPRHLARTLSRDVSASSHPAATVYPHPNLRDVQRSQTSLQLGMFSSESYPPSSSRWPSEQQFPSASEGCAGESSMKWDHPHYHIQNRLHANILPSVRI

SEQ ID NO: 22476 - protein, 444 aa, Microbotryum violaceum
MREIVSLQAGQCGNQIGTKFWEVVSEEHGIDGTGQYTGTSDLQLERINVYYNETGTGKYVPRAVLVDLEPGTMDVIQGGPLGGLFRPDNFVFGQSGAGNNWAKGHYTEGAELVDQVLDVVRKEAEGTDCLQGFQLTHSLGGGTGSGMGTLLVSKIREEFPDRMMATFSVVPSPKVSDTVVEPYNAVLSVHQLVENSDETFCIDNEALYDICFRTLKLSAPTHGDLNGLVSIVMSGITTCLRFPGQLNSDLRKLAVNMVPFPRLHFFTVGFAPLTARGSSQYRAVTVAELTAQMFDAKNMMAASDPRHGRYLTVAAYFRGKVSMKEVEDQMVSIQQKNSQYFVEWIPNNVQSAHCEVAPRGLKMSVTFIGNNTSIQELFKRVGDHFDVMFRRRAFLHWYTGEGMDEMEFSEASANMHDLIAEYTQYQEAGVDDEEEVAYEEEPQE

SEQ ID NO: 22477 - protein, 90 aa, Coxiella burnetii
AKLTDTSRTFNNARIEALELDNLMEVSYATAVSAQQRTESRGAHSRYDYKERDDANWLKHTVYFRDGHIAYRPVNMKPKGMDPFPPKSRD

SEQ ID NO: 22478 - protein, 338 aa, Pseudomonas fluorescens PfO-1
MKVFYDKDCDLSIIQGKKVAIIGYGSQGHAQACNLKDSGVDVTVGLRKGSATVAKAEAHGLKVTDVAAAVAGADLVMILTPDEFQSQLYKNEIEPNIKKGATLAFSHGFAIHYNQVVPRADLDVIMIAPKAPGHTVRSEFVKGGGIPDLIAIYQDASGNAKNVALSYAAGVGGGRTGIIETTFKDETETDLFGEQAVLCGGTVELVKAGFETLVEAGYAPEMAYFECLHELKLIVDLMYEGGIANMNYSISNNAEYGEYVTGPEVINAESRQAMRNALKRIQDGEYAKMFISEGATGYPSMTAKRRNNAAHGIEIIGEQLRSMMPWIGANKIVDKAKN

SEQ ID NO: 22479 - protein, 444 aa, Microbotryum violaceum
MREIVSLQAGQCGNQIGTNFWEVVSEEHGIDGTGQYTGTSDLQLERINVYYNEAGTGKYVPRAVLVDLEPGTMDVIQGGPLGGLFRPDNFVFGQSGAGNNWAKGHYTEGAELVDQVLDVVRKEAEGTDCLQGFQLTHSLGGGTGSGMGTLLVSKIREEFPDRMMATFSVVPSPKVSDTVVEPYNAVLSVHQLVENSDETFCIDNEALYDICFRTLKLSAPTHGDLNGLVSIVMSGITTCLRFPGQLNSDLRKLAVNMVPFPRLHFFTVGFAPLTARGSSQYRAVTVAELTAQMFDAKNMMAASDPRHGRYLTVAAYFRGKVSMKEVEDQMVSIQQKNSQYFVEWIPNNVQSAHCEVAPRGLKMSVTFIGNNTSIQELFKRVGDHFDVMFRRRAFLHWYTGEGMDEMEFSEASANMHDLIAEYTQYQEAGVDDEEEVAYEEEPQE

SEQ ID NO: 22480 - protein, 379 aa, Candida glabrata CBS138
MSLANLYMCSVACAINLNINFTMDSKIIKNYLLPKAIYKPGNKIGATIFNDNRTINNKLPLSLEKNANSLNIMDNTNVLKSVLKNYKCNKSLPYSSLIDKENISNESSQIHIAKENSEVDLCNTTLDNAYEYLLKLDEDTYLPDTILNEYSSLRQTRDLLLNWVIKIHQNLKLENETLYMTIDLIDKFLIKKKLPIEKFQLLGLTCLYIASKYEEVLPPSIFQFALESNGIFDSEEIKESEFNILETLNFKIGYPSPIVLLDRQLDGYLNYNEMKFMSLYLLEITFVDFRFLSYRMSMRTKAAALITLKMYNHSIKDLKTRFQKEGLMQTIEKICRYILQYLLEPTIHTELQRKYSQLASYNVADRATKYVKCLIKKYA

SEQ ID NO: 22481 - protein, 363 aa, Arabidopsis thaliana
MDKYELVKDIGAGNFGVARLMKVKNSKELVAMKYIERGPKIDENVAREIINHRSLRHPNIIRFKEVVLTPTHLAIAMEYAAGGELFERICSAGRFSEDEARYFFQQLISGVSYCHAMQICHRDLKLENTLLDGSPAPRLKICDFGYSKSSLLHSRPKSTVGTPAYIAPEVLSRREYDGKMADVWSCGVTLYVMLVGAYPFEDQEDPKNFRKTIQKIMAVQYKIPDYVHISQDCKNLLSRIFVANSLKRITIAEIKKHSWFLKNLPRELTETAQAAYFKKENPTFSLQTVEEIMKIVADAKTPPPVSRSIGGFGWGGNGDADGKEEDAEDVEEEEEEVEEEEDDEDEYDKTVKEVHASGEVRIS

SEQ ID NO: 22482 - protein, 115 aa, Brassica napus
MAVDHLILTTCFASLFASLLLYLLRRRSKEIVSRNNEPLTVKPGNNDVDIIIVGAGVAGAALAHTLGKEGRRVHVIERDLTEPDRIVGELLQPGGYLKLIELGLEDCVKEIDAQR

SEQ ID NO: 22483 - protein, 129 aa, Ralstonia solanacearum
MIVVFDAQCLLCSGFARFLLKHDRRGVLRFASMQGETGRALLRAADVDPEDVDTVLFVRDGRAWRESAAALRILHALGWPWRLAWLGWAVPLPIRDALYRCVARNRYRWFGCSDTCILPPPGAAQRFLD

SEQ ID NO: 22484 - protein, 333 aa, Candida glabrata CBS138
MDMDKRVERVPLAEVRASNVLSQPVTISSSKRKLEVYDGEETPAKKVKVVDQVAIRDVATVPEYSTDIFKNLFKSEEDTIPSHNYLLDEKSEYHIRANMRAILVDWLVDVHRNFKCLPETLLLAINILDRVLSSTKVSVSKLQLVAVTSLFIACKYEEVKLPKIANFAYITDGAATVEDIREAEFNILETLRFNINWPNPLNFLRRLSQIDDYNYELRDIAKFVLEFIMCTHYFVNYKPSFLSAMAIYLSKRICNDESSNHNEGILTTWSATHTEYSGGINPNNDPKFNDSLNVLIDEFKQPSNSTKSLLAKYKANTYHGMFFRVQDWCLNYI

SEQ ID NO: 22485 - protein, 1650 aa, Arabidopsis thaliana
MGSWMWKKLFKYRDCAKTMHKVEIKSGSSTSFWFDNWSQLGRLIDITGPRGVIDLGIPLDAMVETALHPRRRRKHRVDVLNRIEAEIHTTRQRIRINEKDISMWRFVGDKFKTTFSTKFTWNNIRGTHPTVVWSKGVWFSYSTPKYSFLTWLPIHNKLATGDRIKKWNTGQHVHCVLCTNTEETRDHLFFSCPYSSTIWENLAHRLLQTNYSSNWHQLTAMLHNTSTPRLHLFLLRYVFQATLYHIWRERNARRHGEIPTTTIRQIKLIDGTKKKERRRRNEKPVIAPSSLPNDVVEEIFLRFPVKALFRLKTLSKQWRSTIESQSFEERHLKIAERFHAHHPRVMVITEKDPLKLLPRPRPDADIGFRLFCLESGSLLSFILLNFPQSFANYIYVSGCCDGLFCVHSPRSQAMYVVNPATRWLRQLPPARFQILMQKATYRDWLDMKSVFHLAFVKANDYKLVWLYNSDKYNADALSPNEGVTKCEVFDFRANSWRDLTCTPSYRIFHGQIPACANGSVYWLTEPYNDKIEVVAFDIHAESFRLLPKIKPAIAGSDPMHIDMCTLDNGLCMSKREPNTLVQEIWRLKSSEDSWEKICTIDLLSCSSSRTQFRDEFYWDEQDLVNPSTPVALCKNKTILLSHRYSREEFVAHSGNVNCLSIGKKTSRLLLTGGDDYKSLCGHTSPVDSVAFNSEEVLVLAGASSGVIKLWDLEESKMVRAFTGHRSNCSAVEFHPFGEFLASGSSDTNLRVWDTRKKGCIQTYKGHTRGISTIEFSPDGRWVVSGGLDNVVKVWDLTAGKLLHEFKCHEGPIRSLDFHPLEFLLATGSADRTVKFWDLETFELIGTTRPEATGVRAIAFHPDGQTLFCGLDDGLKVYSWEPVICRDGVDMGWSTLGDFCINEGKFIGCSYYRNSVGIWVSDISELEPYGAVSEDKNECMVKRFSVLNDQSERMGSGPRGSVSPDYETREIKNIYVDCGNLNVAQNPGSLKATLPLESGKVATMVSEKQNAAYFGPAGDKYSSTSRDSDSGEESSYSERESIPFSRTKSGMLLRPAHVRKTLAKFEESKQSAVVQSATRKKSGLAVEEEPQTQNAFLSEQNASKPFDAEDSIIKGITNKFEKALSSEPPTDEANRMFLKPPRIHRSSNSKYNDTRRAMSADPATFGKGGMENSGDVEDIPSKTERVLSREKPGDEQKNTEYPSGSRELNPVKIVEGVNVVSGRTRSLVEKFERGEKTTHTEGASTTIEQNNNAVQEDPRKTSRQTGETPVISTRRARSTPARVMPIVLNRDSNVTSDEPPLTQPARTSSFPVMPVILNQASNVTYDEPSVALTQESRTSHARILPVTFNQATNITSEEASVTLRRQRRNSAARVRPVLLSQATSHECPVTSVRPLRTSPARVMPTKLNQSVNMTSDTSHIASMHRVSPTQMLATPTVIDQVADMTLDETHATQIQPACDNMPQKEEPNISDREDDSDITENLMLTHNEFLSTLQSRLTKLQIVRHFWERSDVKGAIGALRKLTDQSVQADVISILTEKIEILTLDMFSQLVPVLTSLLGSRTERPVNVSLDMLLKLVAVFGTVIRSTVSAPRIVGVDLHANERNLPNLFCGTAQDSKNSSSSRKKRRSNNKKGSRTKPSSSRTIAASKTKN

SEQ ID NO: 22486 - protein, 465 aa, Kluyveromyces lactis NRRL Y-1140
MASMFRPPESRRTNSKPPKLSLPPQLVSNSKPITDIRDEKLRQPPSKSVPSSATPTSSASASSARTLKNRPVPPPTASSVTPLSSTNSGSAMGSLSNKLHGLKINTDHLPTSGSQQSTQSADSMTSNLISMYDSEPTTSSSTSLVNHGKESEIIEHDRDDSTDELESDIWQTYKIHEQIDTLGILGEGTGGSVTKCKLRNGSKIFALKTIATIENDGSEKQIFRELQFNKSCKSDFIVRYYGMFACEETSTIFIAMEYMGGRSLDSVYKHLLSKGGRIGEKVLGKIAESVLRGLFYLHERKIIHRDIKPQNILFNEIGQIKLCDFGVSGEAVNSLATTFTGTSYYMAPERIQGQPYSVTSDVWSLGLTLLEVAQGHSPFDTDKLAANMPPIELLMLILTFTPELKDEPEQGIVWSKSFKSFLDYSLKKDSKDRPSPRQMLQHPWMVGQTKKHVNMKKFIQTCWAD

SEQ ID NO: 22487 - protein, 909 aa, Kluyveromyces lactis NRRL Y-1140
MSTEAHRHTYYGGPTTNTESSHHIHTSHAHNCSNGSSRRHSSSHNGRRRQVTFGPYIIGPTLGEGEFGKVKLGWSKSNSDESKNVAIKLIRRDTIPKNSEKEVKIYREINALKHLAHPNIVTLEEVLQNSKYIGIVLHYASGGEFYKYIQKKRRLKEPAACRLFAQLISGVHYMHHKGLAHRDLKLENLLLDEHENLIITDFGFVNEFSSRNDLMKTSCGSPCYAAPELVVTTKAYEARKADVWSCGVILYAMLAGYLPWDDDPDNPDGDDIAKLYNYITKTSLKFPEYINPIPRDILRRILVSDPSKRITVELILKHQWLQPHALFLSLKPEDWDIKAKAEISNIFRPPPSQSSQSAYSRPHSNSSVSSSEKRNSLIIDSTLHLQPVPPHESQSHAIAKPSSPSSDLRSSPIKRVNHSRSNSAASIALQAVVDAEREFFQSSQSILQISGVQSIEQSPNTRVQTYTATRSLAHNNSSSLMNRNSIIVEVSPNKEVISSSSSSAIPGMSYSASRESYISTSPVRNAAQSPKFVPGSFTSNTSHHNNKFGSSQQSRPRPTSYHPISSSYLEMQPSNSQNNFITTTNEFSYIPRTVNANNYIDSTRAISPELNGRTVDGTSPPLNSRNFQSGIIRRGSFSASKPSPSVDLNNVEGDLIKTDAEDHKKLKQQRRKSQRYSTVILDNSIATVQEETEEPITAYDANIKKPVENSNNLTKEFGKIVINEPRKEDAHIPISKPESEHLQKPPQQHQSQASIARADSHSKKEKRFSLLSFYSYYNNSKTSVSSDSSGGRRVSANSQKTNERISSVKSNGIPSRNVSGSINQFETSKPRVSSNPSNRTNYRHSMLPPKSSQVIDASAKRMNRSSVMVSSAKDITSSDGTASKEHKEQREPSTAKRVFDFFKRRSMRV

SEQ ID NO: 22488 - protein, 246 aa, Rhodospirillum rubrum
MSDPALPVAPVAPVTEEPPHILVVDDDTRILALLKRFLSERGFIVTAAADAAEARRQLAALRFDLLVVDVMMPGESGLELTRSIREDSDVPILILTAMDQPDDRVSGLESGADDYLAKPFDPRELVLRVNGILRRLRQAPDLPPAAPPEGPLPLGACVFDPHRQELLRGDEVVRLTTAETALLSTLAARAGEAISREDLAELTGVAGNPRAIDVQVTRLRKKIEADPRVPRHLQTVRGRGYMLRPG

SEQ ID NO: 22489 - protein, 386 aa, Rubrivivax gelatinosus PM1
MRKTWLIFSQAVTVALAMWFVVATLKPEWVQNRPLSTAVGSSSNPAPQITLAPAAAGGSSYAAAAKRAAPAVVSVITSKTPTARDPRAADPWFRYFFGDPDSQAQSGVGSGVIVSPEGYVLTNNHVVERMDDIEVVLSDGRRTKAEVIGTDPEADLAVLRIKLDKLPSVSFGDSDALQVGDVVLAIGNPFGVGQTVTSGIVSALGRNQLGINTFENFIQTDAAINPGNSGGALIDAAGNLMGINTAIYSRSGGSLGIGFAIPVSTARQVMEGLIRDGQVTRGWIGVEPRDLTPEIAETFNLKVSQGVLITGVLQGGPASDGGLRPGDVVVKVADSPVGNTSQLLNVVASLKPRSKARLVVQRGDSEVTLDVIVAQRPKAPRQQREP

SEQ ID NO: 22490 - protein, 680 aa, Haemophilus influenzae R2866
MRWIIFQNELSQENKMATRRQLANAIRVLAMDSVQKAKSGHPGAPMGMADIAEVLWRDFLKHNPTNPKWADRDRFVLSNGHGSMLIYSLLHLTGYDLSIEDLKQFRQLHSKTPGHPEYGYAPGVETTTGPLGQGITNAVGMAIAEKTLAGQFNREGHEIVDHHTYVFLGDGCLMEGISHEACSLAGTLGLGKLIAFYDDNNISIDGHVDGWFSDDTAARFEAYGWQVIRNVDGHDAEQIRAATILAQAEKEKPTLIICKTIIGFGSPNKSGSHDSHGAPLGDEEIALTRKALGWEYAPFEIPAEYYAEWSAKEKGSAAEKSWEEKFAAYAKAYPELAAEFKRRVSGELPANWAAESKAFIEKLQANPASIASRKASQNAIEAYAHVLPEFLGGSADLASSNLTLWSGSKPIRAHENVGGNYINYGVREFGMSAIMNGIALHGGFIPYGATFLMFYEYAHNAVRMAALMKQRTLFVYTHDSIGLGEDGPTHQPVEQTASLRLIPNLETWRPCDQVESAIAWQQAVERQDGPSALIFTRQNLAQMNRTSAQLDAVKRGAYVLKDCDGTPELIFIATGSEVELAVQAAEALSAEGKKVRVVSMPSTNRFDKQDAAYRESVLPAAVTKRVAIEAGIADFWYKYVGFNGRVVGMNSFGESAPADQLFKLFGFTVENVVAKAKEIL

SEQ ID NO: 22491 - protein, 370 aa, Triticum aestivum
PTRLGRWPAAASRSGGGYELRTDGRRGSGMERYEVIKDIGSGNFGVAKLVRDVRTKELFAVKFIERGHKIDENVQREIMNHRSLRHPNIVRFKEVVLTPTHLAIVMEYAAGGELFERICGSGRFSENEARFFFQQLLSGVSYCHSMQICHRDLKLENTLLDGSEAPRLKICDFGYSKSSVLHSQPKSTVGTPAYIAPEVLSRREYDGKVADVWSCGVTLYVMLVGAYPFEDPDEPKNFRKTITRILSVQYSVPDYVRISMECRHLLSRIFVANPEQRITIQEIKNHPWFLKNLPIEMTDEYQMSLHMVGVNAPPQTLEEIMAIIQEARIPGDGSKFAGQLSVPGLGSMELDDIDDVDVDVEDSGDFVCAL

SEQ ID NO: 22492 - protein, 160 aa, Hordeum vulgare
MSSSPVVKLGPWGGDDGVAHDITVAPQRLESITIRWGKVLDSVAFTYRDKDNQLHTAGPWGGAGGEKEDPDTITLGPSEYITQVDWSVGPFKLKEIEHCITSLKFVTNQASYGPFGYAVDSTHYSLPVLNNGSVVGMFGRAGDYLHAIGFYVLPETSLAS

SEQ ID NO: 22493 - protein, 337 aa, Glycine max
MGVPERDPLAQLSLPPGFRFYPTDEELLVQYLCRKVAGHHFSLPIIAEVDLYKFDPWVLPGKAVFGEKEWYFFSPRDRKYPNGSRPNRVAGSGYWKATGTDKIITTEGRKVGIKKALVFYIGKAPKGSKTNWIMHEYRLLDSSRKHNLGTAKLDDWVLCRIYKKNSSSQKVEANFLAMECSNGSSPSSSSHVDDMLGSLPEINDRCFTLPRVNSLRTMHQQDEKFGSPNMGSGFFSDWVNSTDLDSISEFESGCQTQRMVNYDCNDFFVPSLPPLGHVDYMVDAPLEEEVQSGVRTRRVDGPGHFQPNPDTRLLPGSGDPFGFGFIMGQQVEFGFRD

SEQ ID NO: 22494 - protein, 473 aa, Corynebacterium efficiens YS-314
MEAFTNLTASIQNHESGPAARKVILETMTNPYPHNNEANSTPDNETSSFEPVRSAYPSWGTPPPQTTQPSSSPAPGAPEGSGTDKRQAGDPGTPAWTSWDTDATGMDTTQPERKQKKTVGLGTALALMVVGSVATGSIVGVASTQFGDDTGGSGVINALDQPSAQRSVSAEPGSAEQVADQVLPSVVSIQALTRNSASEGSGSIISSDGFVMTNNHVVAGVEQNGVLQVTMSDGSSYEADFIAGDVSTDIAVIKIRNATDLPMINFGDSDSLAVGQEVLAVGSPLGLSSTVTSGIVSALNRPVRASGDGGESSLIDAIQTDAAINPGNSGGPLVDMEGNLIGMNSVIASISSGTDTGGSIGLGFAIPANFAKRVATQLIETGVATQPMIGVTLANGANVSGALIASVQDGGPGAAAGLKPGDVVTMLNDRVIDSADALIAAVRSQDFGETVTLTVTAQDTSQTRQVEVTLTSE

SEQ ID NO: 22495 - protein, 363 aa, Xylella fastidiosa Ann-1
MAAIITTARQPFKSETPLTTFPFRFPAEWEPQSAILIAWPHANTDWSAHLADVEETYIALVAAITRFQMVIICVLDDDLQTYTEARLRSASVAMQQVRFTVASYNDTWLRDSGPITLIGTNGDFRLLDFRFTGWGGKFEAKADDQLVSALHAKGLFKNTQMHSINFALEGGAIETDGAGTLLTTWRCLHERHPQRTRTTLDANLTAWLAQNRVLWLEHGYLEGDDTDAHIDTLARFASTDSIVYQSCDNTTDSHYAELQAMANELTALRTTEGRPYRLFPLPWTKPILDQDRRLPASYANFLIIEGAVLMPTYNDPADTIAQSVLAEAFPTREIVPVPCRPLIWQNGSLHCITMQIPAGLLAT

SEQ ID NO: 22496 - protein, 345 aa, Glycine max
MGVPEEDPLSQLSLPPGFRFYPTDEELLVQYLCRKVAGHHFSLPIIAEIDLYKFDPWVLPSKAIFGEKEWYFFSPRDRKYPNGSRPNRVAGSGYWKATGTDKIITTEGRKVGIKKALVFYIGKAPKGTKTNWIMHEYRLLDSSRKNTGTKLDDWVLCRIYKKNSSAQKAVQNGVVPSNEHTQYSNGSSSSSSSQLDDVLESLPAIDERCFPMPRVNTLQQQQHEEKVNVQNLGEGGLLDWTNPSVLNSVVDFVSGNNNHNQLVQDQTQGMVNYNACNDLYVPALCHVGTSVPQKMEEEVQSGVRNQRVQNNSWFLQNDFTQGFQNSVDTSGFKYPVQPVGFGFRN

SEQ ID NO: 22497 - protein, 137 aa, Burkholderia cepacia
EEFDAQYPKFKAAAVQASPVYLDLAATVEKSCRIIDEAAANGARLVAFPEAFLPGYPWFAFIGHPEYTRKFYHELYLNAVEIPSLAVQRLSEAARRNKTYVCMSCSEKDGGSLYLAQLWFNPDGDLIGKHRKMRVSV

SEQ ID NO: 22498 - protein, 444 aa, Microbotryum violaceum
MREIVSLQAGQCGNQIGTKFWEVVSEEHGIDGTGQYTGTSDLQLERINVYYNETGTGKYVPRAVLVDLKPGTMDVIQGGPLGGLFRPDNFVFGQSGAGNNWAKGHYTEGAELVDQVLDVVRKEAEGTDCLQGFQLTHSLGGGTGSGMGTLLVSKIREEFPDRMMATFSVVPSPKVSDTVVEPYNAVLSVHQLVENSDETFCIDNEALYDICFRTLKLSAPTHGDLNGLVSIVMSGITTCLRFPGQLNSDLRKLAVNMVPFPRLHFFTVGFAPLTARGSSQYRAVTVAELTAQMFDAKNMMAASDPRHGRYLTVAAYFRGKVSMKEVEDQMVSIQQKNSQYFVEWIPNNVQSAHCEVAPRGLKMSVTFIGNNTSIQELFKRVGDHFDVMFRRRAFLHWYTGEGMDEMEFSEASANMHDLIAEYTQYQEAGVDDEEEVAYEEEPQE

SEQ ID NO: 22499 - protein, 446 aa, Silicibacter pomeroyi DSS-3
MTYRGHARAIAVLGLPLIGGHLAQFAIGLTDTVMLGWYGVEALAAVTLGSSYFFVLFLMGAGFGWAVMPMVAAAAAERDETSIRRATRMGLWASLIFAMLAMPLLIWSQPILLALGQEPEIATMAAEYLRVAGWGMIPALTVMVVKSYLAALERTQVVFWVTVGAVFANAAANYALIFGNWGAPELGITGAAIASICTQMVSLVAVLAYALWVLPQHTLFRRFWRPDSEMFRRVVRLGVPIALTNLAEVSLFSASAVMMGWLGAVPLAAHGIAIQLAAATFMVHLGLSNAATIRAGNAYGRRDREHMARGGKVVIAMSLMMSLVTIALFLTCAEPLISLFMEPDDPNRPEILAIGVGLLAMAALFQLVDGAQVMALGLLRGVQDTTVPMIMAAVSYWLVGIPASYVLGFVLRWEGIGVWAGLSVGLACAGSLLMTRFWRRSIRLID

SEQ ID NO: 22500 - protein, 330 aa, Vibrio vulnificus YJ016
MSISNTVTKVKDFDVNQMDDDFNDDIEINEKEDLTEEKVTLREEFDASNKSLDATQLYLGEIGFSPLLTAEEEVLYARRALRGDEAARKRMIESNLRLVVKISRRYSNRGLALLDLIEEGNLGLIRAVEKFDPERGFRFSTYATWWIRQTIERALMNQTRTIRLPIHVVKELNIYLRTARELSQKLDHEPTAEEIAAQLDIPVDDVSKMLRLNERISSVDTPIGGDGEKALLDIIPDANNSDPEVSTQDEDMRVSLIHWLEELNPKQKEVLARRFGLLGYEPSTLEEVGQEIGLTRERVRQIQVEGLRRLREVLIKQGLNMENLFDIDMD

SEQ ID NO: 22501 - protein, 575 aa, Podospora anserina
MAIDIRTQGLKKPVPVAQYLFARLYEIGIRSVHGLPGDFNLVALDYIPKAKLKWVGSVNELNAAYAADGYARALGISALVTTFGVGELSAMNGVAGAYSEHVPVVHIVGCPSTISQRNGMLLHHTLGNGDFNVFANMGSQIACNTARLNNPAEIAEQIDFALRECWIHSRPVYIMLPTDMVEKQIEGARLDTPIDLSDPPNEPEREDYVVDVVLRYLHAAKNPIILVDACAIRHRCLEEVRNLVDKAKLPVFVTPMGKGAVNESSPTYGGVYAGTGSQPAVQELVESADLVLSIGALKSDFNTTGFSYRTSQLNTIDFHSDHCKVRYSEYPGVAMKGVLRKLIERVDTTKLSSEKLAPKVVNEVSENRDSTETITQAWFWPRVGEYFKEKDLVVTETGTSNFGIWESKFPPDVVGITQILWGSIGWSVGAAQGVAQAVKDMGEDRRTILFVGDGSFQLTVQEVSTMIKHKLRVTIFLIYNEGFTIERCIHGMEAEYNDIRRWNYTEIPTVFGATDKEVRKHIIKTKSELEKLLADKDFNDAKGLQLVELWMPKHDAPRALKLTAEQSAKNNARME

SEQ ID NO: 22502 - protein, 205 aa, Juglans regia
KRRNGLLKKAYELSVLCDAEVALIVFSSRGRLYEYANNSVKSTIDRYKKARADSSNTGSVSEANTQFYQREAATLRQQINSVQESNRKMLGESLSGMAFRDLKSLESKLESGIRRIRSKKNELLFAEIEYMQKREVDLHNNNQLLRAKIAENERNQQNLNVMPGGGNLELMHSQPFDSRNYFQVDALQPNHDQYPRQDQMALQLV

SEQ ID NO: 22503 - protein, 264 aa, Arabidopsis thaliana
METDKRWSLAGKTALVTGGTRGIGRAVVEELAKFCAKVHTCSRNQEELNACLNDWKANGLVVSGSVCDASVRDQREKLIQEASSAFSGKLNILINNVGTNVRKPTVEYSSEEYAKIMSTNLESAFHLSQIAHPLLKASGVGSIVFISSVAGLVHLSSGSIYGATKGALNQLTRNLACEWASDNIRTNCVAPWYIKTSLVETLLEKKEFVEAVVSRTPLGRVGEPEEVSSLVAFLCLPASSYITGQVISVDGGFTVNGFSYAMKP

SEQ ID NO: 22504 - protein, 472 aa, Burkholderia fungorum LB400
MEAYMSPIAARLERLPFSRFHFKLLIMGGLGFMFEAIDAAIIAFILPVVRTKWHLTSFETGLLGSSTYVGFLVGALFAGLLGDRFGRRVVMMWALTFFCVLTFVNAFVNDWHTFALLRAIAGIGMGAEGAIIAPFLVEFVSNRYRGAFTGALAGFFSFGFVAAALIGYFVIPLNPEGWRIALVIVSLPVIVLLWWRRSLHESPRWLETRGRHEEAAAVVTDIERQIERSGVTLPPVVPVAGDATLHEYSGSFFGNLKLLWKPPLAKTTLMTWCLWLSVTFCSYAFFVWIPGLLVQHGMTITKSFSVSIAIYLAQIPGYYSSAYFCEKLGRKTTIVTYMGLACASGIWLAFAGSDLTIVLASIAMSFSMNGVNAGEYAYTPEVFPTHLRATGMGTASAFGRIGAICSPMLVGYVYPIWGFAGVFGMTTVILLVGALAVLILGVSTSGKTLEQITADEYSLADDLPGASLKTAK

SEQ ID NO: 22505 - protein, 130 aa, Glycine max
KSFTDLTAALALQVRRKEKIEGDHHHHKDEDTSVPVEKVEVVETAHAEEKKGFLDKIKEKLPGHKKTEEATATTPPPPPPVASLEHGEGAHHEGEAKEKKGILEKIKEKLPGYHSKTEEEKEKEKESGAH
